United States Patent Application Publication US 2011/0183924 A1 - sequence listing, part 141

SEQ ID NO: 372547 - DNA, 532 bp, Homo sapiens
tcacattctcctttttaaactgtttttcagggtttggagaacattgattaaggaagcattttcctgattgatgaaaaaaataactcagttatggccatctacccctgctagaaggttacagtgtattatgtagcatgcaatgtgttatgtagtgcttaataaaaataaaatgaaaaaaaaaaaaaaaaaaaaaaaaaaaaaaaaaaaaaaaaaaaaaaaaaaaaaaaaaaaaaaaaaaaaaaaaaaaaaaaaaaaaaaaaaaaaaaaaaaaaaaaaaaaaaaaaaaaaaaaaaaaaaaaaaaaaaaaatataaaaatttagtctatatcaacaaatacctaacttcatatatcacatattcttctatattgcaacaagctttattatctattatcttctctctaaatatatatctctcatatcaatatatatcacattttttcttaatcctcgtatacatcgcaataacctctgtatctctaacataatctactatatggatataccttactccagtatttgtatatttact

SEQ ID NO: 372548 - DNA, 428 bp, Homo sapiens
gaggcgaagccaggtcacctttcaaggacccagaagtagggttttggcctaggtaacggggcagagatgtggttcgagattctccccggactctccgtcatgggcgtgtgcttgttgattccaggactggctactgcgtacatccacaggttcactaacgggggcaaggtaagccggcttcggcccgggggccgactccacgggctgatttccgaaaagggtggtgggcagggagaccgtcagcctgcgaaccctctctccgaggtcggccctctacttgcttccggttgcctagaagccgaggcttgcgaaacgaagcccgatagaaactacatcctgctctagtgaaaaacagcgtttctgggtgtatcagagtgggccttagggcagagtagcgacgcgggggccgggaaggtagattagaaaag

SEQ ID NO: 372549 - DNA, 367 bp, Homo sapiens
ctcgtgccgaattcggcacgagcagagatgtggttcgagattctccccggactctccgtcatgggcgtgtgcttgttgattccaggactggctactgcgtacatccacaggttcactaacgggggcaaggaaaaaagggttgctcattttgggtatcactggagtctgatggaaagagataggcgcatctctggagttgatcgttactatgtgtcaaagggtttggagaacattgattaaggaagcattttcctgattgatgaaaaaaataactcagttatggccatctacccctgctagaaggttacagtgtattatgtagcatgcaatgtgttatgtagtgcttaataaaaataaaatgaaaaaa

SEQ ID NO: 372550 - DNA, 400 bp, Homo sapiens
agattccgtcgcttcttccggagccgtacgtggcaccgccccgctcgcgggcggccgcggggcttgctgggaagagaggcgaagccaggtcacctttcaaggacccagaagtagggttttggcctaggtaacggggcagagatgtggttcgagattctccccggactctccgtcatgggcgtgtgcttgttgattccaggactggctactgcgtacatccacaggttcactaacgggggcaaggaaaaaagggttgctcattttgggtatcactggagtctgatggaaagagatgtggttcgagattctccccggactctccgtcatgggcgtgtgcttgttgattccacggacctggctactgcgtacatccacagcttcacttcgtggcagcggtacc

SEQ ID NO: 372551 - DNA, 562 bp, Homo sapiens
gcggccgcctactactactaaattcgcggccgctcgacgaaagtcaggatgttgtttgatcttctcaaacatctagttccctgcttgatgggaggatcctaatgaaatacctgaaacatatattggcatttatcaatggctcaaatcttcatttatctctggccttaaccctggctcctgaggctgcggccagcagagcccaggccagggctctgttcttgccacacctgcttgatcctcagatgtggagggaggtaggcactgcctcagtcttcatccaaacacctttccctttgccctgagacctcagaatcttccctttaacccaagaccctgcctcttccactccacccttctccagggacccttagatcacatcactccacccctgccaggccccaggttaggaatagtggtgggaggaaggggaaagggctgggcctcaccgctcccagcaactgaaaggacaacactatctggagccacccactgaaagggctgcaggcatgggctgtacccaagctgatttctcatctggtcaataaagctgtttagaccagaa

SEQ ID NO: 372552 - DNA, 410 bp, Homo sapiens
gcggccgcctactactactaaattcgcggccgctcgacgagcagagcccaggccagggctctgttcttgccacacctgcttgatcctcagatgtggagggaggtaggcactgcctcagtcttcatccaaacacctttccctttgccctgagacctcagaatcttccctttaacccaagaccctgcctcttccactccacccttctccagggacccttagatcacatcactccacccctgccaggccccaggttaggaatagtggtgggaggaaggggaaagggctgggcctcaccgctcccagcaactgaaaggacaacactatctggagccacccactgaaagggctgcaggcatgggctgtacccaagctgatttctcatctggtcaataaagctgtttagaccagaa

SEQ ID NO: 372553 - DNA, 1475 bp, Homo sapiens
ctgggattacaggcgtgagccaccatgcccagccctgcatttaaaaaacaaaacaaaacaaaaaaaacttttttcttgtggtgagctatagcttatatacaaaagtgtgcacaaaacctacatgtacagttcaaagaataattataaagtgagcccccatatgacaaccaccctgagttaagaaggagagcattgccaggcagtgccttaccagcctccctggtctcccaacccagtcatggtcccttccctctcttagaggtaactcttctaaggtaaaagcttgtgatcatcattcccttgcttttctgtagtaacttttccacctatatgtccatcccttggcaatatgagtttagcccatttgtgaatttcctacaaatggacttgcgttttcccagctctggtctgtctgcttcttccacattctctttgagatccgtccatgttgacgtgtgtaggggtaggcagtccatttttattgcagctggagccttctttataaagcctgcttcttctgctgatccacatcctttagagtgcctagcacagggctgaaaatgcagcagctgctctgtaaagacctgttgattagattggggggaggaaatccccgagaacgtgcgaggctgctgtcgagagctagcagaaagtgctctgccaggcctggtggccccccaggcattctacttttgtctttctctcctctggatctggctgttgcatttctgtcgtggacaatctgagatgtttccatctccctgtaaaattaattcccatttctgtgtcccttttcagaatgccgaactggggaggaggcaagaaatgtggggtgtgtcagaagacggtttactttgccgaagaggttcagtgcgaaggcaacagcttccataaatcctgcttcctgtgcagtgagtacgccccaggccctattgctgttgccttggacaccctggacgggcctgcccccacaggctgggcctgtcaacaccccagggaactgatcccatgggatgtaaacagcttgacatttggctgaagcgcagctgggcagggaaacacttcagggcctctttgttccgttcagaagcttctttctaagggatgaactggccagagcgggtcggggtggcaggcgttcaggggctgaaagccaagctgtaaagacttggttaagaaaactttccactcagctctctcttctctctctccctgtcatgatttcaccatttcagaggaaaacactttcagccctttgcaccctaattatctcttgttcaaaggcaacagaggccacaacctcatggtgaagctgaatctggaggaagagtggggctcctccttcctcagccccttgcaggctggcctgttcagttcttcacttcccattcccactcagcctgggatgagaggaagagggagtacaaagttccctgatatctactcctaagaagccagagcaaggtttgctccag

SEQ ID NO: 372554 - DNA, 468 bp, Homo sapiens
  misc_feature (460)..(460): n is a, c, g, or t
gcccagccagtggggtaacagctactttggtgttaaacccaccccctcacctgccttttgtggtatagctggtgaccctaatcatcaggccattgcaacatagcatggaagatggtgcgaggtggcgtgtggtccctggccttctccctctactgccttgcaccataggccatgtcctcccagcagcaccagctgagtagacttcagaagtggcttgagcccttataccatggttatgtcaaagggagtgggcctggggtggagggtaccctcatcactggtggcagccattaactatttccttccctgcctagtcctggcataaggcctgctttcgatgtgccaagtgtggcaaaggccttgagtcaaccaccctggcagacaaggatggcgagatttactgcaaaggtgggtgttttcacttctaattgagggtcaggaggccaataaaaagttcagngttcaaaa

SEQ ID NO: 372555 - DNA, 1956 bp, Homo sapiens
ggagggcagcaccgccgggcttcgcgccatgacatcagccctggagtggtgcagtgtgcaaagcccactggttggcgtggcccgggacacgccttccgcggagcggaacaaaacggcgcgcaggccgggcgcacccagccgccacttccgagagcgcctgccgcccctgcgccgccgagccagctgccagaatgccgaactggggaggaggcaagaaatgtggggtgtgtcagaagacggtttactttgccgaagaggttcagtgcgaaggcaacagcttccataaatcctgcttcctgtgcatggtctgcaagaagaatctggacagtaccactgtggccgtgcatggtgaggagatttactgcaagtcctgctacggcaagaagtatgggcccaaaggctatggctacgggcagggcgcaggcaccctcagcactgacaagggggagtcgctgggtatcaagcacgaggaagcccctggccacaggcccaccaccaaccccaatgcatccaaatttgcccagaagattggtggctccgagcgctgcccccgatgcagccaggcagtctatgctgcggagaaggtgattggtgctgggaagtcctggcataaggcctgctttcgatgtgccaagtgtggcaaaggccttgagtcaaccaccctggcagacaaggatggcgagatttactgcaaaggatgttatgctaaaaacttcgggcccaagggctttggttttgggcaaggagctggggccttggtccactctgagtgaggccaccatcacccaccacaccctgcccactcctgcgcttttcatcgccattccattcccagcagctttggagacctccaggattatttctctgtcagccctgccacatatcactaatgacttgaacttgggcatctggctccctttggtttgggggtctgcctgaggtcccaccccactaaagggctccccaggcctgggatctgacaccatcaccagtaggagacctcagtgttttgggtctaggtgagagcaggcccctctccccacacctcgccccacagagctctgttcttagcctcctgtgctgcgtgtccatcatcagctgaccaagacacctgaggacacatcttggcacccagaggagcagcagcaacaggctggagggagagggaagcaagaccaagatgaggaggggggaaggctgggttttttggatctcagagattctcctctgtgggaaagaggttgagcttcctggtgtccctcagagtaagcctgaggagtcccagcttagggagtcactattggaggcagagaggcatgcaggcggggtcctaggagcccctgcttctccaggcctcttgcctttgagtctttgtggaatggatagcctcccactaggactgggaggagaataacccaggtcttaaggaccccaaagtcaggatgttgtttgatcttctcaaacatctagttccctgcttgatgggaggatcctaatgaaatacctgaaacatatattggcatttatcaatggctcaaatcttcatttatctctggccttaaccctggctcctgaggctgcggccagcagagcccaggccagggctctgttcttgccacacctgcttgatcctcagatgtggagggaggtaggcactgcctcagtcttcatccaaacacctttccctttgccctgagacctcagaatcttccctttaacccaagaccctgcctcttccactccacccttctccagggacccttagatcacatcactccacccctgccaggccccaggttaggaatagtggtgggaggaaggggaaagggctgggcctcaccgctcccagcaactgaaaggacaacactatctggagccacccactgaaagggctgcaggcatgggctgtacccaagctgatttctcatctggtcaataaagctgtttagaccagaa

SEQ ID NO: 372556 - DNA, 1832 bp, Homo sapiens
gcggccgctccaacatcagaatggtaacagcgcctgccgcccctgcgccgccgagccagctgccagaatgccgaactggggaggaggcaagaaatgtggggtgtgtcagaagacggtttactttgccgaagaggttcagtgcgaaggcaacagcttccataaatcctgcttcctgtgcatggtctgcaagaagaatctggacagtaccactgtggccgtgcatggtgaggagatttactgcaagtcctgctacggcaagaagtatgggcccaaaggctatggctacgggcagggcgcaggcaccctcagcactgacaagggggagtcgctgggtatcaagcacgaggaagcccctggccacaggcccaccaccaaccccaatgcatccaaatttgcccagaagattggtggctccgagcgctgcccccgatgcagccaggcagtctatgctgcggagaaggtgattggtgctgggaagtcctggcataaggcctgctttcgatgtgccaagtgtggcaaaggccttgagtcaaccaccctggcagacaaggatggcgagatttactgcaaaggatgttatgctaaaaacttcgggcccaagggctttggttttgggcaaggagctggggccttggtccactctgagtgaggccaccatcacccaccacaccctgcccactcctgcgcttttcatcgccattccattcccagcagctttggagacctccaggattatttctctgtcagccctgccacatatcactaatgacttgaacttgggcatctggctccctttggtttgggggtctgcctgaggtcccaccccactaaagggctccccaggcctgggatctgacaccatcaccagtaggagacctcagtgttttgggtctaggtgagagcaggcccctctccccacacctcgccccacagagctctgttcttagcctcctgtgctgcgtgtccatcatcagctgaccaagacacctgaggacacatcttggcacccagaggagcagcagcaacaggctggagggagagggaagcaagaccaagatgaggaggggggaaggctgggttttttggatctcagagattctcctctgtgggaaagaggttgagcttcctggtgtccctcagagtaagcctgaggagtcccagcttagggagtcactattggaggcagagaggcatgcaggcggggtcctaggagcccctgcttctccaggcctcttgcctttgagtctttgtggaatggatagcctcccactaggactgggaggagaataacccaggtcttaaggaccccaaagtcaggatgttgtttgatcttctcaaacatctagttccctgcttgatgggaggatcctaatgaaatacctgaaacatatattggcatttatcaatggctcaaatcttcatttatctctggccttaaccctggctcctgaggctgcggccagcagagcccaggccagggctctgttcttgccacacctgcttgatcctcagatgtggagggaggtaggcactgcctcagtcttcatccaaacacctttccctttgccctgagacctcagaatcttccctttaacccaagaccctgcctcttccactccacccttctccagggacccttagatcacatcactccacccctgccaggccccaggttaggaatagtggtgggaggaaggggaaagggctgggcctcaccgctcccagcaactgaaaggacaacactatctggagccacccactgaaagggctgcaggcatgggctgtacccaagctgatttctcatctggtcaataaagctgtttagaccagaa

SEQ ID NO: 372557 - DNA, 2872 bp, Homo sapiens
  misc_feature (2865)..(2865): n is a, c, g, or t
ggagggcagcaccgccgggcttcgcgccatgacatcagccctggagtggtgcagtgtgcaaagcccactggttggcgtggcccgggacacgccttccgcggagcggaacaaaacggcgcgcaggccgggcgcacccagccgccacttccgagagcgcctgccgcccctgcgccgccgagccagctgccagaatgccgaactggggaggaggcaagaaatgtggggtgtgtcagaagacggtttactttgccgaagaggttcagtgcgaaggcaacagcttccataaatcctgcttcctgtgcatggtctgcaagaagaatctggacagtaccactgtggccgtgcatggtgaggagatttactgcaagtcctgctacggcaagaagtatgggcccaaaggctatggctacgggcagggcgcaggcaccctcagcactgacaagggggagtcgctgggtatcaagcacgaggaagcccctggccacaggcccaccaccaaccccaatgcatccaaatttgcccagaagattggtggctccgagcgctgcccccgatgcagccaggcagtctatgctgcggagaaggtgattggtgctgggaagtcctggcataaggcctgctttcgatgtgccaagtgtggcaaaggccttgagtcaaccaccctggcagacaaggatggcgagatttactgcaaaggatgttatgctaaaaacttcgggcccaagggctttggttttgggcaaggagctggggccttggtccactctgagtgaggccaccatcacccaccacaccctgcccactcctgcgcttttcatcgccattccattcccagcagctttggagacctccaggattatttctctgtcagccctgccacatatcactaatgacttgaacttgggcatctggctccctttggtttgggggtctgcctgaggtcccaccccactaaagggctccccaggcctgggatctgacaccatcaccagtaggagacctcagtgttttgggtctaggtgagagcaggcccctctccccacacctcgccccacagagctctgttcttagcctcctgtgctgcgtgtccatcatcagctgaccaagacacctgaggacacatcttggcacccagaggagcagcagcaacaggctggagggagagggaagcaagaccaagatgaggaggggggaaggctgggttttttggatctcagagattctcctctgtgggaaagaggttgagcttcctggtgtccctcagagtaagcctgaggagtcccagcttagggagtcactattggaggcagagaggcatgcaggcggggtcctaggagcccctgcttctccaggcctcttgcctttgagtctttgtggaatggatagcctcccactaggactgggaggagaataacccaggtcttaaggaccccaaagtcaggatgttgtttgatcttctcaaacatctagttccctgcttgatgggaggatcctaatgaaatacctgaaacatatattggcatttatcaatggctcaaatcttcatttatctctggccttaaccctggctcctgaggctgcggccagcagagcccaggccagggctctgttcttgccacacctgcttgatcctcagatgtggagggaggtaggcactgcctcagtcttcatccaaacacctttccctttgccctgagacctcagaatcttccctttaacccaagaccctgcctcttccactccacccttctccagggacccttagatcacatcactccacccctgccaggccccaggttaggaatagtggtgggaggaaggggaaagggctgggcctcaccgctcccagcaactgaaaggacaacactatctggagccacccactgaaagggctgcaggcatgggctgtacccaagctgatttctcatctggtcaataaagctgtttagaccagaaaaaaaaaaaaaaaaaaaaaaaaaaaaaaaaaaaaaaaaaaaaaaaaaaaaaagccgccacttccgagagcgcctgccgcccctgcgccgccgagccagctgccagaatgccgaactggggaggaggcaagaaatgtggggtgtgtcagaagacggtttactttgccgaagaggttcagtgcgaaggcaacagcttccataaatcctgcttcctgtgcatggtctgcaagaagaatctggacagtaccactgtggccgtgcatggtgaggagatttactgcaagtcctgctacggcaagaagtatgggcccaaaggctatggctacgggcagggcgcaggcaccctcagcactgacaagggggagtcgctgggtatcaagcacgaggaagcccctggccacaggcccaccaccaaccccaatgcatccaaatttgcccagaagattggtggctccgagcgctgcccccgatgcagccaggcagtctatgctgcggagaaggtgattggtgctgggaagtcctggcataaggcctgctttcgatgtgccaagtgtggcaaaggccttgagtcaaccaccctggcagacaaggatggcgagatttactgcaaaggatgttatgctaaaaacttcgggcccaagggctttggttttgggcaaggagctggggccttggtccactctgagtgaggccaccatcacccaacacaccctgcccactcctgcgcttttcatcgccattccattcccagcagctttggagacctccaggattatttctctgtcagcctgcacatatatcactaatgacttgaacttgggcatctggctccctttggtttgggggtctgaggtcacccataaggtccagctggattgaacatacagagaaccatgtttggtcagtaganagccccc

SEQ ID NO: 372558 - DNA, 2294 bp, Homo sapiens
ggagggcagcaccgccgggcttcgcgccatgacatcagccctggagtggtgcagtgtgcaaagcccactggttggcgtggcccgggacacgccttccgcggagcggaacaaaacggcgcgcaggccgggcgcacccagccgccacttccgagagcgcctgccgcccctgcgccgccgagccagctgccagaatgccgaactggggaggaggcaagaaatgtggggtgtgtcagaagacggtttactttgccgaagaggttcagtgcgaaggcaacagcttccataaatcctgcttcctgtgcatggtctgcaagaagaatctggacagtaccactgtggccgtgcatggtgaggagatttactgcaagtcctgctacggcaagaagtatgggcccaaaggctatggctacgggcagggcgcaggcaccctcagcactgacaagggggagtcgctgggtatcaagcacgaggaagcccctggccacaggcccaccaccaaccccaatgcatccaaatttgcccagaagattggtggctccgagcgctgcccccgatgcagccaggcagtctatgctgcggagaaggtgattggtgctgggaagtcctggcataaggcctgctttcgatgtgccaagtgtggcaaaggccttgagtcaaccaccctggcagacaaggatggcgagatttactgcaaaggatgttatgctaaaaacttcgggcccaagggctttggttttgggcaaggagctggggccttggtccactctgagtgaggccaccatcacccaccacaccctgcccactcctgcgcttttcatcgccattccattcccagcagctttggagacctccaggattatttctctgtcagccctgccacatatcactaatgacttgaacttgggcatctggctccctttggtttgggggtctgcctgaggtcccaccccactaaagggctccccaggcctgggatctgacaccatcaccagtaggagacctcagtgttttgggtctaggtgagagcaggcccctctccccacacctcgccccacagagctctgttcttagcctcctgtgctgcgtgtccatcatcagctgaccaagacacctgaggacacatcttggcacccagaggagcagcagcaacaggctggagggagagggaagcaagaccaagatgaggaggggggaaggctgggttttttggatctcagagattctcctctgtgggaaagaggttgagcttcctggtgtccctcagagtaagcctgaggagtcccagcttagggagtcactattggaggcagagaggcatgcaggcggggtcctaggagcccctgcttctccaggcctcttgcctttgagtctttgtggaatggatagcctcccactaggactgggaggagaataacccaggtcttaaggaccccaaagtcaggatgttgtttgatcttctcaaacatctagttccctgcttgatgggaggatcctaatgaaatacctgaaacatatattggcatttatcaatggctcaaatcttcatttatctctggccttaaccctggctcctgaggctgcggccagcagagcccaggccagggctctgttcttgccacacctgcttgatcctcagatgtggagggaggtaggcactgcctcagtcttcatccaaacacctttccctttgccctgagacctcagaatcttccctttaacccaagaccctgcctcttccactccacccttctccagggacccttagatcacatcactccacccctgccaggccccaggttaggaatagtggtgggaggaaggggaaagggctgggcctcaccgctcccagcaactgaaaggacaacactatctggagccacccactgaaagggctgcaggcatgggctgtacccaagctgatttctcatctggtcaataaagctgtttagaccagaaaaaaaaaaaaaaaaaaaaaaaaaaaaaaaaaaaaaaaaaaaaaaaaaaaaaaggggggggggcccaaaaaaaataccccgaggggggcacaagcgaggccgacaacgacacttaacaaacaaggaggggccccaatagagggaggacgaataataacgacgcacacacggagcgccccgagattaaacaagccgacgaccgggtggggaaacaaaaccgaaacggaagcaaactatggaaaggagacacacccaacgggcggagggagcacaatagaggaaacaaaccgaagagaagagaaaagacacgggaggaaaaaaaaacaagcgccaagggcg

SEQ ID NO: 372559 - DNA, 1828 bp, Homo sapiens
  misc_feature (29)..(29): n is a, c, g, or t
  misc_feature (31)..(33): n is a, c, g, or t
cggacgcgtgggtcgacccacgcgtcggncnnncgcccctgcgccgccgagccagctgccagaatgccgaactggggaggaggcaagaaatgtggggtgtgtcagaagacggtttactttgccgaagaggttcagtgcgaaggcaacagcttccataaatcctgcttcctgtgcatggtctgcaagaagaatctggacagtaccactgtggccgtgcatggtgaggagatttactgcaagtcctgctacggcaagaagtatgggcccaaaggctatggctacgggcagggcgcaggcaccctcagcactgacaagggggagtcgctgggtatcaagcacgaggaagcccctggccacaggcccaccaccaaccccaatgcatccaaatttgcccagaagattggtggctccgagcgctgcccccgatgcagccaggcagtctatgctgcggagaaggtgattggtgctgggaagtcctggcataaggcctgctttcgatgtgccaagtgtggcaaaggccttgagtcaaccaccctggcagacaaggatggcgagatttactgcaaaggatgttatgctaaaaacttcgggcccaagggctttggttttgggcaaggagctggggccttggtccactctgagtgaggccaccatcacccaccacaccctgcccactcctgcgcttttcatcgccattccattcccagcagctttggagacctccaggattatttctctgtcagccctgccacatatcactaatgacttgaacttgggcatctggctccctttggtttgggggtctgcctgaggtcccaccccactaaagggctccccaggcctgggatctgacaccatcaccagtaggagacctcagtgttttgggtctaggtgagagcaggcccctctccccacacctcgccccacagagctctgttcttagcctcctgtgctgcgtgtccatcatcagctgaccaagacacctgaggacacatcttggcacccagaggagcagcagcaacaggctggagggagagggaagcaagaccaagatgaggaggggggaaggctgggttttttggatctcagagattctcctctgtgggaaagaggttgagcttcctggtgtccctcagagtaagcctgaggagtcccagcttagggagtcactattggaggcagagaggcatgcaggcggggtcctaggagcccctgcttctccaggcctcttgcctttgagtctttgtggaatggatagcctcccactaggactgggaggagaataacccaggtcttaaggaccccaaagtcaggatgttgtttgatcttctcaaacatctagttccctgcttgatgggaggatcctaatgaaatacctgaaacatatattggcatttatcaatggctcaaatcttcatttatctctggccttaaccctggctcctgaggctgcggccagcagagcccaggccagggctctgttcttgccacacctgcttgatcctcagatgtggagggaggtaggcactgcctcagtcttcatccaaacacctttccctttgccctgagacctcagaatcttccctttaacccaagaccctgcctcttccactccacccttctccagggacccttagatcacatcactccacccctgccaggccccaggttaggaatagtggtgggaggaaggggaaagggctgggcctcaccgctcccagcaactgaaaggacaacactatctggagccacccactgaaagggctgcaggcatgggctgtacccaagctgatttctcatctggtcaataaagctgtttagaccagaa

SEQ ID NO: 372560 - DNA, 2113 bp, Homo sapiens
  misc_feature (2029)..(2030): n is a, c, g, or t
ggagggcagcaccgccgggcttcgcgccatgacatcagccctggagtggtgcagtgtgcaaagcccactggttggcgtggcccgggacacgccttccgcggagcggaacaaaacggcgcgcaggccgggcgcacccagccgccacttccgagagcgcctgccgcccctgcgccgccgagccagctgccagaatgccgaactggggaggaggcaagaaatgtggggtgtgtcagaagacggtttactttgccgaagaggttcagtgcgaaggcaacagcttccataaatcctgcttcctgtgcatggtctgcaagaagaatctggacagtaccactgtggccgtgcatggtgaggagatttactgcaagtcctgctacggcaagaagtatgggcccaaaggctatggctacgggcagggcgcaggcaccctcagcactgacaagggggagtcgctgggtatcaagcacgaggaagcccctggccacaggcccaccaccaaccccaatgcatccaaatttgcccagaagattggtggctccgagcgctgcccccgatgcagccaggcagtctatgctgcggagaaggtgattggtgctgggaagtcctggcataaggcctgctttcgatgtgccaagtgtggcaaaggccttgagtcaaccaccctggcagacaaggatggcgagatttactgcaaaggatgttatgctaaaaacttcgggcccaagggctttggttttgggcaaggagctggggccttggtccactctgagtgaggccaccatcacccaccacaccctgcccactcctgcgcttttcatcgccattccattcccagcagctttggagacctccaggattatttctctgtcagccctgccacatatcactaatgacttgaacttgggcatctggctccctttggtttgggggtctgcctgaggtcccaccccactaaagggctccccaggcctgggatctgacaccatcaccagtaggagacctcagtgttttgggtctaggtgagagcaggcccctctccccacacctcgccccacagagctctgttcttagcctcctgtgctgcgtgtccatcatcagctgaccaagacacctgaggacacatcttggcacccagaggagcagcagcaacaggctggagggagagggaagcaagaccaagatgaggaggggggaaggctgggttttttggatctcagagattctcctctgtgggaaagaggttgagcttcctggtgtccctcagagtaagcctgaggagtcccagcttagggagtcactattggaggcagagaggcatgcaggcggggtcctaggagcccctgcttctccaggcctcttgcctttgagtctttgtggaatggatagcctcccactaggactgggaggagaataacccaggtcttaaggaccccaaagtcaggatgttgtttgatcttctcaaacatctagttccctgcttgatgggaggatcctaatgaaatacctgaaacatatattggcatttatcaatggctcaaatcttcatttatctctggccttaaccctggctcctgaggctgcggccagcagagcccaggccagggctctgttcttgccacacctgcttgatcctcagatgtggagggaggtaggcactgcctcagtcttcatccaaacacctttccctttgccctgagacctcagaatcttccctttaacccaagaccctgcctcttccactccacccttctccagggacccttagatcacatcactccacccctgccaggccccaggttaggaatagtggtgggaggaaggggaaagggctgggcctcaccgctcccagcaactgaaaggacaacactatctggagccacccactgaaagggctgcaggcatgggctgtacccaagctgatttctcatctggtcaataaagctgtttagaccagaaaaaaaaaaaaaaagcactcaattgggcaattaacattagtgtttgttctctgatggtatctctgagaatactnnttgtaggactggccagtagtgcttcgggactgggttcacccccaggtctgcggcagttgtcacagcgccagccccgctggcct

SEQ ID NO: 372561 - DNA, 2564 bp, Homo sapiens
ctgggattacaggcgtgagccaccatgcccagccctgcatttaaaaaacaaaacaaaacaaaaaaaacttttttcttgtggtgagctatagcttatatacaaaagtgtgcacaaaacctacatgtacagttcaaagaataattataaagtgagcccccatatgacaaccaccctgagttaagaaggagagcattgccaggcagtgccttaccagcctccctggtctcccaacccagtcatggtcccttccctctcttagaggtaactcttctaaggtaaaagcttgtgatcatcattcccttgcttttctgtagtaacttttccacctatatgtccatcccttggcaatatgagtttagcccatttgtgaatttcctacaaatggacttgcgttttcccagctctggtctgtctgcttcttccacattctctttgagatccgtccatgttgacgtgtgtaggggtaggcagtccatttttattgcagctggagccttctttataaagcctgcttcttctgctgatccacatcctttagagtgcctagcacagggctgaaaatgcagcagctgctctgtaaagacctgttgattagattggggggaggaaatccccgagaacgtgcgaggctgctgtcgagagctagcagaaagtgctctgccaggcctggtggccccccaggcattctacttttgtctttctctcctctggatctggctgttgcatttctgtcgtggacaatctgagatgtttccatctccctgtaaaattaattcccatttctgtgtcccttttcagaatgccgaactggggaggaggcaagaaatgtggggtgtgtcagaagacggtttactttgccgaagaggttcagtgcgaaggcaacagcttccataaatcctgcttcctgtgcatggtctgcaagaagaatctggacagtaccactgtggccgtgcatggtgaggagatttactgcaagtcctgctacggcaagaagtatgggcccaaaggctatggctacgggcagggcgcaggcaccctcagcactgacaagggggagtcgctgggtatcaagcacgaggaagcccctggccacaggcccaccaccaaccccaatgcatccaaatttgcccagaagattggtggctccgagcgctgcccccgatgcagccaggcagtctatgctgcggagaaggtgattggtgctgggaagtcctggcataaggcctgctttcgatgtgccaagtgtggcaaaggccttgagtcaaccaccctggcagacaaggatggcgagatttactgcaaaggatgttatgctaaaaacttcgggcccaagggctttggttttgggcaaggagctggggccttggtccactctgagtgaggccaccatcacccaccacaccctgcccactcctgcgcttttcatcgccattccattcccagcagctttggagacctccaggattatttctctgtcagccctgccacatatcactaatgacttgaacttgggcatctggctccctttggtttgggggtctgcctgaggtcccaccccactaaagggctccccaggcctgggatctgacaccatcaccagtaggagacctcagtgttttgggtctaggtgagagcaggcccctctccccacacctcgccccacagagctctgttcttagcctcctgtgctgcgtgtccatcatcagctgaccaagacacctgaggacacatcttggcacccagaggagcagcagcaacaggctggagggagagggaagcaagaccaagatgaggaggggggaaggctgggttttttggatctcagagattctcctctgtgggaaagaggttgagcttcctggtgtccctcagagtaagcctgaggagtcccagcttagggagtcactattggaggcagagaggcatgcaggcggggtcctaggagcccctgcttctccaggcctcttgcctttgagtctttgtggaatggatagcctcccactaggactgggaggagaataacccaggtcttaaggaccccaaagtcaggatgttgtttgatcttctcaaacatctagttccctgcttgatgggaggatcctaatgaaatacctgaaacatatattggcatttatcaatggctcaaatcttcatttatctctggccttaaccctggctcctgaggctgcggccagcagagcccaggccagggctctgttcttgccacacctgcttgatcctcagatgtggagggaggtaggcactgcctcagtcttcatccaaacacctttccctttgccctgagacctcagaatcttccctttaacccaagaccctgcctcttccactccacccttctccagggacccttagatcacatcactccacccctgccaggccccaggttaggaatagtggtgggaggaaggggaaagggctgggcctcaccgctcccagcaactgaaaggacaacactatctggagccacccactgaaagggctgcaggcatgggctgtacccaagctgatttctcatctggtcaataaagctgtttagaccagaa

SEQ ID NO: 372562 - DNA, 1533 bp, Homo sapiens
tctgccagggtggttgactcaaggcctttgccacacttggcacatcgaaagcaggccttatgccaggacttcccaaccccaatgcatccaaatttgcccagaagattggtggctccgagcgctgcccccgatgcagccaggcagtctatgctgcggagaaggtgattggtgctgggaagtcctggcataaggcctgctttcgatgtgccaagtgtggcaaaggccttgagtcaaccaccctggcagacaaggatggcgagatttactgcaaaggatgttatgctaaaaacttcgggcccaagggctttggttttgggcaaggagctggggccttggtccactctgagtgaggccaccatcacccaccacaccctgcccactcctgcgcttttcatcgccattccattcccagcagctttggagacctccaggattatttctctgtcagccctgccacatatcactaatgacttgaacttgggcatctggctccctttggtttgggggtctgcctgaggtcccaccccactaaagggctccccaggcctgggatctgacaccatcaccagtaggagacctcagtgttttgggtctaggtgagagcaggcccctctccccacacctcgccccacagagctctgttcttagcctcctgtgctgcgtgtccatcatcagctgaccaagacacctgaggacacatcttggcacccagaggagcagcagcaacaggctggagggagagggaagcaagaccaagatgaggaggggggaaggctgggttttttggatctcagagattctcctctgtgggaaagaggttgagcttcctggtgtccctcagagtaagcctgaggagtcccagcttagggagtcactattggaggcagagaggcatgcaggcggggtcctaggagcccctgcttctccaggcctcttgcctttgagtctttgtggaatggatagcctcccactaggactgggaggagaataacccaggtcttaaggaccccaaagtcaggatgttgtttgatcttctcaaacatctagttccctgcttgatgggaggatcctaatgaaatacctgaaacatatattggcatttatcaatggctcaaatcttcatttatctctggccttaaccctggctcctgaggctgcggccagcagagcccaggccagggctctgttcttgccacacctgcttgatcctcagatgtggagggaggtaggcactgcctcagtcttcatccaaacacctttccctttgccctgagacctcagaatcttccctttaacccaagaccctgcctcttccactccacccttctccagggacccttagatcacatcactccacccctgccaggccccaggttaggaatagtggtgggaggaaggggaaagggctgggcctcaccgctcccagcaactgaaaggacaacactatctggagccacccactgaaagggctgcaggcatgggctgtacccaagctgatttctcatctggtcaataaagctgtttagaccagaa

SEQ ID NO: 372563 - DNA, 1608 bp, Homo sapiens
acggcggaaaacacgatattgtactaacatcttaatttgttataaaatctcacaaaccccctgacatagtctcagagatctgtagggccgaggttacatttggagaacccgtactctagggccaaatccattcttcttgccctggatcacttgtcccccccagcgccccgcgctggagccactgcctagttcttcagccctagatggtgctcgccaagacaagaaccacacgtgtgggttcttgtgctgggaagtcctggcataaggcctgctttcgatgtgccaagtgtggcaaaggccttgagtcaaccaccctggcagacaaggatggcgagatttactgcaaaggatgttatgctaaaaacttcgggcccaagggctttggttttgggcaaggagctggggccttggtccactctgagtgaggccaccatcacccaccacaccctgcccactcctgcgcttttcatcgccattccattcccagcagctttggagacctccaggattatttctctgtcagccctgccacatatcactaatgacttgaacttgggcatctggctccctttggtttgggggtctgcctgaggtcccaccccactaaagggctccccaggcctgggatctgacaccatcaccagtaggagacctcagtgttttgggtctaggtgagagcaggcccctctccccacacctcgccccacagagctctgttcttagcctcctgtgctgcgtgtccatcatcagctgaccaagacacctgaggacacatcttggcacccagaggagcagcagcaacaggctggagggagagggaagcaagaccaagatgaggaggggggaaggctgggttttttggatctcagagattctcctctgtgggaaagaggttgagcttcctggtgtccctcagagtaagcctgaggagtcccagcttagggagtcactattggaggcagagaggcatgcaggcggggtcctaggagcccctgcttctccaggcctcttgcctttgagtctttgtggaatggatagcctcccactaggactgggaggagaataacccaggtcttaaggaccccaaagtcaggatgttgtttgatcttctcaaacatctagttccctgcttgatgggaggatcctaatgaaatacctgaaacatatattggcatttatcaatggctcaaatcttcatttatctctggccttaaccctggctcctgaggctgcggccagcagagcccaggccagggctctgttcttgccacacctgcttgatcctcagatgtggagggaggtaggcactgcctcagtcttcatccaaacacctttccctttgccctgagacctcagaatcttccctttaacccaagaccctgcctcttccactccacccttctccagggacccttagatcacatcactccacccctgccaggccccaggttaggaatagtggtgggaggaaggggaaagggctgggcctcaccgctcccagcaactgaaaggacaacactatctggagccacccactgaaagggctgcaggcatgggctgtacccaagctgatttctcatctggtcaataaagctgtttagaccagaa

SEQ ID NO: 372564 - DNA, 1668 bp, Homo sapiens
gcccagccagtggggtaacagctactttggtgttaaacccaccccctcacctgccttttgtggtatagctggtgaccctaatcatcaggccattgcaacatagcatggaagatggtgcgaggtggcgtgtggtccctggccttctccctctactgccttgcaccataggccatgtcctcccagcagcaccagctgagtagacttcagaagtggcttgagcccttataccatggttatgtcaaagggagtgggcctggggtggagggtaccctcatcactggtggcagccattaactatttccttccctgcctagtcctggcataaggcctgctttcgatgtgccaagtgtggcaaaggccttgagtcaaccaccctggcagacaaggatggcgagatttactgcaaaggatgttatgctaaaaacttcgggcccaagggctttggttttgggcaaggagctggggccttggtccactctgagtgaggccaccatcacccaccacaccctgcccactcctgcgcttttcatcgccattccattcccagcagctttggagacctccaggattatttctctgtcagccctgccacatatcactaatgacttgaacttgggcatctggctccctttggtttgggggtctgcctgaggtcccaccccactaaagggctccccaggcctgggatctgacaccatcaccagtaggagacctcagtgttttgggtctaggtgagagcaggcccctctccccacacctcgccccacagagctctgttcttagcctcctgtgctgcgtgtccatcatcagctgaccaagacacctgaggacacatcttggcacccagaggagcagcagcaacaggctggagggagagggaagcaagaccaagatgaggaggggggaaggctgggttttttggatctcagagattctcctctgtgggaaagaggttgagcttcctggtgtccctcagagtaagcctgaggagtcccagcttagggagtcactattggaggcagagaggcatgcaggcggggtcctaggagcccctgcttctccaggcctcttgcctttgagtctttgtggaatggatagcctcccactaggactgggaggagaataacccaggtcttaaggaccccaaagtcaggatgttgtttgatcttctcaaacatctagttccctgcttgatgggaggatcctaatgaaatacctgaaacatatattggcatttatcaatggctcaaatcttcatttatctctggccttaaccctggctcctgaggctgcggccagcagagcccaggccagggctctgttcttgccacacctgcttgatcctcagatgtggagggaggtaggcactgcctcagtcttcatccaaacacctttccctttgccctgagacctcagaatcttccctttaacccaagaccctgcctcttccactccacccttctccagggacccttagatcacatcactccacccctgccaggccccaggttaggaatagtggtgggaggaaggggaaagggctgggcctcaccgctcccagcaactgaaaggacaacactatctggagccacccactgaaagggctgcaggcatgggctgtacccaagctgatttctcatctggtcaataaagctgtttagaccagaa

SEQ ID NO: 372565 - DNA, 1551 bp, Homo sapiens
  misc_feature (1548)..(1548): n is a, c, g, or t
ggagggcagcaccgccgggcttcgcgccatgacatcagccctggagtggtgcagtgtgcaaagcccactggttggcgtggcccgggacacgccttccgcggagcggaacaaaacggcgcgcaggccgggcgcacccagccgccacttccgagagcgcctgccgcccctgcgccgccgagccagctgccagaatgccgaactggggaggaggcaagaaatgtggggtgtgtcagaagacggtttactttgccgaagaggttcagtgcgaaggcaacagcttccataaatcctgcttcctgtgcatggtctgcaagaagaatctggacagtaccactgtggccgtgcatggtgaggagatttactgcaagtcctgctacggcaagaagtatgggcccaaaggctatggctacgggcagggcgcaggcaccctcagcactgacaagggggagtcgctgggtatcaagcacgaggaagcccctggccacaggcccaccaccaaccccaatgcatccaaatttgcccagaagattggtggctccgagcgctgcccccgatgcagccaggcagtctatgctgcggagaaggtgattggtgctgggaagtcctggcataaggcctgctttcgatgtgccaagtgtggcaaaggccttgagtcaaccaccctggcagacaaggatggcgagatttactgcaaaggatgttatgctaaaaacttcgggcccaagggctttggttttgggcaaggagctggggccttggtccactctgagtgaggccaccatcacccaccacaccctgcccactcctgcgcttttcatcgccattccattcccagcagctttggagacctccaggattatttctctgtcagccctgccacatatcactaatgacttgaacttgggcatctggctccctttggtttgggggtctgcctgaggtcccaccccactaaagggctccccaggcctgggatctgacaccatcaccagtaggagacctcagtgttttgggtctaggtgagagcaggcccctctccccacacctcgccccacagagctctgttcttagcctcctgtgctgcgtgtccatcatcagctgaccaagacacctgaggacacatcttggcacccagaggagcagcagcaacaggctggagggagagggaagcaagaccaagatgaggaggggggaaggctgggttttttggatctcagagattctcctctgtgggaaagaggttgagcttcctggtgtccctcagagtaagcctgaggagtcccagcttagggagtcactattggaggcagagaggcatgcaggcggggtcctaggagcccctgcttctccaggcctcttgcctttgagtctttgtggaatggatagcctcccactaggactgggaggagaataacccaggtcttaaggaccccagagatcaatgaagatttgagccattgataaatgccaatatatgtttcaggtatttcattaggatcctcccatcaagcagggaactagatgtttagaagatcaaacaacagggtnccg

SEQ ID NO: 372566 - DNA, 974 bp, Homo sapiens
  misc_feature (2)..(2): n is a, c, g, or t
cngagtgggtctgctccaaacacctttccctttgccctgagacctcagaatcttccctttaacccaagaccctgcctcttccactccacccttctgcagggacccattcatgatatcgatctcgaattggtaggcatggtgttaggtagtagcgtggggaagaaggggaaagggctgggcctcaccgctcccagcaactgaaaggacaacactagctgggttttttggatctcagagattctcctctgtgggaaagaggttgagcttcctggtgtccctcagagtaagcctgaggagtcccagcttagggagtcactattggaggcagagaggcatgcaggcggggtcctaggagcccctgcttctccaggcctcttgcctttgagtctttgtggaatggatagcctcccactaggactgggaggagaataacccaggtcttaaggaccccaaagtcaggatgttgtttgatcttctcaaacatctagttccctgcttgatgggaggatcctaatgaaatacctgaaacatatattggcatttatcaatggctcaaatcttcatttatctctggccttaaccctggctcctgaggctgcggccagcagagcccaggccagggctctgttcttgccacacctgcttgatcctcagatgtggagggaggtaggcactgcctcagtcttcatccaaacacctttccctttgccctgagacctcagaatcttccctttaacccaagaccctgcctcttccactccacccttctccagggacccttagatcacatcactccacccctgccaggccccaggttaggaatagtggtgggaggaaggggaaagggctgggcctcaccgctcccagcaactgaaaggacaacactatctggagccacccactgaaagggctgcaggcatgggctgtacccaagctgatttctcatctggtcaataaagctgtttagaccagaa

SEQ ID NO: 372567 - DNA, 661 bp, Homo sapiens
gcggccgcctactactactaaattcgcggccgctcgacggagcccctgcttctccaggcctcttgcctttgagtctttgtggaatggatagcctcccactaggactgggaggagaataacccaggtcttaaggaccccaaagtcaggatgttgtttgatcttctcaaacatctagttccctgcttgatgggaggatcctaatgaaatacctgaaacatatattggcatttatcaatggctcaaatcttcatttatctctggccttaaccctggctcctgaggctgcggccagcagagcccaggccagggctctgttcttgccacacctgcttgatcctcagatgtggagggaggtaggcactgcctcagtcttcatccaaacacctttccctttgccctgagacctcagaatcttccctttaacccaagaccctgcctcttccactccacccttctccagggacccttagatcacatcactccacccctgccaggccccaggttaggaatagtggtgggaggaaggggaaagggctgggcctcaccgctcccagcaactgaaaggacaacactatctggagccacccactgaaagggctgcaggcatgggctgtacccaagctgatttctcatctggtcaataaagctgtttagaccagaa

SEQ ID NO: 372568 - DNA, 1338 bp, Homo sapiens
  misc_feature (1)..(2): n is a, c, g, or t
  misc_feature (14)..(14): n is a, c, g, or t
  misc_feature (42)..(43): n is a, c, g, or t
  misc_feature (1331)..(1331): n is a, c, g, or t
nnccctgggctctngtaaagaatagtgcctctggtgaacccnnggcaagaaagcagagcccaggccagggctctgttcttgccacacctgcttgatcctcagatgtggagggaggtaggcactgcctcagtcttcatccaaacacctttccctttgccctgagacctcagaatcttccctttaacccaagaccctgcctcttccactccacccttctccagggacccttagatcacatcactccacccctgccaggccccaggttaggaatagtggtgggaggaaggggaaagggctgggcctcaccgctcccagcaactgaaaggacaacactatctggagccacccactgaaagggctgcaggcatgggctgtacccaagctgatttctcatctggtcaataaagctgtttagaccagaaaaaaaaaaaaaaaaaaaaaaaaaaaaaaaaaaaaaaaaaaaaaaaaaaaaaagccgccacttccgagagcgcctgccgcccctgcgccgccgagccagctgccagaatgccgaactggggaggaggcaagaaatgtggggtgtgtcagaagacggtttactttgccgaagaggttcagtgcgaaggcaacagcttccataaatcctgcttcctgtgcatggtctgcaagaagaatctggacagtaccactgtggccgtgcatggtgaggagatttactgcaagtcctgctacggcaagaagtatgggcccaaaggctatggctacgggcagggcgcaggcaccctcagcactgacaagggggagtcgctgggtatcaagcacgaggaagcccctggccacaggcccaccaccaaccccaatgcatccaaatttgcccagaagattggtggctccgagcgctgcccccgatgcagccaggcagtctatgctgcggagaaggtgattggtgctgggaagtcctggcataaggcctgctttcgatgtgccaagtgtggcaaaggccttgagtcaaccaccctggcagacaaggatggcgagatttactgcaaaggatgttatgctaaaaacttcgggcccaagggctttggttttgggcaaggagctggggccttggtccactctgagtgaggccaccatcacccaacacaccctgcccactcctgcgcttttcatcgccattccattcccagcagctttggagacctccaggattatttctctgtcagcctgcacatatatcactaatgacttgaacttgggcatctggctccctttggtttgggggtctgaggtcacccataaggtccagctggattgaacatacagagaaccatgtttggtcagtaganagccccc

SEQ ID NO: 372569 - DNA, 1050 bp, Homo sapiens
  misc_feature (1028)..(1028): n is a, c, g, or t
ggagggcagcaccgccgggcttcgcgccatgacatcagccctggagtggtgcagtgtgcaaagcccactggttggcgtggcccgggacacgccttccgcggagcggaacaaaacggcgcgcaggccgggcgcacccagccgccacttccgagagcgcctgccgcccctgcgccgccgagccagctgccagaatgccgaactggggaggaggcaagaaatgtggggtgtgtcagaagacggtttactttgccgaagaggttcagtgcgaaggcaacagcttccataaatcctgcttcctgtgcatggtctgcaagaagaatctggacagtaccactgtggccgtgcatggtgaggagatttactgcaagtcctgctacggcaagaagtatgggcccaaaggctatggctacgggcagggcgcaggcaccctcagcactgacaagggggagtcgctgggtatcaagcacgaggaagcccctggccacaggcccaccaccaaccccaatgcatccaaatttgcccagaagattggtggctccgagcgctgcccccgatgcagccaggcagtctatgctgcggagaaggtgattggtgctgggaagtcctggcataaggcctgctttcgatgtgccaagtgtggcaaaggccttgagtcaaccaccctggcagacaaggatggcgagatttactgcaaaggatgttatgctaaaaacttcgggcccaagggctttggttttgggcaaggagctggggccttggtccactctgagtgaggccaccatcacccaccacaccctgcccactcctgcgcttttcatcgccattccattcccagcagctttggagaagaatattatcgttgagcgtccaaatcataggacgaactgggcatggtcctggatggggtgctaggcaccacagggtccggctgtatgcacactgaaccggttggaatacagcgccccataccaagtatcattggtcactcaacgactcacgccggggaaggggtctcttgcatccgtcgnctatcaacacgcgagtaggcgg

SEQ ID NO: 372570 - DNA, 760 bp, Homo sapiens
  misc_feature (698)..(698): n is a, c, g, or t
  misc_feature (746)..(746): n is a, c, g, or t
ggagggcagcaccgccgggcttcgcgccatgacatcagccctggagtggtgcagtgtgcaaagcccactggttggcgtggcccgggacacgccttccgcggagcggaacaaaacggcgcgcaggccgggcgcacccagccgccacttccgagagcgcctgccgcccctgcgccgccgagccagctgccagaatgccgaactggggaggaggcaagaaatgtggggtgtgtcagaagacggtttactttgccgaagaggttcagtgcgaaggcaacagcttccataaatcctgcttcctgtgcatggtctgcaagaagaatctggacagtaccactgtggccgtgcatggtgaggagatttactgcaagtcctgctacggcaagaagtatgggcccaaaggctatggctacgggcagggcgcaggcaccctcagcactgacaagggggagtcgctgggtatcaagcacgaggaagcccctggccacaggcccaccaccaaccccaatgcatccaaatttgcccagaagattggtggctccgagcgctgcccccgatgcagccaggcagtctatgctgcggagaaggtgattggtgctgggaagtcctggcataaggcctgctttcgatgtgccaagtgtggcaaaggccttgagtcaaccaccctggcagacaaggatggcgagatttactgcaaaggnatgctgaatgcctaaaaaaactctcggggccccaagggggcttttggntttttggggccaag

SEQ ID NO: 372571 - DNA, 857 bp, Homo sapiens
gcggccgctccaacatcagaatggtaacagcgcctgccgcccctgcgccgccgagccagctgccagaatgccgaactggggaggaggcaagaaatgtggggtgtgtcagaagacggtttactttgccgaagaggttcagtgcgaaggcaacagcttccataaatcctgcttcctgtgcatggtctgcaagaagaatctggacagtaccactgtggccgtgcatggtgaggagatttactgcaagtcctgctacggcaagaagtatgggcccaaaggctatggctacgggcagggcgcaggcaccctcagcactgacaagggggagtcgctgggtatcaagcacgaggagtgagtaaaagatcccctcccaacctttttcttgagctctctcccccaccctgtattaggcctcatgtgtatttacaaccatttttgggtaagcaatggaaggctcagaaaaccagttatttaaaaggcagtcacagagcagtgtctatgtgtcaggctgctgcaggagctggggatgcagcagggactaaaacaggctgggctcctccctgcaaggagcgtgcattctatatttgtatgagagtcagagctgggaggggccccaagaatcacttagtccaatttcctctttttttgtttttttttgaaagggagtcttgctctgtcacccaggctggagtgcagtggtacaatcttggctcactgcagcctctgcttcttgggctcaagtgatcctcttgcctcaggctcccgagtagctgggagtacaggcatgtgccaccacacccagctaattctgtattttgtagagacagggtttcaccatgttgcctcctctttttatagat

SEQ ID NO: 372572 - DNA, 1146 bp, Homo sapiens
ctgggattacaggcgtgagccaccatgcccagccctgcatttaaaaaacaaaacaaaacaaaaaaaacttttttcttgtggtgagctatagcttatatacaaaagtgtgcacaaaacctacatgtacagttcaaagaataattataaagtgagcccccatatgacaaccaccctgagttaagaaggagagcattgccaggcagtgccttaccagcctccctggtctcccaacccagtcatggtcccttccctctcttagaggtaactcttctaaggtaaaagcttgtgatcatcattcccttgcttttctgtagtaacttttccacctatatgtccatcccttggcaatatgagtttagcccatttgtgaatttcctacaaatggacttgcgttttcccagctctggtctgtctgcttcttccacattctctttgagatccgtccatgttgacgtgtgtaggggtaggcagtccatttttattgcagctggagccttctttataaagcctgcttcttctgctgatccacatcctttagagtgcctagcacagggctgaaaatgcagcagctgctctgtaaagacctgttgattagattggggggaggaaatccccgagaacgtgcgaggctgctgtcgagagctagcagaaagtgctctgccaggcctggtggccccccaggcattctacttttgtctttctctcctctggatctggctgttgcatttctgtcgtggacaatctgagatgtttccatctccctgtaaaattaattcccatttctgtgtcccttttcagaatgccgaactggggaggaggcaagaaatgtggggtgtgtcagaagacggtttactttgccgaagaggttcagtgcgaaggcaacagcttccataaatcctgcttcctgtgcatggtctgcaagaagaatctggacagtaccactgtggccgtgcatggtgaggagatttactgcaagtcctgctacggcaagaagtatgggcccaaaggctatggctacgggcagggcgcaggcaccctcagcatgaaaggacaacactatctggagccacccactgaaagggctgcaggcatgggctgtacccaagctgatttctcatctggtcaataaagctgtttagaccagaa

SEQ ID NO: 372573 - DNA, 743 bp, Homo sapiens
gcggccgctccaacatcagaatggtaacagcgcctgccgcccctgcgccgccgagccagctgccagaatgccgaactggggaggaggcaagaaatgtggggtgtgtcagaagacggtttactttgccgaagaggttcagtgcgaaggcaacagcttccataaatcctgcttcctgtgcagtgagtacgccccaggccctattgctgttgccttggacaccctggacgggcctgcccccacaggctgggcctgtcaacaccccagggaactgatcccatgggatgtaaacagcttgacatttggctgaagcgcagctgggcagggaaacacttcagggcctctttgttccgttcagaagcttctttctaagggatgaactggccagagcgggtcggggtggcaggcgttcaggggctgaaagccaagctgtaaagacttggttaagaaaactttccactcagctctctcttctctctctccctgtcatgatttcaccatttcagaggaaaacactttcagccctttgcaccctaattatctcttgttcaaaggcaacagaggccacaacctcatggtgaagctgaatctggaggaagagtggggctcctccttcctcagccccttgcaggctggcctgttcagttcttcacttcccattcccactcagcctgggatgagaggaagagggagtacaaagttccctgatatctactcctaagaagccagagcaaggtttgctccag

SEQ ID NO: 372574 - DNA, 753 bp, Homo sapiens
gtaagaagcttgcaatgagcaagaaggtcaccccagcttcaactcaatgcgtccgcttccccttcccctccacagtggtctgcaagaagaatctggacagtaccactgtggccgtgcatggtgaggagatttactgcaagtcctgctacggcaagaagtatgggcccaaaggctatggctacgggcagggcgcaggcaccctcagcactgacaagggggagtcgctgggtatcaagcacgaggagtgagtaaaagatcccctcccaacctttttcttgagctctctcccccaccctgtattaggcctcatgtgtatttacaaccatttttgggtaagcaatggaaggctcagaaaaccagttatttaaaaggcagtcacagagcagtgtctatgtgtcaggctgctgcaggagctggggatgcagcagggactaaaacaggctgggctcctccctgcaaggagcgtgcattctatatttgtatgagagtcagagctgggaggggccccaagaatcacttagtccaatttcctctttttttgtttttttttgaaagggagtcttgctctgtcacccaggctggagtgcagtggtacaatcttggctcactgcagcctctgcttcttgggctcaagtgatcctcttgcctcaggctcccgagtagctgggagtacaggcatgtgccaccacacccagctaattctgtattttgtagagacagggtttcaccatgttgcctcctctttttatagat

SEQ ID NO: 372575 - DNA, 2215 bp, Homo sapiens
ggagggcagcaccgccgggcttcgcgccatgacatcagccctggagtggtgcagtgtgcaaagcccactggttggcgtggcccgggacacgccttccgcggagcggaacaaaacggcgcgcaggccgggcgcacccagccgccacttccgagagcgcctgccgcccctgcgccgccgagccagctgccagaatgccgaactggggaggaggcaagaaatgtggggtgtgtcagaagacggtttactttgccgaagaggttcagtgcgaaggcaacagcttccataaatcctgcttcctgtgcatggtctgcaagaagaatctggacagtaccactgtggccgtgcatggtgaggagatttactgcaagtcctgctacggcaagaagtatgggcccaaaggctatggctacgggcagggcgcaggcaccctcagcactgacaagggggagtcgctgggtatcaagcacgaggaagcccctggccacaggcccaccaccaaccccaatgcatccaaatttgcccagaagattggtggctccgagcgctgcccccgatgcagccaggcagtctatgctgcggagaaggtgattggtgctgggaagtcctggcataaggcctgctttcgatgtgccaagtgtggcaaaggccttgagtcaaccaccctggcagacaaggatggcgagatttactgcaaaggatgttatgctaaaaacttcgggcccaagggctttggttttgggcaaggagctggggccttggtccactctgagtgaggccaccatcacccaccacaccctgcccactcctgcgcttttcatcgccattccattcccagcagctttggagacctccaggattatttctctgtcagccctgccacatatcactaatgacttgaacttgggcatctggctccctttggtttgggggtctgcctgaggtcccaccccactaaagggctccccaggcctgggatctgacaccatcaccagtaggagacctcagtgttttgggtctaggtgagagcaggcccctctccccacacctcgccccacagagctctgttcttagcctcctgtgctgcgtgtccatcatcagctgaccaagacacctgaggacacatcttggcacccagaggagcagcagcaacaggctggagggagagggaagcaagaccaagatgaggaggggggaaggctgggttttttggatctcagagattctcctctgtgggaaagaggttgagcttcctggtgtccctcagagtaagcctgaggagtcccagcttagggagtcactattggaggcagagaggcatgcaggcggggtcctaggagcccctgcttctccaggcctcttgcctttgagtctttgtggaatggatagcctcccactaggactgggaggagaataacccaggtcttaaggaccccaaagtcaggatgttgtttgatcttctcaaacatctagttccctgcttgatgggaggatcctaatgaaatacctgaaacatatattggcatttatcaatggctcaaatcttcatttatctctggccttaaccctggctcctgaggctgcggccagcagagcccaggccagggctctgttcttgccacacctgcttgatcctcagatgtggagggaggtaggcactgcctcagtcttcatccaaacacctttccctttgccctgagacctcagaatcttccctttaacccaagaccctgcctcttccactccacccttctccagggacccttagatcacatcactccacccctgccaggccccaggttaggaatagtggtgggaggaaggggaaagggctgggcctcaccgctcccagcaactgaaaggacaacactatctggagccacccactgaaagggctgcaggcatgggctgtacccaagctgatttctcatctggtcaataaagctgtttagaccagaaaaaaaccacacagcaccaccacacaaacaaaaaccggagggggggccggtaaccaattgggctataggaggcggattacatacatggcgccgttaaaagccggacgggaaaccggggtacccattatcgtggaggatcccctagcacggcgaaacgaaggcgcaaagctcccagaggccccaaggaggaaggacggattggacacgcacaggcctataccacgacggccgcacgcgggtgccccagcaatgccgagact

SEQ ID NO: 372576 - DNA, 2041 bp, Homo sapiens
ggagggcagcaccgccgggcttcgcgccatgacatcagccctggagtggtgcagtgtgcaaagcccactggttggcgtggcccgggacacgccttccgcggagcggaacaaaacggcgcgcaggccgggcgcacccagccgccacttccgagagcgcctgccgcccctgcgccgccgagccagctgccagaatgccgaactggggaggaggcaagaaatgtggggtgtgtcagaagacggtttactttgccgaagaggttcagtgcgaaggcaacagcttccataaatcctgcttcctgtgcatggtctgcaagaagaatctggacagtaccactgtggccgtgcatggtgaggagatttactgcaagtcctgctacggcaagaagtatgggcccaaaggctatggctacgggcagggcgcaggcaccctcagcactgacaagggggagtcgctgggtatcaagcacgaggaagcccctggccacaggcccaccaccaaccccaatgcatccaaatttgcccagaagattggtggctccgagcgctgcccccgatgcagccaggcagtctatgctgcggagaaggtgattggtgctgggaagtcctggcataaggcctgctttcgatgtgccaagtgtggcaaaggccttgagtcaaccaccctggcagacaaggatggcgagatttactgcaaaggatgttatgctaaaaacttcgggcccaagggctttggttttgggcaaggagctggggccttggtccactctgagtgaggccaccatcacccaccacaccctgcccactcctgcgcttttcatcgccattccattcccagcagctttggagacctccaggattatttctctgtcagccctgccacatatcactaatgacttgaacttgggcatctggctccctttggtttgggggtctgcctgaggtcccaccccactaaagggctccccaggcctgggatctgacaccatcaccagtaggagacctcagtgttttgggtctaggtgagagcaggcccctctccccacacctcgccccacagagctctgttcttagcctcctgtgctgcgtgtccatcatcagctgaccaagacacctgaggacacatcttggcacccagaggagcagcagcaacaggctggagggagagggaagcaagaccaagatgaggaggggggaaggctgggttttttggatctcagagattctcctctgtgggaaagaggttgagcttcctggtgtccctcagagtaagcctgaggagtcccagcttagggagtcactattggaggcagagaggcatgcaggcggggtcctaggagcccctgcttctccaggcctcttgcctttgagtctttgtggaatggatagcctcccactaggactgggaggagaataacccaggtcttaaggaccccaaagtcaggatgttgtttgatcttctcaaacatctagttccctgcttgatgggaggatcctaatgaaatacctgaaacatatattggcatttatcaatggctcaaatcttcatttatctctggccttaaccctggctcctgaggctgcggccagcagagcccaggccagggctctgttcttgccacacctgcttgatcctcagatgtggagggaggtaggcactgcctcagtcttcatccaaacacctttccctttgccctgagacctcagaatcttccctttaacccaagaccctgcctcttccactccacccttctccagggacccttagatcacatcactccacccctgccaggccccaggttaggaatagtggtgggaggaaggggaaagggctgggcctcaccgctcccagcaactgaaaggacaacactatctggagccacccactgaaagggctgcaggcatgggctgtacccaagctgatttctcatctggtcaataaagctgtttagaccagaaaaaaaaaaaaaaaaaaaaaaaaaaaaaaaaaaaaaaaaaaaaaaaaaaaaaaggggggggcccaaaattcccccggggggcccca

SEQ ID NO: 372577 - DNA, 1988 bp, Homo sapiens
ggagggcagcaccgccgggcttcgcgccatgacatcagccctggagtggtgcagtgtgcaaagcccactggttggcgtggcccgggacacgccttccgcggagcggaacaaaacggcgcgcaggccgggcgcacccagccgccacttccgagagcgcctgccgcccctgcgccgccgagccagctgccagaatgccgaactggggaggaggcaagaaatgtggggtgtgtcagaagacggtttactttgccgaagaggttcagtgcgaaggcaacagcttccataaatcctgcttcctgtgcatggtctgcaagaagaatctggacagtaccactgtggccgtgcatggtgaggagatttactgcaagtcctgctacggcaagaagtatgggcccaaaggctatggctacgggcagggcgcaggcaccctcagcactgacaagggggagtcgctgggtatcaagcacgaggaagcccctggccacaggcccaccaccaaccccaatgcatccaaatttgcccagaagattggtggctccgagcgctgcccccgatgcagccaggcagtctatgctgcggagaaggtgattggtgctgggaagtcctggcataaggcctgctttcgatgtgccaagtgtggcaaaggccttgagtcaaccaccctggcagacaaggatggcgagatttactgcaaaggatgttatgctaaaaacttcgggcccaagggctttggttttgggcaaggagctggggccttggtccactctgagtgaggccaccatcacccaccacaccctgcccactcctgcgcttttcatcgccattccattcccagcagctttggagacctccaggattatttctctgtcagccctgccacatatcactaatgacttgaacttgggcatctggctccctttggtttgggggtctgcctgaggtcccaccccactaaagggctccccaggcctgggatctgacaccatcaccagtaggagacctcagtgttttgggtctaggtgagagcaggcccctctccccacacctcgccccacagagctctgttcttagcctcctgtgctgcgtgtccatcatcagctgaccaagacacctgaggacacatcttggcacccagaggagcagcagcaacaggctggagggagagggaagcaagaccaagatgaggaggggggaaggctgggttttttggatctcagagattctcctctgtgggaaagaggttgagcttcctggtgtccctcagagtaagcctgaggagtcccagcttagggagtcactattggaggcagagaggcatgcaggcggggtcctaggagcccctgcttctccaggcctcttgcctttgagtctttgtggaatggatagcctcccactaggactgggaggagaataacccaggtcttaaggaccccaaagtcaggatgttgtttgatcttctcaaacatctagttccctgcttgatgggaggatcctaatgaaatacctgaaacatatattggcatttatcaatggctcaaatcttcatttatctctggccttaaccctggctcctgaggctgcggccagcagagcccaggccagggctctgttcttgccacacctgcttgatcctcagatgtggagggaggtaggcactgcctcagtcttcatccaaacacctttccctttgccctgagacctcagaatcttccctttaacccaagaccctgcctcttccactccacccttctccagggacccttagatcacatcactccacccctgccaggccccaggttaggaatagtggtgggaggaaggggaaagggctgggcctcaccgctcccagcaactgaaaggacaacactatctggagccacccactgaaagggctgcaggcatgggctgtacccaagctgatttctcatctggtcaataaagctgtttagaccagaaaaaaacggcacgaggagacgtcgagaggtcgg

SEQ ID NO: 372578 - DNA, 2021 bp, Homo sapiens
ggagggcagcaccgccgggcttcgcgccatgacatcagccctggagtggtgcagtgtgcaaagcccactggttggcgtggcccgggacacgccttccgcggagcggaacaaaacggcgcgcaggccgggcgcacccagccgccacttccgagagcgcctgccgcccctgcgccgccgagccagctgccagaatgccgaactggggaggaggcaagaaatgtggggtgtgtcagaagacggtttactttgccgaagaggttcagtgcgaaggcaacagcttccataaatcctgcttcctgtgcatggtctgcaagaagaatctggacagtaccactgtggccgtgcatggtgaggagatttactgcaagtcctgctacggcaagaagtatgggcccaaaggctatggctacgggcagggcgcaggcaccctcagcactgacaagggggagtcgctgggtatcaagcacgaggaagcccctggccacaggcccaccaccaaccccaatgcatccaaatttgcccagaagattggtggctccgagcgctgcccccgatgcagccaggcagtctatgctgcggagaaggtgattggtgctgggaagtcctggcataaggcctgctttcgatgtgccaagtgtggcaaaggccttgagtcaaccaccctggcagacaaggatggcgagatttactgcaaaggatgttatgctaaaaacttcgggcccaagggctttggttttgggcaaggagctggggccttggtccactctgagtgaggccaccatcacccaccacaccctgcccactcctgcgcttttcatcgccattccattcccagcagctttggagacctccaggattatttctctgtcagccctgccacatatcactaatgacttgaacttgggcatctggctccctttggtttgggggtctgcctgaggtcccaccccactaaagggctccccaggcctgggatctgacaccatcaccagtaggagacctcagtgttttgggtctaggtgagagcaggcccctctccccacacctcgccccacagagctctgttcttagcctcctgtgctgcgtgtccatcatcagctgaccaagacacctgaggacacatcttggcacccagaggagcagcagcaacaggctggagggagagggaagcaagaccaagatgaggaggggggaaggctgggttttttggatctcagagattctcctctgtgggaaagaggttgagcttcctggtgtccctcagagtaagcctgaggagtcccagcttagggagtcactattggaggcagagaggcatgcaggcggggtcctaggagcccctgcttctccaggcctcttgcctttgagtctttgtggaatggatagcctcccactaggactgggaggagaataacccaggtcttaaggaccccaaagtcaggatgttgtttgatcttctcaaacatctagttccctgcttgatgggaggatcctaatgaaatacctgaaacatatattggcatttatcaatggctcaaatcttcatttatctctggccttaaccctggctcctgaggctgcggccagcagagcccaggccagggctctgttcttgccacacctgcttgatcctcagatgtggagggaggtaggcactgcctcagtcttcatccaaacacctttccctttgccctgagacctcagaatcttccctttaacccaagaccctgcctcttccactccacccttctccagggacccttagatcacatcactccacccctgccaggccccaggttaggaatagtggtgggaggaaggggaaagggctgggcctcaccgctcccagcaactgaaaggacaacactatctggagccacccactgaaagggctgcaggcatgggctgtacccaagctgatttctcatctggtcaataaagctgtttagaccagaaaaaaaaaaaaaaaaaaaaaaaaaaaaaaaaaaggggggggcccaaaattcccccggggggcccca

SEQ ID NO: 372579 - DNA, 1201 bp, Homo sapiens
ctcggctctaccttgtctctcggctctaccttgtctctcggctctaccttgtctctcggctctaccttgtctctcggctctaccttgtctctcggctctaccttgtctctcggctctaccttgtctctcggctctaccttgtctctcggctctaccttgtctctcggctctaccttgtctctcggctctaccttgtctctcggctctaccttgcctgggatctgacaccatcaccagtaggagacctcagtgttttgggtctaggtgagagcaggcccctctccccacacctcgccccacagagctctgttcttagcctcctgtgctgcgtgtccatcatcagctgaccaagacacctgaggacacatcttggcacccagaggagcagcagcaacaggctggagggagagggaagcaagaccaagatgaggaggggggaaggctgggttttttggatctcagagattctcctctgtgggaaagaggttgagcttcctggtgtccctcagagtaagcctgaggagtcccagcttagggagtcactattggaggcagagaggcatgcaggcggggtcctaggagcccctgcttctccaggcctcttgcctttgagtctttgtggaatggatagcctcccactaggactgggaggagaataacccaggtcttaaggaccccaaagtcaggatgttgtttgatcttctcaaacatctagttccctgcttgatgggaggatcctaatgaaatacctgaaacatatattggcatttatcaatggctcaaatcttcatttatctctggccttaaccctggctcctgaggctgcggccagcagagcccaggccagggctctgttcttgccacacctgcttgatcctcagatgtggagggaggtaggcactgcctcagtcttcatccaaacacctttccctttgccctgagacctcagaatcttccctttaacccaagaccctgcctcttccactccacccttctccagggacccttagatcacatcactccacccctgccaggccccaggttaggaatagtggtgggaggaaggggaaagggctgggcctcaccgctcccagcaactgaaaggacaacactatctggagccacccactgaaagggctgcaggcatgggctgtacccaagctgatttctcatctggtcaataaagctgtttagaccagaa

SEQ ID NO: 372580 - DNA, 908 bp, Homo sapiens
  misc_feature (29)..(29): n is a, c, g, or t
  misc_feature (31)..(33): n is a, c, g, or t
cggacgcgtgggtcgacccacgcgtcggncnnncgcgtgtccatcatcagctgaccaagacacctgaggacacatcttggcacccagaggagcagcagcaacaggctggagggagagggaagcaagaccaagatgaggaggggggaaggctgggttttttggatctcagagattctcctctgtgggaaagaggttgagcttcctggtgtccctcagagtaagcctgaggagtcccagcttagggagtcactattggaggcagagaggcatgcaggcggggtcctaggagcccctgcttctccaggcctcttgcctttgagtctttgtggaatggatagcctcccactaggactgggaggagaataacccaggtcttaaggaccccaaagtcaggatgttgtttgatcttctcaaacatctagttccctgcttgatgggaggatcctaatgaaatacctgaaacatatattggcatttatcaatggctcaaatcttcatttatctctggccttaaccctggctcctgaggctgcggccagcagagcccaggccagggctctgttcttgccacacctgcttgatcctcagatgtggagggaggtaggcactgcctcagtcttcatccaaacacctttccctttgccctgagacctcagaatcttccctttaacccaagaccctgcctcttccactccacccttctccagggacccttagatcacatcactccacccctgccaggccccaggttaggaatagtggtgggaggaaggggaaagggctgggcctcaccgctcccagcaactgaaaggacaacactatctggagccacccactgaaagggctgcaggcatgggctgtacccaagctgatttctcatctggtcaataaagctgtttagaccagaa

SEQ ID NO: 372581 - DNA, 922 bp, Homo sapiens
  misc_feature (29)..(29): n is a, c, g, or t
  misc_feature (31)..(33): n is a, c, g, or t
  misc_feature (900)..(900): n is a, c, g, or t
cggacgcgtgggtcgacccacgcgtcggncnnncgcccctgcgccgccgagccagctgccagaatgccgaactggggaggaggcaagaaatgtggggtgtgtcagaagacggtttactttgccgaagaggttcagtgcgaaggcaacagcttccataaatcctgcttcctgtgcatggtctgcaagaagaatctggacagtaccactgtggccgtgcatggtgaggagatttactgcaagtcctgctacggcaagaagtatgggcccaaaggctatggctacgggcagggcgcaggcaccctcagcactgacaagggggagtcgctgggtatcaagcacgaggaagcccctggccacaggcccaccaccaaccccaatgcatccaaatttgcccagaagattggtggctccgagcgctgcccccgatgcagccaggcagtctatgctgcggagaaggtgattggtgctgggaagtcctggcataaggcctgctttcgatgtgccaagtgtggcaaaggccttgagtcaaccaccctggcagacaaggatggcgagatttactgcaaaggatgttatgctaaaaacttcgggcccaagggctttggttttgggcaaggagctggggccttggtccactctgagtgaggccaccatcacccaccacaccctgcccactcctgcgcttttcatcgccattccattcccagcagctttggagaagaatattatcgttgagcgtccaaatcataggacgaactgggcatggtcctggatggggtgctaggcaccacagggtccggctgtatgcacactgaaccggttggaatacagcgccccataccaagtatcattggtcactcaacgactcacgccggggaaggggtctcttgcatccgtcgnctatcaacacgcgagtaggcgg

SEQ ID NO: 372582 - DNA, 1284 bp, Homo sapiens
  misc_feature (1217)..(1218): n is a, c, g, or t
  misc_feature (1222)..(1222): n is a, c, g, or t
  misc_feature (1279)..(1279): n is a, c, g, or t
ctgggattacaggcgtgagccaccatgcccagccctgcatttaaaaaacaaaacaaaacaaaaaaaacttttttcttgtggtgagctatagcttatatacaaaagtgtgcacaaaacctacatgtacagttcaaagaataattataaagtgagcccccatatgacaaccaccctgagttaagaaggagagcattgccaggcagtgccttaccagcctccctggtctcccaacccagtcatggtcccttccctctcttagaggtaactcttctaaggtaaaagcttgtgatcatcattcccttgcttttctgtagtaacttttccacctatatgtccatcccttggcaatatgagtttagcccatttgtgaatttcctacaaatggacttgcgttttcccagctctggtctgtctgcttcttccacattctctttgagatccgtccatgttgacgtgtgtaggggtaggcagtccatttttattgcagctggagccttctttataaagcctgcttcttctgctgatccacatcctttagagtgcctagcacagggctgaaaatgcagcagctgctctgtaaagacctgttgattagattggggggaggaaatccccgagaacgtgcgaggctgctgtcgagagctagcagaaagtgctctgccaggcctggtggccccccaggcattctacttttgtctttctctcctctggatctggctgttgcatttctgtcgtggacaatctgagatgtttccatctccctgtaaaattaattcccatttctgtgtcccttttcagaatgccgaactggggaggaggcaagaaatgtggggtgtgtcagaagacggtttactttgccgaagaggttcagtgcgaaggcaacagcttccataaatcctgcttcctgtgcatggtctgcaagaagaatctggacagtaccactgtggccgtgcatggtgaggagatttactgcaagtcctgctacggcaagaagtatgggcccaaaggctatggctacgggcagggcgcaggcaccctcagcactgacaagggggagtcgctgggtatcaagcacgaggaagcccctggccacaggcccaccaccaaccccaatgcatccaaatttgcccagaagattggtggctccgagcgctgcccccgatgcagccaggcagtctatgctgcggagaaggtgattggtgctgggaagtctggcnnaagnctgctttcgagtgccagtgtggcaagctggtcacactggcgacaggtggcggtttangcaag

SEQ ID NO: 372583 - DNA, 1206 bp, Homo sapiens
ctgggattacaggcgtgagccaccatgcccagccctgcatttaaaaaacaaaacaaaacaaaaaaaacttttttcttgtggtgagctatagcttatatacaaaagtgtgcacaaaacctacatgtacagttcaaagaataattataaagtgagcccccatatgacaaccaccctgagttaagaaggagagcattgccaggcagtgccttaccagcctccctggtctcccaacccagtcatggtcccttccctctcttagaggtaactcttctaaggtaaaagcttgtgatcatcattcccttgcttttctgtagtaacttttccacctatatgtccatcccttggcaatatgagtttagcccatttgtgaatttcctacaaatggacttgcgttttcccagctctggtctgtctgcttcttccacattctctttgagatccgtccatgttgacgtgtgtaggggtaggcagtccatttttattgcagctggagccttctttataaagcctgcttcttctgctgatccacatcctttagagtgcctagcacagggctgaaaatgcagcagctgctctgtaaagacctgttgattagattggggggaggaaatccccgagaacgtgcgaggctgctgtcgagagctagcagaaagtgctctgccaggcctggtggccccccaggcattctacttttgtctttctctcctctggatctggctgttgcatttctgtcgtggacaatctgagatgtttccatctccctgtaaaattaattcccatttctgtgtcccttttcagaatgccgaactggggaggaggcaagaaatgtggggtgtgtcagaagacggtttactttgccgaagaggttcagtgcgaaggcaacagcttccataaatcctgcttcctgtgcatggtctgcaagaagaatctggacagtaccactgtggccgtgcatggtgaggagatttactgcaagtcctgctacggcaagaagtatgggcccaaaggctatggctacgggcagggcgcaggcaccctcagcactgacaagggggagtcgctgggtatcaagcacgaggaagcccctggccacaggcccaccaccaatcaccttctccgcagcatagactgcctggctgcatcgggggcagcgctgagccaccaatcttctggggaaatttgatgcattgggaccgagctcgatga

SEQ ID NO: 372584 - DNA, 554 bp, Homo sapiens
ttttaaagtaattatcaatttattatcaaccgtatcttatctgaaagtggatttaatgctatacatagagctcagacttggtaataaaactgtttgcctttgctcagcagtgtttgtgaataacctatgtttttctgcaggtcagacatggctgtgatgccacatgctggggtccgggacctggtgggtgccttcagacgctcctgcacagagccattgatgaaaacaacgagcccaccgcctgctttcttattcgcaggtctgagagtccccagtatctctccacagctttttagtgagcttgttgcaaactggctctttcctttttaaatccgtctatagtcttggcatgccagtagccggcttgactttcacagttaaggttatcagagagtcactgttctgtcatgtcaagtcagccaggagccaggctcacttgtgacgggaggagctcacagccctgaatcaaagaatctgaaagctggagtcagcgtcctgctttgggagctgcctgagctcctgtagtcacggcagaccagttcagactgtgaagc

SEQ ID NO: 372585 - DNA, 556 bp, Homo sapiens
gggaccgggcctcccccctgtgttgcagatatgctgtccaaggagcctccgtggtgtgacggctcctactgctatgagtgcactgccaggttcggagtcaccactcgcaaacaccactgtggtaagaccccagcgtcactggcaaggagcgaggggactgccgctgatgtcattgcttccccccttctccaggacaggccgtgaacttgcctgggtcctgcacattgatgggcaaaccttgaccaaatggagggatgagatgagcacacccaaggatcctactgaggaacagagatgtagggaaggcagggagcctgcagacgggtggctttcctgctggaggctgaaggtgcacagtttccaggcagcctgccaggcctgtgccatccttcctgacttcctgcctgcaccaaagctgagatgagctactgccctcatggtgtgcctcagtatgggccgctttgccgagaactaaggggctgttcccattaaaatgagattacaggcgtgagccaccatgcctggcctgagctgctcttgatcttccaaaaaaaaa

SEQ ID NO: 372586 - DNA, 7480 bp, Homo sapiens
agtgccgggccagacatggcggaagaggaggtggccaagttggagaagcacttgatgcttctgcggcaggagtatgtcaagctgcagaagaagctggcggagacagagaagcgctgcgctctcttggctgcgcaggcaaacaaggagagcagcagcgagtccttcatcagccgtctgctggccatcgtggcagacctctacgagcaggagcagtacagcgatctgaagataaaggttggggacaggcacatcagtgctcacaagtttgtcctggcagcccgcagtgacagctggagtctggctaacttgtcttccactaaagagttggacctgtcagatgctaatcctgaggtgacgatgacaatgcttcgctggatctatacagatgagctggagttcagagaggatgatgtgttcctgactgaactgatgaaactagcaaatcggtttcagctacagctcctcagggagagatgtgagaagggtgttatgtctctagtgaatgtcaggaactgtattcgcttctaccagacggcagaggagctgaatgccagcacactgatgaactactgtgcagaaattattgcaagtcattgggacgacctgaggaaggaggatttcagcagcatgagcgctcagttgttatacaaaatgatcaaatccaagacagagtacccgctacataaagccatcaaagtggagagagaagacgtggtcttcctgtatctgattgaaatggattcccagctccctgggaagctgaatgaagcggatcataacggagatctggcattagatctagccctctcacgacgactggagagtattgccaccacgctggttagtcacaaagctgatgtggacatggtggacaagagtggctggagcttgttacacaaaggaatccaaagaggagatctctttgctgccactttcctcattaagaatggggcctttgtcaacgctgctacactgggtgcccaggagacaccactgcaccttgtggccttgtacagttcaaagaaacactcagcagatgtgatgtctgagatggcgcagattgcagaggcccttctgcaggctggtgccaaccccaacatgcaggacagcaaggggaggactcctttacatgtgtccatcatggccgggaatgaatatgtgttcagtcagctgctgcagtgcaaacaactagatttagaactcaaagaccacgagggcagcacggctctgtggctggcagtgcagcatatcacagtgtcttctgaccagtctgtgaaccccttcgaagatgtccccgtggtaaatgggacttcatttgatgagaacagctttgcagccagactcatccagcgcggcagccacacagacgcacctgacacggcgacaggaaactgtttactacagcgggcagctggagcaggaaacgaggcagcagctcttttcctggcaaccaacggtgcccatgtcaaccacagaaacaagtggggagaaaccccgttgcacacagcgtgtcggcatggcctggccaacctcacagcagagctcctgcagcaaggcgccaacccaaacctgcagacggaggaagctctgcctctgccaaaggaggccgcatccctgaccagcttggcggacagcgtccatctgcagacgccactgcacatggcgatcgcctataaccatccggatgtggtgtctgtcatcctggagcagaaagccaatgctcttcatgccaccaacaacttgcagatcattccggacttcagcctcaaagattcccgagaccagactgtgctgggcctggcattatggactggcatgcacacgatcgcagcccagctgctgggctctggagccgccatcaatgacaccatgtcggatgggcagacgctactgcacatggccatacagcggcaggacagcaagagcgcactcttcctgctggagcaccaggcagatataaatgtcaggactcaggacggggagacagccctccagctggccatcagaaaccagcttccactcgtagttgatgccatatgcacccgaggagctgacatgtctgtgccagatgagaaggggaaccccccgctgtggcttgcattggcaaacaatctggaggacatcgcatccactctggtcagacatggctgtgatgccacatgctggggtccgggacctggtgggtgccttcagacgctcctgcacagagccattgatgaaaacaacgagcccaccgcctgctttcttattcgcagtggctgtgacgtgaacagtcccagacaaccaggcgccaatggagaaggagaggaagaggctagagatgggcagacccctttgcatttggcagcctcttgggggctggaagagacagtacagtgtcttctggagtttggtgccaacgtgaacgcacaggatgcagaaggaagaacccccatccacgtggccatcagcagccaacacggtgtcatcattcagctgttggtttctcaccccgatatccatttgaatgtacgagacagacaagggctgaccccgtttgcctgtgccatgactttcaagaacaacaagtcagccgaggccattctcaaacgagagtccggggctgctgagcaggtggataacaagggccggaatttccttcatgtggcagttcagaactctgatattgaaagtgtgctgttcctgatcagtgtccacgctaatgtgaattcaagagtccaggatgcctccaagttgacccccctgcacctcgctgtccaagcaggctcagaaattattgtccgcaatttgcttcttgcgggagccaaagtgaacgaattaaccaagcatcgccagactgccctccatcttgctgcccagcaggacctgcccaccatctgctcagtcctcctagagaatggcgtggactttgctgccgtggatgagaatggaaacaatgctcttcatcttgctgtcatgcacggccggctcaacaacatccgggttctcctgacagagtgcacagtggacgccgaagcctttaatctcagaggccagtcaccactgcacattttgggacaatatggcaaggagaatgcagcggccatctttgatctcttcctagaatgcatgccggggtatcctctggacaagccggatgcagacggcagcacggtgctgctcctggcatacatgaaagggaacgccaacttgtgccgcgccatcgtccggtcgggggctcgcctcggggtgaataacaaccagggagtcaacatcttcaactaccaggtcgccaccaagcagctcctgttccgactgctggatatgctgtccaaggagcctccgtggtgtgacggctcctactgctatgagtgcactgccaggttcggagtcaccactcgcaaacaccactgtcgtcactgcggacgtcttctttgccataaatgctcgaccaaggagattcctattataaagtttgatctgaacaagcctgtgcgggtttgcaacatttgttttgatgtactgactctgggtggggtttcttagtgagccccccggagggtccaggccacgtccttggtcacctccccagcagctgctctgctcaccagcctgaccccacccagagcaggagctggcgggtgtcttcctgcggcaatagactggaacgattaaggaccatggtgtgatagatcccatttcaaatgattccatatgattgtcagtgtgtgtgtcagactgtgatcgatttcactagatgtctcactcatcagaccaggccattgggcctaagtggtaaatgtgattaggaattagacctctccccattctgctagcaacatacagggacacttggaaaaccatttccccttccagtagcttggtgtccatcccagagcattcatgaagtcttcccgcctgggctgactgatgaggcagagcctctcagcgtaggaagctggctgcttaatgagctggctttactctagggtaagtggctgtggacttttctgcacagtgttttcataaagataataggatcctcttgccctgaagtctttttttctttttacgctaagctgtatttttagtgagctaccccttttaaaaaggtgaaatctttcttaacagggttcaaagatgagagctgaaaaatcgtggccttaacaactgaaagctttacagtgttcatgctactgaggtgtcaggagtgcagctgggccgcttgacacctcgtagcagccgtctcattctctcgtcttgctgcgtcctgtctgtggagtcctcagtcactctgctgttggagagtgctggaggaaatgcacttttactgtgctgcactttttatagagctgcattgtcggtgattccaatttaaaaatccatattcaaaaataccctcacacatccctgcatcagtgattctaatgatcagctttgactggacctcagctcacacgaatctccaaggaaaaactctacagagcatcttttagagcaagagattcatacaggccaagtgatgagagggggagtcaccaaggcttcagccccaagggcatctccagcctcaggccggcaggtcctatgtccttgacacaaacgcttcttgctgaaatcctccctagtgatgctgcgagtgctgttggtcccagttctgtgtagcttgccctgccccatgaagggccaccagccaagggccctggccacgtgtgcgccaccttactttggaagtctctggcttgtgtgctggatgaggctgccagaacttgttgggcgttcatcgctgttagtacatatattaaccgtgaggtgttaaacttttcttttgaaggtttggccagtttctaaaaaatgcacatttaaagagaagcatctaccacggctttaaaacaaaacaactctgagatgaacaatatgtgttatactcagagattaacaatctcaatcatacatactgattctttcagacatttaataaccactacatttttttgcattaatgaagtttgactatatgtgtaaagggactaaatatttttgcaacagcctgttctttgttcattcttttctggatagtgtgtcctctgtattgcggtagatttatacattctgttgcctaaatatgtgtgtaaaatgagctgataaactggagtactacttaaaaaaaagtctgtgatttataagatgtatatgctttctatgtgaatataagcttgtgcacaatgtttaaaagaaaaacaatgaattagaagagatcccccgtcccccagtctgacatatttcatacagaatgtttaaaagaaaaactctgctagtcttggcaaacatttggccatgtgaggcatgtggtcagtttccattttctattacctggaaagggccataaggaagcaggcagggcttaggtagcttggttacctaagttagaaagtaagagaatcatggttcggatatgaattgaagtggttggtacatggatacctgttctttaaaaggaatgtgggagatgagtcaagggtgaggccgattgttctgcccatgccctaccataccaatttcaataacaatcttgcctgtcattgcactcagaatcttaagatcatgtttcaaatatgttgattcaaacttgcttctaagcctgagtccagggatagcaatggtactgaccagctatggactgggagaacattgagtcctgttttccattggcttcagggcgcatccatgtggatataggaaaagcctctttccacagacttaggaagccccccgaccacgcggacgctcgctgggctgcactcagcaggctgcttgagtgggagctgactccaacatgccctgccctggctgggactaggcatgcttccagcccttcccgtgctctccctgctgtcaacacttgcgtacaaacctgcctagctgttgtaagttttcatcagtagcttaagtactagtagcaaaaacttaaattcattcagaaagttgccacttctgaatgagtagagcaggaaaagtaaactttactgaaacataatttgctgcaacagtcaacattgttatgctgaatgtgctctcaactgccctttgctcatcgccagatttattatccagtgtattcctaacagtcttttgttgtcgttgtttttaaaacaaaggtacggaccatgtgctatatataaatcgaatggcttaaactaatttgctatgatcctctaacaccgaaatttcccataaacttaagtgcctacacttaggacttttgaactttcagtcatctttttcgtggtgtctcactgaacgatgtgttagaacatgtgttccatttggagttttgggcctgtgcacggtcaaccccaattaccaatttagttgaggctggattcgattgctcagttcacctgccacgttctctccaaggagtggggtctacgtgacctttagtcctctacctcagagccccgagtcatttctgaccaccccgttctgtgtcctcactcttgtccctgaatgggtccctgtgtggatctcagtgtgtgtgtggtttctccactcctccccgctcatgtcccacacctgccatattgaaccgtttctgcactaatcttctccacgggcacggagtggagggaacgtcttgggaaaggggagagcttgacctccatctaggtttcttttatctggagaaaaagaacacttttgaactatgtaatgcttcgccctgaaaggcaagctaacgctaacttcccaggtgacagtagcaggaacaaggaagggtaatgtttccatgacagacacttgcttcccttgggacaagtcccagaagaactacctgaagcaccaaagctccccaccccagcctggtggcagaggaagcaggtggcaccaactcaccaaagggacttgggagccaccttctcactctgtggaagtactttagtgagagctgactggcaagataaaaaccctgaaattcccagaagttacagatgccttaaagactttctttggaagatcattgcctgtactattccttttttgtgtggcataaataatatattaacctgttacaactgacaacattggttttctgcagctagggagtcttgagtcgagactgctcgccttgatgacttgctcttttttggcagatgtgtggagttggctgttacgacatccctgtgtgatcccagaggaggggcagtagctgggcagaaactgcaggcacacatttgggtggatcacctggcttccagccccttcggggtggtgctcagtgtggggtgatggtatcatagaggaccacggcgcttatcagcattgtttctttggagtctgtgtaatggaatgtatttttcaaatactgatatttgcattttctgtaacaattccttataataaaatgaagtaaaattgtgcatttaaagtggaaactttaataagacatttgtagttacttctaatgcagaagtaccaataagcattaaaaacaaattttaga

SEQ ID NO: 372587 - DNA, 7411 bp, Homo sapiens
agtgccgggccagacatggcggaagaggaggtggccaagttggagaagcacttgatgcttctgcggcaggagtatgtcaagctgcagaagaagctggcggagacagagaagcgctgcgctctcttggctgcgcaggcaaacaaggagagcagcagcgagtccttcatcagccgtctgctggccatcgtggcagacctctacgagcaggagcagtacagcgatctgaagataaaggttggggacaggcacatcagtgctcacaagtttgtcctggcagcccgcagtgacagctggagtctggctaacttgtcttccactaaagagttggacctgtcagatgctaatcctgaggtgacgatgacaatgcttcgctggatctatacagatgagctggagttcagagaggatgatgtgttcctgactgaactgatgaaactagcaaatcggtttcagctacagctcctcagggagagatgtgagaagggtgttatgtctctagtgaatgtcaggaactgtattcgcttctaccagacggcagaggagctgaatgccagcacactgatgaactactgtgcagaaattattgcaagtcattgggacgacctgaggaaggaggatttcagcagcatgagcgctcagttgttatacaaaatgatcaaatccaagacagagtacccgctacataaagccatcaaagtggagagagaagacgtggtcttcctgtatctgattgaaatggattcccagctccctgggaagctgaatgaagcggatcataacggagatctggcattagatctagccctctcacgacgactggagagtattgccaccacgctggttagtcacaaagctgatgtggacatggtggacaagagtggctggagcttgttacacaaaggaatccaaagaggagatctctttgctgccactttcctcattaagaatggggcctttgtcaacgctgctacactgggtgcccaggagacaccactgcaccttgtggccttgtacagttcaaagaaacactcagcagatgtgatgtctgagatggcgcagattgcagaggcccttctgcaggctggtgccaaccccaacatgcaggacagcaaggggaggactcctttacatgtgtccatcatggccgggaatgaatatgtgttcagtcagctgctgcagtgcaaacaactagatttagaactcaaagaccacgagggcagcacggctctgtggctggcagtgcagcatatcacagtgtcttctgaccagtctgtgaaccccttcgaagatgtccccgtggtaaatgggacttcatttgatgagaacagctttgcagccagactcatccagcgcggcagccacacagacgcacctgacacggcgacaggaaactgtttactacagcgggcagctggagcaggaaacgaggcagcagctcttttcctggcaaccaacggtgcccatgtcaaccacagaaacaagtggggagaaaccccgttgcacacagcgtgtcggcatggcctggccaacctcacagcagagctcctgcagcaaggcgccaacccaaacctgcagacggaggaagctctgcctctgccaaaggaggccgcatccctgaccagcttggcggacagcgtccatctgcagacgccactgcacatggcgatcgcctataaccatccggatgtggtgtctgtcatcctggagcagaaagccaatgctcttcatgccaccaacaacttgcagatcattccggacttcagcctcaaagattcccgagaccagactgtgctgggcctggcattatggactggcatgcacacgatcgcagcccagctgctgggctctggagccgccatcaatgacaccatgtcggatgggcagacgctactgcacatggccatacagcggcaggacagcaagagcgcactcttcctgctggagcaccaggcagatataaatgtcaggactcaggacggggagacagccctccagctggccatcagaaaccagcttccactcgtagttgatgccatatgcacccgaggagctgacatgtctgtgccagatgagaaggggaaccccccgctgtggcttgcattggcaaacaatctggaggacatcgcatccactctggtcagacatggctgtgatgccacatgctggggtccgggacctggtgggtgccttcagacgctcctgcacagagccattgatgaaaacaacgagcccaccgcctgctttcttattcgcagtggctgtgacgtgaacagtcccagacaaccaggcgccaatggagaaggagaggaagaggctagagatgggcagacccctttgcatttggcagcctcttgggggctggaagagacagtacagtgtcttctggagtttggtgccaacgtgaacgcacaggatgcagaaggaagaacccccatccacgtggccatcagcagccaacacggtgtcatcattcagctgttggtttctcaccccgatatccatttgaatgtacgagacagacaagggctgaccccgtttgcctgtgccatgactttcaagaacaacaagtcagccgaggccattctcaaacgagagtccggggctgctgagcaggtggataacaagggccggaatttccttcatgtggcagttcagaactctgatattgaaagtgtgctgttcctgatcagtgtccacgctaatgtgaattcaagagtccaggatgcctccaagttgacccccctgcacctcgctgtccaagcaggctcagaaattattgtccgcaatttgcttcttgcgggagccaaagtgaacgaattaaccaagcatcgccagactgccctccatcttgctgcccagcaggacctgcccaccatctgctcagtcctcctagagaatggcgtggactttgctgccgtggatgagaatggaaacaatgctcttcatcttgctgtcatgcacggccggctcaacaacatccgggttctcctgacagagtgcacagtggacgccgaagcctttaatctcagaggccagtcaccactgcacattttgggacaatatggcaaggagaatgcagcggccatctttgatctcttcctagaatgcatgccggggtatcctctggacaagccggatgcagacggcagcacggtgctgctcctggcatacatgaaagggaacgccaacttgtgccgcgccatcgtccggtcgggggctcgcctcggggtgaataacaaccagggagtcaacatcttcaactaccaggtcgccaccaagcagctcctgttccgactgctggatatgctgtccaaggagcctccgtggtgtgacggctcctactgctatgagtgcactgccaggttcggagtcaccactcgcaaacaccactgtcgtcactgcggacgtcttctttgccataaatgctcgaccaaggagattcctattataaagtttgatctgaacaagcctgtgcgggtttgcaacatttgttttgatgtactgactctgggtggggtttcttagtgagccccccggagggtccaggccacgtccttggtcacctccccagcagctgctctgctcaccagcctgaccccacccagagcaggagctggcgggtgtcttcctgcggcaatagactggaacgattaaggaccatggtgtgatagatcccatttcaaatgattccatatgattgtcagtgtgtgtgtcagactgtgatcgatttcactagatgtctcactcatcagaccaggccattgggcctaagtggtaaatgtgattaggaattagacctctccccattctgctagcaacatacagggacacttggaaaaccatttccccttccagtagcttggtgtccatcccagagcattcatgaagtcttcccgcctgggctgactgatgaggcagagcctctcagcgtaggaagctggctgcttaatgagctggctttactctagggtaagtggctgtggacttttctgcacagtgttttcataaagataataggatcctcttgccctgaagtctttttttctttttacgctaagctgtatttttagtgagctaccccttttaaaaaggtgaaatctttcttaacagggttcaaagatgagagctgaaaaatcgtggccttaacaactgaaagctttacagtgttcatgctactgaggtgtcaggagtgcagctgggccgcttgacacctcgtagcagccgtctcattctctcgtcttgctgcgtcctgtctgtggagtcctcagtcactctgctgttggagagtgctggaggaaatgcacttttactgtgctgcactttttatagagctgcattgtcggtgattccaatttaaaaatccatattcaaaaataccctcacacatccctgcatcagtgattctaatgatcagctttgactggacctcagctcacacgaatctccaaggaaaaactctacagagcatcttttagagcaagagattcatacaggccaagtgatgagagggggagtcaccaaggcttcagccccaagggcatctccagcctcaggccggcaggtcctatgtccttgacacaaacgcttcttgctgaaatcctccctagtgatgctgcgagtgctgttggtcccagttctgtgtagcttgccctgccccatgaagggccaccagccaagggccctggccacgtgtgcgccaccttactttggaagtctctggcttgtgtgctggatgaggctgccagaacttgttgggcgttcatcgctgttagtacatatattaaccgtgaggtgttaaacttttcttttgaaggtttggccagtttctaaaaaatgcacatttaaagagaagcatctaccacggctttaaaacaaaacaactctgagatgaacaatatgtgttatactcagagattaacaatctcaatcatacatactgattctttcagacatttaataaccactacatttttttgcattaatgaagtttgactatatgtgtaaagggactaaatatttttgcaacagcctgttctttgttcattcttttctggatagtgtgtcctctgtattgcggtagatttatacattctgttgcctaaatatgtgtgtaaaatgagctgataaactggagtactacttaaaaaaaagtctgtgatttataagatgtatatgctttctatgtgaatataagcttgtgcacaatgtttaaaagaaaaacaatgaattagaagagatcccccgtcccccagtctgacatatttcatacagaatgtttaaaagaaaaactctgctagtcttggcaaacatttggccatgtgaggcatgtggtcagtttccattttctattacctggaaagggccataaggaagcaggcagggcttaggtagcttggttacctaagttagaaagtaagagaatcatggttcggatatgaattgaagtggttggtacatggatacctgttctttaaaaggaatgtgggagatgagtcaagggtgaggccgattgttctgcccatgccctaccataccaatttcaataacaatcttgcctgtcattgcactcagaatcttaagatcatgtttcaaatatgttgattcaaacttgcttctaagcctgagtccagggatagcaatggtactgaccagctatggactgggagaacattgagtcctgttttccattggcttcagggcgcatccatgtggatataggaaaagcctctttccacagacttaggaagccccccgaccacgcggacgctcgctgggctgcactcagcaggctgcttgagtgggagctgactccaacatgccctgccctggctgggactaggcatgcttccagcccttcccgtgctctccctgctgtcaacacttgcgtacaaacctgcctagctgttgtaagttttcatcagtagcttaagtactagtagcaaaaacttaaattcattcagaaagttgccacttctgaatgagtagagcaggaaaagtaaactttactgaaacataatttgctgcaacagtcaacattgttatgctgaatgtgctctcaactgccctttgctcatcgccagatttattatccagtgtattcctaacagtcttttgttgtcgttgtttttaaaacaaaggtacggaccatgtgctatatataaatcgaatggcttaaactaatttgctatgatcctctaacaccgaaatttcccataaacttaagtgcctacacttaggacttttgaactttcagtcatctttttcgtggtgtctcactgaacgatgtgttagaacatgtgttccatttggagttttgggcctgtgcacggtcaaccccaattaccaatttagttgaggctggattcgattgctcagttcacctgccacgttctctccaaggagtggggtctacgtgacctttagtcctctacctcagagccccgagtcatttctgaccaccccgttctgtgtcctcactcttgtccctgaatgggtccctgtgtggatctcagtgtgtgtgtggtttctccactcctccccgctcatgtcccacacctgccatattgaaccgtttctgcactaatcttctccacgggcacggagtggagggaacgtcttgggaaaggggagagcttgacctccatctaggtttcttttatctggagaaaaagaacacttttgaactatgtaatgcttcgccctgaaaggcaagctaacgctaacttcccaggtgacagtagcaggaacaaggaagggtaatgtttccatgacagacacttgcttcccttgggacaagtcccagaagaactacctgaagcaccaaagctccccaccccagcctggtggcagaggaagcaggtggcaccaactcaccaaagggacttgggagccaccttctcactctgtggaagtactttagtgagagctgactggcaagataaaaaccctgaaattcccagaagttacagatgccttaaagactttctttggaagatcattgcctgtactattccttttttgtgtggcataaataatatattaacctgttacaactgacaacattgtgtggagttggctgttacgacatccctgtgtgatcccagaggaggggcagtagctgggcagaaactgcaggcacacatttgggtggatcacctggcttccagccccttcggggtggtgctcagtgtggggtgatggtatcatagaggaccacggcgcttatcagcattgtttctttggagtctgtgtaatggaatgtatttttcaaatactgatatttgcattttctgtaacaattccttataataaaatgaagtaaaattgtgcatttaaagtggaaactttaataagacatttgtagttacttctaatgcagaagtaccaataagcattaaaaacaaattttaga

SEQ ID NO: 372588 - DNA, 6248 bp, Homo sapiens
agtgccgggccagacatggcggaagaggaggtggccaagttggagaagcacttgatgcttctgcggcaggagtatgtcaagctgcagaagaagctggcggagacagagaagcgctgcgctctcttggctgcgcaggcaaacaaggagagcagcagcgagtccttcatcagccgtctgctggccatcgtggcagacctctacgagcaggagcagtacagcgatctgaagataaaggttggggacaggcacatcagtgctcacaagtttgtcctggcagcccgcagtgacagctggagtctggctaacttgtcttccactaaagagttggacctgtcagatgctaatcctgaggtgacgatgacaatgcttcgctggatctatacagatgagctggagttcagagaggatgatgtgttcctgactgaactgatgaaactagcaaatcggtttcagctacagctcctcagggagagatgtgagaagggtgttatgtctctagtgaatgtcaggaactgtattcgcttctaccagacggcagaggagctgaatgccagcacactgatgaactactgtgcagaaattattgcaagtcattgggacgacctgaggaaggaggatttcagcagcatgagcgctcagttgttatacaaaatgatcaaatccaagacagagtacccgctacataaagccatcaaagtggagagagaagacgtggtcttcctgtatctgattgaaatggattcccagctccctgggaagctgaatgaagcggatcataacggagatctggcattagatctagccctctcacgacgactggagagtattgccaccacgctggttagtcacaaagctgatgtggacatggtggacaagagtggctggagcttgttacacaaaggaatccaaagaggagatctctttgctgccactttcctcattaagaatggggcctttgtcaacgctgctacactgggtgcccaggagacaccactgcaccttgtggccttgtacagttcaaagaaacactcagcagatgtgatgtctgagatggcgcagattgcagaggcccttctgcaggctggtgccaaccccaacatgcaggacagcaaggggaggactcctttacatgtgtccatcatggccgggaatgaatatgtgttcagtcagctgctgcagtgcaaacaactagatttagaactcaaagaccacgagggcagcacggctctgtggctggcagtgcagcatatcacagtgtcttctgaccagtctgtgaaccccttcgaagatgtccccgtggtaaatgggacttcatttgatgagaacagctttgcagccagactcatccagcgcggcagccacacagacgcacctgacacggcgacaggaaactgtttactacagcgggcagctggagcaggaaacgaggcagcagctcttttcctggcaaccaacggtgcccatgtcaaccacagaaacaagtggggagaaaccccgttgcacacagcgtgtcggcatggcctggccaacctcacagcagagctcctgcagcaaggcgccaacccaaacctgcagacggaggaagctctgcctctgccaaaggaggccgcatccctgaccagcttggcggacagcgtccatctgcagacgccactgcacatggcgatcgcctataaccatccggatgtggtgtctgtcatcctggagcagaaagccaatgctcttcatgccaccaacaacttgcagatcattccggacttcagcctcaaagattcccgagaccagactgtgctgggcctggcattatggactggcatgcacacgatcgcagcccagctgctgggctctggagccgccatcaatgacaccatgtcggatgggcagacgctactgcacatggccatacagcggcaggacagcaagagcgcactcttcctgctggagcaccaggcagatataaatgtcaggactcaggacggggagacagccctccagctggccatcagaaaccagcttccactcgtagttgatgccatatgcacccgaggagctgacatgtctgtgccagatgagaaggggaaccccccgctgtggcttgcattggcaaacaatctggaggacatcgcatccactctggtcagacatggctgtgatgccacatgctggggtccgggacctggtgggtgccttcagacgctcctgcacagagccattgatgaaaacaacgagcccaccgcctgctttcttattcgcagtggctgtgacgtgaacagtcccagacaaccaggcgccaatggagaaggagaggaagaggctagagatgggcagacccctttgcatttggcagcctcttgggggctggaagagacagtacagtgtcttctggagtttggtgccaacgtgaacgcacaggatgcagaaggaagaacccccatccacgtggccatcagcagccaacacggtgtcatcattcagctgttggtttctcaccccgatatccatttgaatgtacgagacagacaagggctgaccccgtttgcctgtgccatgactttcaagaacaacaagtcagccgaggccattctcaaacgagagtccggggctgctgagcaggtggataacaagggccggaatttccttcatgtggcagttcagaactctgatattgaaagtgtgctgttcctgatcagtgtccacgctaatgtgaattcaagagtccaggatgcctccaagttgacccccctgcacctcgctgtccaagcaggctcagaaattattgtccgcaatttgcttcttgcgggagccaaagtgaacgaattaaccaagcatcgccagactgccctccatcttgctgcccagcaggacctgcccaccatctgctcagtcctcctagagaatggcgtggactttgctgccgtggatgagaatggaaacaatgctcttcatcttgctgtcatgcacggccggctcaacaacatccgggttctcctgacagagtgcacagtggacgccgaagcctttaatctcagaggccagtcaccactgcacattttgggacaatatggcaaggagaatgcagcggccatctttgatctcttcctagaatgcatgccggggtatcctctggacaagccggatgcagacggcagcacggtgctgctcctggcatacatgaaagggaacgccaacttgtgccgcgccatcgtccggtcgggggctcgcctcggggtgaataacaaccagggagtcaacatcttcaactaccaggtcgccaccaagcagctcctgttccgactgctggatatgctgtccaaggagcctccgtggtgtgacggctcctactgctatgagtgcactgccaggttcggagtcaccactcgcaaacaccactgtcgtcactgcggacgtcttctttgccataaatgctcgaccaaggagattcctattataaagtttgatctgaacaagcctgtgcgggtttgcaacatttgttttgatgtactgactctgggtggggtttcttagtgagccccccggagggtccaggccacgtccttggtcacctccccagcagctgctctgctcaccagcctgaccccacccagagcaggagctggcgggtgtcttcctgcggcaatagactggaacgattaaggaccatggtgtgatagatcccatttcaaatgattccatatgattgtcagtgtgtgtgtcagactgtgatcgatttcactagatgtctcactcatcagaccaggccattgggcctaagtggtaaatgtgattaggaattagacctctccccattctgctagcaacatacagggacacttggaaaaccatttccccttccagtagcttggtgtccatcccagagcattcatgaagtcttcccgcctgggctgactgatgaggcagagcctctcagcgtaggaagctggctgcttaatgagctggctttactctagggtaagtggctgtggacttttctgcacagtgttttcataaagataataggatcctcttgccctgaagtctttttttctttttacgctaagctgtatttttagtgagctaccccttttaaaaaggtgaaatctttcttaacagggttcaaagatgagagctgaaaaatcgtggccttaacaactgaaagctttacagtgttcatgctactgaggtgtcaggagtgcagctgggccgcttgacacctcgtagcagccgtctcattctctcgtcttgctgcgtcctgtctgtggagtcctcagtcactctgctgttggagagtgctggaggaaatgcacttttactgtgctgcactttttatagagctgcattgtcggtgattccaatttaaaaatccatattcaaaaataccctcacacatccctgcatcagtgattctaatgatcagctttgactggacctcagctcacacgaatctccaaggaaaaactctacagagcatcttttagagcaagagattcatacaggccaagtgatgagagggggagtcaccaaggcttcagccccaagggcatctccagcctcaggccggcaggtcctatgtccttgacacaaacgcttcttgctgaaatcctccctagtgatgctgcgagtgctgttggtcccagttctgtgtagcttgccctgccccatgaagggccaccagccaagggccctggccacgtgtgcgccaccttactttggaagtctctggcttgtgtgctggatgaggctgccagaacttgttgggcgttcatcgctgttagtacatatattaaccgtgaggtgttaaacttttcttttgaaggtttggccagtttctaaaaaatgcacatttaaagagaagcatctaccacggctttaaaacaaaacaactctgagatgaacaatatgtgttatactcagagattaacaatctcaatcatacatactgattctttcagacatttaataaccactacatttttttgcattaatgaagtttgactatatgtgtaaagggactaaatatttttgcaacagcctgttctttgttcattcttttctggatagtgtgtcctctgtattgcggtagatttatacattctgttgcctaaatatgtgtgtaaaatgagctgataaactggagtactacttaaaaaaaagtctgtgatttataagatgtatatgctttctatgtgaatataagcttgtgcacaatgtttaaaagaaaaacaatgaattagaagagatcccccgtcccccagtctgacatatttcatacagaatgtttaaaagaaaaactctgctagtcttggcaaacatttggccatgtgaggcatgtggtcagtttccattttctattacctggaaagggccataaggaagcaggcagggcttaggtagcttggttacctaagttagaaagtaagagaatcatggttcggatatgaattgaagtggttggtacatggatacctgttctttaaaaggaatgtgggagatgagtcaagggtgaggccgattgttctgcccatgccctaccataccaatttcaataacaatcttgcctgtcattgcactcagaatcttaagatcatgtttcaaatatgttgattcaaacttgcttctaagcctgagtccagggatagcaatggtactgaccagctatggactgggagaacattgagtcctgttttccattggcttcagggcgcatccatgtggatataggaaaagcctctttccacagacttaggaagccccccgaccacgcggacgctcgctgggctgcactcagcaggctgcttgagtgggagctgactccaacatgccctgccctggctgggactaggcatgcttccagcccttcccgtgctctccctgctgtcaacacttgcgtacaaacctgcctagctgttgtaagttttcatcagtagcttaagtactagtagcaaaaacttaaattcattcagaaagttgccacttctgaatgagtagagcaggaaaagtaaactttactgaaacataatttgtcagtgtggggtgatggtatcatagaggaccacggcgcttatcagcattgtttctttggagtctgtgtaatggaatgtatttttcaaatactgatatttgcattttctgtaacaattccttataataaaatgaagtaaaattgtgcatttaaagtggaaactttaataagacatttgtagttacttctaatgcagaagtaccaataagcattaaaaacaaattttaga

SEQ ID NO: 372589 - DNA, 6159 bp, Homo sapiens
gattagagcaaccatcaactaggcgtctccagattaaccatcaactaggagtctccagattagagcagccatcaactaggagtctccagtatagagcaaccatcaactaggagtcggattcctgtctctgagggataaggaaaaacatggaaactgtttactacagcgggcagctggagcaggaaacgaggcagcagctcttttcctggcaaccaacggtgcccatgtcaaccacagaaacaagtggggagaaaccccgttgcacacagcgtgtcggcatggcctggccaacctcacagcagagctcctgcagcaaggcgccaacccaaacctgcagacggaggaagctctgcctctgccaaaggaggccgcatccctgaccagcttggcggacagcgtccatctgcagacgccactgcacatggcgatcgcctataaccatccggatgtggtgtctgtcatcctggagcagaaagccaatgctcttcatgccaccaacaacttgcagatcattccggacttcagcctcaaagattcccgagaccagactgtgctgggcctggcattatggactggcatgcacacgatcgcagcccagctgctgggctctggagccgccatcaatgacaccatgtcggatgggcagacgctactgcacatggccatacagcggcaggacagcaagagcgcactcttcctgctggagcaccaggcagatataaatgtcaggactcaggacggggagacagccctccagctggccatcagaaaccagcttccactcgtagttgatgccatatgcacccgaggagctgacatgtctgtgccagatgagaaggggaaccccccgctgtggcttgcattggcaaacaatctggaggacatcgcatccactctggtcagacatggctgtgatgccacatgctggggtccgggacctggtgggtgccttcagacgctcctgcacagagccattgatgaaaacaacgagcccaccgcctgctttcttattcgcagtggctgtgacgtgaacagtcccagacaaccaggcgccaatggagaaggagaggaagaggctagagatgggcagacccctttgcatttggcagcctcttgggggctggaagagacagtacagtgtcttctggagtttggtgccaacgtgaacgcacaggatgcagaaggaagaacccccatccacgtggccatcagcagccaacacggtgtcatcattcagctgttggtttctcaccccgatatccatttgaatgtacgagacagacaagggctgaccccgtttgcctgtgccatgactttcaagaacaacaagtcagccgaggccattctcaaacgagagtccggggctgctgagcaggtggataacaagggccggaatttccttcatgtggcagttcagaactctgatattgaaagtgtgctgttcctgatcagtgtccacgctaatgtgaattcaagagtccaggatgcctccaagttgacccccctgcacctcgctgtccaagcaggctcagaaattattgtccgcaatttgcttcttgcgggagccaaagtgaacgaattaaccaagcatcgccagactgccctccatcttgctgcccagcaggacctgcccaccatctgctcagtcctcctagagaatggcgtggactttgctgccgtggatgagaatggaaacaatgctcttcatcttgctgtcatgcacggccggctcaacaacatccgggttctcctgacagagtgcacagtggacgccgaagcctttaatctcagaggccagtcaccactgcacattttgggacaatatggcaaggagaatgcagcggccatctttgatctcttcctagaatgcatgccggggtatcctctggacaagccggatgcagacggcagcacggtgctgctcctggcatacatgaaagggaacgccaacttgtgccgcgccatcgtccggtcgggggctcgcctcggggtgaataacaaccagggagtcaacatcttcaactaccaggtcgccaccaagcagctcctgttccgactgctggatatgctgtccaaggagcctccgtggtgtgacggctcctactgctatgagtgcactgccaggttcggagtcaccactcgcaaacaccactgtcgtcactgcggacgtcttctttgccataaatgctcgaccaaggagattcctattataaagtttgatctgaacaagcctgtgcgggtttgcaacatttgttttgatgtactgactctgggtggggtttcttagtgagccccccggagggtccaggccacgtccttggtcacctccccagcagctgctctgctcaccagcctgaccccacccagagcaggagctggcgggtgtcttcctgcggcaatagactggaacgattaaggaccatggtgtgatagatcccatttcaaatgattccatatgattgtcagtgtgtgtgtcagactgtgatcgatttcactagatgtctcactcatcagaccaggccattgggcctaagtggtaaatgtgattaggaattagacctctccccattctgctagcaacatacagggacacttggaaaaccatttccccttccagtagcttggtgtccatcccagagcattcatgaagtcttcccgcctgggctgactgatgaggcagagcctctcagcgtaggaagctggctgcttaatgagctggctttactctagggtaagtggctgtggacttttctgcacagtgttttcataaagataataggatcctcttgccctgaagtctttttttctttttacgctaagctgtatttttagtgagctaccccttttaaaaaggtgaaatctttcttaacagggttcaaagatgagagctgaaaaatcgtggccttaacaactgaaagctttacagtgttcatgctactgaggtgtcaggagtgcagctgggccgcttgacacctcgtagcagccgtctcattctctcgtcttgctgcgtcctgtctgtggagtcctcagtcactctgctgttggagagtgctggaggaaatgcacttttactgtgctgcactttttatagagctgcattgtcggtgattccaatttaaaaatccatattcaaaaataccctcacacatccctgcatcagtgattctaatgatcagctttgactggacctcagctcacacgaatctccaaggaaaaactctacagagcatcttttagagcaagagattcatacaggccaagtgatgagagggggagtcaccaaggcttcagccccaagggcatctccagcctcaggccggcaggtcctatgtccttgacacaaacgcttcttgctgaaatcctccctagtgatgctgcgagtgctgttggtcccagttctgtgtagcttgccctgccccatgaagggccaccagccaagggccctggccacgtgtgcgccaccttactttggaagtctctggcttgtgtgctggatgaggctgccagaacttgttgggcgttcatcgctgttagtacatatattaaccgtgaggtgttaaacttttcttttgaaggtttggccagtttctaaaaaatgcacatttaaagagaagcatctaccacggctttaaaacaaaacaactctgagatgaacaatatgtgttatactcagagattaacaatctcaatcatacatactgattctttcagacatttaataaccactacatttttttgcattaatgaagtttgactatatgtgtaaagggactaaatatttttgcaacagcctgttctttgttcattcttttctggatagtgtgtcctctgtattgcggtagatttatacattctgttgcctaaatatgtgtgtaaaatgagctgataaactggagtactacttaaaaaaaagtctgtgatttataagatgtatatgctttctatgtgaatataagcttgtgcacaatgtttaaaagaaaaacaatgaattagaagagatcccccgtcccccagtctgacatatttcatacagaatgtttaaaagaaaaactctgctagtcttggcaaacatttggccatgtgaggcatgtggtcagtttccattttctattacctggaaagggccataaggaagcaggcagggcttaggtagcttggttacctaagttagaaagtaagagaatcatggttcggatatgaattgaagtggttggtacatggatacctgttctttaaaaggaatgtgggagatgagtcaagggtgaggccgattgttctgcccatgccctaccataccaatttcaataacaatcttgcctgtcattgcactcagaatcttaagatcatgtttcaaatatgttgattcaaacttgcttctaagcctgagtccagggatagcaatggtactgaccagctatggactgggagaacattgagtcctgttttccattggcttcagggcgcatccatgtggatataggaaaagcctctttccacagacttaggaagccccccgaccacgcggacgctcgctgggctgcactcagcaggctgcttgagtgggagctgactccaacatgccctgccctggctgggactaggcatgcttccagcccttcccgtgctctccctgctgtcaacacttgcgtacaaacctgcctagctgttgtaagttttcatcagtagcttaagtactagtagcaaaaacttaaattcattcagaaagttgccacttctgaatgagtagagcaggaaaagtaaactttactgaaacataatttgctgcaacagtcaacattgttatgctgaatgtgctctcaactgccctttgctcatcgccagatttattatccagtgtattcctaacagtcttttgttgtcgttgtttttaaaacaaaggtacggaccatgtgctatatataaatcgaatggcttaaactaatttgctatgatcctctaacaccgaaatttcccataaacttaagtgcctacacttaggacttttgaactttcagtcatctttttcgtggtgtctcactgaacgatgtgttagaacatgtgttccatttggagttttgggcctgtgcacggtcaaccccaattaccaatttagttgaggctggattcgattgctcagttcacctgccacgttctctccaaggagtggggtctacgtgacctttagtcctctacctcagagccccgagtcatttctgaccaccccgttctgtgtcctcactcttgtccctgaatgggtccctgtgtggatctcagtgtgtgtgtggtttctccactcctccccgctcatgtcccacacctgccatattgaaccgtttctgcactaatcttctccacgggcacggagtggagggaacgtcttgggaaaggggagagcttgacctccatctaggtttcttttatctggagaaaaagaacacttttgaactatgtaatgcttcgccctgaaaggcaagctaacgctaacttcccaggtgacagtagcaggaacaaggaagggtaatgtttccatgacagacacttgcttcccttgggacaagtcccagaagaactacctgaagcaccaaagctccccaccccagcctggtggcagaggaagcaggtggcaccaactcaccaaagggacttgggagccaccttctcactctgtggaagtactttagtgagagctgactggcaagataaaaaccctgaaattcccagaagttacagatgccttaaagactttctttggaagatcattgcctgtactattccttttttgtgtggcataaataatatattaacctgttacaactgacaacattggttttctgcagctagggagtcttgagtcgagactgctcgccttgatgacttgctcttttttggcagatgtgtggagttggctgttacgacatccctgtgtgatcccagaggaggggcagtagctgggcagaaactgcaggcacacatttgggtggatcacctggcttccagccccttcggggtggtgctcagtgtggggtgatggtatcatagaggaccacggcgcttatcagcattgtttctttggagtctgtgtaatggaatgtatttttcaaatactgatatttgcattttctgtaacaattccttataataaaatgaagtaaaattgtg

SEQ ID NO: 372590 - DNA, 4113 bp, Homo sapiens
cattgcgggcgccttggctgccaggccctgctgcggttgtcctcacgtgccaggaagcagagtctgtcgttggcgctcctctcatacttcctttctttgcttccacagtcgtcactgcggacgtcttctttgccataaatgctcgaccaaggagattcctattataaagtttgatctgaacaagcctgtgcgggtttgcaacatttgttttgatgtactgactctgggtggggtttcttagtgagccccccggagggtccaggccacgtccttggtcacctccccagcagctgctctgctcaccagcctgaccccacccagagcaggagctggcgggtgtcttcctgcggcaatagactggaacgattaaggaccatggtgtgatagatcccatttcaaatgattccatatgattgtcagtgtgtgtgtcagactgtgatcgatttcactagatgtctcactcatcagaccaggccattgggcctaagtggtaaatgtgattaggaattagacctctccccattctgctagcaacatacagggacacttggaaaaccatttccccttccagtagcttggtgtccatcccagagcattcatgaagtcttcccgcctgggctgactgatgaggcagagcctctcagcgtaggaagctggctgcttaatgagctggctttactctagggtaagtggctgtggacttttctgcacagtgttttcataaagataataggatcctcttgccctgaagtctttttttctttttacgctaagctgtatttttagtgagctaccccttttaaaaaggtgaaatctttcttaacagggttcaaagatgagagctgaaaaatcgtggccttaacaactgaaagctttacagtgttcatgctactgaggtgtcaggagtgcagctgggccgcttgacacctcgtagcagccgtctcattctctcgtcttgctgcgtcctgtctgtggagtcctcagtcactctgctgttggagagtgctggaggaaatgcacttttactgtgctgcactttttatagagctgcattgtcggtgattccaatttaaaaatccatattcaaaaataccctcacacatccctgcatcagtgattctaatgatcagctttgactggacctcagctcacacgaatctccaaggaaaaactctacagagcatcttttagagcaagagattcatacaggccaagtgatgagagggggagtcaccaaggcttcagccccaagggcatctccagcctcaggccggcaggtcctatgtccttgacacaaacgcttcttgctgaaatcctccctagtgatgctgcgagtgctgttggtcccagttctgtgtagcttgccctgccccatgaagggccaccagccaagggccctggccacgtgtgcgccaccttactttggaagtctctggcttgtgtgctggatgaggctgccagaacttgttgggcgttcatcgctgttagtacatatattaaccgtgaggtgttaaacttttcttttgaaggtttggccagtttctaaaaaatgcacatttaaagagaagcatctaccacggctttaaaacaaaacaactctgagatgaacaatatgtgttatactcagagattaacaatctcaatcatacatactgattctttcagacatttaataaccactacatttttttgcattaatgaagtttgactatatgtgtaaagggactaaatatttttgcaacagcctgttctttgttcattcttttctggatagtgtgtcctctgtattgcggtagatttatacattctgttgcctaaatatgtgtgtaaaatgagctgataaactggagtactacttaaaaaaaagtctgtgatttataagatgtatatgctttctatgtgaatataagcttgtgcacaatgtttaaaagaaaaacaatgaattagaagagatcccccgtcccccagtctgacatatttcatacagaatgtttaaaagaaaaactctgctagtcttggcaaacatttggccatgtgaggcatgtggtcagtttccattttctattacctggaaagggccataaggaagcaggcagggcttaggtagcttggttacctaagttagaaagtaagagaatcatggttcggatatgaattgaagtggttggtacatggatacctgttctttaaaaggaatgtgggagatgagtcaagggtgaggccgattgttctgcccatgccctaccataccaatttcaataacaatcttgcctgtcattgcactcagaatcttaagatcatgtttcaaatatgttgattcaaacttgcttctaagcctgagtccagggatagcaatggtactgaccagctatggactgggagaacattgagtcctgttttccattggcttcagggcgcatccatgtggatataggaaaagcctctttccacagacttaggaagccccccgaccacgcggacgctcgctgggctgcactcagcaggctgcttgagtgggagctgactccaacatgccctgccctggctgggactaggcatgcttccagcccttcccgtgctctccctgctgtcaacacttgcgtacaaacctgcctagctgttgtaagttttcatcagtagcttaagtactagtagcaaaaacttaaattcattcagaaagttgccacttctgaatgagtagagcaggaaaagtaaactttactgaaacataatttgctgcaacagtcaacattgttatgctgaatgtgctctcaactgccctttgctcatcgccagatttattatccagtgtattcctaacagtcttttgttgtcgttgtttttaaaacaaaggtacggaccatgtgctatatataaatcgaatggcttaaactaatttgctatgatcctctaacaccgaaatttcccataaacttaagtgcctacacttaggacttttgaactttcagtcatctttttcgtggtgtctcactgaacgatgtgttagaacatgtgttccatttggagttttgggcctgtgcacggtcaaccccaattaccaatttagttgaggctggattcgattgctcagttcacctgccacgttctctccaaggagtggggtctacgtgacctttagtcctctacctcagagccccgagtcatttctgaccaccccgttctgtgtcctcactcttgtccctgaatgggtccctgtgtggatctcagtgtgtgtgtggtttctccactcctccccgctcatgtcccacacctgccatattgaaccgtttctgcactaatcttctccacgggcacggagtggagggaacgtcttgggaaaggggagagcttgacctccatctaggtttcttttatctggagaaaaagaacacttttgaactatgtaatgcttcgccctgaaaggcaagctaacgctaacttcccaggtgacagtagcaggaacaaggaagggtaatgtttccatgacagacacttgcttcccttgggacaagtcccagaagaactacctgaagcaccaaagctccccaccccagcctggtggcagaggaagcaggtggcaccaactcaccaaagggacttgggagccaccttctcactctgtggaagtactttagtgagagctgactggcaagataaaaaccctgaaattcccagaagttacagatgccttaaagactttctttggaagatcattgcctgtactattccttttttgtgtggcataaataatatattaacctgttacaactgacaacattggttttctgcagctagggagtcttgagtcgagactgctcgccttgatgacttgctcttttttggcagatgtgtggagttggctgttacgacatccctgtgtgatcccagaggaggggcagtagctgggcagaaactgcaggcacacatttgggtggatcacctggcttccagccccttcggggtggtgctcagtgtggggtgatggtatcatagaggaccacggcgcttatcagcattgtttctttggagtctgtgtaatggaatgtatttttcaaatactgatatttgcattttctgtaacaattccttataataaaatgaagtaaaattgtg

SEQ ID NO: 372591 - DNA, 3829 bp, Homo sapiens
agtgccgggccagacatggcggaagaggaggtggccaagttggagaagcacttgatgcttctgcggcaggagtatgtcaagctgcagaagaagctggcggagacagagaagcgctgcgctctcttggctgcgcaggcaaacaaggagagcagcagcgagtccttcatcagccgtctgctggccatcgtggcagacctctacgagcaggagcagtacagcgatctgaagataaaggttggggacaggcacatcagtgctcacaagtttgtcctggcagcccgcagtgacagctggagtctggctaacttgtcttccactaaagagttggacctgtcagatgctaatcctgaggtgacgatgacaatgcttcgctggatctatacagatgagctggagttcagagaggatgatgtgttcctgactgaactgatgaaactagcaaatcggtttcagctacagctcctcagggagagatgtgagaagggtgttatgtctctagtgaatgtcaggaactgtattcgcttctaccagacggcagaggagctgaatgccagcacactgatgaactactgtgcagaaattattgcaagtcattgggacgacctgaggaaggaggatttcagcagcatgagcgctcagttgttatacaaaatgatcaaatccaagacagagtacccgctacataaagccatcaaagtggagagagaagacgtggtcttcctgtatctgattgaaatggattcccagctccctgggaagctgaatgaagcggatcataacggagatctggcattagatctagccctctcacgacgactggagagtattgccaccacgctggttagtcacaaagctgatgtggacatggtggacaagagtggctggagcttgttacacaaaggaatccaaagaggagatctctttgctgccactttcctcattaagaatggggcctttgtcaacgctgctacactgggtgcccaggagacaccactgcaccttgtggccttgtacagttcaaagaaacactcagcagatgtgatgtctgagatggcgcagattgcagaggcccttctgcaggctggtgccaaccccaacatgcaggacagcaaggggaggactcctttacatgtgtccatcatggccgggaatgaatatgtgttcagtcagctgctgcagtgcaaacaactagatttagaactcaaagaccacgagggcagcacggctctgtggctggcagtgcagcatatcacagtgtcttctgaccagtctgtgaaccccttcgaagatgtccccgtggtaaatgggacttcatttgatgagaacagctttgcagccagactcatccagcgcggcagccacacagacgcacctgacacggcgacaggaaactgtttactacagcgggcagctggagcaggaaacgaggcagcagctcttttcctggcaaccaacggtgcccatgtcaaccacagaaacaagtggggagaaaccccgttgcacacagcgtgtcggcatggcctggccaacctcacagcagagctcctgcagcaaggcgccaacccaaacctgcagacggaggaagctctgcctctgccaaaggaggccgcatccctgaccagcttggcggacagcgtccatctgcagacgccactgcacatggcgatcgcctataaccatccggatgtggtgtctgtcatcctggagcagaaagccaatgctcttcatgccaccaacaacttgcagatcattccggacttcagcctcaaagattcccgagaccagactgtgctgggcctggcattatggactggcatgcacacgatcgcagcccagctgctgggctctggagccgccatcaatgacaccatgtcggatgggcagacgctactgcacatggccatacagcggcaggacagcaagagcgcactcttcctgctggagcaccaggcagatataaatgtcaggactcaggacggggagacagccctccagctggccatcagaaaccagcttccactcgtagttgatgccatatgcacccgaggagctgacatgtctgtgccagatgagaaggggaaccccccgctgtggcttgcattggcaaacaatctggaggacatcgcatccactctggtcagacatggctgtgatgccacatgctggggtccgggacctggtgggtgccttcagacgctcctgcacagagccattgatgaaaacaacgagcccaccgcctgctttcttattcgcagtggctgtgacgtgaacagtcccagacaaccaggcgccaatggagaaggagaggaagaggctagagatgggcagacccctttgcatttggcagcctcttgggggctggaagagacagtacagtgtcttctggagtttggtgccaacgtgaacgcacaggatgcagaaggaagaacccccatccacgtggccatcagcagccaacacggtgtcatcattcagctgttggtttctcaccccgatatccatttgaatgtacgagacagacaagggctgaccccgtttgcctgtgccatgactttcaagaacaacaagtcagccgaggccattctcaaacgagagtccggggctgctgagcaggtggataacaagggccggaatttccttcatgtggcagttcagaactctgatattgaaagtgtgctgttcctgatcagtgtccacgctaatgtgaattcaagagtccaggatgcctccaagttgacccccctgcacctcgctgtccaagcaggctcagaaattattgtccgcaatttgcttcttgcgggagccaaagtgaacgaattaaccaagcatcgccagactgccctccatcttgctgcccagcaggacctgcccaccatctgctcagtcctcctagagaatggcgtggactttgctgccgtggatgagaatggaaacaatgctcttcatcttgctgtcatgcacggccggctcaacaacatccgggttctcctgacagagtgcacagtggacgccgaagcctttaatctcagaggccagtcaccactgcacattttgggacaatatggcaaggagaatgcagcggccatctttgatctcttcctagaatgcatgccggggtatcctctggacaagccggatgcagacggcagcacggtgctgctcctggcatacatgaaagggaacgccaacttgtgccgcgccatcgtccggtcgggggctcgcctcggggtgaataacaaccagggagtcaacatcttcaactaccaggtcgccaccaagcagctcctgttccgactgctggatatgctgtccaaggagcctccgtggtgtgacggctcctactgctatgagtgcactgccaggttcggagtcaccactcgcaaacaccactgtggtaagaccccagcgtcactggcaaggagcgaggggactgccgctgatgtcattgcttccccccttctccaggacaggccgtgaacttgcctgggtcctgcacattgatgggcaaaccttgaccaaatggagggatgagatgagcacacccaaggatcctactgaggaacagagatgtagggaaggcagggagcctgcagacgggtggctttcctgctggaggctgaaggtgcacagtttccaggcagcctgccaggcctgtgccatccttcctgacttcctgcctgcaccaaagctgagatgagctactgccctcatggtgtgcctcagtatgggccgctttgccgagaactaaggggctgttcccattaaaatgagattacaggcgtgagccaccatgcctggcctgagctgctcttgatcttccaaaaaaaaa

SEQ ID NO: 372592 - DNA, 419 bp, Homo sapiens
gcggcaggacagcaagagcgcactcttcctgctggagcaccaggcagatataaatgtcaggtaggaggaagccgctctctccacctaacaccaggtaacaattaattgagatgtcaaaagcatagcctcgcttgtagaaaagtgtttttgtttcatattagttagaggaaaggaaacagtagctctagaaacacacaactgcggtgtcatcactgaatatcatcaaaagacttgattgtaatggcggaaaggaactgtcctttgctcttgtttgaacctttcaggaccagtgcatagtattgcacaagtctcattgtaaaaaacaatctaaaatccaggttttttttcctttgaggcaggatcttactcttttgcctaggctggagtgcagtggcacaatctcggctcactgcggcctc

SEQ ID NO: 372593 - DNA, 3432 bp, Homo sapiens
agtgccgggccagacatggcggaagaggaggtggccaagttggagaagcacttgatgcttctgcggcaggagtatgtcaagctgcagaagaagctggcggagacagagaagcgctgcgctctcttggctgcgcaggcaaacaaggagagcagcagcgagtccttcatcagccgtctgctggccatcgtggcagacctctacgagcaggagcagtacagcgatctgaagataaaggttggggacaggcacatcagtgctcacaagtttgtcctggcagcccgcagtgacagctggagtctggctaacttgtcttccactaaagagttggacctgtcagatgctaatcctgaggtgacgatgacaatgcttcgctggatctatacagatgagctggagttcagagaggatgatgtgttcctgactgaactgatgaaactagcaaatcggtttcagctacagctcctcagggagagatgtgagaagggtgttatgtctctagtgaatgtcaggaactgtattcgcttctaccagacggcagaggagctgaatgccagcacactgatgaactactgtgcagaaattattgcaagtcattgggacgacctgaggaaggaggatttcagcagcatgagcgctcagttgttatacaaaatgatcaaatccaagacagagtacccgctacataaagccatcaaagtggagagagaagacgtggtcttcctgtatctgattgaaatggattcccagctccctgggaagctgaatgaagcggatcataacggagatctggcattagatctagccctctcacgacgactggagagtattgccaccacgctggttagtcacaaagctgatgtggacatggtggacaagagtggctggagcttgttacacaaaggaatccaaagaggagatctctttgctgccactttcctcattaagaatggggcctttgtcaacgctgctacactgggtgcccaggagacaccactgcaccttgtggccttgtacagttcaaagaaacactcagcagatgtgatgtctgagatggcgcagattgcagaggcccttctgcaggctggtgccaaccccaacatgcaggacagcaaggggaggactcctttacatgtgtccatcatggccgggaatgaatatgtgttcagtcagctgctgcagtgcaaacaactagatttagaactcaaagaccacgagggcagcacggctctgtggctggcagtgcagcatatcacagtgtcttctgaccagtctgtgaaccccttcgaagatgtccccgtggtaaatgggacttcatttgatgagaacagctttgcagccagactcatccagcgcggcagccacacagacgcacctgacacggcgacaggaaactgtttactacagcgggcagctggagcaggaaacgaggcagcagctcttttcctggcaaccaacggtgcccatgtcaaccacagaaacaagtggggagaaaccccgttgcacacagcgtgtcggcatggcctggccaacctcacagcagagctcctgcagcaaggcgccaacccaaacctgcagacggaggaagctctgcctctgccaaaggaggccgcatccctgaccagcttggcggacagcgtccatctgcagacgccactgcacatggcgatcgcctataaccatccggatgtggtgtctgtcatcctggagcagaaagccaatgctcttcatgccaccaacaacttgcagatcattccggacttcagcctcaaagattcccgagaccagactgtgctgggcctggcattatggactggcatgcacacgatcgcagcccagctgctgggctctggagccgccatcaatgacaccatgtcggatgggcagacgctactgcacatggccatacagcggcaggacagcaagagcgcactcttcctgctggagcaccaggcagatataaatgtcaggactcaggacggggagacagccctccagctggccatcagaaaccagcttccactcgtagttgatgccatatgcacccgaggagctgacatgtctgtgccagatgagaaggggaaccccccgctgtggcttgcattggcaaacaatctggaggacatcgcatccactctggtcagacatggctgtgatgccacatgctggggtccgggacctggtgggtgccttcagacgctcctgcacagagccattgatgaaaacaacgagcccaccgcctgctttcttattcgcagtggctgtgacgtgaacagtcccagacaaccaggcgccaatggagaaggagaggaagaggctagagatgggcagacccctttgcatttggcagcctcttgggggctggaagagacagtacagtgtcttctggagtttggtgccaacgtgaacgcacaggatgcagaaggaagaacccccatccacgtggccatcagcagccaacacggtgtcatcattcagctgttggtttctcaccccgatatccatttgaatgtacgagacagacaagggctgaccccgtttgcctgtgccatgactttcaagaacaacaagtcagccgaggccattctcaaacgagagtccggggctgctgagcaggtggataacaagggccggaatttccttcatgtggcagttcagaactctgatattgaaagtgtgctgttcctgatcagtgtccacgctaatgtgaattcaagagtccaggatgcctccaagttgacccccctgcacctcgctgtccaagcaggctcagaaattattgtccgcaatttgcttcttgcgggagccaaagtgaacgaattaaccaagcatcgccagactgccctccatcttgctgcccagcaggacctgcccaccatctgctcagtcctcctagagaatggcgtggactttgctgccgtggatgagaatggaaacaatgctcttcatcttgctgtcatgcacggccggctcaacaacatccgggttctcctgacagagtgcacagtggacgccgaagcctttaatctcagaggccagtcaccactgcacattttgggacaatatggcaaggagaatgcagcggccatctttgatctcttcctagaatgcatgccggggtatcctctggacaagccggatgcagacggcagcacggtgctgctcctggcatacatgaaagggaacgccaacttgtgccgcgccatcgtccggtcgggggctcgcctcggggtgaataacaaccagggagtcaacatcttcaactaccaggtcgccaccaagcagctcctgttccgactgctggatatgctgtccaaggagcctccgtggtgtgacggctcctactgctatgagtgcactgccaggttcggagtcaccactcgcaaacaccactgcatgcctggcctgagctgctcttgatcttccaaaaaaaaa

SEQ ID NO: 372594 - DNA, 7397 bp, Homo sapiens
agtgccgggccagacatggcggaagaggaggtggccaagttggagaagcacttgatgcttctgcggcaggagtatgtcaagctgcagaagaagctggcggagacagagaagcgctgcgctctcttggctgcgcaggcaaacaaggagagcagcagcgagtccttcatcagccgtctgctggccatcgtggcagacctctacgagcaggagcagtacagcgatctgaagataaaggttggggacaggcacatcagtgctcacaagtttgtcctggcagcccgcagtgacagctggagtctggctaacttgtcttccactaaagagttggacctgtcagatgctaatcctgaggtgacgatgacaatgcttcgctggatctatacagatgagctggagttcagagaggatgatgtgttcctgactgaactgatgaaactagcaaatcggtttcagctacagctcctcagggagagatgtgagaagggtgttatgtctctagtgaatgtcaggaactgtattcgcttctaccagacggcagaggagctgaatgccagcacactgatgaactactgtgcagaaattattgcaagtcattgggacgacctgaggaaggaggatttcagcagcatgagcgctcagttgttatacaaaatgatcaaatccaagacagagtacccgctacataaagccatcaaagtggagagagaagacgtggtcttcctgtatctgattgaaatggattcccagctccctgggaagctgaatgaagcggatcataacggagatctggcattagatctagccctctcacgacgactggagagtattgccaccacgctggttagtcacaaagctgatgtggacatggtggacaagagtggctggagcttgttacacaaaggaatccaaagaggagatctctttgctgccactttcctcattaagaatggggcctttgtcaacgctgctacactgggtgcccaggagacaccactgcaccttgtggccttgtacagttcaaagaaacactcagcagatgtgatgtctgagatggcgcagattgcagaggcccttctgcaggctggtgccaaccccaacatgcaggacagcaaggggaggactcctttacatgtgtccatcatggccgggaatgaatatgtgttcagtcagctgctgcagtgcaaacaactagatttagaactcaaagaccacgagggcagcacggctctgtggctggcagtgcagcatatcacagtgtcttctgaccagtctgtgaaccccttcgaagatgtccccgtggtaaatgggacttcatttgatgagaacagctttgcagccagactcatccagcgcggcagccacacagacgcacctgacacggcgacaggaaactgtttactacagcgggcagctggagcaggaaacgaggcagcagctcttttcctggcaaccaacggtgcccatgtcaaccacagaaacaagtggggagaaaccccgttgcacacagcgtgtcggcatggcctggccaacctcacagcagagctcctgcagcaaggcgccaacccaaacctgcagacggaggaagctctgcctctgccaaaggaggccgcatccctgaccagcttggcggacagcgtccatctgcagacgccactgcacatggcgatcgcctataaccatccggatgtggtgtctgtcatcctggagcagaaagccaatgctcttcatgccaccaacaacttgcagatcattccggacttcagcctcaaagattcccgagaccagactgtgctgggcctggcattatggactggcatgcacacgatcgcagcccagctgctgggctctggagccgccatcaatgacaccatgtcggatgggcagacgctactgcacatggccatacagcggcaggacagcaagagcgcactcttcctgctggagcaccaggcagatataaatgtcaggactcaggacggggagacagccctccagctggccatcagaaaccagcttccactcgtagttgatgccatatgcacccgaggagctgacatgtctgtgccagatgagaaggggaaccccccgctgtggcttgcattggcaaacaatctggaggacatcgcatccactctggtcagacatggctgtgatgccacatgctggggtccgggacctggtgggtgccttcagacgctcctgcacagagccattgatgaaaacaacgagcccaccgcctgctttcttattcgcagtggctgtgacgtgaacagtcccagacaaccaggcgccaatggagaaggagaggaagaggctagagatgggcagacccctttgcatttggcagcctcttgggggctggaagagacagtacagtgtcttctggagtttggtgccaacgtgaacgcacaggatgcagaaggaagaacccccatccacgtggccatcagcagccaacacggtgtcatcattcagctgttggtttctcaccccgatatccatttgaatgtacgagacagacaagggctgaccccgtttgcctgtgccatgactttcaagaacaacaagtcagccgaggccattctcaaacgagagtccggggctgctgagcaggtggataacaagggccggaatttccttcatgtggcagttcagaactctgatattgaaagtgtgctgttcctgatcagtgtccacgctaatgtgaattcaagagtccaggatgcctccaagttgacccccctgcacctcgctgtccaagcaggctcagaaattattgtccgcaatttgcttcttgcgggagccaaagtgaacgaattaaccaagcatcgccagactgccctccatcttgctgcccagcaggacctgcccaccatctgctcagtcctcctagagaatggcgtggactttgctgccgtggatgagaatggaaacaatgctcttcatcttgctgtcatgcacggccggctcaacaacatccgggttctcctgacagagtgcacagtggacgccgaagcctttaatctcagaggccagtcaccactgcacattttgggacaatatggcaaggagaatgcagcggccatctttgatctcttcctagaatgcatgccggggtatcctctggacaagccggatgcagacggcagcacggtgctgctcctggcatacatgaaagggaacgccaacttgtgccgcgccatcgtccggtcgggggctcgcctcggggtgaataacaaccagggagtcaacatcttcaactaccaggtcgccaccaagcagctcctgttccgactgctggatatgctgtccaaggagcctccgtggtgtgacggctcctactgctatgagtgcactgccaggttcggagtcaccactcgcaaacaccactgtcgtcactgcggacgtcttctttgccataaatgctcgaccaaggagattcctattataaagtttgatctgaacaagcctgtgcgggtttgcaacatttgttttgatgtactgactctgggtggggtttcttagtgagccccccggagggtccaggccacgtccttggtcacctccccagcagctgctctgctcaccagcctgaccccacccagagcaggagctggcgggtgtcttcctgcggcaatagactggaacgattaaggaccatggtgtgatagatcccatttcaaatgattccatatgattgtcagtgtgtgtgtcagactgtgatcgatttcactagatgtctcactcatcagaccaggccattgggcctaagtggtaaatgtgattaggaattagacctctccccattctgctagcaacatacagggacacttggaaaaccatttccccttccagtagcttggtgtccatcccagagcattcatgaagtcttcccgcctgggctgactgatgaggcagagcctctcagcgtaggaagctggctgcttaatgagctggctttactctagggtaagtggctgtggacttttctgcacagtgttttcataaagataataggatcctcttgccctgaagtctttttttctttttacgctaagctgtatttttagtgagctaccccttttaaaaaggtgaaatctttcttaacagggttcaaagatgagagctgaaaaatcgtggccttaacaactgaaagctttacagtgttcatgctactgaggtgtcaggagtgcagctgggccgcttgacacctcgtagcagccgtctcattctctcgtcttgctgcgtcctgtctgtggagtcctcagtcactctgctgttggagagtgctggaggaaatgcacttttactgtgctgcactttttatagagctgcattgtcggtgattccaatttaaaaatccatattcaaaaataccctcacacatccctgcatcagtgattctaatgatcagctttgactggacctcagctcacacgaatctccaaggaaaaactctacagagcatcttttagagcaagagattcatacaggccaagtgatgagagggggagtcaccaaggcttcagccccaagggcatctccagcctcaggccggcaggtcctatgtccttgacacaaacgcttcttgctgaaatcctccctagtgatgctgcgagtgctgttggtcccagttctgtgtagcttgccctgccccatgaagggccaccagccaagggccctggccacgtgtgcgccaccttactttggaagtctctggcttgtgtgctggatgaggctgccagaacttgttgggcgttcatcgctgttagtacatatattaaccgtgaggtgttaaacttttcttttgaaggtttggccagtttctaaaaaatgcacatttaaagagaagcatctaccacggctttaaaacaaaacaactctgagatgaacaatatgtgttatactcagagattaacaatctcaatcatacatactgattctttcagacatttaataaccactacatttttttgcattaatgaagtttgactatatgtgtaaagggactaaatatttttgcaacagcctgttctttgttcattcttttctggatagtgtgtcctctgtattgcggtagatttatacattctgttgcctaaatatgtgtgtaaaatgagctgataaactggagtactacttaaaaaaaagtctgtgatttataagatgtatatgctttctatgtgaatataagcttgtgcacaatgtttaaaagaaaaacaatgaattagaagagatcccccgtcccccagtctgacatatttcatacagaatgtttaaaagaaaaactctgctagtcttggcaaacatttggccatgtgaggcatgtggtcagtttccattttctattacctggaaagggccataaggaagcaggcagggcttaggtagcttggttacctaagttagaaagtaagagaatcatggttcggatatgaattgaagtggttggtacatggatacctgttctttaaaaggaatgtgggagatgagtcaagggtgaggccgattgttctgcccatgccctaccataccaatttcaataacaatcttgcctgtcattgcactcagaatcttaagatcatgtttcaaatatgttgattcaaacttgcttctaagcctgagtccagggatagcaatggtactgaccagctatggactgggagaacattgagtcctgttttccattggcttcagggcgcatccatgtggatataggaaaagcctctttccacagacttaggaagccccccgaccacgcggacgctcgctgggctgcactcagcaggctgcttgagtgggagctgactccaacatgccctgccctggctgggactaggcatgcttccagcccttcccgtgctctccctgctgtcaacacttgcgtacaaacctgcctagctgttgtaagttttcatcagtagcttaagtactagtagcaaaaacttaaattcattcagaaagttgccacttctgaatgagtagagcaggaaaagtaaactttactgaaacataatttgctgcaacagtcaacattgttatgctgaatgtgctctcaactgccctttgctcatcgccagatttattatccagtgtattcctaacagtcttttgttgtcgttgtttttaaaacaaaggtacggaccatgtgctatatataaatcgaatggcttaaactaatttgctatgatcctctaacaccgaaatttcccataaacttaagtgcctacacttaggacttttgaactttcagtcatctttttcgtggtgtctcactgaacgatgtgttagaacatgtgttccatttggagttttgggcctgtgcacggtcaaccccaattaccaatttagttgaggctggattcgattgctcagttcacctgccacgttctctccaaggagtggggtctacgtgacctttagtcctctacctcagagccccgagtcatttctgaccaccccgttctgtgtcctcactcttgtccctgaatgggtccctgtgtggatctcagtgtgtgtgtggtttctccactcctccccgctcatgtcccacacctgccatattgaaccgtttctgcactaatcttctccacgggcacggagtggagggaacgtcttgggaaaggggagagcttgacctccatctaggtttcttttatctggagaaaaagaacacttttgaactatgtaatgcttcgccctgaaaggcaagctaacgctaacttcccaggtgacagtagcaggaacaaggaagggtaatgtttccatgacagacacttgcttcccttgggacaagtcccagaagaactacctgaagcaccaaagctccccaccccagcctggtggcagaggaagcaggtggcaccaactcaccaaagggacttgggagccaccttctcactctgtggaagtactttagtgagagctgactggcaagataaaaaccctgaaattcccagaagttacagatgccttaaagactttctttggaagatcattgcctgtactattccttttttgtgtggcataaataatatattaacctgttacaactgacaacattggttttctgcagctagggagtcttgagtcgagactgctcgccttgatgacttgctcttttttggcagatgtgtggagttggctgttacgacatccctgtgtgatcccagaggaggggcagtagctgggcagaaactgcaggcacacatttgggtggatcacctggcttccagccccttcggggtggtgctcagtgtggggtgatggtatcatagaggaccacggcgcttatcagcattgtttctttggagtctgtgtaatggaatgtatttttcaaatactgatatttgcattttctgtaacaattccttataataaaatgaagtaaaattgtg

SEQ ID NO: 372595 - DNA, 7824 bp, Homo sapiens
agtgccgggccagacatggcggaagaggaggtggccaagttggagaagcacttgatgcttctgcggcaggagtatgtcaagctgcagaagaagctggcggagacagagaagcgctgcgctctcttggctgcgcaggcaaacaaggagagcagcagcgagtccttcatcagccgtctgctggccatcgtggcagacctctacgagcaggagcagtacagcgatctgaagataaaggttggggacaggcacatcagtgctcacaagtttgtcctggcagcccgcagtgacagctggagtctggctaacttgtcttccactaaagagttggacctgtcagatgctaatcctgaggtgacgatgacaatgcttcgctggatctatacagatgagctggagttcagagaggatgatgtgttcctgactgaactgatgaaactagcaaatcggtttcagctacagctcctcagggagagatgtgagaagggtgttatgtctctagtgaatgtcaggaactgtattcgcttctaccagacggcagaggagctgaatgccagcacactgatgaactactgtgcagaaattattgcaagtcattgggacgacctgaggaaggaggatttcagcagcatgagcgctcagttgttatacaaaatgatcaaatccaagacagagtacccgctacataaagccatcaaagtggagagagaagacgtggtcttcctgtatctgattgaaatggattcccagctccctgggaagctgaatgaagcggatcataacggagatctggcattagatctagccctctcacgacgactggagagtattgccaccacgctggttagtcacaaagctgatgtggacatggtggacaagagtggctggagcttgttacacaaaggaatccaaagaggagatctctttgctgccactttcctcattaagaatggggcctttgtcaacgctgctacactgggtgcccaggagacaccactgcaccttgtggccttgtacagttcaaagaaacactcagcagatgtgatgtctgagatggcgcagattgcagaggcccttctgcaggctggtgccaaccccaacatgcaggacagcaaggggaggactcctttacatgtgtccatcatggccgggaatgaatatgtgttcagtcagctgctgcagtgcaaacaactagatttagaactcaaagaccacgagggcagcacggctctgtggctggcagtgcagcatatcacagtgtcttctgaccagtctgtgaaccccttcgaagatgtccccgtggtaaatgggacttcatttgatgagaacagctttgcagccagactcatccagcgcggcagccacacagacgcacctgacacggcgacaggaaactgtttactacagcgggcagctggagcaggaaacgaggcagcagctcttttcctggcaaccaacggtgcccatgtcaaccacagaaacaagtggggagaaaccccgttgcacacagcgtgtcggcatggcctggccaacctcacagcagagctcctgcagcaaggcgccaacccaaacctgcagacggaggaagctctgcctctgccaaaggaggccgcatccctgaccagcttggcggacagcgtccatctgcagacgccactgcacatggcgatcgcctataaccatccggatgtggtgtctgtcatcctggagcagaaagccaatgctcttcatgccaccaacaacttgcagatcattccggacttcagcctcaaagattcccgagaccagactgtgctgggcctggcattatggactggcatgcacacgatcgcagcccagctgctgggctctggagccgccatcaatgacaccatgtcggatgggcagacgctactgcacatggccatacagcggcaggacagcaagagcgcactcttcctgctggagcaccaggcagatataaatgtcaggactcaggacggggagacagccctccagctggccatcagaaaccagcttccactcgtagttgatgccatatgcacccgaggagctgacatgtctgtgccagatgagaaggggaaccccccgctgtggcttgcattggcaaacaatctggaggacatcgcatccactctggtcagacatggctgtgatgccacatgctggggtccgggacctggtgggtgccttcagacgctcctgcacagagccattgatgaaaacaacgagcccaccgcctgctttcttattcgcagtggctgtgacgtgaacagtcccagacaaccaggcgccaatggagaaggagaggaagaggctagagatgggcagacccctttgcatttggcagcctcttgggggctggaagagacagtacagtgtcttctggagtttggtgccaacgtgaacgcacaggatgcagaaggaagaacccccatccacgtggccatcagcagccaacacggtgtcatcattcagctgttggtttctcaccccgatatccatttgaatgtacgagacagacaagggctgaccccgtttgcctgtgccatgactttcaagaacaacaagtcagccgaggccattctcaaacgagagtccggggctgctgagcaggtggataacaagggccggaatttccttcatgtggcagttcagaactctgatattgaaagtgtgctgttcctgatcagtgtccacgctaatgtgaattcaagagtccaggatgcctccaagttgacccccctgcacctcgctgtccaagcaggctcagaaattattgtccgcaatttgcttcttgcgggagccaaagtgaacgaattaaccaagcatcgccagactgccctccatcttgctgcccagcaggacctgcccaccatctgctcagtcctcctagagaatggcgtggactttgctgccgtggatgagaatggaaacaatgctcttcatcttgctgtcatgcacggccggctcaacaacatccgggttctcctgacagagtgcacagtggacgccgaagcctttaatctcagaggccagtcaccactgcacattttgggacaatatggcaaggagaatgcagcggccatctttgatctcttcctagaatgcatgccggggtatcctctggacaagccggatgcagacggcagcacggtgctgctcctggcatacatgaaagggaacgccaacttgtgccgcgccatcgtccggtcgggggctcgcctcggggtgaataacaaccagggagtcaacatcttcaactaccaggtcgccaccaagcagctcctgttccgactgctggatatgctgtccaaggagcctccgtggtgtgacggctcctactgctatgagtgcactgccaggttcggagtcaccactcgcaaacaccactgtcgtcactgcggacgtcttctttgccataaatgctcgaccaaggagattcctattataaagtttgatctgaacaagcctgtgcgggtttgcaacatttgttttgatgtactgactctgggtggggtttcttagtgagccccccggagggtccaggccacgtccttggtcacctccccagcagctgctctgctcaccagcctgaccccacccagagcaggagctggcgggtgtcttcctgcggcaatagactggaacgattaaggaccatggtgtgatagatcccatttcaaatgattccatatgattgtcagtgtgtgtgtcagactgtgatcgatttcactagatgtctcactcatcagaccaggccattgggcctaagtggtaaatgtgattaggaattagacctctccccattctgctagcaacatacagggacacttggaaaaccatttccccttccagtagcttggtgtccatcccagagcattcatgaagtcttcccgcctgggctgactgatgaggcagagcctctcagcgtaggaagctggctgcttaatgagctggctttactctagggtaagtggctgtggacttttctgcacagtgttttcataaagataataggatcctcttgccctgaagtctttttttctttttacgctaagctgtatttttagtgagctaccccttttaaaaaggtgaaatctttcttaacagggttcaaagatgagagctgaaaaatcgtggccttaacaactgaaagctttacagtgttcatgctactgaggtgtcaggagtgcagctgggccgcttgacacctcgtagcagccgtctcattctctcgtcttgctgcgtcctgtctgtggagtcctcagtcactctgctgttggagagtgctggaggaaatgcacttttactgtgctgcactttttatagagctgcattgtcggtgattccaatttaaaaatccatattcaaaaataccctcacacatccctgcatcagtgattctaatgatcagctttgactggacctcagctcacacgaatctccaaggaaaaactctacagagcatcttttagagcaagagattcatacaggccaagtgatgagagggggagtcaccaaggcttcagccccaagggcatctccagcctcaggccggcaggtcctatgtccttgacacaaacgcttcttgctgaaatcctccctagtgatgctgcgagtgctgttggtcccagttctgtgtagcttgccctgccccatgaagggccaccagccaagggccctggccacgtgtgcgccaccttactttggaagtctctggcttgtgtgctggatgaggctgccagaacttgttgggcgttcatcgctgttagtacatatattaaccgtgaggtgttaaacttttcttttgaaggtttggccagtttctaaaaaatgcacatttaaagagaagcatctaccacggctttaaaacaaaacaactctgagatgaacaatatgtgttatactcagagattaacaatctcaatcatacatactgattctttcagacatttaataaccactacatttttttgcattaatgaagtttgactatatgtgtaaagggactaaatatttttgcaacagcctgttctttgttcattcttttctggatagtgtgtcctctgtattgcggtagatttatacattctgttgcctaaatatgtgtgtaaaatgagctgataaactggagtactacttaaaaaaaagtctgtgatttataagatgtatatgctttctatgtgaatataagcttgtgcacaatgtttaaaagaaaaacaatgaattagaagagatcccccgtcccccagtctgacatatttcatacagaatgtttaaaagaaaaactctgctagtcttggcaaacatttggccatgtgaggcatgtggtcagtttccattttctattacctggaaagggccataaggaagcaggcagggcttaggtagcttggttacctaagttagaaagtaagagaatcatggttcggatatgaattgaagtggttggtacatggatacctgttctttaaaaggaatgtgggagatgagtcaagggtgaggccgattgttctgcccatgccctaccataccaatttcaataacaatcttgcctgtcattgcactcagaatcttaagatcatgtttcaaatatgttgattcaaacttgcttctaagcctgagtccagggatagcaatggtactgaccagctatggactgggagaacattgagtcctgttttccattggcttcagggcgcatccatgtggatataggaaaagcctctttccacagacttaggaagccccccgaccacgcggacgctcgctgggctgcactcagcaggctgcttgagtgggagctgactccaacatgccctgccctggctgggactaggcatgcttccagcccttcccgtgctctccctgctgtcaacacttgcgtacaaacctgcctagctgttgtaagttttcatcagtagcttaagtactagtagcaaaaacttaaattcattcagaaagttgccacttctgaatgagtagagcaggaaaagtaaactttactgaaacataatttgctgcaacagtcaacattgttatgctgaatgtgctctcaactgccctttgctcatcgccagatttattatccagtgtattcctaacagtcttttgttgtcgttgtttttaaaacaaaggtacggaccatgtgctatatataaatcgaatggcttaaactaatttgctatgatcctctaacaccgaaatttcccataaacttaagtgcctacacttaggacttttgaactttcagtcatctttttcgtggtgtctcactgaacgatgtgttagaacatgtgttccatttggagttttgggcctgtgcacggtcaaccccaattaccaatttagttgaggctggattcgattgctcagttcacctgccacgttctctccaaggagtggggtctacgtgacctttagtcctctacctcagagccccgagtcatttctgaccaccccgttctgtgtcctcactcttgtccctgaatgggtccctgtgtggatctcagtgtgtgtgtggtttctccactcctccccgctcatgtcccacacctgccatattgaaccgtttctgcactaatcttctccacgggcacggagtggagggaacgtcttgggaaaggggagagcttgacctccatctaggtttcttttatctggagaaaaagaacacttttgaactatgtaatgcttcgccctgaaaggcaagctaacgctaacttcccaggtgacagtagcaggaacaaggaagggtaatgtttccatgacagacacttgcttcccttgggacaagtcccagaagaactacctgaagcaccaaagctccccaccccagcctggtggcagaggaagcaggtggcaccaactcaccaaagggacttgggagccaccttctcactctgtggaagtactttagtgagagctgactggcaagataaaaaccctgaaattcccagaagttacagatgccttaaagactttctttggaagatcattgcctgtactattccttttttgtgtggcataaataatatattaacctgttacaactgacaacattggttttctgcagctagggagtcttgagtcgagactgctcgccttgatgacttgctcttttttggcagatgtgtggagttggctgttacgacatccctgtgtgatcccagaggaggggcagtagctgggcagaaactgcaggcacacatttgggtggatcacctggcttccagccccttcggggtggtgctcagtgtggggtgatggtatcatagaggaccacggcgcttatcagcattgtttctttggagtctgtgtaatggaatgtatttttcaaatactgatatttgcattttctgtaacaattccttataataaaatgaagtaaaattgtgcatttaaagtggaaactttaataagacatttgtagttacttctaatgcagaagtaccaataagcattaaaaacaaattttagaaaactcctgacgtgaataagtttcttgaccagctgccctccagaaagtttgaattccaacatttttcaggaacatgctgttgacagcagtaaaagtagctattttatgtatgtatttttaatttttaaaagtttcagtaggtttttggggttcaggtggtgtttggttacgtgaggttctttagcggtgatttccaggattttggggcacccatcacccaagcagtgtacactggacccttttatccctcaccccaaccctttcccctgagtccccaaagtccactgtatcattcttaatgcctttacgtcctcatggcttagctcccgaaaagtagttatttt

SEQ ID NO: 372596 - DNA, 5401 bp, Homo sapiens
ttttaaagtaattatcaatttattatcaaccgtatcttatctgaaagtggatttaatgctatacatagagctcagacttggtaataaaactgtttgcctttgctcagcagtgtttgtgaataacctatgtttttctgcaggtcagacatggctgtgatgccacatgctggggtccgggacctggtgggtgccttcagacgctcctgcacagagccattgatgaaaacaacgagcccaccgcctgctttcttattcgcagtggctgtgacgtgaacagtcccagacaaccaggcgccaatggagaaggagaggaagaggctagagatgggcagacccctttgcatttggcagcctcttgggggctggaagagacagtacagtgtcttctggagtttggtgccaacgtgaacgcacaggatgcagaaggaagaacccccatccacgtggccatcagcagccaacacggtgtcatcattcagctgttggtttctcaccccgatatccatttgaatgtacgagacagacaagggctgaccccgtttgcctgtgccatgactttcaagaacaacaagtcagccgaggccattctcaaacgagagtccggggctgctgagcaggtggataacaagggccggaatttccttcatgtggcagttcagaactctgatattgaaagtgtgctgttcctgatcagtgtccacgctaatgtgaattcaagagtccaggatgcctccaagttgacccccctgcacctcgctgtccaagcaggctcagaaattattgtccgcaatttgcttcttgcgggagccaaagtgaacgaattaaccaagcatcgccagactgccctccatcttgctgcccagcaggacctgcccaccatctgctcagtcctcctagagaatggcgtggactttgctgccgtggatgagaatggaaacaatgctcttcatcttgctgtcatgcacggccggctcaacaacatccgggttctcctgacagagtgcacagtggacgccgaagcctttaatctcagaggccagtcaccactgcacattttgggacaatatggcaaggagaatgcagcggccatctttgatctcttcctagaatgcatgccggggtatcctctggacaagccggatgcagacggcagcacggtgctgctcctggcatacatgaaagggaacgccaacttgtgccgcgccatcgtccggtcgggggctcgcctcggggtgaataacaaccagggagtcaacatcttcaactaccaggtcgccaccaagcagctcctgttccgactgctggatatgctgtccaaggagcctccgtggtgtgacggctcctactgctatgagtgcactgccaggttcggagtcaccactcgcaaacaccactgtcgtcactgcggacgtcttctttgccataaatgctcgaccaaggagattcctattataaagtttgatctgaacaagcctgtgcgggtttgcaacatttgttttgatgtactgactctgggtggggtttcttagtgagccccccggagggtccaggccacgtccttggtcacctccccagcagctgctctgctcaccagcctgaccccacccagagcaggagctggcgggtgtcttcctgcggcaatagactggaacgattaaggaccatggtgtgatagatcccatttcaaatgattccatatgattgtcagtgtgtgtgtcagactgtgatcgatttcactagatgtctcactcatcagaccaggccattgggcctaagtggtaaatgtgattaggaattagacctctccccattctgctagcaacatacagggacacttggaaaaccatttccccttccagtagcttggtgtccatcccagagcattcatgaagtcttcccgcctgggctgactgatgaggcagagcctctcagcgtaggaagctggctgcttaatgagctggctttactctagggtaagtggctgtggacttttctgcacagtgttttcataaagataataggatcctcttgccctgaagtctttttttctttttacgctaagctgtatttttagtgagctaccccttttaaaaaggtgaaatctttcttaacagggttcaaagatgagagctgaaaaatcgtggccttaacaactgaaagctttacagtgttcatgctactgaggtgtcaggagtgcagctgggccgcttgacacctcgtagcagccgtctcattctctcgtcttgctgcgtcctgtctgtggagtcctcagtcactctgctgttggagagtgctggaggaaatgcacttttactgtgctgcactttttatagagctgcattgtcggtgattccaatttaaaaatccatattcaaaaataccctcacacatccctgcatcagtgattctaatgatcagctttgactggacctcagctcacacgaatctccaaggaaaaactctacagagcatcttttagagcaagagattcatacaggccaagtgatgagagggggagtcaccaaggcttcagccccaagggcatctccagcctcaggccggcaggtcctatgtccttgacacaaacgcttcttgctgaaatcctccctagtgatgctgcgagtgctgttggtcccagttctgtgtagcttgccctgccccatgaagggccaccagccaagggccctggccacgtgtgcgccaccttactttggaagtctctggcttgtgtgctggatgaggctgccagaacttgttgggcgttcatcgctgttagtacatatattaaccgtgaggtgttaaacttttcttttgaaggtttggccagtttctaaaaaatgcacatttaaagagaagcatctaccacggctttaaaacaaaacaactctgagatgaacaatatgtgttatactcagagattaacaatctcaatcatacatactgattctttcagacatttaataaccactacatttttttgcattaatgaagtttgactatatgtgtaaagggactaaatatttttgcaacagcctgttctttgttcattcttttctggatagtgtgtcctctgtattgcggtagatttatacattctgttgcctaaatatgtgtgtaaaatgagctgataaactggagtactacttaaaaaaaagtctgtgatttataagatgtatatgctttctatgtgaatataagcttgtgcacaatgtttaaaagaaaaacaatgaattagaagagatcccccgtcccccagtctgacatatttcatacagaatgtttaaaagaaaaactctgctagtcttggcaaacatttggccatgtgaggcatgtggtcagtttccattttctattacctggaaagggccataaggaagcaggcagggcttaggtagcttggttacctaagttagaaagtaagagaatcatggttcggatatgaattgaagtggttggtacatggatacctgttctttaaaaggaatgtgggagatgagtcaagggtgaggccgattgttctgcccatgccctaccataccaatttcaataacaatcttgcctgtcattgcactcagaatcttaagatcatgtttcaaatatgttgattcaaacttgcttctaagcctgagtccagggatagcaatggtactgaccagctatggactgggagaacattgagtcctgttttccattggcttcagggcgcatccatgtggatataggaaaagcctctttccacagacttaggaagccccccgaccacgcggacgctcgctgggctgcactcagcaggctgcttgagtgggagctgactccaacatgccctgccctggctgggactaggcatgcttccagcccttcccgtgctctccctgctgtcaacacttgcgtacaaacctgcctagctgttgtaagttttcatcagtagcttaagtactagtagcaaaaacttaaattcattcagaaagttgccacttctgaatgagtagagcaggaaaagtaaactttactgaaacataatttgctgcaacagtcaacattgttatgctgaatgtgctctcaactgccctttgctcatcgccagatttattatccagtgtattcctaacagtcttttgttgtcgttgtttttaaaacaaaggtacggaccatgtgctatatataaatcgaatggcttaaactaatttgctatgatcctctaacaccgaaatttcccataaacttaagtgcctacacttaggacttttgaactttcagtcatctttttcgtggtgtctcactgaacgatgtgttagaacatgtgttccatttggagttttgggcctgtgcacggtcaaccccaattaccaatttagttgaggctggattcgattgctcagttcacctgccacgttctctccaaggagtggggtctacgtgacctttagtcctctacctcagagccccgagtcatttctgaccaccccgttctgtgtcctcactcttgtccctgaatgggtccctgtgtggatctcagtgtgtgtgtggtttctccactcctccccgctcatgtcccacacctgccatattgaaccgtttctgcactaatcttctccacgggcacggagtggagggaacgtcttgggaaaggggagagcttgacctccatctaggtttcttttatctggagaaaaagaacacttttgaactatgtaatgcttcgccctgaaaggcaagctaacgctaacttcccaggtgacagtagcaggaacaaggaagggtaatgtttccatgacagacacttgcttcccttgggacaagtcccagaagaactacctgaagcaccaaagctccccaccccagcctggtggcagaggaagcaggtggcaccaactcaccaaagggacttgggagccaccttctcactctgtggaagtactttagtgagagctgactggcaagataaaaaccctgaaattcccagaagttacagatgccttaaagactttctttggaagatcattgcctgtactattccttttttgtgtggcataaataatatattaacctgttacaactgacaacattggttttctgcagctagggagtcttgagtcgagactgctcgccttgatgacttgctcttttttggcagatgtgtggagttggctgttacgacatccctgtgtgatcccagaggaggggcagtagctgggcagaaactgcaggcacacatttgggtggatcacctggcttccagccccttcggggtggtgctcagtgtggggtgatggtatcatagaggaccacggcgcttatcagcattgtttctttggagtctgtgtaatggaatgtatttttcaaatactgatatttgcattttctgtaacaattccttataataaaatgaagtaaaattgtg

SEQ ID NO: 372597 - DNA, 6597 bp, Homo sapiens
agtgccgggccagacatggcggaagaggaggtggccaagttggagaagcacttgatgcttctgcggcaggagtatgtcaagctgcagaagaagctggcggagacagagaagcgctgcgctctcttggctgcgcaggcaaacaaggagagcagcagcgagtccttcatcagccgtctgctggccatcgtggcagacctctacgagcaggagcagtacagcgatctgaagataaaggttggggacaggcacatcagtgctcacaagtttgtcctggcagcccgcagtgacagctggagtctggctaacttgtcttccactaaagagttggacctgtcagatgctaatcctgaggtgacgatgacaatgcttcgctggatctatacagatgagctggagttcagagaggatgatgtgttcctgactgaactgatgaaactagcaaatcggtttcagctacagctcctcagggagagatgtgagaagggtgttatgtctctagtgaatgtcaggaactgtattcgcttctaccagacggcagaggagctgaatgccagcacactgatgaactactgtgcagaaattattgcaagtcattgggacgacctgaggaaggaggatttcagcagcatgagcgctcagttgttatacaaaatgatcaaatccaagacagagtacccgctacataaagccatcaaagtggagagagaagacgtggtcttcctgtatctgattgaaatggattcccagctccctgggaagctgaatgaagcggatcataacggagatctggcattagatctagccctctcacgacgactggagagtattgccaccacgctggttagtcacaaagctgatgtggacatggtggacaagagtggctggagcttgttacacaaaggaatccaaagaggagatctctttgctgccactttcctcattaagaatggggcctttgtcaacgctgctacactgggtgcccaggagacaccactgcaccttgtggccttgtacagttcaaagaaacactcagcagatgtgatgtctgagatggcgcagattgcagaggcccttctgcaggctggtgccaaccccaacatgcaggacagcaaggggaggactcctttacatgtgtccatcatggccgggaatgaatatgtgttcagtcagctgctgcagtgcaaacaactagatttagaactcaaagaccacgagggcagcacggctctgtggctggcagtgcagcatatcacagtgtcttctgaccagtctgtgaaccccttcgaagatgtccccgtggtaaatgggacttcatttgatgagaacagctttgcagccagactcatccagcgcggcagccacacagacgcacctgacacggcgacaggaaactgtttactacagcgggcagctggagcaggaaacgaggcagcagctcttttcctggcaaccaacggtgcccatgtcaaccacagaaacaagtggggagaaaccccgttgcacacagcgtgtcggcatggcctggccaacctcacagcagagctcctgcagcaaggcgccaacccaaacctgcagacggaggaagctctgcctctgccaaaggaggccgcatccctgaccagcttggcggacagcgtccatctgcagacgccactgcacatggcgatcgcctataaccatccggatgtggtgtctgtcatcctggagcagaaagccaatgctcttcatgccaccaacaacttgcagatcattccggacttcagcctcaaagattcccgagaccagactgtgctgggcctggcattatggactggcatgcacacgatcgcagcccagctgctgggctctggagccgccatcaatgacaccatgtcggatgggcagacgctactgcacatggccatacagcggcaggacagcaagagcgcactcttcctgctggagcaccaggcagatataaatgtcaggactcaggacggggagacagccctccagctggccatcagaaaccagcttccactcgtagttgatgccatatgcacccgaggagctgacatgtctgtgccagatgagaaggggaaccccccgctgtggcttgcattggcaaacaatctggaggacatcgcatccactctggtcagacatggctgtgatgccacatgctggggtccgggacctggtgggtgccttcagacgctcctgcacagagccattgatgaaaacaacgagcccaccgcctgctttcttattcgcagtggctgtgacgtgaacagtcccagacaaccaggcgccaatggagaaggagaggaagaggctagagatgggcagacccctttgcatttggcagcctcttgggggctggaagagacagtacagtgtcttctggagtttggtgccaacgtgaacgcacaggatgcagaaggaagaacccccatccacgtggccatcagcagccaacacggtgtcatcattcagctgttggtttctcaccccgatatccatttgaatgtacgagacagacaagggctgaccccgtttgcctgtgccatgactttcaagaacaacaagtcagccgaggccattctcaaacgagagtccggggctgctgagcaggtggataacaagggccggaatttccttcatgtggcagttcagaactctgatattgaaagtgtgctgttcctgatcagtgtccacgctaatgtgaattcaagagtccaggatgcctccaagttgacccccctgcacctcgctgtccaagcaggctcagaaattattgtccgcaatttgcttcttgcgggagccaaagtgaacgaattaaccaagcatcgccagactgccctccatcttgctgcccagcaggacctgcccaccatctgctcagtcctcctagagaatggcgtggactttgctgccgtggatgagaatggaaacaatgctcttcatcttgctgtcatgcacggccggctcaacaacatccgggttctcctgacagagtgcacagtggacgccgaagcctttaatctcagaggccagtcaccactgcacattttgggacaatatggcaaggagaatgcagcggccatctttgatctcttcctagaatgcatgccggggtatcctctggacaagccggatgcagacggcagcacggtgctgctcctggcatacatgaaagggaacgccaacttgtgccgcgccatcgtccggtcgggggctcgcctcggggtgaataacaaccagggagtcaacatcttcaactaccaggtcgccaccaagcagctcctgttccgactgctggatatgctgtccaaggagcctccgtggtgtgacggctcctactgctatgagtgcactgccaggttcggagtcaccactcgcaaacaccactgtcgtcactgcggacgtcttctttgccataaatgctcgaccaaggagattcctattataaagtttgatctgaacaagcctgtgcgggtttgcaacatttgttttgatgtactgactctgggtggggtttcttagtgagccccccggagggtccaggccacgtccttggtcacctccccagcagctgctctgctcaccagcctgaccccacccagagcaggagctggcgggtgtcttcctgcggcaatagactggaacgattaaggaccatggtgtgatagatcccatttcaaatgattccatatgattgtcagtgtgtgtgtcagactgtgatcgatttcactagatgtctcactcatcagaccaggccattgggcctaagtggtaaatgtgattaggaattagacctctccccattctgctagcaacatacagggacacttggaaaaccatttccccttccagtagcttggtgtccatcccagagcattcatgaagtcttcccgcctgggctgactgatgaggcagagcctctcagcgtaggaagctggctgcttaatgagctggctttactctagggtaagtggctgtggacttttctgcacagtgttttcataaagataataggatcctcttgccctgaagtctttttttctttttacgctaagctgtatttttagtgagctaccccttttaaaaaggtgaaatctttcttaacagggttcaaagatgagagctgaaaaatcgtggccttaacaactgaaagctttacagtgttcatgctactgaggtgtcaggagtgcagctgggccgcttgacacctcgtagcagccgtctcattctctcgtcttgctgcgtcctgtctgtggagtcctcagtcactctgctgttggagagtgctggaggaaatgcacttttactgtgctgcactttttatagagctgcattgtcggtgattccaatttaaaaatccatattcaaaaataccctcacacatccctgcatcagtgattctaatgatcagctttgactggacctcagctcacacgaatctccaaggaaaaactctacagagcatcttttagagcaagagattcatacaggccaagtgatgagagggggagtcaccaaggcttcagccccaagggcatctccagcctcaggccggcaggtcctatgtccttgacacaaacgcttcttgctgaaatcctccctagtgatgctgcgagtgctgttggtcccagttctgtgtagcttgccctgccccatgaagggccaccagccaagggccctggccacgtgtgcgccaccttactttggaagtctctggcttgtgtgctggatgaggctgccagaacttgttgggcgttcatcgctgttagtacatatattaaccgtgaggtgttaaacttttcttttgaaggtttggccagtttctaaaaaatgcacatttaaagagaagcatctaccacggctttaaaacaaaacaactctgagatgaacaatatgtgttatactcagagattaacaatctcaatcatacatactgattctttcagacatttaataaccactacatttttttgcattaatgaagtttgactatatgtgtaaagggactaaatatttttgcaacagcctgttctttgttcattcttttctggatagtgtgtcctctgtattgcggtagatttatacattctgttgcctaaatatgtgtgtaaaatgagctgataaactggagtactacttaaaaaaaagtctgtgatttataagatgtatatgctttctatgtgaatataagcttgtgcacaatgtttaaaagaaaaacaatgaattagaagagatcccccgtcccccagtctgacatatttcatacagaatgtttaaaagaaaaactctgctagtcttggcaaacatttggccatgtgaggcatgtggtcagtttccattttctattacctggaaagggccataaggaagcaggcagggcttaggtagcttggttacctaagttagaaagtaagagaatcatggttcggatatgaattgaagtggttggtacatggatacctgttctttaaaaggaatgtgggagatgagtcaagggtgaggccgattgttctgcccatgccctaccataccaatttcaataacaatcttgcctgtcattgcactcagaatcttaagatcatgtttcaaatatgttgattcaaacttgcttctaagcctgagtccagggatagcaatggtactgaccagctatggactgggagaacattgagtcctgttttccattggcttcagggcgcatccatgtggatataggaaaagcctctttccacagacttaggaagccccccgaccacgcggacgctcgctgggctgcactcagcaggctgcttgagtgggagctgactccaacatgccctgccctggctgggactaggcatgcttccagcccttcccgtgctctccctgctgtcaacacttgcgtacaaacctgcctagctgtttgtggagttggctgttacgacatccctgtgtgatcccagaggaggggcagtagctgggcagaaactgcaggcacacatttgggtggatcacctggcttccagccccttcggggtggtgctcagtgtggggtgatggtatcatagaggaccacggcgcttatcagcattgtttctttggagtctgtgtaatggaatgtatttttcaaatactgatatttgcattttctgtaacaattccttataataaaatgaagtaaaattgtgcatttaaagtggaaactttaataagacatttgtagttacttctaatgcagaagtaccaataagcattaaaaacaaattttagaaaactcctgacgtgaataagtttcttgaccagctgccctccagaaagtttgaattccaacatttttcaggaacatgctgttgacagcagtaaaagtagctattttatgtatgtatttttaatttttaaaagtttcagtaggtttttggggttcaggtggtgtttggttacgtgaggttctttagcggtgatttccaggattttggggcacccatcacccaagcagtgtacactggacccttttatccctcaccccaaccctttcccctgagtccccaaagtccactgtatcattcttaatgcctttacgtcctcatggcttagctcccgaaaagtagttatttt

SEQ ID NO: 372598 - DNA, 747 bp, Homo sapiens
agtgccgggccagacatggcggaagaggaggtggccaagttggagaagcacttgatgcttctgcggcaggagtatgtcaagctgcagaagaagctggcggagacagagaagcgctgcgctctcttggctgcgcaggcaaacaaggagagcagcagcgagtccttcatcagccgtctgctggccatcgtggcagacctctacgagcaggagcagtacagcgatctgaagataaaggttggggacaggcacatcagtgctcacaagtttgtcctggcagcccgcagtgacagctggagtctggctaacttgtcttccactaaagagttggacctgtcagatgctaatcctgaggtgacgatgacaatgcttcgctggatctatacagatgagctggagttcagagaggatgatgtgttcctgactgaactgatgaaactagcaaatcggtttcagctacagctcctcagggagagatgtgagaagggtgttatgtctctagtgaatgtcaggaactgtattcgcttctaccagacggcagaggagctgaatgccagcacactgatgaactactgtgcagaaattattgcaagtcattgggtgagtgaggttgagggtgtcaacaaagcactctagctggcagtcaggagaccgccgctggggacgtagttccatggaaagtgacctctctggcacctggttttctcttgttacacaattgaagaataaatagtttgattagatgatcta

SEQ ID NO: 372599 - DNA, 4509 bp, Homo sapiens
  misc_feature (1693)..(1693): n is a, c, g, or t
  misc_feature (3896)..(3896): n is a, c, g, or t
tgcttattaattacattttaaaatgaagggttacaaaaagagatgagcctggcatttctaattcgggggccttgggacctctcccctccaagtgcaagttgtagcaacctgccgggtccacgcatgggcgggtcatactccacgggttccggtttccactccctgtgaaccaaaagccagagaggcccacgcacgagtccggaagtgagggagggaggactttcgtacgcagccgcctcccagctggaacctcatctttagtgctcggccgcgggcggcgtaactcggggttccgcctcggaatacctcccacttctcttgtctaagaggagcagtagcaagctgagctcagagcgaagctggcgagccaaggagataaagaaccctcggtggggatgcccagagggtgcatgctccacgcccctcgaaaccgattctcattgctgctgctgcaaagcaacccgaagtgcgccacctacccgactgaggctgcgcaagccccggggtctgggcggggtggtcctcgtgcgcgccgcgtcgccgtggagacgagggcgggcccgcgcgagactggcgtctagaggcgcgcgaagcgctgaggcgggcgtggaccgcgcgggagttaagaagcaggtcccggatcgccgtataccgccgggttttctcccaacgtcaggcccgatggctcggcttccccagttagaaggggaagataaaagactttgattcatgaagaatctgctcactgagaagtgtatatcaagccacaatttccatcaaaaagtgattaagcagagaatggagaagaaggttgattccaggtattttaaggatggtgcagttaagaaaccttattctgcaaagacactgtccaacaagaagtcttctgcatcctttgggatccggagggagttacctagtaccagtcatctagtgcagtatcgtggcacacatacttgtacccgacagggccggttaagagaactgcgcatcagatgcgtggccagaaagttcttatatttatggattcgaatgacttttggaagagtatttccctctaaagccagattttactatgagcagcgattactacggaaggtcttcgaagaatggaaagaggagtggtgggttttccagcacgagtggaaactctgtgttcgagctgactgtcactacaggtattacctgtacaacctgatgttccagacgtggaagacctatgtgcgtcagcagcaggagatgaggaacaagtacattagagccgaggttcatgatgcaaagcaaaagatgcgacaggcctggaagtcctggttgatctacgtggttgttcgtaggaccaaacttcagatgcagactacagctctggagtttaggcaacggattatcttacgggtgtggtggagcacgtggaggcagcgactaggacaggtccgtgtgagccgtgccctccatgcctctgctttgaagcacagggccctgagcctccaggtgcaggcttggtcacagtggcgggaacagctcctgtatgtccagaaggagaaacaaaaggttgtctctgcagtgaaacatcatcagcactggcaaaaacggagatttctaaaggcctggcttgaatacctgcaagtccgcagagtgaagagacagcagaatgagatggctgagcgattccatcatgtcactgtgctccagatanacttctgtgactggcagcaggcctgggagcggagggagagcttgtacgctcaccatgcccaggtggagaaactggccaggaagatggccctgcggcgcgcctttactcactggaaacactacatgctgctgtgtgcagaagaagctgcccagtttgagatggcagaagagcaccacaggcacagccagctgctgctgcacaggttctggaacctctggcggtctcagattgagcagaaaaaggaaagagagctgctccccttactgcatgctgcctgggaccactacagaatagcactgctgtgcaaatgtatcgaattgtggctacagtatactcagaagaggcggtacaagcagctgctacaggccagagcggatggtcatttccagcagagagccctgcctgctgccttccacacatggaacagactctggcgatggcgccaccaggaaaatgtcctcagtgcaagagcaacacgtttccacagggagacattagagaagcaagtattttctctctggaggcagaagatgtttcagcatcgagaaaaccgcctggcagagagaatggccatccttcacgcagagcgacagcttctgtataggtcttggttcatgtggcaccagcaggcagcagcacgtcaccaggagcaggagtggcaaacagtggcctgtgcccaccaccgccacgggcggctcaagaaagctttctgcctctggagggaaagtgcccaagggctcagaacagagaggacgggcagggtgcgggcagcagaattccacatggcccagctcctgcgttgggcctggagccagtggagggagtgcctggccctgcggggagcggagcggcagaagctgatgcgagcagacctgcaccaccagcacagcgtgctgcacagggcgctgcaggcatgggtgacttaccagggcagggtgcgaagcatcctccgggaggtggcagccagggagagccagcacaacaggcagctgctgcgcggggcattacgtcgctggaaagagaacaccatggcccgagtggatgaagccaaaaaaacctttcaagcaagtactcattacagaaggaccatatgttccaaggtcctggtccagtggcgggaagctgtgtcagtgcagatgtattaccgacagcaggaggactgtgccatctgggaggcccagaaggtgctggacaggggctgtctgcggacctggtttcagcgctggtgggactgcagccggaggtcagcccagcagagactgcagctggagagggcagtgcaacaccaccaccggcagctgctgctggaggggctggcccggtggaagacgcaccatctgcagtgtgtcaggaagaggctcctgcacaggcagagcacccaactgctggcacagagactcagccggacctgcttccgccagtggagacaacagctggcagccaggaggcaggagcagcgggcgacagtgcgggccctgtggttctgggccttctcgctgcaggcaaaggtgtgggccacgtggctggcctttgtactggaaaggaggagaaagaaggcgcggctgcagtgggcgctccaggcctaccaggggcagctcctccaggagggtgccacgcggctcctgcgctttgcagccagcatgaaggcctcccggcagcagctgcaggcccagcagcaggtccaggcggctcacagtctccatcgtgccgtccgccgctgtgccacgctctggaaacagaaagtgctgggccggggcgggaagcctcagcccctggcagccatcgcacccagcaggaaagtgacgtttgagggtccccttctcaaccgcattgctgctggggctggggatggcacccttgagaccaagaggccacaggcttctcggcctctgggagctctgggccgcctggctgctgaggagccccacgccctggagctcaacactgcccactcagcgaggaagcagccgcgacgcccacacttcctgttggagcctgcgcagagccagaggcctcagaagccacaggaacatggcctaggcatggctcagccagcagccccctccctgacgcggcccttcctggcagaggccccgacagcactggtcccacacagccccctgcctggggccctgtcaagcgcccctggcccgaagcagcccccgacggcaagcacaggcccggagctgctgctgctgcctcnttcctccttcatgccctgcggggcggctgcaccagccagggtgtcagcacagcgggctactcctagggataagcccccggtcccctcatccctggccagtgtccctgacccccatctactccttcctggggacttctcagccaccagggctgggcctggactttcaactgcaggcagcctggaccttgaggctgaacttgaggagatccagcagcaactactgcactaccagaccaccaagcagaacctctggtcctgtcggcggcaagcgagcagcctgcgcaggtggctggagctgaacagagaggagccggggcctgaggaccaggaagtagagcagcaggtgcagaaagagctggaacaggtggaaatgcagatccagctgctggcagaggagctccaggctcagcgccagcccattggcgcctgcgttgcccgcatccaggccctgcggcaggccctgtgctagcgtgttcgcaccaggaacgcaggtgctgggctgtcggggaggcctcaggccacctccaggaacagaacacagttttaagtttgattttttttatttcaaaatgctttgcaattaaatgaattactgttcaaaaaaaaaaaactt

SEQ ID NO: 372600 - DNA, 5605 bp, Homo sapiens
  misc_feature (1693)..(1693): n is a, c, g, or t
  misc_feature (4992)..(4992): n is a, c, g, or t
tgcttattaattacattttaaaatgaagggttacaaaaagagatgagcctggcatttctaattcgggggccttgggacctctcccctccaagtgcaagttgtagcaacctgccgggtccacgcatgggcgggtcatactccacgggttccggtttccactccctgtgaaccaaaagccagagaggcccacgcacgagtccggaagtgagggagggaggactttcgtacgcagccgcctcccagctggaacctcatctttagtgctcggccgcgggcggcgtaactcggggttccgcctcggaatacctcccacttctcttgtctaagaggagcagtagcaagctgagctcagagcgaagctggcgagccaaggagataaagaaccctcggtggggatgcccagagggtgcatgctccacgcccctcgaaaccgattctcattgctgctgctgcaaagcaacccgaagtgcgccacctacccgactgaggctgcgcaagccccggggtctgggcggggtggtcctcgtgcgcgccgcgtcgccgtggagacgagggcgggcccgcgcgagactggcgtctagaggcgcgcgaagcgctgaggcgggcgtggaccgcgcgggagttaagaagcaggtcccggatcgccgtataccgccgggttttctcccaacgtcaggcccgatggctcggcttccccagttagaaggggaagataaaagactttgattcatgaagaatctgctcactgagaagtgtatatcaagccacaatttccatcaaaaagtgattaagcagagaatggagaagaaggttgattccaggtattttaaggatggtgcagttaagaaaccttattctgcaaagacactgtccaacaagaagtcttctgcatcctttgggatccggagggagttacctagtaccagtcatctagtgcagtatcgtggcacacatacttgtacccgacagggccggttaagagaactgcgcatcagatgcgtggccagaaagttcttatatttatggattcgaatgacttttggaagagtatttccctctaaagccagattttactatgagcagcgattactacggaaggtcttcgaagaatggaaagaggagtggtgggttttccagcacgagtggaaactctgtgttcgagctgactgtcactacaggtattacctgtacaacctgatgttccagacgtggaagacctatgtgcgtcagcagcaggagatgaggaacaagtacattagagccgaggttcatgatgcaaagcaaaagatgcgacaggcctggaagtcctggttgatctacgtggttgttcgtaggaccaaacttcagatgcagactacagctctggagtttaggcaacggattatcttacgggtgtggtggagcacgtggaggcagcgactaggacaggtccgtgtgagccgtgccctccatgcctctgctttgaagcacagggccctgagcctccaggtgcaggcttggtcacagtggcgggaacagctcctgtatgtccagaaggagaaacaaaaggttgtctctgcagtgaaacatcatcagcactggcaaaaacggagatttctaaaggcctggcttgaatacctgcaagtccgcagagtgaagagacagcagaatgagatggctgagcgattccatcatgtcactgtgctccagatanacttctgtgactggcagcaggcctgggagcggagggagagcttgtacgctcaccatgcccaggtggagaaactggccaggaagatggccctgcggcgcgcctttactcactggaaacactacatgctgctgtgtgcagaagaagctgcccagtttgagatggcagaagagcaccacaggcacagccagctgtatttttgctttagagccctaaaagacaatgtgacccacgctcatctccagcaaataagaaggaatcttgctcaccagcagcatggtgtcacgctgctgcacaggttctggaacctctggcggtctcagattgagcagaaaaaggaaagagagctgctccccttactgcatgctgcctgggaccactacagaatagcactgctgtgcaaatgtatcgaattgtggctacagtatactcagaagaggcggtacaagcagctgctacaggccagagcggatggtcatttccagcagagagccctgcctgctgccttccacacatggaacagactctggcgatggcgccaccaggaaaatgtcctcagtgcaagagcaacacgtttccacagggagacattagagaagcaagtattttctctctggaggcagaagatgtttcagcatcgagaaaaccgcctggcagagagaatggccatccttcacgcagagcgacagcttctgtataggtcttggttcatgtggcaccagcaggcagcagcacgtcaccaggagcaggagtggcaaacagtggcctgtgcccaccaccgccacgggcggctcaagaaagctttctgcctctggagggaaagtgcccaagggctcagaacagagaggacgggcagggtgcgggcagcagaattccacatggcccagctcctgcgttgggcctggagccagtggagggagtgcctggccctgcggggagcggagcggcagaagctgatgcgagcagacctgcaccaccagcacagcgtgctgcacagggcgctgcaggcatgggtgacttaccagggcagggtgcgaagcatcctccgggaggtggcagccagggagagccagcacaacaggcagctgctgcgcggggcattacgtcgctggaaagagaacaccatggcccgagtggatgaagccaaaaaaacctttcaagcaagtactcattacagaaggaccatatgttccaaggtcctggtccagtggcgggaagctgtgtcagtgcagatgtattaccgacagcaggaggactgtgccatctgggaggcccagaaggtgctggacaggggctgtctgcggacctggtttcagcgctggtgggactgcagccggaggtcagcccagcagagactgcagctggagagggcagtgcaacaccaccaccggcagctgctgctggaggggctggcccggtggaagacgcaccatctgcagtgtgtcaggaagaggctcctgcacaggcagagcacccaactgctggcacagagactcagccggacctgcttccgccagtggagacaacagctggcagccaggaggcaggagcagcgggcgacagtgcgggccctgtggttctgggccttctcgctgcaggcaaaggtgtgggccacgtggctggcctttgtactggaaaggaggagaaagaaggcgcggctgcagtgggcgctccaggcctaccaggggcagctcctccaggagggtgccacgcggctcctgcgctttgcagccagcatgaaggcctcccggcagcagctgcaggcccagcagcaggtccaggtaggcccagggccccttcctgtggggagcaggcagggtgtggcatgagctgaccagaggctgtgttgtaggcggctcacagtctccatcgtgccgtccgccgctgtgccacgctctggaaacagaaagtgctgggccggggcgggaagcctcagcccctggcagccatcgcacccagcaggaaagtgacgtttgagggtccccttctcaaccgcattgctgctggggctggggatggcacccttgagaccaagaggccacaggcttctcggcctctgggagctctgggccgcctggctgctgaggagccccacgccctggagctgtgagtagcctgtgctcaccttgtcctcgcttccaccctgggcaaaaggttggatggcatagcagggaggaaaacagccctgacgggatgggacgggctggtcacggcttgtcacagctgagctgctgggaaccccctcttctccagccagatcccatccctcccacggcaagagggagagaatggagtgggatttccaaaccctctctcctttgcctggccaaagctcaggaaataggtgtcccctcctctgcaagacttcctaacctctctccgtcctgctgacacgatcttttccgggagtcatacacgttgttgacaaagggaacaagctcagctcctacccgtgcctgccggcctctcttctgctccatcacagccaagacactggctttttgtcagaagcccctctttcttgtgtgagctggcacctgtccctctgcccacccctactatggtctcctcaaaccctaacctgccctgccccatgctgatgaagctggtggctcccacagcaaccagcactacccgagagccttgggcctcgggggagatgtcaggtgggtgcatggggcctgggtcccggtccctgctgtgctcctcactgtttgactgaccttgatgggatcctgaacgtctcagaggctgctcccctgtgacatggaccctggcgacctgtacaccagcgtcaccagggttgttctgcaggtcaaaagagacaatgtgggtgaagcagtcccctggcgtcaggtaccttttgtcggaactgctgggagctctatggcccaggcccaccccagcttacttgctgaccttggcctcgcctttcctgactttcagtctccctataaaattggagatcccacagagatctcagacccccctgcagcccctggtcagcccaggggaacagaccccatgtttctttccagcaacactgcccactcagcgaggaagcagccgcgacgcccacacttcctgttggagcctgcgcagagccagaggcctcagaagccacaggaacatggcctaggcatggctcagccagcagccccctccctgacgcggcccttcctggcagaggccccgacagcactggtcccacacagccccctgcctggggccctgtcaagcgcccctggcccgaagcagcccccgacggcaagcacaggcccggagctgctgctgctgcctcnttcctccttcatgccctgcggggcggctgcaccagccagggtgtcagcacagcgggctactcctagggataagcccccggtcccctcatccctggccagtgtccctgacccccatctactccttcctggggacttctcagccaccagggctgggcctggactttcaactgcaggcagcctggaccttgaggctgaacttgaggagatccagcagcaactactgcactaccagaccaccaagcagaacctctggtcctgtcggcggcaagcgagcagcctgcgcaggtggctggagctgaacagagaggagccggggcctgaggaccaggaagtagagcagcaggtgcagaaagagctggaacaggtggaaatgcagatccagctgctggcagaggagctccaggctcagcgccagcccattggcgcctgcgttgcccgcatccaggccctgcggcaggccctgtgctagcgtgttcgcaccaggaacgcaggtgctgggctgtcggggaggcctcaggccacctccaggaacagaacacagttttaagtttgattttttttatttcaaaatgctttgcaattaaatgaattactgttcaaaaaaaaaaaactt

SEQ ID NO: 372601 - DNA, 4601 bp, Homo sapiens
  misc_feature (1693)..(1693): n is a, c, g, or t
  misc_feature (3988)..(3988): n is a, c, g, or t
tgcttattaattacattttaaaatgaagggttacaaaaagagatgagcctggcatttctaattcgggggccttgggacctctcccctccaagtgcaagttgtagcaacctgccgggtccacgcatgggcgggtcatactccacgggttccggtttccactccctgtgaaccaaaagccagagaggcccacgcacgagtccggaagtgagggagggaggactttcgtacgcagccgcctcccagctggaacctcatctttagtgctcggccgcgggcggcgtaactcggggttccgcctcggaatacctcccacttctcttgtctaagaggagcagtagcaagctgagctcagagcgaagctggcgagccaaggagataaagaaccctcggtggggatgcccagagggtgcatgctccacgcccctcgaaaccgattctcattgctgctgctgcaaagcaacccgaagtgcgccacctacccgactgaggctgcgcaagccccggggtctgggcggggtggtcctcgtgcgcgccgcgtcgccgtggagacgagggcgggcccgcgcgagactggcgtctagaggcgcgcgaagcgctgaggcgggcgtggaccgcgcgggagttaagaagcaggtcccggatcgccgtataccgccgggttttctcccaacgtcaggcccgatggctcggcttccccagttagaaggggaagataaaagactttgattcatgaagaatctgctcactgagaagtgtatatcaagccacaatttccatcaaaaagtgattaagcagagaatggagaagaaggttgattccaggtattttaaggatggtgcagttaagaaaccttattctgcaaagacactgtccaacaagaagtcttctgcatcctttgggatccggagggagttacctagtaccagtcatctagtgcagtatcgtggcacacatacttgtacccgacagggccggttaagagaactgcgcatcagatgcgtggccagaaagttcttatatttatggattcgaatgacttttggaagagtatttccctctaaagccagattttactatgagcagcgattactacggaaggtcttcgaagaatggaaagaggagtggtgggttttccagcacgagtggaaactctgtgttcgagctgactgtcactacaggtattacctgtacaacctgatgttccagacgtggaagacctatgtgcgtcagcagcaggagatgaggaacaagtacattagagccgaggttcatgatgcaaagcaaaagatgcgacaggcctggaagtcctggttgatctacgtggttgttcgtaggaccaaacttcagatgcagactacagctctggagtttaggcaacggattatcttacgggtgtggtggagcacgtggaggcagcgactaggacaggtccgtgtgagccgtgccctccatgcctctgctttgaagcacagggccctgagcctccaggtgcaggcttggtcacagtggcgggaacagctcctgtatgtccagaaggagaaacaaaaggttgtctctgcagtgaaacatcatcagcactggcaaaaacggagatttctaaaggcctggcttgaatacctgcaagtccgcagagtgaagagacagcagaatgagatggctgagcgattccatcatgtcactgtgctccagatanacttctgtgactggcagcaggcctgggagcggagggagagcttgtacgctcaccatgcccaggtggagaaactggccaggaagatggccctgcggcgcgcctttactcactggaaacactacatgctgctgtgtgcagaagaagctgcccagtttgagatggcagaagagcaccacaggcacagccagctgtatttttgctttagagccctaaaagacaatgtgacccacgctcatctccagcaaataagaaggaatcttgctcaccagcagcatggtgtcacgctgctgcacaggttctggaacctctggcggtctcagattgagcagaaaaaggaaagagagctgctccccttactgcatgctgcctgggaccactacagaatagcactgctgtgcaaatgtatcgaattgtggctacagtatactcagaagaggcggtacaagcagctgctacaggccagagcggatggtcatttccagcagagagccctgcctgctgccttccacacatggaacagactctggcgatggcgccaccaggaaaatgtcctcagtgcaagagcaacacgtttccacagggagacattagagaagcaagtattttctctctggaggcagaagatgtttcagcatcgagaaaaccgcctggcagagagaatggccatccttcacgcagagcgacagcttctgtataggtcttggttcatgtggcaccagcaggcagcagcacgtcaccaggagcaggagtggcaaacagtggcctgtgcccaccaccgccacgggcggctcaagaaagctttctgcctctggagggaaagtgcccaagggctcagaacagagaggacgggcagggtgcgggcagcagaattccacatggcccagctcctgcgttgggcctggagccagtggagggagtgcctggccctgcggggagcggagcggcagaagctgatgcgagcagacctgcaccaccagcacagcgtgctgcacagggcgctgcaggcatgggtgacttaccagggcagggtgcgaagcatcctccgggaggtggcagccagggagagccagcacaacaggcagctgctgcgcggggcattacgtcgctggaaagagaacaccatggcccgagtggatgaagccaaaaaaacctttcaagcaagtactcattacagaaggaccatatgttccaaggtcctggtccagtggcgggaagctgtgtcagtgcagatgtattaccgacagcaggaggactgtgccatctgggaggcccagaaggtgctggacaggggctgtctgcggacctggtttcagcgctggtgggactgcagccggaggtcagcccagcagagactgcagctggagagggcagtgcaacaccaccaccggcagctgctgctggaggggctggcccggtggaagacgcaccatctgcagtgtgtcaggaagaggctcctgcacaggcagagcacccaactgctggcacagagactcagccggacctgcttccgccagtggagacaacagctggcagccaggaggcaggagcagcgggcgacagtgcgggccctgtggttctgggccttctcgctgcaggcaaaggtgtgggccacgtggctggcctttgtactggaaaggaggagaaagaaggcgcggctgcagtgggcgctccaggcctaccaggggcagctcctccaggagggtgccacgcggctcctgcgctttgcagccagcatgaaggcctcccggcagcagctgcaggcccagcagcaggtccaggtaggcccagggccccttcctgtggggagcaggcagggtgtggcatgagctgaccagaggctgtgttgtaggcggctcacagtctccatcgtgccgtccgccgctgtgccacgctctggaaacagaaagtgctgggccggggcgggaagcctcagcccctggcagccatcgcacccagcaggaaagtgacgtttgagggtccccttctcaaccgcattgctgctggggctggggatggcacccttgagaccaagaggccacaggcttctcggcctctgggagctctgggccgcctggctgctgaggagccccacgccctggagctgcctcagaagccacaggaacatggcctaggcatggctcagccagcagccccctccctgacgcggcccttcctggcagaggccccgacagcactggtcccacacagccccctgcctggggccctgtcaagcgcccctggcccgaagcagcccccgacggcaagcacaggcccggagctgctgctgctgcctcnttcctccttcatgccctgcggggcggctgcaccagccagggtgtcagcacagcgggctactcctagggataagcccccggtcccctcatccctggccagtgtccctgacccccatctactccttcctggggacttctcagccaccagggctgggcctggactttcaactgcaggcagcctggaccttgaggctgaacttgaggagatccagcagcaactactgcactaccagaccaccaagcagaacctctggtcctgtcggcggcaagcgagcagcctgcgcaggtggctggagctgaacagagaggagccggggcctgaggaccaggaagtagagcagcaggtgcagaaagagctggaacaggtggaaatgcagatccagctgctggcagaggagctccaggctcagcgccagcccattggcgcctgcgttgcccgcatccaggccctgcggcaggccctgtgctagcgtgttcgcaccaggaacgcaggtgctgggctgtcggggaggcctcaggccacctccaggaacagaacacagttttaagtttgattttttttatttcaaaatgctttgcaattaaatgaattactgttcaaaaaaaaaaaactt

SEQ ID NO: 372602 - DNA, 5692 bp, Homo sapiens
  misc_feature (1693)..(1693): n is a, c, g, or t
  misc_feature (4992)..(4992): n is a, c, g, or t
tgcttattaattacattttaaaatgaagggttacaaaaagagatgagcctggcatttctaattcgggggccttgggacctctcccctccaagtgcaagttgtagcaacctgccgggtccacgcatgggcgggtcatactccacgggttccggtttccactccctgtgaaccaaaagccagagaggcccacgcacgagtccggaagtgagggagggaggactttcgtacgcagccgcctcccagctggaacctcatctttagtgctcggccgcgggcggcgtaactcggggttccgcctcggaatacctcccacttctcttgtctaagaggagcagtagcaagctgagctcagagcgaagctggcgagccaaggagataaagaaccctcggtggggatgcccagagggtgcatgctccacgcccctcgaaaccgattctcattgctgctgctgcaaagcaacccgaagtgcgccacctacccgactgaggctgcgcaagccccggggtctgggcggggtggtcctcgtgcgcgccgcgtcgccgtggagacgagggcgggcccgcgcgagactggcgtctagaggcgcgcgaagcgctgaggcgggcgtggaccgcgcgggagttaagaagcaggtcccggatcgccgtataccgccgggttttctcccaacgtcaggcccgatggctcggcttccccagttagaaggggaagataaaagactttgattcatgaagaatctgctcactgagaagtgtatatcaagccacaatttccatcaaaaagtgattaagcagagaatggagaagaaggttgattccaggtattttaaggatggtgcagttaagaaaccttattctgcaaagacactgtccaacaagaagtcttctgcatcctttgggatccggagggagttacctagtaccagtcatctagtgcagtatcgtggcacacatacttgtacccgacagggccggttaagagaactgcgcatcagatgcgtggccagaaagttcttatatttatggattcgaatgacttttggaagagtatttccctctaaagccagattttactatgagcagcgattactacggaaggtcttcgaagaatggaaagaggagtggtgggttttccagcacgagtggaaactctgtgttcgagctgactgtcactacaggtattacctgtacaacctgatgttccagacgtggaagacctatgtgcgtcagcagcaggagatgaggaacaagtacattagagccgaggttcatgatgcaaagcaaaagatgcgacaggcctggaagtcctggttgatctacgtggttgttcgtaggaccaaacttcagatgcagactacagctctggagtttaggcaacggattatcttacgggtgtggtggagcacgtggaggcagcgactaggacaggtccgtgtgagccgtgccctccatgcctctgctttgaagcacagggccctgagcctccaggtgcaggcttggtcacagtggcgggaacagctcctgtatgtccagaaggagaaacaaaaggttgtctctgcagtgaaacatcatcagcactggcaaaaacggagatttctaaaggcctggcttgaatacctgcaagtccgcagagtgaagagacagcagaatgagatggctgagcgattccatcatgtcactgtgctccagatanacttctgtgactggcagcaggcctgggagcggagggagagcttgtacgctcaccatgcccaggtggagaaactggccaggaagatggccctgcggcgcgcctttactcactggaaacactacatgctgctgtgtgcagaagaagctgcccagtttgagatggcagaagagcaccacaggcacagccagctgtatttttgctttagagccctaaaagacaatgtgacccacgctcatctccagcaaataagaaggaatcttgctcaccagcagcatggtgtcacgctgctgcacaggttctggaacctctggcggtctcagattgagcagaaaaaggaaagagagctgctccccttactgcatgctgcctgggaccactacagaatagcactgctgtgcaaatgtatcgaattgtggctacagtatactcagaagaggcggtacaagcagctgctacaggccagagcggatggtcatttccagcagagagccctgcctgctgccttccacacatggaacagactctggcgatggcgccaccaggaaaatgtcctcagtgcaagagcaacacgtttccacagggagacattagagaagcaagtattttctctctggaggcagaagatgtttcagcatcgagaaaaccgcctggcagagagaatggccatccttcacgcagagcgacagcttctgtataggtcttggttcatgtggcaccagcaggcagcagcacgtcaccaggagcaggagtggcaaacagtggcctgtgcccaccaccgccacgggcggctcaagaaagctttctgcctctggagggaaagtgcccaagggctcagaacagagaggacgggcagggtgcgggcagcagaattccacatggcccagctcctgcgttgggcctggagccagtggagggagtgcctggccctgcggggagcggagcggcagaagctgatgcgagcagacctgcaccaccagcacagcgtgctgcacagggcgctgcaggcatgggtgacttaccagggcagggtgcgaagcatcctccgggaggtggcagccagggagagccagcacaacaggcagctgctgcgcggggcattacgtcgctggaaagagaacaccatggcccgagtggatgaagccaaaaaaacctttcaagcaagtactcattacagaaggaccatatgttccaaggtcctggtccagtggcgggaagctgtgtcagtgcagatgtattaccgacagcaggaggactgtgccatctgggaggcccagaaggtgctggacaggggctgtctgcggacctggtttcagcgctggtgggactgcagccggaggtcagcccagcagagactgcagctggagagggcagtgcaacaccaccaccggcagctgctgctggaggggctggcccggtggaagacgcaccatctgcagtgtgtcaggaagaggctcctgcacaggcagagcacccaactgctggcacagagactcagccggacctgcttccgccagtggagacaacagctggcagccaggaggcaggagcagcgggcgacagtgcgggccctgtggttctgggccttctcgctgcaggcaaaggtgtgggccacgtggctggcctttgtactggaaaggaggagaaagaaggcgcggctgcagtgggcgctccaggcctaccaggggcagctcctccaggagggtgccacgcggctcctgcgctttgcagccagcatgaaggcctcccggcagcagctgcaggcccagcagcaggtccaggtaggcccagggccccttcctgtggggagcaggcagggtgtggcatgagctgaccagaggctgtgttgtaggcggctcacagtctccatcgtgccgtccgccgctgtgccacgctctggaaacagaaagtgctgggccggggcgggaagcctcagcccctggcagccatcgcacccagcaggaaagtgacgtttgagggtccccttctcaaccgcattgctgctggggctggggatggcacccttgagaccaagaggccacaggcttctcggcctctgggagctctgggccgcctggctgctgaggagccccacgccctggagctgtgagtagcctgtgctcaccttgtcctcgcttccaccctgggcaaaaggttggatggcatagcagggaggaaaacagccctgacgggatgggacgggctggtcacggcttgtcacagctgagctgctgggaaccccctcttctccagccagatcccatccctcccacggcaagagggagagaatggagtgggatttccaaaccctctctcctttgcctggccaaagctcaggaaataggtgtcccctcctctgcaagacttcctaacctctctccgtcctgctgacacgatcttttccgggagtcatacacgttgttgacaaagggaacaagctcagctcctacccgtgcctgccggcctctcttctgctccatcacagccaagacactggctttttgtcagaagcccctctttcttgtgtgagctggcacctgtccctctgcccacccctactatggtctcctcaaaccctaacctgccctgccccatgctgatgaagctggtggctcccacagcaaccagcactacccgagagccttgggcctcgggggagatgtcaggtgggtgcatggggcctgggtcccggtccctgctgtgctcctcactgtttgactgaccttgatgggatcctgaacgtctcagaggctgctcccctgtgacatggaccctggcgacctgtacaccagcgtcaccagggttgttctgcaggtcaaaagagacaatgtgggtgaagcagtcccctggcgtcaggtaccttttgtcggaactgctgggagctctatggcccaggcccaccccagcttacttgctgaccttggcctcgcctttcctgactttcagtctccctataaaattggagatcccacagagatctcagacccccctgcagcccctggtcagcccaggggaacagaccccatgtttctttccagcaacactgcccactcagcgaggaagcagccgcgacgcccacacttcctgttggagcctgcgcagagccagaggcctcagaagccacaggaacatggcctaggcatggctcagccagcagccccctccctgacgcggcccttcctggcagaggccccgacagcactggtcccacacagccccctgcctggggccctgtcaagcgcccctggcccgaagcagcccccgacggcaagcacaggcccggagctgctgctgctgcctcnttcctccttcatgccctgcggggcggctgcaccagccagggtgtcagcacagcgggctactcctagggataagcccccggtcccctcatccctggccagtgtccctgacccccatctactccttcctggggacttctcagccaccagggctgggcctggactttcaactgcaggcagcctggaccttgaggctgaacttgaggagatccagcagcaactactgcactaccagaccaccaagcagaacctctggtcctgtcggcggcaagcgagcagcctgcgcaggtggctggagctgaacagagaggagccggggcctgaggaccaggaagtagagcagcaggtgcagaaagagctggaacaggtgaggccccaggccatccccaggtgtccctggggacgccccgggctgtgctccctctcagccctgcctgtccctccatggccccaggtggaaatgcagatccagctgctggcagaggagctccaggctcagcgccagcccattggcgcctgcgttgcccgcatccaggccctgcggcaggccctgtgctagcgtgttcgcaccaggaacgcaggtgctgggctgtcggggaggcctcaggccacctccaggaacagaacacagttttaagtttgattttttttatttcaaaatgctttgcaattaaatgaattactgttcaaaaaaaaaaaactt

SEQ ID NO: 372603 - DNA, 3382 bp, Homo sapiens
  misc_feature (2769)..(2769): n is a, c, g, or t
aatcaagtatcaaagatccctatggcctaaggcccgctgtccggggcacctgcttggtttgatgtgtgtcacgtgactctgttctgggacgtacaggtagtacaaggataggtaaacaaagtctccagataccttcccctgtccccacagcaagatcaggagggaagcagcagttcctaccacccatgcttgcagcgccctgtgcagcacgctgtgctgtctgtgggtactagccttgtagcgaaagcagctcctttccctggagtcccatggtttgacttaggaggtgagggcctgtgagacagtttctccctgtcgtctgggagggtctgctggccctgggaccaggggctgttggcctcttcctaccctttttgagttctctgggcatggcagccttgtggtagatgcacctctgaggcctgcctaaacagggggaagtgtgggcccaagagcagcctcagtcttccttgtcccctacagacttaccagggcagggtgcgaagcatcctccgggaggtggcagccagggagagccagcacaacaggcagctgctgcgcggggcattacgtcgctggaaagagaacaccatggcccgagtggatgaagccaaaaaaacctttcaagcaagtactcattacagaaggaccatatgttccaaggtcctggtccagtggcgggaagctgtgtcagtgcagatgtattaccgacagcaggaggactgtgccatctgggaggcccagaaggtgctggacaggggctgtctgcggacctggtttcagcgctggtgggactgcagccggaggtcagcccagcagagactgcagctggagagggcagtgcaacaccaccaccggcagctgctgctggaggggctggcccggtggaagacgcaccatctgcagtgtgtcaggaagaggctcctgcacaggcagagcacccaactgctggcacagagactcagccggacctgcttccgccagtggagacaacagctggcagccaggaggcaggagcagcgggcgacagtgcgggccctgtggttctgggccttctcgctgcaggcaaaggtgtgggccacgtggctggcctttgtactggaaaggaggagaaagaaggcgcggctgcagtgggcgctccaggcctaccaggggcagctcctccaggagggtgccacgcggctcctgcgctttgcagccagcatgaaggcctcccggcagcagctgcaggcccagcagcaggtccaggtaggcccagggccccttcctgtggggagcaggcagggtgtggcatgagctgaccagaggctgtgttgtaggcggctcacagtctccatcgtgccgtccgccgctgtgccacgctctggaaacagaaagtgctgggccggggcgggaagcctcagcccctggcagccatcgcacccagcaggaaagtgacgtttgagggtccccttctcaaccgcattgctgctggggctggggatggcacccttgagaccaagaggccacaggcttctcggcctctgggagctctgggccgcctggctgctgaggagccccacgccctggagctgtgagtagcctgtgctcaccttgtcctcgcttccaccctgggcaaaaggttggatggcatagcagggaggaaaacagccctgacgggatgggacgggctggtcacggcttgtcacagctgagctgctgggaaccccctcttctccagccagatcccatccctcccacggcaagagggagagaatggagtgggatttccaaaccctctctcctttgcctggccaaagctcaggaaataggtgtcccctcctctgcaagacttcctaacctctctccgtcctgctgacacgatcttttccgggagtcatacacgttgttgacaaagggaacaagctcagctcctacccgtgcctgccggcctctcttctgctccatcacagccaagacactggctttttgtcagaagcccctctttcttgtgtgagctggcacctgtccctctgcccacccctactatggtctcctcaaaccctaacctgccctgccccatgctgatgaagctggtggctcccacagcaaccagcactacccgagagccttgggcctcgggggagatgtcaggtgggtgcatggggcctgggtcccggtccctgctgtgctcctcactgtttgactgaccttgatgggatcctgaacgtctcagaggctgctcccctgtgacatggaccctggcgacctgtacaccagcgtcaccagggttgttctgcaggtcaaaagagacaatgtgggtgaagcagtcccctggcgtcaggtaccttttgtcggaactgctgggagctctatggcccaggcccaccccagcttacttgctgaccttggcctcgcctttcctgactttcagtctccctataaaattggagatcccacagagatctcagacccccctgcagcccctggtcagcccaggggaacagaccccatgtttctttccagcaacactgcccactcagcgaggaagcagccgcgacgcccacacttcctgttggagcctgcgcagagccagaggcctcagaagccacaggaacatggcctaggcatggctcagccagcagccccctccctgacgcggcccttcctggcagaggccccgacagcactggtcccacacagccccctgcctggggccctgtcaagcgcccctggcccgaagcagcccccgacggcaagcacaggcccggagctgctgctgctgcctcnttcctccttcatgccctgcggggcggctgcaccagccagggtgtcagcacagcgggctactcctagggataagcccccggtcccctcatccctggccagtgtccctgacccccatctactccttcctggggacttctcagccaccagggctgggcctggactttcaactgcaggcagcctggaccttgaggctgaacttgaggagatccagcagcaactactgcactaccagaccaccaagcagaacctctggtcctgtcggcggcaagcgagcagcctgcgcaggtggctggagctgaacagagaggagccggggcctgaggaccaggaagtagagcagcaggtgcagaaagagctggaacaggtggaaatgcagatccagctgctggcagaggagctccaggctcagcgccagcccattggcgcctgcgttgcccgcatccaggccctgcggcaggccctgtgctagcgtgttcgcaccaggaacgcaggtgctgggctgtcggggaggcctcaggccacctccaggaacagaacacagttttaagtttgattttttttatttcaaaatgctttgcaattaaatgaattactgttcaaaaaaaaaaaactt

SEQ ID NO: 372604 - DNA, 2306 bp, Homo sapiens
  misc_feature (1693)..(1693): n is a, c, g, or t
tgcttattaattacattttaaaatgaagggttacaaaaagagatgagcctggcatttctaattcgggggccttgggacctctcccctccaagtgcaagttgtagcaacctgccgggtccacgcatgggcgggtcatactccacgggttccggtttccactccctgtgaaccaaaagccagagaggcccacgcacgagtccggaagtgagggagggaggactttcgtacgcagccgcctcccagctggaacctcatctttagtgctcggccgcgggcggcgtaactcggggttccgcctcggaatacctcccacttctcttgtctaagaggagcagtagcaagctgagctcagagcgaagctggcgagccaaggagataaagaaccctcggtggggatgcccagagggtgcatgctccacgcccctcgaaaccgattctcattgctgctgctgcaaagcaacccgaagtgcgccacctacccgactgaggctgcgcaagccccggggtctgggcggggtggtcctcgtgcgcgccgcgtcgccgtggagacgagggcgggcccgcgcgagactggcgtctagaggcgcgcgaagcgctgaggcgggcgtggaccgcgcgggagttaagaagcaggtcccggatcgccgtataccgccgggttttctcccaacgtcaggcccgatggctcggcttccccagttagaaggggaagataaaagactttgattcatgaagaatctgctcactgagaagtgtatatcaagccacaatttccatcaaaaagtgattaagcagagaatggagaagaaggttgattccaggtattttaaggatggtgcagttaagaaaccttattctgcaaagacactgtccaacaagaagtcttctgcatcctttgggatccggagggagttacctagtaccagtcatctagtgcagtatcgtggcacacatacttgtacccgacagggccggttaagagaactgcgcatcagatgcgtggccagaaagttcttatatttatggattcgaatgacttttggaagagtatttccctctaaagccagattttactatgagcagcgattactacggaaggtcttcgaagaatggaaagaggagtggtgggttttccagcacgagtggaaactctgtgttcgagctgactgtcactacaggtattacctgtacaacctgatgttccagacgtggaagacctatgtgcgtcagcagcaggagatgaggaacaagtacattagagccgaggttcatgatgcaaagcaaaagatgcgacaggcctggaagtcctggttgatctacgtggttgttcgtaggaccaaacttcagatgcagactacagctctggagtttaggcaacggattatcttacgggtgtggtggagcacgtggaggcagcgactaggacaggtccgtgtgagccgtgccctccatgcctctgctttgaagcacagggccctgagcctccaggtgcaggcttggtcacagtggcgggaacagctcctgtatgtccagaaggagaaacaaaaggttgtctctgcagtgaaacatcatcagcactggcaaaaacggagatttctaaaggcctggcttgaatacctgcaagtccgcagagtgaagagacagcagaatgagatggctgagcgattccatcatgtcactgtgctccagatanacttctgtgactggcagcaggcctgggagcggagggagagcttgtacgctcaccatgcccaggtggagaaactggccaggaagatggccctgcggcgcgcctttactcactggaaacactacatgctgctgtgtgcagaagaagctgcccagtttgagatggcagaagagcaccacaggcacagccagctgctgctgcacaggttctggaacctctggcggtctcagattgagcagaaaaaggaaagagagctgctccccttactgcatgctgcctgggaccactacagaatagcactgctgtgcaaatgtatcgaattgtggctacagtatactcagaagaggcggtacaagcagctgctacaggccagagcggatggtcatttccagcagagagccctgcctgctgccttccacacatggaacagactctggcgatggcgccaccaggaaaatgtcctcagtgcaagagcaacacgtttccacagggagacattagagaagcaagtattttctctctggaggcagaagatgtttcagcttctaaacctcgggtagcagatagaactgatcatcctgtgactcagtagcggtcgttttccaaggagcagcta

SEQ ID NO: 372605 - DNA, 2220 bp, Homo sapiens
  misc_feature (1693)..(1693): n is a, c, g, or t
  misc_feature (2220)..(2220): n is a, c, g, or t
tgcttattaattacattttaaaatgaagggttacaaaaagagatgagcctggcatttctaattcgggggccttgggacctctcccctccaagtgcaagttgtagcaacctgccgggtccacgcatgggcgggtcatactccacgggttccggtttccactccctgtgaaccaaaagccagagaggcccacgcacgagtccggaagtgagggagggaggactttcgtacgcagccgcctcccagctggaacctcatctttagtgctcggccgcgggcggcgtaactcggggttccgcctcggaatacctcccacttctcttgtctaagaggagcagtagcaagctgagctcagagcgaagctggcgagccaaggagataaagaaccctcggtggggatgcccagagggtgcatgctccacgcccctcgaaaccgattctcattgctgctgctgcaaagcaacccgaagtgcgccacctacccgactgaggctgcgcaagccccggggtctgggcggggtggtcctcgtgcgcgccgcgtcgccgtggagacgagggcgggcccgcgcgagactggcgtctagaggcgcgcgaagcgctgaggcgggcgtggaccgcgcgggagttaagaagcaggtcccggatcgccgtataccgccgggttttctcccaacgtcaggcccgatggctcggcttccccagttagaaggggaagataaaagactttgattcatgaagaatctgctcactgagaagtgtatatcaagccacaatttccatcaaaaagtgattaagcagagaatggagaagaaggttgattccaggtattttaaggatggtgcagttaagaaaccttattctgcaaagacactgtccaacaagaagtcttctgcatcctttgggatccggagggagttacctagtaccagtcatctagtgcagtatcgtggcacacatacttgtacccgacagggccggttaagagaactgcgcatcagatgcgtggccagaaagttcttatatttatggattcgaatgacttttggaagagtatttccctctaaagccagattttactatgagcagcgattactacggaaggtcttcgaagaatggaaagaggagtggtgggttttccagcacgagtggaaactctgtgttcgagctgactgtcactacaggtattacctgtacaacctgatgttccagacgtggaagacctatgtgcgtcagcagcaggagatgaggaacaagtacattagagccgaggttcatgatgcaaagcaaaagatgcgacaggcctggaagtcctggttgatctacgtggttgttcgtaggaccaaacttcagatgcagactacagctctggagtttaggcaacggattatcttacgggtgtggtggagcacgtggaggcagcgactaggacaggtccgtgtgagccgtgccctccatgcctctgctttgaagcacagggccctgagcctccaggtgcaggcttggtcacagtggcgggaacagctcctgtatgtccagaaggagaaacaaaaggttgtctctgcagtgaaacatcatcagcactggcaaaaacggagatttctaaaggcctggcttgaatacctgcaagtccgcagagtgaagagacagcagaatgagatggctgagcgattccatcatgtcactgtgctccagatanacttctgtgactggcagcaggcctgggagcggagggagagcttgtacgctcaccatgcccaggtggagaaactggccaggaagatggccctgcggcgcgcctttactcactggaaacactacatgctgctgtgtgcagaagaagctgcccagtttgagatggcagaagagcaccacaggcacagccagctgtatttttgctttagagccctaaaagacaatgtgacccacgctcatctccagcaaataagaaggaatcttgctcaccagcagcatggtgtcacgctgctgcacaggttctggaacctctggcggtctcagattgagcagaaaaaggaaagagagctgctccccttactgcatgctgcctgggaccactacagaatagcactgctgtgcaaatgtatcgaattgtggctacagtatactcagaagaggcggtacaagcagctgctacaggccagagcggatgtcattttcagcaaacagctatgcccattgctttgcattcactagcggtcgtttccn

SEQ ID NO: 372606 - DNA, 993 bp, Homo sapiens
aatcaagtatcaaagatccctatggcctaaggcccgctgtccggggcacctgcttggtttgatgtgtgtcacgtgactctgttctgggacgtacaggtagtacaaggataggtaaacaaagtctccagataccttcccctgtccccacagcaagatcaggagggaagcagcagttcctaccacccatgcttgcagcgccctgtgcagcacgctgtgctgtctgtgggtactagccttgtagcgaaagcagctcctttccctggagtcccatggtttgacttaggaggtgagggcctgtgagacagtttctccctgtcgtctgggagggtctgctggccctgggaccaggggctgttggcctcttcctaccctttttgagttctctgggcatggcagccttgtggtagatgcacctctgaggcctgcctaaacagggggaagtgtgggcccaagagcagcctcagtcttccttgtcccctacagacttaccagggcagggtgcgaagcatcctccgggaggtggcagccagggagagccagcacaacaggcagctgctgcgcggggcattacgtcgctggaaagagaacaccatggcccgagtggatgaagccaaaaaaacctttcaagcaagtactcattacagaaggaccatatgttccaaggtgaggtataaggaggcaagctggtcacccaggagagttgggactgtgttctggtgagggcgtgggatgtagggggtggtgccagagatttgaactgaataaggaacctagaaaatgggtaactttcctccagcacacacacaaacatccatgtgggcacatgtttagttttttactgaattacaaaccaatatgcattaaatagaaacataacacatcataagtgaactagttcttatcagaaccagtattttctttttttctttttttttttttttttttttttgagacagtctgggtgacagagtgagactccgtctcaaaaaaaaa

SEQ ID NO: 372607 - DNA, 217 bp, Homo sapiens
cctcctgccttggcctcccaaagtattaggattgcagacatgggccactgtgcccagccacttaattcacctcttatacgatagcatggtataaaaggaaaaatccaattatttggaacttctagttctgtttgggttaatttttatgtttgttttaagtgctttacattcttccttgttttttagggagacattagagaagcaagtattttctctc

SEQ ID NO: 372608 - DNA, 445 bp, Homo sapiens
cctgggcaacacagcaacactccatctcaaaaaaaaaaaaaaatgcagaggagacaggcccgtgactcagctgcactcagtggtctggggaccattcaacatgcagcaacctcagagcttccagggcaacagactggcgcctcatccttggctctgcacagggggagagagacaaggagtgtgttcttgcccaggcccacctgagttgctgtctgctggggagggcggaggagactgggagaggaaaaagaacaagtgtttggctcccaagcaggggcctgcagttcaggtcaggggccctaccagaccacctctctccacccgatacccgcatcagaattagctgaggtgcctctccctgagccggatggggctctgccaaggacccagcctggcaggcagtgggtatctccacccctcaggtcctgtcggcggcaagcgagca

SEQ ID NO: 372609 - DNA, 294 bp, Homo sapiens
ctgtggtgacacggggtgctccctggttgcttgcgggactttcccctacagtaccaggccctgtgtgcaggggcaggctagacactgagctggcacggccagtgcctgggaagcccagctcctgcagctgggagcctggtcttcccccacccctgcagggcaggcagtgacaaggacttggtgtccccctccctggcttcctcctagcttccttgctcagcatctacccttctttcctttgcaggtgtcagcacagcgggctactcctagggataagcccccggtcccctcatc

SEQ ID NO: 372610 - DNA, 436 bp, Homo sapiens
ttccctggagtcccatggtttgacttaggaggtgagggcctgtgagacagtttctccctgtcgtctgggagggtctgctggccctgggaccaggggctgttggcctcttcctaccctttttgagttctctgggcatggcagccttgtggtagatgcacctctgaggcctgcctaaacagggggaagtgtgggcccaagagcagcctcagtcttccttgtcccctacagacttaccagggcagggtgcgaagcatcctccgggaggtggcagccagggagagccagcacaacaggcagctgctgcggtgagtctcccgggcgcctcccaagctccagctggggaacaaggaatgcactccaaaccccagccttttagggggtcctgctgagggccaggtcggggatgatcccgggttcctagtcgctaatatcatgg

SEQ ID NO: 372611 - DNA, 591 bp, Homo sapiens
gagcttttaccgcaaatcaagcacttacctcatcaaatcatcacagaacccctaagaagcacgtatttatagatgaggccagagaggttaatttacactcacacagatgatgtataaaatggaggcaaagcaggaagccacccccaactcagaccccagcccacggtagctgctttctcctctgtctgcagtgcctggccctgcggggagcggagcggcagaagctgatgcgagcagacctgcaccaccagcacagcgtgctgcacagggcgctgcaggcatgggtggtaggaactgctgcttccctcctgatcttgctgtggggacaggggaggtttctggagactttgttttccttccttgttcttcctgtccgtcccagaacagagtcacgtgacacacctcaaaccaagcaggtgccccggacagcgggccttaggccatagggttctttgattcttgcttggccaagtggaaacaagtgctgtctgtgggtactagccttgtagcgaaagcagctcctttccctggagtcccatggtttgacttaggaggtgagggcctgtgagacagtttctccctgtcgtctgg

SEQ ID NO: 372612 - DNA, 4467 bp, Homo sapiens
  misc_feature (1)..(2): n is a, c, g, or t
  misc_feature (12)..(12): n is a, c, g, or t
  misc_feature (169)..(169): n is a, c, g, or t
  misc_feature (185)..(185): n is a, c, g, or t
  misc_feature (555)..(555): n is a, c, g, or t
  misc_feature (3854)..(3854): n is a, c, g, or t
nncgatacaccngtacagcagtgctattctgtagtggtcccaggcagcatgcagtaaggggagcagctctctttcctttttctgctcaatctgagaccgccagaggttccagaacctgtgcagcagcgtgacaccatgctgctggtgagcaagattccttcttatttgntggagatgagcgtggntcacattgtcttttagggctctaaagcaaaaatacagctctggagtttaggcaacggattatcttacgggtgtggtggagcacgtggaggcagcgactaggacaggtccgtgtgagccgtgccctccatgcctctgctttgaagcacagggccctgagcctccaggtgcaggcttggtcacagtggcgggaacagctcctgtatgtccagaaggagaaacaaaaggttgtctctgcagtgaaacatcatcagcactggcaaaaacggagatttctaaaggcctggcttgaatacctgcaagtccgcagagtgaagagacagcagaatgagatggctgagcgattccatcatgtcactgtgctccagatanacttctgtgactggcagcaggcctgggagcggagggagagcttgtacgctcaccatgcccaggtggagaaactggccaggaagatggccctgcggcgcgcctttactcactggaaacactacatgctgctgtgtgcagaagaagctgcccagtttgagatggcagaagagcaccacaggcacagccagctgtatttttgctttagagccctaaaagacaatgtgacccacgctcatctccagcaaataagaaggaatcttgctcaccagcagcatggtgtcacgctgctgcacaggttctggaacctctggcggtctcagattgagcagaaaaaggaaagagagctgctccccttactgcatgctgcctgggaccactacagaatagcactgctgtgcaaatgtatcgaattgtggctacagtatactcagaagaggcggtacaagcagctgctacaggccagagcggatggtcatttccagcagagagccctgcctgctgccttccacacatggaacagactctggcgatggcgccaccaggaaaatgtcctcagtgcaagagcaacacgtttccacagggagacattagagaagcaagtattttctctctggaggcagaagatgtttcagcatcgagaaaaccgcctggcagagagaatggccatccttcacgcagagcgacagcttctgtataggtcttggttcatgtggcaccagcaggcagcagcacgtcaccaggagcaggagtggcaaacagtggcctgtgcccaccaccgccacgggcggctcaagaaagctttctgcctctggagggaaagtgcccaagggctcagaacagagaggacgggcagggtgcgggcagcagaattccacatggcccagctcctgcgttgggcctggagccagtggagggagtgcctggccctgcggggagcggagcggcagaagctgatgcgagcagacctgcaccaccagcacagcgtgctgcacagggcgctgcaggcatgggtgacttaccagggcagggtgcgaagcatcctccgggaggtggcagccagggagagccagcacaacaggcagctgctgcgcggggcattacgtcgctggaaagagaacaccatggcccgagtggatgaagccaaaaaaacctttcaagcaagtactcattacagaaggaccatatgttccaaggtcctggtccagtggcgggaagctgtgtcagtgcagatgtattaccgacagcaggaggactgtgccatctgggaggcccagaaggtgctggacaggggctgtctgcggacctggtttcagcgctggtgggactgcagccggaggtcagcccagcagagactgcagctggagagggcagtgcaacaccaccaccggcagctgctgctggaggggctggcccggtggaagacgcaccatctgcagtgtgtcaggaagaggctcctgcacaggcagagcacccaactgctggcacagagactcagccggacctgcttccgccagtggagacaacagctggcagccaggaggcaggagcagcgggcgacagtgcgggccctgtggttctgggccttctcgctgcaggcaaaggtgtgggccacgtggctggcctttgtactggaaaggaggagaaagaaggcgcggctgcagtgggcgctccaggcctaccaggggcagctcctccaggagggtgccacgcggctcctgcgctttgcagccagcatgaaggcctcccggcagcagctgcaggcccagcagcaggtccaggtaggcccagggccccttcctgtggggagcaggcagggtgtggcatgagctgaccagaggctgtgttgtaggcggctcacagtctccatcgtgccgtccgccgctgtgccacgctctggaaacagaaagtgctgggccggggcgggaagcctcagcccctggcagccatcgcacccagcaggaaagtgacgtttgagggtccccttctcaaccgcattgctgctggggctggggatggcacccttgagaccaagaggccacaggcttctcggcctctgggagctctgggccgcctggctgctgaggagccccacgccctggagctgtgagtagcctgtgctcaccttgtcctcgcttccaccctgggcaaaaggttggatggcatagcagggaggaaaacagccctgacgggatgggacgggctggtcacggcttgtcacagctgagctgctgggaaccccctcttctccagccagatcccatccctcccacggcaagagggagagaatggagtgggatttccaaaccctctctcctttgcctggccaaagctcaggaaataggtgtcccctcctctgcaagacttcctaacctctctccgtcctgctgacacgatcttttccgggagtcatacacgttgttgacaaagggaacaagctcagctcctacccgtgcctgccggcctctcttctgctccatcacagccaagacactggctttttgtcagaagcccctctttcttgtgtgagctggcacctgtccctctgcccacccctactatggtctcctcaaaccctaacctgccctgccccatgctgatgaagctggtggctcccacagcaaccagcactacccgagagccttgggcctcgggggagatgtcaggtgggtgcatggggcctgggtcccggtccctgctgtgctcctcactgtttgactgaccttgatgggatcctgaacgtctcagaggctgctcccctgtgacatggaccctggcgacctgtacaccagcgtcaccagggttgttctgcaggtcaaaagagacaatgtgggtgaagcagtcccctggcgtcaggtaccttttgtcggaactgctgggagctctatggcccaggcccaccccagcttacttgctgaccttggcctcgcctttcctgactttcagtctccctataaaattggagatcccacagagatctcagacccccctgcagcccctggtcagcccaggggaacagaccccatgtttctttccagcaacactgcccactcagcgaggaagcagccgcgacgcccacacttcctgttggagcctgcgcagagccagaggcctcagaagccacaggaacatggcctaggcatggctcagccagcagccccctccctgacgcggcccttcctggcagaggccccgacagcactggtcccacacagccccctgcctggggccctgtcaagcgcccctggcccgaagcagcccccgacggcaagcacaggcccggagctgctgctgctgcctcnttcctccttcatgccctgcggggcggctgcaccagccagggtgtcagcacagcgggctactcctagggataagcccccggtcccctcatccctggccagtgtccctgacccccatctactccttcctggggacttctcagccaccagggctgggcctggactttcaactgcaggcagcctggaccttgaggctgaacttgaggagatccagcagcaactactgcactaccagaccaccaagcagaacctctggtcctgtcggcggcaagcgagcagcctgcgcaggtggctggagctgaacagagaggagccggggcctgaggaccaggaagtagagcagcaggtgcagaaagagctggaacaggtggaaatgcagatccagctgctggcagaggagctccaggctcagcgccagcccattggcgcctgcgttgcccgcatccaggccctgcggcaggccctgtgctagcgtgttcgcaccaggaacgcaggtgctgggctgtcggggaggcctcaggccacctccaggaacagaacacagttttaagtttgattttttttatttcaaaatgctttgcaattaaatgaattactgttcaaaaaaaaaaaactt

SEQ ID NO: 372613 - DNA, 3337 bp, Homo sapiens
  misc_feature (2724)..(2724): n is a, c, g, or t
attgtattgtgttctctgagacatttgacagcgttgataatttcttcttgaaactaaaaacactcttccagttcccccctgctctgagcattcttttttcctcttttctgctgtgggctttcccctgctttgccctatagatgtggttttcccatgccttcttctctttctgacccagaccatctaatcagcctccggcccccactctggctttacgtacttccagtggggccggaggctgattagatggtctgggtcagaacagagaggacgggcagggtgcgggcagcagaattccacatggcccagctcctgcgttgggcctggagccagtggagggagtgcctggccctgcggggagcggagcggcagaagctgatgcgagcagacctgcaccaccagcacagcgtgctgcacagggcgctgcaggcatgggtgacttaccagggcagggtgcgaagcatcctccgggaggtggcagccagggagagccagcacaacaggcagctgctgcgcggggcattacgtcgctggaaagagaacaccatggcccgagtggatgaagccaaaaaaacctttcaagcaagtactcattacagaaggaccatatgttccaaggtcctggtccagtggcgggaagctgtgtcagtgcagatgtattaccgacagcaggaggactgtgccatctgggaggcccagaaggtgctggacaggggctgtctgcggacctggtttcagcgctggtgggactgcagccggaggtcagcccagcagagactgcagctggagagggcagtgcaacaccaccaccggcagctgctgctggaggggctggcccggtggaagacgcaccatctgcagtgtgtcaggaagaggctcctgcacaggcagagcacccaactgctggcacagagactcagccggacctgcttccgccagtggagacaacagctggcagccaggaggcaggagcagcgggcgacagtgcgggccctgtggttctgggccttctcgctgcaggcaaaggtgtgggccacgtggctggcctttgtactggaaaggaggagaaagaaggcgcggctgcagtgggcgctccaggcctaccaggggcagctcctccaggagggtgccacgcggctcctgcgctttgcagccagcatgaaggcctcccggcagcagctgcaggcccagcagcaggtccaggtaggcccagggccccttcctgtggggagcaggcagggtgtggcatgagctgaccagaggctgtgttgtaggcggctcacagtctccatcgtgccgtccgccgctgtgccacgctctggaaacagaaagtgctgggccggggcgggaagcctcagcccctggcagccatcgcacccagcaggaaagtgacgtttgagggtccccttctcaaccgcattgctgctggggctggggatggcacccttgagaccaagaggccacaggcttctcggcctctgggagctctgggccgcctggctgctgaggagccccacgccctggagctgtgagtagcctgtgctcaccttgtcctcgcttccaccctgggcaaaaggttggatggcatagcagggaggaaaacagccctgacgggatgggacgggctggtcacggcttgtcacagctgagctgctgggaaccccctcttctccagccagatcccatccctcccacggcaagagggagagaatggagtgggatttccaaaccctctctcctttgcctggccaaagctcaggaaataggtgtcccctcctctgcaagacttcctaacctctctccgtcctgctgacacgatcttttccgggagtcatacacgttgttgacaaagggaacaagctcagctcctacccgtgcctgccggcctctcttctgctccatcacagccaagacactggctttttgtcagaagcccctctttcttgtgtgagctggcacctgtccctctgcccacccctactatggtctcctcaaaccctaacctgccctgccccatgctgatgaagctggtggctcccacagcaaccagcactacccgagagccttgggcctcgggggagatgtcaggtgggtgcatggggcctgggtcccggtccctgctgtgctcctcactgtttgactgaccttgatgggatcctgaacgtctcagaggctgctcccctgtgacatggaccctggcgacctgtacaccagcgtcaccagggttgttctgcaggtcaaaagagacaatgtgggtgaagcagtcccctggcgtcaggtaccttttgtcggaactgctgggagctctatggcccaggcccaccccagcttacttgctgaccttggcctcgcctttcctgactttcagtctccctataaaattggagatcccacagagatctcagacccccctgcagcccctggtcagcccaggggaacagaccccatgtttctttccagcaacactgcccactcagcgaggaagcagccgcgacgcccacacttcctgttggagcctgcgcagagccagaggcctcagaagccacaggaacatggcctaggcatggctcagccagcagccccctccctgacgcggcccttcctggcagaggccccgacagcactggtcccacacagccccctgcctggggccctgtcaagcgcccctggcccgaagcagcccccgacggcaagcacaggcccggagctgctgctgctgcctcnttcctccttcatgccctgcggggcggctgcaccagccagggtgtcagcacagcgggctactcctagggataagcccccggtcccctcatccctggccagtgtccctgacccccatctactccttcctggggacttctcagccaccagggctgggcctggactttcaactgcaggcagcctggaccttgaggctgaacttgaggagatccagcagcaactactgcactaccagaccaccaagcagaacctctggtcctgtcggcggcaagcgagcagcctgcgcaggtggctggagctgaacagagaggagccggggcctgaggaccaggaagtagagcagcaggtgcagaaagagctggaacaggtggaaatgcagatccagctgctggcagaggagctccaggctcagcgccagcccattggcgcctgcgttgcccgcatccaggccctgcggcaggccctgtgctagcgtgttcgcaccaggaacgcaggtgctgggctgtcggggaggcctcaggccacctccaggaacagaacacagttttaagtttgattttttttatttcaaaatgctttgcaattaaatgaattactgttcaaaaaaaaaaaactt

SEQ ID NO: 372614 - DNA, 2291 bp, Homo sapiens
  misc_feature (21)..(21): n is a, c, g, or t
  misc_feature (1678)..(1678): n is a, c, g, or t
gaatcgagaataggctaggtncgaggctgcgcggctgcagtgggcgctccaggcctaccaggggcagctcctccaggagggtgccacgcggctcctgcgctttgcagccagcatgaaggcctcccggcagcagctgcaggcccagcagcaggtccaggtaggcccagggccccttcctgtggggagcaggcagggtgtggcatgagctgaccagaggctgtgttgtaggcggctcacagtctccatcgtgccgtccgccgctgtgccacgctctggaaacagaaagtgctgggccggggcgggaagcctcagcccctggcagccatcgcacccagcaggaaagtgacgtttgagggtccccttctcaaccgcattgctgctggggctggggatggcacccttgagaccaagaggccacaggcttctcggcctctgggagctctgggccgcctggctgctgaggagccccacgccctggagctgtgagtagcctgtgctcaccttgtcctcgcttccaccctgggcaaaaggttggatggcatagcagggaggaaaacagccctgacgggatgggacgggctggtcacggcttgtcacagctgagctgctgggaaccccctcttctccagccagatcccatccctcccacggcaagagggagagaatggagtgggatttccaaaccctctctcctttgcctggccaaagctcaggaaataggtgtcccctcctctgcaagacttcctaacctctctccgtcctgctgacacgatcttttccgggagtcatacacgttgttgacaaagggaacaagctcagctcctacccgtgcctgccggcctctcttctgctccatcacagccaagacactggctttttgtcagaagcccctctttcttgtgtgagctggcacctgtccctctgcccacccctactatggtctcctcaaaccctaacctgccctgccccatgctgatgaagctggtggctcccacagcaaccagcactacccgagagccttgggcctcgggggagatgtcaggtgggtgcatggggcctgggtcccggtccctgctgtgctcctcactgtttgactgaccttgatgggatcctgaacgtctcagaggctgctcccctgtgacatggaccctggcgacctgtacaccagcgtcaccagggttgttctgcaggtcaaaagagacaatgtgggtgaagcagtcccctggcgtcaggtaccttttgtcggaactgctgggagctctatggcccaggcccaccccagcttacttgctgaccttggcctcgcctttcctgactttcagtctccctataaaattggagatcccacagagatctcagacccccctgcagcccctggtcagcccaggggaacagaccccatgtttctttccagcaacactgcccactcagcgaggaagcagccgcgacgcccacacttcctgttggagcctgcgcagagccagaggcctcagaagccacaggaacatggcctaggcatggctcagccagcagccccctccctgacgcggcccttcctggcagaggccccgacagcactggtcccacacagccccctgcctggggccctgtcaagcgcccctggcccgaagcagcccccgacggcaagcacaggcccggagctgctgctgctgcctcnttcctccttcatgccctgcggggcggctgcaccagccagggtgtcagcacagcgggctactcctagggataagcccccggtcccctcatccctggccagtgtccctgacccccatctactccttcctggggacttctcagccaccagggctgggcctggactttcaactgcaggcagcctggaccttgaggctgaacttgaggagatccagcagcaactactgcactaccagaccaccaagcagaacctctggtcctgtcggcggcaagcgagcagcctgcgcaggtggctggagctgaacagagaggagccggggcctgaggaccaggaagtagagcagcaggtgcagaaagagctggaacaggtggaaatgcagatccagctgctggcagaggagctccaggctcagcgccagcccattggcgcctgcgttgcccgcatccaggccctgcggcaggccctgtgctagcgtgttcgcaccaggaacgcaggtgctgggctgtcggggaggcctcaggccacctccaggaacagaacacagttttaagtttgattttttttatttcaaaatgctttgcaattaaatgaattactgttcaaaaaaaaaaaactt

SEQ ID NO: 372615 - DNA, 2339 bp, Homo sapiens
  misc_feature (1693)..(1693): n is a, c, g, or t
tgcttattaattacattttaaaatgaagggttacaaaaagagatgagcctggcatttctaattcgggggccttgggacctctcccctccaagtgcaagttgtagcaacctgccgggtccacgcatgggcgggtcatactccacgggttccggtttccactccctgtgaaccaaaagccagagaggcccacgcacgagtccggaagtgagggagggaggactttcgtacgcagccgcctcccagctggaacctcatctttagtgctcggccgcgggcggcgtaactcggggttccgcctcggaatacctcccacttctcttgtctaagaggagcagtagcaagctgagctcagagcgaagctggcgagccaaggagataaagaaccctcggtggggatgcccagagggtgcatgctccacgcccctcgaaaccgattctcattgctgctgctgcaaagcaacccgaagtgcgccacctacccgactgaggctgcgcaagccccggggtctgggcggggtggtcctcgtgcgcgccgcgtcgccgtggagacgagggcgggcccgcgcgagactggcgtctagaggcgcgcgaagcgctgaggcgggcgtggaccgcgcgggagttaagaagcaggtcccggatcgccgtataccgccgggttttctcccaacgtcaggcccgatggctcggcttccccagttagaaggggaagataaaagactttgattcatgaagaatctgctcactgagaagtgtatatcaagccacaatttccatcaaaaagtgattaagcagagaatggagaagaaggttgattccaggtattttaaggatggtgcagttaagaaaccttattctgcaaagacactgtccaacaagaagtcttctgcatcctttgggatccggagggagttacctagtaccagtcatctagtgcagtatcgtggcacacatacttgtacccgacagggccggttaagagaactgcgcatcagatgcgtggccagaaagttcttatatttatggattcgaatgacttttggaagagtatttccctctaaagccagattttactatgagcagcgattactacggaaggtcttcgaagaatggaaagaggagtggtgggttttccagcacgagtggaaactctgtgttcgagctgactgtcactacaggtattacctgtacaacctgatgttccagacgtggaagacctatgtgcgtcagcagcaggagatgaggaacaagtacattagagccgaggttcatgatgcaaagcaaaagatgcgacaggcctggaagtcctggttgatctacgtggttgttcgtaggaccaaacttcagatgcagactacagctctggagtttaggcaacggattatcttacgggtgtggtggagcacgtggaggcagcgactaggacaggtccgtgtgagccgtgccctccatgcctctgctttgaagcacagggccctgagcctccaggtgcaggcttggtcacagtggcgggaacagctcctgtatgtccagaaggagaaacaaaaggttgtctctgcagtgaaacatcatcagcactggcaaaaacggagatttctaaaggcctggcttgaatacctgcaagtccgcagagtgaagagacagcagaatgagatggctgagcgattccatcatgtcactgtgctccagatanacttctgtgactggcagcaggcctgggagcggagggagagcttgtacgctcaccatgcccaggtggagaaactggccaggaagatggccctgcggcgcgcctttactcactggaaacactacatgctgctgtgtgcagaagaagctgcccagtttgagatggcagaagagcaccacaggcacagccagctgctgctgcacaggttctggaacctctggcggtctcagattgagcagaaaaaggaaagagagctgctccccttactgcatgctgcctgggaccactacagaatagcactgctgtgcaaatgtatcgaattgtggctacagtatactcagaagaggcggtacaagcagctgctacaggccagagcggatggtcatttccagcagagagccctgcctgctgccttccacacatggaacagactctggcgatggcgccaccaggaaaatgtcctcagtgcaagagcaacacgtttccacaggaggacgggcagggtgcgggcagcagaattccacatggtgctgggctgtcggggaggcctcaggccacctccaggaacagaacacagttttaagtttgattttttttatttcaaaatgctttgcaattaaatgaattactgttcaaaaaaaaaaaactt

SEQ ID NO: 372616 - DNA, 1610 bp, Homo sapiens
tgcttattaattacattttaaaatgaagggttacaaaaagagatgagcctggcatttctaattcgggggccttgggacctctcccctccaagtgcaagttgtagcaacctgccgggtccacgcatgggcgggtcatactccacgggttccggtttccactccctgtgaaccaaaagccagagaggcccacgcacgagtccggaagtgagggagggaggactttcgtacgcagccgcctcccagctggaacctcatctttagtgctcggccgcgggcggcgtaactcggggttccgcctcggaatacctcccacttctcttgtctaagaggagcagtagcaagctgagctcagagcgaagctggcgagccaaggagataaagaaccctcggtggggatgcccagagggtgcatgctccacgcccctcgaaaccgattctcattgctgctgctgcaaagcaacccgaagtgcgccacctacccgactgaggctgcgcaagccccggggtctgggcggggtggtcctcgtgcgcgccgcgtcgccgtggagacgagggcgggcccgcgcgagactggcgtctagaggcgcgcgaagcgctgaggcgggcgtggaccgcgcgggagttaagaagcaggtcccggatcgccgtataccgccgggttttctcccaacgtcaggcccgatggctcggcttccccagttagaaggggaagataaaagactttgattcatgaagaatctgctcactgagaagtgtatatcaagccacaatttccatcaaaaagtgattaagcagagaatggagaagaaggttgattccaggtattttaaggatggtgcagttaagaaaccttattctgcaaagacactgtccaacaagaagtcttctgcatcctttgggatccggagggagttacctagtaccagtcatctagtgcagtatcgtggcacacatacttgtacccgacagggccggttaagagaactgcgcatcagatgcgtggccagaaagttcttatatttatggattcgaatgacttttggaagagtatttccctctaaagccagattttactatgagcagcgattactacggaaggtcttcgaagaatggaaagaggagtggtgggttttccagcacgagtggaaactctgtgttcgagctgactgtcactacaggtattacctgtacaacctgatgttccagacgtggaagacctatgtgcgtcagcagcaggagatgaggaacaagtacattagagccgaggttcatggtgagaaaaagaagtccatgtctgaagaagatgcccacatttactttgcagaaggtcataggaaggacaaacacattgtctcagagagagaggaactctaggccaaaggaagatttgtttgattctctttcatatttttcagaaagtgtgatctctgagtgggcacctgtatgattgatccctatggttttctccatatggcatggtttgagcccttaaaactcatttaatcagaatttgtgtgaactggctgttcctggcctgctggttcagtgggctggctgtgactctcctgtggcacctggggctgccatctatcttgctgcgtccgtagcgc

SEQ ID NO: 372617 - DNA, 522 bp, Homo sapiens
agcctacagacagcttctgggctggaccacgtcctgacatccattccttttgccttagtcattatttgtggcctgtaaattctttcctggcttctgtgcctctctcctacttgatttattctgttctctccttcctgtcctgcctcaggccatccttcacgcagagcgacagcttctgtataggtcttggttcatgtggcaccagcaggcagcagcacgtcaccaggagcaggagtggcaaacagtggcctgtgcccaccaccgccacgggcggctcaagaaagctttctgcctctggagggaaagtgcccaagggctcagaacagagtgagtggccagttctgccttacaagcctttccatcacaggccagctttgcttgttctagcagcaccatgagctccaagtgcctgtctggaggactgcattaccccagactctggttgtaagttctggaagttcaacctaaaagagtcttaagtaaaactaggttggccgggcacagtggctcacgcctgtaatc

SEQ ID NO: 372618 - DNA, 426 bp, Homo sapiens
tgataaatgaagtttaaaacttctaggtttagcaattctgggaagatactaaaagtaataattatatagaaccaactcaagaatgcatgttgcaattcctcaggtaaacactaaaagaacagtaaaagaaagtgtagttagcatgttactacaaataaataaatggatgtttgattaatgcagagaaaagttatgagaaaaaaagaatatagtaaacagggcaactaggtaggaaatagaggaaaacatagcagaaaaatctttgtaaccctggagtaggcaaggatttcttttttttcttttctttcttttttttttgagatggggtcttgctctgttgccaggctggagtgcagtggcgtgacctcagctccctgcaacctccgcctcccgggttcaagcgattcccctgcctcagcctcccaa

SEQ ID NO: 372619 - DNA, 261 bp, Homo sapiens
ccatgtgagccatatggctgtgttgcaattactccactctgccattgtagtgcaaaagctaccatagatgatacataaagaaaagagatggactgtgttgaaacataactttatttacaaaggcagcagccagacctaatttggctgttaggctgtaattgacccctagactagaggctggtggcagtttgggcagataggcaatagtaaggacttgaatggaaaagcaaggcccagcataaggaagatgtggattcagag

SEQ ID NO: 372620 - DNA, 677 bp, Homo sapiens
tgaaagaattatgcttttgaattgtggaagaattatttctgcttaagtttagaaatgagccagaagcggccaggcgtggtggctcacgcctgtaatctcagcactttcggaagccgaggtgggtggatcacctgagatcaggagatcgagaccatcgtggccaacacggtaaaaccctgtctctactaaaaatacaaaaattagctgggtgtggtggcatgtacctgtagtcccagctacttggaaggctgaggcaggagaatcatttgaactttgggaggcggaggttgcagtttgcttgagattcgcatcactgcactccagcctagtgacagagttgagattttgtctgtctcaaaaaaaaaaaaaaaaagaaagaaagaaatgagccagaagctttatgaaactgtacttgcctctgtttgaaaactgaaaggacaaacatgaattagtttttgatacttttggaatacatgtgagaccacattattctctattcaggttaagcaatgataagcgtgccctccattttaaatgctttctcttttataaatagagcctggtagtgcagcctttaaatgcaggtggtacaggtgtaaaatagttctgtaagtaactttccatgtctaaaagtgtcttaaacagctactgtgacattgatggagccatcgaaatat

SEQ ID NO: 372621 - DNA, 218 bp, Homo sapiens
aagttgcaaggaagaagatagtagtagggggagcagtgggatggctctgccaaatgactcagctgctagtgagggcctctgaaataaagttattggttcttactgctttgaagagtaaagtttgctttgataccctacccttcattgtttgagagttgaaaaagattgtttgaaactactgaaataatatccacataaaatatccacgttagtaagga

SEQ ID NO: 372622 - DNA, 1706 bp, Homo sapiens
gcgcggggggcggacccgccagctgcctgcgctgctcgccagcttgctcgcactcggctgtgcggcggggcaggcatgggagccgcgcgctctctcccggcgcccacacctgtctgagcggcgcagcgagccgcggcccgggcgggctgctcggcgcggaacagtgctcggcatggcagggattccagggctcctcttccttctcttctttctgctctgtgctgttgggcaagtgagcccttacagtgccccctggaaacccacttggcctgcataccgcctccctgtcgtcttgccccagtctaccctcaatttagccaagccagactttggagccgaagccaaattagaagtatcttcttcatgtggaccccagtgtcataagggaactccactgcccacttacgaagaggccaagcaatatctgtcttatgaaacgctctatgccaatggcagccgcacagagacgcaggtgggcatctacatcctcagcagtagtggagatggggcccaacaccgagactcagggtcttcaggaaagtctcgaaggaagcggcagatttatggctatgacagcaggttcagcatttttgggaaggacttcctgctcaactaccctttctcaacatcagtgaagttatccacgggctgcaccggcaccctggtggcagagaagcatgtcctcacagctgcccactgcatacacgatggaaaaacctatgtgaaaggaacccagaagcttcgagtgggcttcctaaagcccaagtttaaagatggtggtcgaggggccaacgactccacttcagccatgcccgagcagatgaaatttcagtggatccgggtgaaacgcacccatgtgcccaagggttggatcaagggcaatgccaatgacatcggcatggattatgattatgccctcctggaactcaaaaagccccacaagagaaaatttatgaagattggggtgagccctcctgctaagcagctgccagggggcagaattcacttctctggttatgacaatgaccgaccaggcaatttggtgtatcgcttctgtgacgtcaaagacgagacctatgacttgctctaccagcaatgcgatgcccagccaggggccagcgggtctggggtctatgtgaggatgtggaagagacagcagcagaagtgggagcgaaaaattattggcattttttcagggcaccagtgggtggacatgaatggttccccacaggatttcaacgtggctgtcagaatcactcctctcaaatatgcccagatttgctattggattaaaggaaactacctggattgtagggaggggtgacacagtgttccctcctggcagcaattaagggtcttcatgttcttattttaggagaggccaaattgttttttgtcattggcgtgcacacgtgtgtgtgtgtgtgtgtgtgtgtgtaaggtgtcttataatcttttacctatttcttacaattgcaagatgactggctttactatttgaaaactggtttgtgtatcatatcatatatcatttaagcagtttgaaggcatacttttgcatagaaataaaaaaaatactgatttggggcaatgaggaatatttgacaattaagttaatcttcacgtttttgcaaactttgatttttatttcatctgaacttgtttcaaagatttatattaaatatttggcatacaagagatatgaa

SEQ ID NO: 372623 - DNA, 732 bp, Homo sapiens
ttttcactctggatacatgaggaggactgaccatgtactgtacttcttttaacttctatagagcaatctctttgtatttatacaattatgacaacagtagtaagagaagaaggttcagaggatacaagcatgctgcagtacaaaaattctataaaaataccttttttgagtcattaacataaaatgaagaaaacagcagcagccaagaagagagatgttgaaatttaagagaggaagacagagaagaaaaatccactggataccttatgtgtaattcaccaatctgttggaacacttctgccacgtgtgaagagttttggcagaccaaatccacatgcctgaagtgatgcccaccaacaaagacataaaaattttcaacatttcaacagccatgttggaatcatctgcagaataccgaaaaagtgcccagttggagatttcataaaaataacaggcaatcacacacgttgcaggaactgtgtacagtactgagaacaccccaatcttgaccatcagtctttctaacttgtctgtctttgtcccatccttttgaagatttgaccgaattttgaacaaggccaccaaacctgcagcaatgaacaaagttccaatgaccaaataagtaaagaggggagccaccacgaacccggtgagggcatcgagattttggtttccaacatagcacaagccagtcagttcatctgcatccaccagtctcataatcaagatgac

SEQ ID NO: 372624 - DNA, 3774 bp, Homo sapiens
gcgcggggggcggacccgccagctgcctgcgctgctcgccagcttgctcgcactcggctgtgcggcggggcaggcatgggagccgcgcgctctctcccggcgcccacacctgtctgagcggcgcagcgagccgcggcccgggcgggctgctcggcgcggaacagtgctcggcatggcagggattccagggctcctcttccttctcttctttctgctctgtgctgttgggcaagtgagcccttacagtgccccctggaaacccacttggcctgcataccgcctccctgtcgtcttgccccagtctaccctcaatttagccaagccagactttggagccgaagccaaattagaagtatcttcttcatgtggaccccagtgtcataagggaactccactgcccacttacgaagaggccaagcaatatctgtcttatgaaacgctctatgccaatggcagccgcacagagacgcaggtgggcatctacatcctcagcagtagtggagatggggcccaacaccgagactcagggtcttcaggaaagtctcgaaggaagcggcagatttatggctatgacagcaggttcagcatttttgggaaggacttcctgctcaactaccctttctcaacatcagtgaagttatccacgggctgcaccggcaccctggtggcagagaagcatgtcctcacagctgcccactgcatacacgatggaaaaacctatgtgaaaggaacccagaagcttcgagtgggcttcctaaagcccaagtttaaagatggtggtcgaggggccaacgactccacttcagccatgcccgagcagatgaaatttcagtggatccgggtgaaacgcacccatgtgcccaagggttggatcaagggcaatgccaatgacatcggcatggattatgattatgccctcctggaactcaaaaagccccacaagagaaaatttatgaagattggggtgagccctcctgctaagcagctgccagggggcagaattcacttctctggttatgacaatgaccgaccaggcaatttggtgtatcgcttctgtgacgtcaaagacgagacctatgacttgctctaccagcaatgcgatgcccagccaggggccagcgggtctggggtctatgtgaggatgtggaagagacagcagcagaagtgggagcgaaaaattattggcattttttcagggcaccagtgggtggacatgaatggttccccacaggatttcaacgtggctgtcagaatcactcctctcaaatatgcccagatttgctattggattaaaggaaactacctggattgtagggaggggtgacacagtgttccctcctggcagcaattaagggtcttcatgttcttattttaggagaggccaaattgttttttgtcattggcgtgcacacgtgtgtgtgtgtgtgtgtgtgtgtgtaaggtgtcttataatcttttacctatttcttacaattgcaagatgactggctttactatttgaaaactggtttgtgtatcatatcatatatcatttaagcagtttgaaggcatacttttgcatagaaataaaaaaaatactgatttggggcaatgaggaatatttgacaattaagttaatcttcacgtttttgcaaactttgatttttatttcatctgaacttgtttcaaagatttatattaaatatttggcatacaagagatatgaatgaattcttatatgtgtgcatgtgtgttttcttctgagattcatcttggtggtgggtttttttgtttttttaattcagtgcctgatctttaatgcttccataaggcagtgttcccatttaggaactttgacagcatttgttaggcagaatattttggatttggaggcatttgcatggtagtctttgaacagtaaaatgatgtgttgactatactgatacacatattaaactataccttatagtaaaccagtatcccaagctgcttttagttccaaaaatagtttcttttccaaaggttgttgctctactttgtaggaagtctttgcatatggccctcccaactttaaagtcataccagagtggccaagagtgtttatcccaacccttccatttaacaggatttcactcacatttctggaactagctatttttcagaagacaataatcagggcttaattagaacaggctgtatttcctcccagcaaacagttgtggccacactaaaaacaatcatagcattttacccctggattatagcacatctcatgttttatcatttggatggagtaatttaaaatgaattaaattccagagaacaatggaagcattgcctggcagatgtcacaacagaataaccacttgtttggagcctggcacagtcctccagcctgatcaaaaattattctgcatagttttcagtgtgctttctgggagctatgtacttcttcaatttggaaacttttctctctcatttatagtgaaaatacttggaagttactttaagaaaaccagtgtggcctttttccctctagctttaaaagggccgcttttgctggaatgctctaggttatagataaacaattaggtataatagcaaaaatgaaaattggaagaatgcaaaatggatcagaatcatgccttccaataaaggcctttacacatgttttatcaatatgattatcaaatcacagcatatacagaaaagacttggacttattgtatgtttttattttatggctctcggcctaagcacttctttctaaatgtatcggagaaaaaatcaaatggactacaagcacgtgtttgctgtgcttgcaccccaggtaaacctgcattgtagcaatttgtaaggatattcagatggagcactgtcacttagacattctctgggggattttctgcttgtctttcttgagctttttggaaggataattctgataaggcactcaagaaacgtacaaccacagtgctttcttcaaatcatatgagaaatactatgcatagcaaggagatgcagagccgccaggaaaattctgagttccagcacaattttctttggaatctaacaggaatctagcctgaggaagaagggaggtctccatttctatgtctggtatttgggggttttgtttgtttttgctttagcttggtgaaaaaaagttcactgaacaccaagaccagaatggatttttttaaaaaaatagatgttccttttgtgaagcaccttgattccttgattttgattttttgcaaagttagacaatggcacaaagtcaaaatgaaatcaatgtttagttcacaagtagatgtaatttactaaagaatgatacacccatatgctatatacagcttaactcacagaactgtaaaagaaaattataaaataattcaacatgtccatctttttagtgataataaaagaaagcatggtattaaactatcatagaagtagacagaaaaagaaaaaaggactcatggcattattaatataattagtgctttacatgtgttagttatacatattagaagcatatttgcctagtaaggctagtagaaccacatttcccaaagtgtgctccttaaacactcatgccttatgattttctaccaaaagtaaaaagggttgtattaagtcagaggaagatgcctctccattttccctctctttatcagaggttcacatgcctgtctgcacattaaaagctctgggaagacctgttgtaaagggacaagttgaggttgtaaaatctgcatttaaataaacatctttgatcacaaaaaaaaaaat

SEQ ID NO: 372625 - DNA, 2249 bp, Homo sapiens
gcgcggggggcggacccgccagctgcctgcgctgctcgccagcttgctcgcactcggctgtgcggcggggcaggcatgggagccgcgcgctctctcccggcgcccacacctgtctgagcggcgcagcgagccgcggcccgggcgggctgctcggcgcggaacagtgctcggcatggcagggattccagggctcctcttccttctcttctttctgctctgtgctgttgggcaagtgagcccttacagtgccccctggaaacccacttggcctgcataccgcctccctgtcgtcttgccccagtctaccctcaatttagccaagccagactttggagccgaagccaaattagaagtatcttcttcatgtggaccccagtgtcataagggaactccactgcccacttacgaagaggccaagcaatatctgtcttatgaaacgctctatgccaatggcagccgcacagagacgcaggtgggcatctacatcctcagcagtagtggagatggggcccaacaccgagactcagggtcttcaggaaagtctcgaaggaagcggcagatttatggctatgacagcaggttcagcatttttgggaaggacttcctgctcaactaccctttctcaacatcagtgaagttatccacgggctgcaccggcaccctggtggcagagaagcatgtcctcacagctgcccactgcatacacgatggaaaaacctatgtgaaaggaacccagaagcttcgagtgggcttcctaaagcccaagtttaaagatggtggtcgaggggccaacgactccacttcagccatgcccgagcagatgaaatttcagtggatccgggtgaaacgcacccatgtgcccaagggttggatcaagggcaatgccaatgacatcggcatggattatgattatgccctcctggaactcaaaaagccccacaagagaaaatttatgaagattggggtgagccctcctgctaagcagctgccagggggcagaattcacttctctggttatgacaatgaccgaccaggcaatttggtgtatcgcttctgtgacgtcaaagacgagacctatgacttgctctaccagcaatgcgatgcccagccaggggccagcgggtctggggtctatgtgaggatgtggaagagacagcagcagaagtgggagcgaaaaattattggcattttttcagggcaccagtgggtggacatgaatggttccccacaggatttcaacgtggctgtcagaatcactcctctcaaatatgcccagatttgctattggattaaaggaaactacctggattgtagggaggggtgacacagtgttccctcctggcagcaattaagggtcttcatgttcttattttaggagaggccaaattgttttttgtcattggcgtgcacacgtgtgtgtgtgtgtgtgtgtgtgtgtaaggtgtcttataatcttttacctatttcttacaattgcaagatgactggctttactatttgaaaactggtttgtgtatcatatcatatatcatttaagcagtttgaaggcatacttttgcatagaaataaaaaaaatactgatttggggcaatgaggaatatttgacaattaagttaatcttcacgtttttgcaaactttgatttttatttcatctgaacttgtttcaaagatttatattaaatatttggcatacaagagatatgaaaaaaaaaaaaaaaaaaaaaaaaaaaaaaaaaaaaaaaaaaaaaaaaaaaaaaaaaaaaaaaaaaaaaaaaaaaaaaaaaaaaagggggggcgcgcgcccgccaaaaaccccccggggggcgccccccaccccccccccttttgaaggggccccccggggaggctgaatattataataagcagcgacgaaagcgggggggcggcgcgtaataataaaacaacaagcgcgcgagagaggagagcgaaaaaacacgcgctgccacgggggagaacgtactgtggggaaagaggaccacccccctcttccgtgggggcgggaggggacaaccaataggatgtgggggagacaacacccacaccacaccagcaaagagataatattatgagcctccagggcagagacaaataatacaaaccctgaaggggatagaacaacaaggtcggtaaccaccaccaccgtacatataacatcggcgcgcgaaagaaaaaattggtggcacagggacagaatcatgcctgagaaacaaatatactacgcgggacg

SEQ ID NO: 372626 - DNA, 1600 bp, Homo sapiens
tcgtttgcgtggccacttcgtaagtgggcagtggagttcccttatgacactggggtccacatgaagaagatacttctaatttggctcctcttccttctcttctttctgctctgtgctgttgggcaagtgagcccttacagtgccccctggaaacccacttggcctgcataccgcctccctgtcgtcttgccccagtctaccctcaatttagccaagccagactttggagccgaagccaaattagaagtatcttcttcatgtggaccccagtgtcataagggaactccactgcccacttacgaagaggccaagcaatatctgtcttatgaaacgctctatgccaatggcagccgcacagagacgcaggtgggcatctacatcctcagcagtagtggagatggggcccaacaccgagactcagggtcttcaggaaagtctcgaaggaagcggcagatttatggctatgacagcaggttcagcatttttgggaaggacttcctgctcaactaccctttctcaacatcagtgaagttatccacgggctgcaccggcaccctggtggcagagaagcatgtcctcacagctgcccactgcatacacgatggaaaaacctatgtgaaaggaacccagaagcttcgagtgggcttcctaaagcccaagtttaaagatggtggtcgaggggccaacgactccacttcagccatgcccgagcagatgaaatttcagtggatccgggtgaaacgcacccatgtgcccaagggttggatcaagggcaatgccaatgacatcggcatggattatgattatgccctcctggaactcaaaaagccccacaagagaaaatttatgaagattggggtgagccctcctgctaagcagctgccagggggcagaattcacttctctggttatgacaatgaccgaccaggcaatttggtgtatcgcttctgtgacgtcaaagacgagacctatgacttgctctaccagcaatgcgatgcccagccaggggccagcgggtctggggtctatgtgaggatgtggaagagacagcagcagaagtgggagcgaaaaattattggcattttttcagggcaccagtgggtggacatgaatggttccccacaggatttcaacgtggctgtcagaatcactcctctcaaatatgcccagatttgctattggattaaaggaaactacctggattgtagggaggggtgacacagtgttccctcctggcagcaattaagggtcttcatgttcttattttaggagaggccaaattgttttttgtcattggcgtgcacacgtgtgtgtgtgtgtgtgtgtgtgtgtaaggtgtcttataatcttttacctatttcttacaattgcaagatgactggctttactatttgaaaactggtttgtgtatcatatcatatatcatttaagcagtttgaaggcatacttttgcatagaaataaaaaaaatactgatttggggcaatgaggaatatttgacaattaagttaatcttcacgtttttgcaaactttgatttttatttcatctgaacttgtttcaaagatttatattaaatatttggcatacaagagatatgaa

SEQ ID NO: 372627 - DNA, 1962 bp, Homo sapiens
gcgcggggggcggacccgccagctgcctgcgctgctcgccagcttgctcgcactcggctgtgcggcggggcaggcatgggagccgcgcgctctctcccggcgcccacacctgtctgagcggcgcagcgagccgcggcccgggcgggctgctcggcgcggaacagtgctcggcatggcagggattccagggctcctcttccttctcttctttctgctctgtgctgttgggcaagtgagcccttacagtgccccctggaaacccacttggcctgcataccgcctccctgtcgtcttgccccagtctaccctcaatttagccaagccagactttggagccgaagccaaattagaagtatcttcttcatgtggaccccagtgtcataagggaactccactgcccacttacgaagaggccaagcaatatctgtcttatgaaacgctctatgccaatggcagccgcacagagacgcaggtgggcatctacatcctcagcagtagtggagatggggcccaacaccgagactcagggtcttcaggaaagtctcgaaggaagcggcagatttatggctatgacagcaggttcagcatttttgggaaggacttcctgctcaactaccctttctcaacatcagtgaagttatccacgggctgcaccggcaccctggtggcagagaagcatgtcctcacagctgcccactgcatacacgatggaaaaacctatgtgaaaggaacccagaagcttcgagtgggcttcctaaagcccaagtttaaagatggtggtcgaggggccaacgactccacttcagccatgcccgagcagatgaaatttcagtggatccgggtgaaacgcacccatgtgcccaagggttggatcaagggcaatgccaatgacatcggcatggattatgattatgccctcctggaactcaaaaagccccacaagagaaaatttatgaagattggggtgagccctcctgctaagcagctgccagggggcagaattcacttctctggttatgacaatgaccgaccaggcaatttggtgtatcgcttctgtgacgtcaaagacgagacctatgacttgctctaccagcaatgcgatgcccagccaggggccagcgggtctggggtctatgtgaggatgtggaagagacagcagcagaagtgggagcgaaaaattattggcattttttcagggcaccagtgggtggacatgaatggttccccacaggatttcaacgtggctgtcagaatcactcctctcaaatatgcccagatttgctattggattaaaggaaactacctggattgtagggaggggtgacacagtgttccctcctggcagcaattaagggtcttcatgttcttattttaggagaggccaaattgttttttgtcattggcgtgcacacgtgtgtgtgtgtgtgtgtgtgtgtgtaaggtgtcttataatcttttacctatttcttacaattgcaagatgactggctttactatttgaaaactggtttgtgtatcatatcatatatcatttaagcagtttgaaggcatacttttgcatagaaataaaaaaaatactggggagcaagactccagtcttctcccatcagtaataaaaaattaaaaacttttgttgactctgtgtgaacacaatagactaggaactcttccctagacagtgttagaattggcaagaaatgtcaccagcaacttttaagaactttccggtggtccacaccttccgctcggccaaatcatcttcagagaggaggctcaaatcaggccctgtcctgacccccaggcgcagatctgggggaccacctccaagacaccctgtttcttgccaatccgggtcaacttcccgacagtctctcgcgggcaggagcaaagggacttagcagtcactcttccacagtttaattgttttgtcattttctagcgcagcagaggcgatgatgtttt

SEQ ID NO: 372628 - DNA, 1087 bp, Homo sapiens
gcgcggggggcggacccgccagctgcctgcgctgctcgccagcttgctcgcactcggctgtgcggcggggcaggcatgggagccgcgcgctctctcccggcgcccacacctgtctgagcggcgcagcgagccgcggcccgggcgggctgctcggcgcggatggctccctaatgagtagaatgagacctgtgtgccaaccctggcctagtcctcatgcccccacaactgtgaagcgagagggctcaacagtttcgaattcaattcaaccaccacctcctgaataccaactaggttccaggacctggctagaagcagagacaccaggacagaaaagacagtgttctgctttcatggagttcacagaagagtcgaggagagcttcacatttttcatccattcttaaaattgagccagtttagccctaggaggtgggcaggctctgaggaatcatcaatcaagagaagagaacatcgccagaaacaccatgctgcagtacaaaaattctataaaaataccttttttgagtcattaacataaaatgaagaaaacagcagcagccaagaagagagatgttgaaatttaagagaggaagacagagaagaaaaatccactggataccttatgtgtaattcaccaatctgttggaacacttctgccacgtgtgaagagttttggcagaccaaatccacatgcctgaagtgatgcccaccaacaaagacataaaaattttcaacatttcaacagccatgttggaatcatctgcagaataccgaaaaagtgcccagttggagatttcataaaaataacaggcaatcacacacgttgcaggaactgtgtacagtactgagaacaccccaatcttgaccatcagtctttctaacttgtctgtctttgtcccatccttttgaagatttgaccgaattttgaacaaggccaccaaacctgcagcaatgaacaaagttccaatgaccaaataagtaaagaggggagccaccacgaacccggtgagggcatcgagattttggtttccaacatagcacaagccagtcagttcatctgcatccaccagtctcataatcaagatgac

SEQ ID NO: 372629 - DNA, 2209 bp, Homo sapiens
gcgcggggggcggacccgccagctgcctgcgctgctcgccagcttgctcgcactcggctgtgcggcggggcaggcatgggagccgcgcgctctctcccggcgcccacacctgtctgagcggcgcagcgagccgcggcccgggcgggctgctcggcgcggaacagtgctcggcatggcagggattccagggctcctcttccttctcttctttctgctctgtgctgttgggcaagtgagcccttacagtgccccctggaaacccacttggcctgcataccgcctccctgtcgtcttgccccagtctaccctcaatttagccaagccagactttggagccgaagccaaattagaagtatcttcttcatgtggaccccagtgtcataagggaactccactgcccacttacgaagaggccaagcaatatctgtcttatgaaacgctctatgccaatggcagccgcacagagacgcaggtgggcatctacatcctcagcagtagtggagatggggcccaacaccgagactcagggtcttcaggaaagtctcgaaggaagcggcagatttatggctatgacagcaggttcagcatttttgggaaggacttcctgctcaactaccctttctcaacatcagtgaagttatccacgggctgcaccggcaccctggtggcagagaagcatgtcctcacagctgcccactgcatacacgatggaaaaacctatgtgaaaggaacccagaagcttcgagtgggcttcctaaagcccaagtttaaagatggtggtcgaggggccaacgactccacttcagccatgcccgagcagatgaaatttcagtggatccgggtgaaacgcacccatgtgcccaagggttggatcaagggcaatgccaatgacatcggcatggattatgattatgccctcctggaactcaaaaagccccacaagagaaaatttatgaagattggggtgagccctcctgctaagcagctgccagggggcagaattcacttctctggttatgacaatgaccgaccaggcaatttggtgtatcgcttctgtgacgtcaaagacgagacctatgacttgctctaccagcaatgcgatgcccagccaggggccagcgggtctggggtctatgtgaggatgtggaagagacagcagcagaagtgggagcgaaaaattattggcattttttcagggcaccagtgggtggacatgaatggttccccacaggatttcaacgtggctgtcagaatcactcctctcaaatatgcccagatttgctattggattaaaggaaactacctggattgtagggaggggtgacacagtgttccctcctggcagcaattaagggtcttcatgttcttattttaggagaggccaaattgttttttgtcattggcgtgcacacgtgtgtgtgtgtgtgtgtgtgtgtgtaaggtgtcttataatcttttacctatttcttacaattgcaagatgactggctttactatttgaaaactggtttgtgtatcatatcatatatcatttaagcagtttgaaggcatacttttgcatagaaataaaaaaaatactgatttggggcaatgaggaatatttgacaattaagttaatcttcacgtttttgcaaactttgatttttatttcatctgaacttgtttcaaagatttatattaaatatttggcatacaagagatatgaaaaaaaaaaaaaaaaaaaaaaaaaaaaaaaaaaaaaaaaaaaaagggggggcgcgcgcccgccaaaaaccccccggggggcgccccccaccccccccccttttgaaggggccccccggggaggctgaatattataataagcagcgacgaaagcgggggggcggcgcgtaataataaaacaacaagcgcgcgagagaggagagcgaaaaaacacgcgctgccacgggggagaacgtactgtggggaaagaggaccacccccctcttccgtgggggcgggaggggacaaccaataggatgtgggggagacaacacccacaccacaccagcaaagagataatattatgagcctccagggcagagacaaataatacaaaccctgaaggggatagaacaacaaggtcggtaaccaccaccaccgtacatataacatcggcgcgcgaaagaaaaaattggtggcacagggacagaatcatgcctgagaaacaaatatactacgcgggacg

SEQ ID NO: 372630 - DNA, 1570 bp, Homo sapiens
gcggccgcgagctcgcggagctgaacagtgctcggcatggcagggattccagggctcctcttccttctcttctttctgctctgtgctgttgggcaagtgagcccttacagtgccccctggaaacccacttggcctgcataccgcctccctgtcgtcttgccccagtctaccctcaatttagccaagccagactttggagccgaagccaaattagaagtatcttcttcatgtggaccccagtgtcataagggaactccactgcccacttacgaagaggccaagcaatatctgtcttatgaaacgctctatgccaatggcagccgcacagagacgcaggtgggcatctacatcctcagcagtagtggagatggggcccaacaccgagactcagggtcttcaggaaagtctcgaaggaagcggcagatttatggctatgacagcaggttcagcatttttgggaaggacttcctgctcaactaccctttctcaacatcagtgaagttatccacgggctgcaccggcaccctggtggcagagaagcatgtcctcacagctgcccactgcatacacgatggaaaaacctatgtgaaaggaacccagaagcttcgagtgggcttcctaaagcccaagtttaaagatggtggtcgaggggccaacgactccacttcagccatgcccgagcagatgaaatttcagtggatccgggtgaaacgcacccatgtgcccaagggttggatcaagggcaatgccaatgacatcggcatggattatgattatgccctcctggaactcaaaaagccccacaagagaaaatttatgaagattggggtgagccctcctgctaagcagctgccagggggcagaattcacttctctggttatgacaatgaccgaccaggcaatttggtgtatcgcttctgtgacgtcaaagacgagacctatgacttgctctaccagcaatgcgatgcccagccaggggccagcgggtctggggtctatgtgaggatgtggaagagacagcagcagaagtgggagcgaaaaattattggcattttttcagggcaccagtgggtggacatgaatggttccccacaggatttcaacgtggctgtcagaatcactcctctcaaatatgcccagatttgctattggattaaaggaaactacctggattgtagggaggggtgacacagtgttccctcctggcagcaattaagggtcttcatgttcttattttaggagaggccaaattgttttttgtcattggcgtgcacacgtgtgtgtgtgtgtgtgtgtgtgtgtaaggtgtcttataatcttttacctatttcttacaattgcaagatgactggctttactatttgaaaactggtttgtgtatcatatcatatatcatttaagcagtttgaaggcatacttttgcatagaaataaaaaaaatactgatttggggcaatgaggaatatttgacaattaagttaatcttcacgtttttgcaaactttgatttttatttcatctgaacttgtttcaaagatttatattaaatatttggcatacaagagatatgaa

SEQ ID NO: 372631 - DNA, 1663 bp, Homo sapiens
gcgcggggggcggacccgccagctgcctgcgctgctcgccagcttgctcgcactcggctgtgcggcggggcaggcatgggagccgcgcgctctctcccggcgcccacacctgtctgagcggcgcagcgagccgcggcccgggcgggctgctcggcgcggaacagtgctcggcatggcagggattccagggctcctcttccttctcttctttctgctctgtgctgttgggcaagtgagcccttacagtgccccctggaaacccacttggcctgcataccgcctccctgtcgtcttgccccagtctaccctcaatttagccaagccagactttggagccgaagccaaattagaagtatcttcttcatgtggaccccagtgtcataagggaactccactgcccacttacgaagaggccaagcaatatctgtcttatgaaacgctctatgccaatggcagccgcacagagacgcaggtgggcatctacatcctcagcagtagtggagatggggcccaacaccgagactcagggtcttcaggaaagtctcgaaggaagcggcagatttatggctatgacagcaggttcagcatttttgggaaggacttcctgctcaactaccctttctcaacatcagtgaagttatccacgggctgcaccggcaccctggtggcagagaagcatgtcctcacagctgcccactgcatacacgatggaaaaacctatgtgaaaggaacccagaagcttcgagtgggcttcctaaagcccaagtttaaagatggtggtcgaggggccaacgactccacttcagccatgcccgagcagatgaaatttcagtggatccgggtgaaacgcacccatgtgcccaagggttggatcaagggcaatgccaatgacatcggcatggattatgattatgccctcctggaactcaaaaagccccacaagagaaaatttatgaagattggggtgagccctcctgctaagcagctgccagggggcagaattcacttctctggttatgacaatgaccgaccaggcaatttggtgtatcgcttctgtgacgtcaaagacgagacctatgacttgctctaccagcaatgcgatgcccagccaggggccagcgggtctggggtctatgtgaggatgtggaagagacagcagcagaagtgggagcgaaaaattattggcattttttcagggcaccagtgggtggacatgaatggttccccacaggatttcaacgtggctgtcagaatcactcctctcaaatatgcccagatttgctattggattaaaggaaactacctggattgtagggaggggtgacacagtgttccctcctggcagcaattaagggtcttcatgttcttattttaggagaggccaaattgttttttgtcattggcgtgcacacgtgtgtgtgtgtgtgtgtgtgtgtgtaaggtgtcttataatcttttacctatttcttacaattgcaagatgactggctttactatttgaaaactggtttgtgtatcatatcatatatcatttaagcagtttgaaggcatacttttgcatagaaataaaaaaaatactggggagcaaatggcgcatcttctcccatcagcaattcctgcagagggttaaaaattacactggtttatactactgatgggacga

SEQ ID NO: 372632 - DNA, 1775 bp, Homo sapiens
gcgcggggggcggacccgccagctgcctgcgctgctcgccagcttgctcgcactcggctgtgcggcggggcaggcatgggagccgcgcgctctctcccggcgcccacacctgtctgagcggcgcagcgagccgcggcccgggcgggctgctcggcgcggaacagtgctcggcatggcagggattccagggctcctcttccttctcttctttctgctctgtgctgttgggcaagtgagcccttacagtgccccctggaaacccacttggcctgcataccgcctccctgtcgtcttgccccagtctaccctcaatttagccaagccagactttggagccgaagccaaattagaagtatcttcttcatgtggaccccagtgtcataagggaactccactgcccacttacgaagaggccaagcaatatctgtcttatgaaacgctctatgccaatggcagccgcacagagacgcaggtgggcatctacatcctcagcagtagtggagatggggcccaacaccgagactcagggtcttcaggaaagtctcgaaggaagcggcagatttatggctatgacagcaggttcagcatttttgggaaggacttcctgctcaactaccctttctcaacatcagtgaagttatccacgggctgcaccggcaccctggtggcagagaagcatgtcctcacagctgcccactgcatacacgatggaaaaacctatgtgaaaggaacccagaagcttcgagtgggcttcctaaagcccaagtttaaagatggtggtcgaggggccaacgactccacttcagccatgcccgagcagatgaaatttcagtggatccgggtgaaacgcacccatgtgcccaagggttggatcaagggcaatgccaatgacatcggcatggattatgattatgccctcctggaactcaaaaagccccacaagagaaaatttatgaagattggggtgagccctcctgctaagcagctgccagggggcagaattcacttctctggttatgacaatgaccgaccaggcaatttggtgtatcgcttctgtgacgtcaaagacgagacctatgacttgctctaccagcaatgcgatgcccagccaggggccagcgggtctggggtctatgtgaggatgtggaagagacagcagcagaagtgggagcgaaaaattattggcattttttcagggcaccagtgggtggacatgaatggttccccacaggatttcaacgtggctgtcagaatcactcctctcaaatatgcccagatttgctattggattaaaggaaactacctggattgtagggaggggtgacacagtgttccctcctggcagcaattaagggtcttcatgttcttattttaggagaggccaaattgttttttgtcattggcgtgcacacgtgtgtgtgtgtgtgtgtgtgtgtgtaaggtgtcttataatcttttacctatttcttacaattgcaagatgactggctttactatttgaaaactggtttgtgtatcatatcatatatcatttaagcagtttgaaggcatacttttgcatagaaataaaaaaaatactggcagtcttctcccatcagccatcttcgtccctcaggttcactttgtatcaagtatttttactttttatttttcatttaggatattttctattgttgtcttcaggcccactgatcattacttctatagctactgctctgatataaccccgtctattaaaaatttaagtacctgatggacgcaaggttcggtccggc

SEQ ID NO: 372633 - DNA, 1840 bp, Homo sapiens
tgcaccaggatggctctgaaatggacttcagttcttctgctgatacatctcagttgttactttagctctgggagttgtggaaaggtgctggtgtgggccgcagaatacagccattggatgaatatgaagacaatcctgaaagagcttgttcagagaggtcatgaggtgactgtactggcatcttcagcttccattctttttgatcccaatgacgcatccactcttaaactcgaagtttatcctacatctttaactaaaactgaatttgagaatatcatcatgcaacaggttaagagatggtcagacattcgaaaagatagcttttggttatatttttcacaagaacaagaaatcctgtgggaattatatgacatatttagaaacttctgtaaagatgtagtttcaaataagaaagttatgaaaaaactacaagagtcaagatttgacatcgtttttgcagatgctgtttttccctgtggtgagctgctggctgcgctacttaacatacggtttgtgtacagtctccgctttactcctggctacacaattgaaaggcacagtggaggactgattttccctccttcctacatacctattgttatgtcaaaattaagtgatcaaatgactttcatggagagggtaaaaaatatgatctatgtgctttattttgacttttggttccaaatgtctgatatgaagaagtgggatcagttttacagtgaagttttaggaagacccactaccttatttgagacaatggggaaagctgacatatggcttatgcgaaactcctggagttttcaatttcctcatccattcttaccaaacgttgattttgttggaggattccactgcaaacctgccaaacccctacctaaggaaatggaggagtttgtacagagctctggagaaaatggtgttgtggtgttttctctggggtcagtgataagtaacatgacagcagaaagggccaacgtaattgcaacagcccttgccaagatcccacaaaaggttctgtggagatttgatgggaataaaccagatgccttaggtctcaatactcggctgtacaagtggataccccagaatgaccttctaggtcatccaaaaaccagagcttttataactcatggtggagccaatggcatctatgaggcaatctaccatgggatccctatggtgggcattccattgttttgggatcaacctgataacattgctcacatgaaggccaagggagcagctgttagactggacttccacacaatgtcgagtacagacctgctgaatgcactgaagacagtaattaatgatcctttatataaagagaatgttatgaaattatcaagaattcaacatgatcaaccagtaaagcccctggatcgagcagtcttctggattgaatttgtcatgcgccacaaaggagccaaacaccttcgagttgcagcccgtgacctcacctggttccagtaccactctttggatgtgattgggtttctgctggcctgtgtggcaactgtgatatttatcatcacaaagttttgtctgttttgtttctggaagtttgctagaaaagggaagaagggaaaaagagattagttatgtctgacatttgaagctggaaaaccagatagatgggatgacttcagtttattccagcaagaaagaaaagattgttatgcaagatttctttcttcctgtgacaaaaaaaaaaacttttcaaaatctaccttgtcaagtaaaaatttgtttttcagagatttaccacccaagtaatggttagaaatattctgtggcaatgaagaaaacactagggaaaataaaaaataatataaagcca

SEQ ID NO: 372634 - DNA, 1489 bp, Homo sapiens
tgcaccaggatggctctgaaatggacttcagttcttctgctgatacatctcagttgttactttagctctgggagttgtggaaaggtgctggtgtgggccgcagaatacagccattggatgaatatgaagacaatcctgaaagagcttgttcagagaggtcatgaggtgactgtactggcatcttcagcttccattctttttgatcccaatgacgcatccactcttaaactcgaagtttatcctacatctttaactaaaactgaatttgagaatatcatcatgcaacaggttaagagatggtcagacattcgaaaagataacttttggttccaaatgtctgatatgaagaagtgggatcagttttacagtgaagttttaggaagacccactaccttatttgagacaatggggaaagctgacatatggcttatgcgaaactcctggagttttcaatttcctcatccattcttaccaaacgttgattttgttggaggattccactgcaaacctgccaaacccctacctaaggaaatggaggagtttgtacagagctctggagaaaatggtgttgtggtgttttctctggggtcagtgataagtaacatgacagcagaaagggccaacgtaattgcaacagcccttgccaagatcccacaaaaggttctgtggagatttgatgggaataaaccagatgccttaggtctcaatactcggctgtacaagtggataccccagaatgaccttctaggtcatccaaaaaccagagcttttataactcatggtggagccaatggcatctatgaggcaatctaccatgggatccctatggtgggcattccattgttttgggatcaacctgataacattgctcacatgaaggccaagggagcagctgttagactggacttccacacaatgtcgagtacagacctgctgaatgcactgaagacagtaattaatgatcctttatataaagagaatgttatgaaattatcaagaattcaacatgatcaaccagtaaagcccctggatcgagcagtcttctggattgaatttgtcatgcgccacaaaggagccaaacaccttcgagttgcagcccgtgacctcacctggttccagtaccactctttggatgtgattgggtttctgctggcctgtgtggcaactgtgatatttatcatcacaaagttttgtctgttttgtttctggaagtttgctagaaaagggaagaagggaaaaagagattagttatgtctgacatttgaagctggaaaaccagatagatgggatgacttcagtttattccagcaagaaagaaaagattgttatgcaagatttctttcttcctgtgacaaaaaaaaaaacttttcaaaatctaccttgtcaagtaaaaatttgtttttcagagatttaccacccaagtaatggttagaaatattctgtggcaatgaagaaaacactagggaaaataaaaaataatataaagcca

SEQ ID NO: 372635 - DNA, 1653 bp, Homo sapiens
tgcaccaggatggctctgaaatggacttcagttcttctgctgatacatctcagttgttactttagctctgggagttgtggaaaggtgctggtgtgggccgcagaatacagccattggatgaatatgaagacaatcctgaaagagcttgttcagagaggtcatgaggtgactgtactggcatcttcagcttccattctttttgatcccaatgacgcatccactcttaaactcgaagtttatcctacatctttaactaaaactgaatttgagaatatcatcatgcaacaggttaagagatggtcagacattcgaaaagatagcttttggttatatttttcacaagaacaagaaatcctgtgggaattatatgacatatttagaaacttctgtaaagatgtagtttcaaataagaaagttatgaaaaaactacaagagtcaagatttgacatcgtttttgcagatgctgtttttccctgtggtgagctgctggctgcgctacttaacatacggtttgtgtacagtctccgctttactcctggctacacaattgaaaggcacagtggaggactgattttccctccttcctacatacctattgttatgtcaaaattaagtgatcaaatgactttcatggagagggtaaaaaatatgatctatgtgctttattttgacttttggttccaaatgtctgatatgaagaagtgggatcagttttacagtgaagttttaggaagacccactaccttatttgagacaatggggaaagctgacatatggcttatgcgaaactcctggagttttcaatttcctcatccattcttaccaaacgttgattttgttggaggattccactgcaaacctgccaaacccctacctaaggaaatggaggagtttgtacagagctctggagaaaatggtgttgtggtgttttctctggggtcagtgataagtaacatgacagcagaaagggccaacgtaattgcaacagcccttgccaagatcccacaaaaggttctgtggagatttgatgggaataaaccagatgccttaggtctcaatactcggctgtacaagtggataccccagaatgaccttctaggtcatccaaaaaccagagcttttataactcatggtggagccaatggcatctatgaggcaatctaccatgggatccctatggtgggcattccattgttttgggatcaacctgataacattgctcacatgaaggccaagggagcagctgttagactggacttccacacaatgtcgagtacagacctgctgaatgcactgaagacagtaattaatgatcctttgtgagtagaacaatgtttttcactaggaggtatttgtagacagcttctcttgtcaatagtgagcatgagtttcatcctttttatgagagtaattttgaaagaatttaaataatttaaccaatctgaaatctgctttttttcatctgttatttaaaaattgtatttgaaccccatacatctaatgagtaaccagttagtgaaacaattttctaaacaaaaataattttaaaatgataaataatataaaaaatacatttcttaaaattttaacataatgaacccatagtagaaaggaagaataaacttgaaataatataataaaatgttttaatta

SEQ ID NO: 372636 - DNA, 802 bp, Homo sapiens
tgcaccaggatggctctgaaatggacttcagttcttctgctgatacatctcagttgttactttagctctgggagttgtggaaaggtgctggtgtgggccgcagaatacagccattggatgaatatgaagacaatcctgaaagagcttgttcagagaggtcatgaggtgactgtactggcatcttcagcttccattctttttgatcccaatgacgcatccactcttaaactcgaagtttatcctacatctttaactaaaactgaatttgagaatatcatcatgcaacaggttaagagatggtcagacattcgaaaagatagcttttggttatatttttcacaagaacaagaaatcctgtgggaattatatgacatatttagaaacttctgtaaagatgtagtttcaaataagaaagttatgaaaaaactacaagagtcaagatttgacatcgtttttgcagatgctgtttttccctgtggtgagctgctggctgcgctacttaacatacggtttgtgtacagtctccgctttactcctggctacacaattgaaaggcacagtggaggactgattttccctccttcctacatacctattgttatgtcaaaattaagtgatcaaatgactttcatggagagggtaaaaaatatgatctatgtgctttattttgacttttggttccaaatgtctgatatgaagaagtgggatcagttttacagtgaagttttaggtaagaatttgtttaatcggtaacgtgaagatctaacttatttgtgtctttgaagcagagcttatataaagc

SEQ ID NO: 372637 - DNA, 2708 bp, Homo sapiens
ttctgtggatcaggggccgagctccgcccccggcgcgcggctgagtccctctctataaaaggagccggcggaggatgacgagcggctttacgtcggcgcgtaacgagggggtgcgtgtgaggtcatcgcgcgggcgggcgggcggggtctggcggtttgaacgagacgaagacggaaccggagccggttgcgggcagtggacgcggttctgccgagagccgaagatggcagtgaacgtatactcaacgtcagtgaccagtgataacctaagtcgacatgacatgctggcctggatcaatgagtctctgcagttgaatctgacaaagatcgaacagttgtgctcaggggctgcgtattgtcagtttatggacatgctgttccctggctccattgccttgaagaaagtgaaattccaagctaagctagaacacgagtacatccagaacttcaaaatactacaagcaggttttaagagaatgggtgttgacaaaataattcctgtggacaaattagtaaaaggaaagtttcaggacaattttgaattcgttcagtggttcaagaagtttttcgatgcaaactatgatggaaaagactatgaccctgtggctgccagacaaggtcaagaaactgcagtggctccttcccttgttgctccagctctgaataaaccgaagaaacctctcacttctagcagtgcagctccccagaggcccatctcaacacagagaaccgctgcggctcctaaggctggccctggtgtggtgcgaaagaaccctggtgtgggcaacggagacgacgaggcagctgagttgatgcagcaggtcaacgtattgaaacttactgttgaagacttggagaaagagagggatttctacttcggaaagctacggaacattgaattgatttgccaggagaacgagggggaaaacgaccctgtattgcagaggattgtagacattctgtatgccacagatgaaggctttgtgatacctgatgaagggggcccacaggaggagcaagaagagtattaacagcctggaccagcagagcaacatcggaattcttcactccaaatcatgtgcttaactgtaaaatactcccttttgttatccttagaggactcactggtttcttttcataagcaaaaagtacctcttcttaaagtgcactttgcagacgtttcactccttttccaataagtttgagttaggagcttttaccttgtagcagagcagtattaacatctagttggttcacctggaaaacagagaggctgaccgtggggctcaccatgcggatgcgggtcacactgaatgctggagagatgttatgtaatatgctgaggtggcgacctcagtggagaaatgtaaagactgaattgaattttaagctaatgtgaaatcagagaatgttgtaataagtaaatgccttaagagtatttaaaatatgcttccacatttcaaaatataaaatgtaacatgacaagagattttgcgtttgacattgtgtctgggaaggaagggccagaccttggaacctttggaacctgctgtcaacaggtcttacagggctgcttgaaccctcataggcctaggctttggtctaaaaggaacatttaaaaagttgccctgtaaagttatttggtgtcattgaccaattgcatcccagctaaaaagcaagaggcatcgttgcctggataatagaggatgtgtttcagccctgagatgttacagttgaagagcttggttttcattgagcatttctctatttttccagttatccccgaaatttctatgtattatattttttggggaagtgaggtgtgcccagttttttaatctaacaactacttttggggacttgcccacatctctgggatttgaatggggattgtatcccattttactgtcttttaggtttacatttaccacgtttctcttctctgctccccttgcccactggggactcctctttggctccttgaagtttgctgcttagagttggaagtgcagcaggcaggtgatcatgctgcaagttctttctggacctctggcaaagggagtggtcagtgaaggccatcgttaccttgggatctgccaggctggggtgttttcggtatctgctgttcacagctctccactgtaatccgaatactttgccagtgcactaatctctttggagataaaattcattagtgtgttactaaatgttaattttcttttgcggaaaatacagtaccgtgtctgaattaattattaatatttaaaatacttcattccttaactctccctcatttgctttgcccacagcctattcagttcctttgtttggcaggattctgcaaaatgtgtctcacccactactgagattgttcagcccctgatgtatttgtattgatttgtttctggtggtagcttgtcctgaaatgtgtgtagaaagcaagtattttatgataaaaatgttgtgtagtgcatgctctgtgtggaattcagaggaaaacccagattcagtgattaacaatgccaaaaaatgcaagtaactagccattgttcaaatgacagtggtgctatttctcttttgtggccttttagacttttgttgccctaaaattccattttattgggaacccattttccacctggtctttcttgacagggtttttttctactttaaacagtttctaaataaaattctgtatttcaagagta

SEQ ID NO: 372638 - DNA, 2572 bp, Homo sapiens
ttctgggccgccgctgaggtgtggtccctgcgctgcagcgactggaggtcccagggtggttgggccctgggagggtgtgggcgagaagatggcagtgaacgtatactcaacgtcagtgaccagtgataacctaagtcgacatgacatgctggcctggatcaatgagtctctgcagttgaatctgacaaagatcgaacagttgtgctcaggggctgcgtattgtcagtttatggacatgctgttccctggctccattgccttgaagaaagtgaaattccaagctaagctagaacacgagtacatccagaacttcaaaatactacaagcaggttttaagagaatgggtgttgacaaaataattcctgtggacaaattagtaaaaggaaagtttcaggacaattttgaattcgttcagtggttcaagaagtttttcgatgcaaactatgatggaaaagactatgaccctgtggctgccagacaaggtcaagaaactgcagtggctccttcccttgttgctccagctctgaataaaccgaagaaacctctcacttctagcagtgcagctccccagaggcccatctcaacacagagaaccgctgcggctcctaaggctggccctggtgtggtgcgaaagaaccctggtgtgggcaacggagacgacgaggcagctgagttgatgcagcaggtcaacgtattgaaacttactgttgaagacttggagaaagagagggatttctacttcggaaagctacggaacattgaattgatttgccaggagaacgagggggaaaacgaccctgtattgcagaggattgtagacattctgtatgccacagatgaaggctttgtgatacctgatgaagggggcccacaggaggagcaagaagagtattaacagcctggaccagcagagcaacatcggaattcttcactccaaatcatgtgcttaactgtaaaatactcccttttgttatccttagaggactcactggtttcttttcataagcaaaaagtacctcttcttaaagtgcactttgcagacgtttcactccttttccaataagtttgagttaggagcttttaccttgtagcagagcagtattaacatctagttggttcacctggaaaacagagaggctgaccgtggggctcaccatgcggatgcgggtcacactgaatgctggagagatgttatgtaatatgctgaggtggcgacctcagtggagaaatgtaaagactgaattgaattttaagctaatgtgaaatcagagaatgttgtaataagtaaatgccttaagagtatttaaaatatgcttccacatttcaaaatataaaatgtaacatgacaagagattttgcgtttgacattgtgtctgggaaggaagggccagaccttggaacctttggaacctgctgtcaacaggtcttacagggctgcttgaaccctcataggcctaggctttggtctaaaaggaacatttaaaaagttgccctgtaaagttatttggtgtcattgaccaattgcatcccagctaaaaagcaagaggcatcgttgcctggataatagaggatgtgtttcagccctgagatgttacagttgaagagcttggttttcattgagcatttctctatttttccagttatccccgaaatttctatgtattatattttttggggaagtgaggtgtgcccagttttttaatctaacaactacttttggggacttgcccacatctctgggatttgaatggggattgtatcccattttactgtcttttaggtttacatttaccacgtttctcttctctgctccccttgcccactggggactcctctttggctccttgaagtttgctgcttagagttggaagtgcagcaggcaggtgatcatgctgcaagttctttctggacctctggcaaagggagtggtcagtgaaggccatcgttaccttgggatctgccaggctggggtgttttcggtatctgctgttcacagctctccactgtaatccgaatactttgccagtgcactaatctctttggagataaaattcattagtgtgttactaaatgttaattttcttttgcggaaaatacagtaccgtgtctgaattaattattaatatttaaaatacttcattccttaactctccctcatttgctttgcccacagcctattcagttcctttgtttggcaggattctgcaaaatgtgtctcacccactactgagattgttcagcccctgatgtatttgtattgatttgtttctggtggtagcttgtcctgaaatgtgtgtagaaagcaagtattttatgataaaaatgttgtgtagtgcatgctctgtgtggaattcagaggaaaacccagattcagtgattaacaatgccaaaaaatgcaagtaactagccattgttcaaatgacagtggtgctatttctcttttgtggccttttagacttttgttgccctaaaattccattttattgggaacccattttccacctggtctttcttgacagggtttttttctactttaaacagtttctaaataaaattctgtatttcaagagta

SEQ ID NO: 372639 - DNA, 2387 bp, Homo sapiens
aacttaggctaggtacgaggctgggggctgcgtattgtcagtttatggacatgctgttccctggctccattgccttgaagaaagtgaaattccaagctaagctagaacacgagtacatccagaacttcaaaatactacaagcaggttttaagagaatgggtgttgacaaaataattcctgtggacaaattagtaaaaggaaagtttcaggacaattttgaattcgttcagtggttcaagaagtttttcgatgcaaactatgatggaaaagactatgaccctgtggctgccagacaaggtcaagaaactgcagtggctccttcccttgttgctccagctctgaataaaccgaagaaacctctcacttctagcagtgcagctccccagaggcccatctcaacacagagaaccgctgcggctcctaaggctggccctggtgtggtgcgaaagaaccctggtgtgggcaacggagacgacgaggcagctgagttgatgcagcaggtcaacgtattgaaacttactgttgaagacttggagaaagagagggatttctacttcggaaagctacggaacattgaattgatttgccaggagaacgagggggaaaacgaccctgtattgcagaggattgtagacattctgtatgccacagatgaaggctttgtgatacctgatgaagggggcccacaggaggagcaagaagagtattaacagcctggaccagcagagcaacatcggaattcttcactccaaatcatgtgcttaactgtaaaatactcccttttgttatccttagaggactcactggtttcttttcataagcaaaaagtacctcttcttaaagtgcactttgcagacgtttcactccttttccaataagtttgagttaggagcttttaccttgtagcagagcagtattaacatctagttggttcacctggaaaacagagaggctgaccgtggggctcaccatgcggatgcgggtcacactgaatgctggagagatgttatgtaatatgctgaggtggcgacctcagtggagaaatgtaaagactgaattgaattttaagctaatgtgaaatcagagaatgttgtaataagtaaatgccttaagagtatttaaaatatgcttccacatttcaaaatataaaatgtaacatgacaagagattttgcgtttgacattgtgtctgggaaggaagggccagaccttggaacctttggaacctgctgtcaacaggtcttacagggctgcttgaaccctcataggcctaggctttggtctaaaaggaacatttaaaaagttgccctgtaaagttatttggtgtcattgaccaattgcatcccagctaaaaagcaagaggcatcgttgcctggataatagaggatgtgtttcagccctgagatgttacagttgaagagcttggttttcattgagcatttctctatttttccagttatccccgaaatttctatgtattatattttttggggaagtgaggtgtgcccagttttttaatctaacaactacttttggggacttgcccacatctctgggatttgaatggggattgtatcccattttactgtcttttaggtttacatttaccacgtttctcttctctgctccccttgcccactggggactcctctttggctccttgaagtttgctgcttagagttggaagtgcagcaggcaggtgatcatgctgcaagttctttctggacctctggcaaagggagtggtcagtgaaggccatcgttaccttgggatctgccaggctggggtgttttcggtatctgctgttcacagctctccactgtaatccgaatactttgccagtgcactaatctctttggagataaaattcattagtgtgttactaaatgttaattttcttttgcggaaaatacagtaccgtgtctgaattaattattaatatttaaaatacttcattccttaactctccctcatttgctttgcccacagcctattcagttcctttgtttggcaggattctgcaaaatgtgtctcacccactactgagattgttcagcccctgatgtatttgtattgatttgtttctggtggtagcttgtcctgaaatgtgtgtagaaagcaagtattttatgataaaaatgttgtgtagtgcatgctctgtgtggaattcagaggaaaacccagattcagtgattaacaatgccaaaaaatgcaagtaactagccattgttcaaatgacagtggtgctatttctcttttgtggccttttagacttttgttgccctaaaattccattttattgggaacccattttccacctggtctttcttgacagggtttttttctactttaaacagtttctaaataaaattctgtatttcaagagta

SEQ ID NO: 372640 - DNA, 2528 bp, Homo sapiens
ttctgtggatcaggggccgagctccgcccccggcgcgcggctgagtccctctctataaaaggagccggcggaggatgacgagcggctttacgtcggcgcgtaacgagggggtgcgtgtgaggtcatcgcgcgggcgggcgggcggggtctggcggtttgaacgagacgaagacggaaccggagccggttgcgggcagtggacgcggttctgccgagagccgaagatggcagtgaacgtatactcaacgtcagtgaccagtgataacctaagtcgacatgacatgctggcctggatcaatgagtctctgcagttgaatctgacaaagatcgaacagttgtgctcaggggctgcgtattgtcagtttatggacatgctgttccctggctccattgccttgaagaaagtgaaattccaagctaagctagaacacgagtacatccagaacttcaaaatactacaagcaggttttaagagaatgggtgttgacaaaataattcctgtggacaaattagtaaaaggaaagtttcaggacaattttgaattcgttcagtggttcaagaagtttttcgatgcaaactatgatggaaaagaccctggtgtgggcaacggagacgacgaggcagctgagttgatgcagcaggtcaacgtattgaaacttactgttgaagacttggagaaagagagggatttctacttcggaaagctacggaacattgaattgatttgccaggagaacgagggggaaaacgaccctgtattgcagaggattgtagacattctgtatgccacagatgaaggctttgtgatacctgatgaagggggcccacaggaggagcaagaagagtattaacagcctggaccagcagagcaacatcggaattcttcactccaaatcatgtgcttaactgtaaaatactcccttttgttatccttagaggactcactggtttcttttcataagcaaaaagtacctcttcttaaagtgcactttgcagacgtttcactccttttccaataagtttgagttaggagcttttaccttgtagcagagcagtattaacatctagttggttcacctggaaaacagagaggctgaccgtggggctcaccatgcggatgcgggtcacactgaatgctggagagatgttatgtaatatgctgaggtggcgacctcagtggagaaatgtaaagactgaattgaattttaagctaatgtgaaatcagagaatgttgtaataagtaaatgccttaagagtatttaaaatatgcttccacatttcaaaatataaaatgtaacatgacaagagattttgcgtttgacattgtgtctgggaaggaagggccagaccttggaacctttggaacctgctgtcaacaggtcttacagggctgcttgaaccctcataggcctaggctttggtctaaaaggaacatttaaaaagttgccctgtaaagttatttggtgtcattgaccaattgcatcccagctaaaaagcaagaggcatcgttgcctggataatagaggatgtgtttcagccctgagatgttacagttgaagagcttggttttcattgagcatttctctatttttccagttatccccgaaatttctatgtattatattttttggggaagtgaggtgtgcccagttttttaatctaacaactacttttggggacttgcccacatctctgggatttgaatggggattgtatcccattttactgtcttttaggtttacatttaccacgtttctcttctctgctccccttgcccactggggactcctctttggctccttgaagtttgctgcttagagttggaagtgcagcaggcaggtgatcatgctgcaagttctttctggacctctggcaaagggagtggtcagtgaaggccatcgttaccttgggatctgccaggctggggtgttttcggtatctgctgttcacagctctccactgtaatccgaatactttgccagtgcactaatctctttggagataaaattcattagtgtgttactaaatgttaattttcttttgcggaaaatacagtaccgtgtctgaattaattattaatatttaaaatacttcattccttaactctccctcatttgctttgcccacagcctattcagttcctttgtttggcaggattctgcaaaatgtgtctcacccactactgagattgttcagcccctgatgtatttgtattgatttgtttctggtggtagcttgtcctgaaatgtgtgtagaaagcaagtattttatgataaaaatgttgtgtagtgcatgctctgtgtggaattcagaggaaaacccagattcagtgattaacaatgccaaaaaatgcaagtaactagccattgttcaaatgacagtggtgctatttctcttttgtggccttttagacttttgttgccctaaaattccattttattgggaacccattttccacctggtctttcttgacagggtttttttctactttaaacagtttctaaataaaattctgtatttcaagagta

SEQ ID NO: 372641 - DNA, 1931 bp, Homo sapiens
agttgattttagtccaaagcagtgctgtccaatgaaggtagaaggtcaacgtattgaaacttactgttgaagacttggagaaagagagggatttctacttcggaaagctacggaacattgaattgatttgccaggagaacgagggggaaaacgaccctgtattgcagaggattgtagacattctgtatgccacagatgaaggctttgtgatacctgatgaagggggcccacaggaggagcaagaagagtattaacagcctggaccagcagagcaacatcggaattcttcactccaaatcatgtgcttaactgtaaaatactcccttttgttatccttagaggactcactggtttcttttcataagcaaaaagtacctcttcttaaagtgcactttgcagacgtttcactccttttccaataagtttgagttaggagcttttaccttgtagcagagcagtattaacatctagttggttcacctggaaaacagagaggctgaccgtggggctcaccatgcggatgcgggtcacactgaatgctggagagatgttatgtaatatgctgaggtggcgacctcagtggagaaatgtaaagactgaattgaattttaagctaatgtgaaatcagagaatgttgtaataagtaaatgccttaagagtatttaaaatatgcttccacatttcaaaatataaaatgtaacatgacaagagattttgcgtttgacattgtgtctgggaaggaagggccagaccttggaacctttggaacctgctgtcaacaggtcttacagggctgcttgaaccctcataggcctaggctttggtctaaaaggaacatttaaaaagttgccctgtaaagttatttggtgtcattgaccaattgcatcccagctaaaaagcaagaggcatcgttgcctggataatagaggatgtgtttcagccctgagatgttacagttgaagagcttggttttcattgagcatttctctatttttccagttatccccgaaatttctatgtattatattttttggggaagtgaggtgtgcccagttttttaatctaacaactacttttggggacttgcccacatctctgggatttgaatggggattgtatcccattttactgtcttttaggtttacatttaccacgtttctcttctctgctccccttgcccactggggactcctctttggctccttgaagtttgctgcttagagttggaagtgcagcaggcaggtgatcatgctgcaagttctttctggacctctggcaaagggagtggtcagtgaaggccatcgttaccttgggatctgccaggctggggtgttttcggtatctgctgttcacagctctccactgtaatccgaatactttgccagtgcactaatctctttggagataaaattcattagtgtgttactaaatgttaattttcttttgcggaaaatacagtaccgtgtctgaattaattattaatatttaaaatacttcattccttaactctccctcatttgctttgcccacagcctattcagttcctttgtttggcaggattctgcaaaatgtgtctcacccactactgagattgttcagcccctgatgtatttgtattgatttgtttctggtggtagcttgtcctgaaatgtgtgtagaaagcaagtattttatgataaaaatgttgtgtagtgcatgctctgtgtggaattcagaggaaaacccagattcagtgattaacaatgccaaaaaatgcaagtaactagccattgttcaaatgacagtggtgctatttctcttttgtggccttttagacttttgttgccctaaaattccattttattgggaacccattttccacctggtctttcttgacagggtttttttctactttaaacagtttctaaataaaattctgtatttcaagagta

SEQ ID NO: 372642 - DNA, 2346 bp, Homo sapiens
tagtgacggggatctcactttattgcccaggctggagtgcctggtggtgcgatcatggctcactgcagctttgacctcctgggtcaagcagtcctgcctcgaccccgctggggagtagctgggactacaggcatgtcccaccaggcttggctagtttttttttttttcgagacattgtctcactgtgttacccaggctggtcttgaacttctgggctcaagccttggccttccaaagtgctaggattacaggcatgagccatcacacctggccttctttcttctttaaaaaacagttttattgaagtataactgacataataaactgcacatatttaaaatgtacctttgatgacatgggtgaaattaccaccataatgaagacaatgtaaatatgcatcactttcaaaagtttgagggtaaatttgactgtgctcagtttttgtctttggtgagatgcaattctactacccaagaaataaaatagcagtcacctggcctgtatagagccaggaagaaccattgtttttaagaggctgtaagtatgaggaaagtgaactcacagtagaaatggatctttcagtggctttcccctctcattttcctatttcaggaaggctttgtgatacctgatgaagggggcccacaggaggagcaagaagagtattaacagcctggaccagcagagcaacatcggaattcttcactccaaatcatgtgcttaactgtaaaatactcccttttgttatccttagaggactcactggtttcttttcataagcaaaaagtacctcttcttaaagtgcactttgcagacgtttcactccttttccaataagtttgagttaggagcttttaccttgtagcagagcagtattaacatctagttggttcacctggaaaacagagaggctgaccgtggggctcaccatgcggatgcgggtcacactgaatgctggagagatgttatgtaatatgctgaggtggcgacctcagtggagaaatgtaaagactgaattgaattttaagctaatgtgaaatcagagaatgttgtaataagtaaatgccttaagagtatttaaaatatgcttccacatttcaaaatataaaatgtaacatgacaagagattttgcgtttgacattgtgtctgggaaggaagggccagaccttggaacctttggaacctgctgtcaacaggtcttacagggctgcttgaaccctcataggcctaggctttggtctaaaaggaacatttaaaaagttgccctgtaaagttatttggtgtcattgaccaattgcatcccagctaaaaagcaagaggcatcgttgcctggataatagaggatgtgtttcagccctgagatgttacagttgaagagcttggttttcattgagcatttctctatttttccagttatccccgaaatttctatgtattatattttttggggaagtgaggtgtgcccagttttttaatctaacaactacttttggggacttgcccacatctctgggatttgaatggggattgtatcccattttactgtcttttaggtttacatttaccacgtttctcttctctgctccccttgcccactggggactcctctttggctccttgaagtttgctgcttagagttggaagtgcagcaggcaggtgatcatgctgcaagttctttctggacctctggcaaagggagtggtcagtgaaggccatcgttaccttgggatctgccaggctggggtgttttcggtatctgctgttcacagctctccactgtaatccgaatactttgccagtgcactaatctctttggagataaaattcattagtgtgttactaaatgttaattttcttttgcggaaaatacagtaccgtgtctgaattaattattaatatttaaaatacttcattccttaactctccctcatttgctttgcccacagcctattcagttcctttgtttggcaggattctgcaaaatgtgtctcacccactactgagattgttcagcccctgatgtatttgtattgatttgtttctggtggtagcttgtcctgaaatgtgtgtagaaagcaagtattttatgataaaaatgttgtgtagtgcatgctctgtgtggaattcagaggaaaacccagattcagtgattaacaatgccaaaaaatgcaagtaactagccattgttcaaatgacagtggtgctatttctcttttgtggccttttagacttttgttgccctaaaattccattttattgggaacccattttccacctggtctttcttgacagggtttttttctactttaaacagtttctaaataaaattctgtatttcaagagta

SEQ ID NO: 372643 - DNA, 1616 bp, Homo sapiens
aacttaggctaggtacgaggctggaggactcactggtttcttttcataagcaaaaagtacctcttcttaaagtgcactttgcagacgtttcactccttttccaataagtttgagttaggagcttttaccttgtagcagagcagtattaacatctagttggttcacctggaaaacagagaggctgaccgtggggctcaccatgcggatgcgggtcacactgaatgctggagagatgttatgtaatatgctgaggtggcgacctcagtggagaaatgtaaagactgaattgaattttaagctaatgtgaaatcagagaatgttgtaataagtaaatgccttaagagtatttaaaatatgcttccacatttcaaaatataaaatgtaacatgacaagagattttgcgtttgacattgtgtctgggaaggaagggccagaccttggaacctttggaacctgctgtcaacaggtcttacagggctgcttgaaccctcataggcctaggctttggtctaaaaggaacatttaaaaagttgccctgtaaagttatttggtgtcattgaccaattgcatcccagctaaaaagcaagaggcatcgttgcctggataatagaggatgtgtttcagccctgagatgttacagttgaagagcttggttttcattgagcatttctctatttttccagttatccccgaaatttctatgtattatattttttggggaagtgaggtgtgcccagttttttaatctaacaactacttttggggacttgcccacatctctgggatttgaatggggattgtatcccattttactgtcttttaggtttacatttaccacgtttctcttctctgctccccttgcccactggggactcctctttggctccttgaagtttgctgcttagagttggaagtgcagcaggcaggtgatcatgctgcaagttctttctggacctctggcaaagggagtggtcagtgaaggccatcgttaccttgggatctgccaggctggggtgttttcggtatctgctgttcacagctctccactgtaatccgaatactttgccagtgcactaatctctttggagataaaattcattagtgtgttactaaatgttaattttcttttgcggaaaatacagtaccgtgtctgaattaattattaatatttaaaatacttcattccttaactctccctcatttgctttgcccacagcctattcagttcctttgtttggcaggattctgcaaaatgtgtctcacccactactgagattgttcagcccctgatgtatttgtattgatttgtttctggtggtagcttgtcctgaaatgtgtgtagaaagcaagtattttatgataaaaatgttgtgtagtgcatgctctgtgtggaattcagaggaaaacccagattcagtgattaacaatgccaaaaaatgcaagtaactagccattgttcaaatgacagtggtgctatttctcttttgtggccttttagacttttgttgccctaaaattccattttattgggaacccattttccacctggtctttcttgacagggtttttttctactttaaacagtttctaaataaaattctgtatttcaagagta

SEQ ID NO: 372644 - DNA, 2182 bp, Homo sapiens
ttctgtggatcaggggccgagctccgcccccggcgcgcggctgagtccctctctataaaaggagccggcggaggatgacgagcggctttacgtcggcgcgtaacgagggggtgcgtgtgaggtcatcgcgcgggcgggcgggcggggtctggcggtttgaacgagacgaagacggaaccggagccggttgcgggcagtggacgcggttctgccgagagccgaagatggcagtgaacgtatactcaacgtcagtgaccagtgataacctaagtcgacatgacatgctggcctggatcaatgagtctctgcagttgaatctgacaaagatcgaacagttgtgctcaggggctgcgtattgtcagtttatggacatgctgttccctggctccattgccttgaagaaagtgaaattccaagctaagctagaacacgagtacatccagaacttcaaaatactacaagcaggttttaagagaatgggtgttgacaaaataattcctgtggacaaattagtaaaaggaaagtttcaggacaattttgaattcgttcagtggttcaagaagtttttcgatgcaaactatgatggaaaagactatgaccctgtggctgccagacaaggtcaagaaactgcagtggctccttcccttgttgctccagctctgaataaaccgaagaaacctctcacttctagcagtgcagctccccagaggcccatctcaacacagagaaccgctgcggctcctaaggctggccctggtgtggtgcgaaagaaccctggtgtgggcaacggagacgacgaggcagctgagttgatgcagcaggtcaacgtattgaaacttactgttgaagacttggagaaagagagggatttctacttcggaaagctacggaacattgaattgatttgccaggagaacgagggggaaaacgaccctgtattgcagaggattgtagacattctgtatgccacagatgaaggctttgtgatacctgatgaagggggcccacaggaggagcaagaagagtattaacagcctggaccagcagagcaacatcggaattcttcactccaaatcatgtgcttaactgtaaaatactcccttttgttatccttagaggactcactggtttcttttcataagcaaaaagtacctcttcttaaagtgcactttgcagacgtttcactccttttccaataagtttgagttaggagcttttaccttgtagcagagcagtattaacatctagttggttcacctggaaaacagagaggctgaccgtggggctcaccatgcggatgcgggtcacactgaatgctggagagatgttatgtaatatgctgaggtggcgacctcagtggagaaatgtaaagactgaattgaattttaagctaatgtgaaatcagagaatgttgtaataagtaaatgccttaagagtatttaaaatatgcttccacatttcaaaatataaaatgtaacatgacaagagattttgcgtttgacattgtgtctgggaaggaagggccagaccttggaacctttggaacctgctgtcaacaggtcttacagggctgcttgaaccctcataggcctaggctttggtctaaaaggaacatttaaaaagttgccctgtaaagttatttggtgtcattgaccaattgcatcccagctaaaaagcaagaggcatcgttgcctggataatagaggatgtgtttcagccctgagatgttacagttgaagagcttggttttcattgagcatttctctatttttccagttatccccgaaatttctatgtattatattttttggggaagtgaggtgtgcccagttttttaatctaacaactacttttggggacttgcccacatctctgggatttgaatggggattgtatcccattttactgtcttttaggtttacatttaccacgtttctcttctctgctccccttgcccactggggactcctctttggctccttgaagtttgctgcttagagttggaagtgcagcaggcaggtgatcatgctgcaagttctttctggacctctggcaaagggagtggtcagtgaaggccatcgttaccttgggatctgccacactggcaaagtattcggattacagtggagagctgtgaacagcagataccgaaaacaccccagcctggaagatcccaaggtaa

SEQ ID NO: 372645 - DNA, 692 bp, Homo sapiens
ttctgtggatcaggggccgagctccgcccccggcgcgcggctgagtccctctctataaaaggagccggcggaggatgacgagcggctttacgtcggcgcgtaacgagggggtgcgtgtgaggtcatcgcgcgggcgggcgggcggggtctggcggtttgaacgagacgaagacggaaccggagccggttgcgggcagtggacgcggttctgccgagagccgaagatggcagtgaacgtatactcaacgtcagtgaccagtgataacctaagtcgacatgacatgctggcctggatcaatgagtctctgcagttgaatctgacaaagatcgaacagttgtgctcaggggctgcgtattgtcagtttatggacatgctgttccctggctccattgccttgaagaaactgaaatgtgtgtagaaagcaagtattttatgataaaaatgttgtgtagtgcatgctctgtgtggaattcagaggaaaacccagattcagtgattaacaatgccaaaaaatgcaagtaactagccattgttcaaatgacagtggtgctatttctcttttgtggccttttagacttttgttgccctaaaattccattttattgggaacccattttccacctggtctttcttgacagggtttttttctactttaaacagtttctaaataaaattctgtatttcaagagta

SEQ ID NO: 372646 - DNA, 1274 bp, Homo sapiens
ttctgtggatcaggggccgagctccgcccccggcgcgcggctgagtccctctctataaaaggagccggcggaggatgacgagcggctttacgtcggcgcgtaacgagggggtgcgtgtgaggtcatcgcgcgggcgggcgggcggggtctggcggtttgaacgagacgaagacggaaccggagccggttgcgggcagtggacgcggttctgccgagagccgaagatggcagtgaacgtatactcaacgtcagtgaccagtgataacctaagtcgacatgacatgctggcctggatcaatgagtctctgcagttgaatctgacaaagatcgaacagttgtgctcaggggctgcgtattgtcagtttatggacatgctgttccctggctccattgccttgaagaaagtgaaattccaagctaagctagaacacgagtacatccagaacttcaaaatactacaagcaggttttaagagaatgggtgttgacaaagtaagtaaacgttatcttttattgtggttaatgttccttaatgatcgttgctaaggaggtagatgctagcttatgactttggacattttcttttttttcttaatttatctagttaacttttctcagttaacacagaatttactgggagcagtttgcccctaccttcttgcccctattccccttgcttgtttctttcttcatcgtctgtgaagttagtaactgtttagaggagtcagcctgtaaatttgtacagtgatttttatttttaaaaaattcctgtgtaatctctagtagtctggaatctaactctcttaatctggatttacttctgtaaaagcatactgtatgtagaatagttccagtagagaagattctaggccaggcgtggtggctcacacccgtaatcccagcactttggaggctgaggtggagaagattctagaaatacttgctttttatagaaggttacaaggaggctccgtggtgggtgctggaaaactcctttctgcccccaaaggtttttgaaggtaacagaaacatggtccaccaggcatggtttagcacaaacatttaatgtttagcacaaatattacctctgttttagtagataatagattaagtagtttatcccttcccccacccttgtgaagggtttatccttttaagccatttttggggggataactttttttttttatggcaaaggtagtaacacccccaattatcttgctggtgtctggtttttatttattttgaaatcagggtttttttttaattttagtt

SEQ ID NO: 372647 - DNA, 240 bp, Homo sapiens
ctactttaaacagtttctaaataaaattctgtatttcaagagtatcatgtcttctgaaatttgtcttgccctgggtatatgctgttaggttcaagtgatgggaaaccagtgcttctttcttcagtgaggactgatcttttcacatcctttactgatttttcagatgtgcttatttcttcttcttcttcttttttttttttttttttttgagatggagtcttggtctgtcgcccaggctgg

SEQ ID NO: 372648 - DNA, 588 bp, Homo sapiens
agaaattgacttcacatgaagttagtgaagcttttggtttttgtaggtctacttcacaattttaaaaattgtatttggtttaagtgggtctgggaagaagttcaccctgcttctttaattgtatttttctgttgccgttgttctttcaggggctgcgtattgtcagtttatggacatgctgttccctggctccattgccttgaagaaagtgaaattccaagctaagctagaacacgagtacatccagaacttcaaaatactacaagcaggttttaagagaatgggtgttgacaaagtaagtaaacgttatcttttattgtggttaatgttccttaatgatcgttgctaaggaggtagatgctagcttatgactttggacattttcttttttttcttaatttatctagttaacttttctcagttaacacagaatttactgggagcagtttgcccctaccttcttgcccctattccccttgcttgtttctttcttcatcgtctgtgaagttagtaactgtttagaggagtcagcctgtaaatttgtacagtgatttttatttttaaaaaattcctgtgtaatctctagta

SEQ ID NO: 372649 - DNA, 2597 bp, Homo sapiens
ttctgtggatcaggggccgagctccgcccccggcgcgcggctgagtccctctctataaaaggagccggcggaggatgacgagcggctttacgtcggcgcgtaacgaggggaagatggcagtgaacgtatactcaacgtcagtgaccagtgataacctaagtcgacatgacatgctggcctggatcaatgagtctctgcagttgaatctgacaaagatcgaacagttgtgctcaggggctgcgtattgtcagtttatggacatgctgttccctggctccattgccttgaagaaagtgaaattccaagctaagctagaacacgagtacatccagaacttcaaaatactacaagcaggttttaagagaatgggtgttgacaaaataattcctgtggacaaattagtaaaaggaaagtttcaggacaattttgaattcgttcagtggttcaagaagtttttcgatgcaaactatgatggaaaagactatgaccctgtggctgccagacaaggtcaagaaactgcagtggctccttcccttgttgctccagctctgaataaaccgaagaaacctctcacttctagcagtgcagctccccagaggcccatctcaacacagagaaccgctgcggctcctaaggctggccctggtgtggtgcgaaagaaccctggtgtgggcaacggagacgacgaggcagctgagttgatgcagcaggtcaacgtattgaaacttactgttgaagacttggagaaagagagggatttctacttcggaaagctacggaacattgaattgatttgccaggagaacgagggggaaaacgaccctgtattgcagaggattgtagacattctgtatgccacagatgaaggctttgtgatacctgatgaagggggcccacaggaggagcaagaagagtattaacagcctggaccagcagagcaacatcggaattcttcactccaaatcatgtgcttaactgtaaaatactcccttttgttatccttagaggactcactggtttcttttcataagcaaaaagtacctcttcttaaagtgcactttgcagacgtttcactccttttccaataagtttgagttaggagcttttaccttgtagcagagcagtattaacatctagttggttcacctggaaaacagagaggctgaccgtggggctcaccatgcggatgcgggtcacactgaatgctggagagatgttatgtaatatgctgaggtggcgacctcagtggagaaatgtaaagactgaattgaattttaagctaatgtgaaatcagagaatgttgtaataagtaaatgccttaagagtatttaaaatatgcttccacatttcaaaatataaaatgtaacatgacaagagattttgcgtttgacattgtgtctgggaaggaagggccagaccttggaacctttggaacctgctgtcaacaggtcttacagggctgcttgaaccctcataggcctaggctttggtctaaaaggaacatttaaaaagttgccctgtaaagttatttggtgtcattgaccaattgcatcccagctaaaaagcaagaggcatcgttgcctggataatagaggatgtgtttcagccctgagatgttacagttgaagagcttggttttcattgagcatttctctatttttccagttatccccgaaatttctatgtattatattttttggggaagtgaggtgtgcccagttttttaatctaacaactacttttggggacttgcccacatctctgggatttgaatggggattgtatcccattttactgtcttttaggtttacatttaccacgtttctcttctctgctccccttgcccactggggactcctctttggctccttgaagtttgctgcttagagttggaagtgcagcaggcaggtgatcatgctgcaagttctttctggacctctggcaaagggagtggtcagtgaaggccatcgttaccttgggatctgccaggctggggtgttttcggtatctgctgttcacagctctccactgtaatccgaatactttgccagtgcactaatctctttggagataaaattcattagtgtgttactaaatgttaattttcttttgcggaaaatacagtaccgtgtctgaattaattattaatatttaaaatacttcattccttaactctccctcatttgctttgcccacagcctattcagttcctttgtttggcaggattctgcaaaatgtgtctcacccactactgagattgttcagcccctgatgtatttgtattgatttgtttctggtggtagcttgtcctgaaatgtgtgtagaaagcaagtattttatgataaaaatgttgtgtagtgcatgctctgtgtggaattcagaggaaaacccagattcagtgattaacaatgccaaaaaatgcaagtaactagccattgttcaaatgacagtggtgctatttctcttttgtggccttttagacttttgttgccctaaaattccattttattgggaacccattttccacctggtctttcttgacagggtttttttctactttaaacagtttctaaataaaattctgtatttcaagagta

SEQ ID NO: 372650 - DNA, 2661 bp, Homo sapiens
ttctgtggatcaggggccgagctccgcccccggcgcgcggctgagtccctctctataaaaggagccggcggaggatgacgagcggctttacgtcggcgcgtaacgagggggtgcgtgtgaggtcatcgcgcgggcgggcgggcggggtctggcggtttgaacgagacgaagacggaaccggagccggttgcgggcagtggacgcggttctgccgagagccgaagatggcagtgaacgtatactcaacgtcagtgaccagtgataacctaagtcgacatgacatgctggcctggatcaatgagtctctgcagttgaatctgacaaagatcgaacagttgtgctcaggggctgcgtattgtcagtttatggacatgctgttccctggctccattgccttgaagaaagtgaaattccaagctaagctagaacacgagtacatccagaacttcaaaatactacaagcaggttttaagagaatgggtgttgacaaaataattcctgtggacaaattagtaaaaggaaagtttcaggacaattttgaattcgttcagtggttcaagaagtttttcgatgcaaactatgatggaaaagacttcccttgttgctccagctctgaataaaccgaagaaacctctcacttctagcagtgcagctccccagaggcccatctcaacacagagaaccgctgcggctcctaaggctggccctggtgtggtgcgaaagaaccctggtgtgggcaacggagacgacgaggcagctgagttgatgcagcaggtcaacgtattgaaacttactgttgaagacttggagaaagagagggatttctacttcggaaagctacggaacattgaattgatttgccaggagaacgagggggaaaacgaccctgtattgcagaggattgtagacattctgtatgccacagatgaaggctttgtgatacctgatgaagggggcccacaggaggagcaagaagagtattaacagcctggaccagcagagcaacatcggaattcttcactccaaatcatgtgcttaactgtaaaatactcccttttgttatccttagaggactcactggtttcttttcataagcaaaaagtacctcttcttaaagtgcactttgcagacgtttcactccttttccaataagtttgagttaggagcttttaccttgtagcagagcagtattaacatctagttggttcacctggaaaacagagaggctgaccgtggggctcaccatgcggatgcgggtcacactgaatgctggagagatgttatgtaatatgctgaggtggcgacctcagtggagaaatgtaaagactgaattgaattttaagctaatgtgaaatcagagaatgttgtaataagtaaatgccttaagagtatttaaaatatgcttccacatttcaaaatataaaatgtaacatgacaagagattttgcgtttgacattgtgtctgggaaggaagggccagaccttggaacctttggaacctgctgtcaacaggtcttacagggctgcttgaaccctcataggcctaggctttggtctaaaaggaacatttaaaaagttgccctgtaaagttatttggtgtcattgaccaattgcatcccagctaaaaagcaagaggcatcgttgcctggataatagaggatgtgtttcagccctgagatgttacagttgaagagcttggttttcattgagcatttctctatttttccagttatccccgaaatttctatgtattatattttttggggaagtgaggtgtgcccagttttttaatctaacaactacttttggggacttgcccacatctctgggatttgaatggggattgtatcccattttactgtcttttaggtttacatttaccacgtttctcttctctgctccccttgcccactggggactcctctttggctccttgaagtttgctgcttagagttggaagtgcagcaggcaggtgatcatgctgcaagttctttctggacctctggcaaagggagtggtcagtgaaggccatcgttaccttgggatctgccaggctggggtgttttcggtatctgctgttcacagctctccactgtaatccgaatactttgccagtgcactaatctctttggagataaaattcattagtgtgttactaaatgttaattttcttttgcggaaaatacagtaccgtgtctgaattaattattaatatttaaaatacttcattccttaactctccctcatttgctttgcccacagcctattcagttcctttgtttggcaggattctgcaaaatgtgtctcacccactactgagattgttcagcccctgatgtatttgtattgatttgtttctggtggtagcttgtcctgaaatgtgtgtagaaagcaagtattttatgataaaaatgttgtgtagtgcatgctctgtgtggaattcagaggaaaacccagattcagtgattaacaatgccaaaaaatgcaagtaactagccattgttcaaatgacagtggtgctatttctcttttgtggccttttagacttttgttgccctaaaattccattttattgggaacccattttccacctggtctttcttgacagggtttttttctactttaaacagtttctaaataaaattctgtatttcaagagta

SEQ ID NO: 372651 - DNA, 2783 bp, Homo sapiens
ttctgtggatcaggggccgagctccgcccccggcgcgcggctgagtccctctctataaaaggagccggcggaggatgacgagcggctttacgtcggcgcgtaacgagggggtgcgtgtgaggtcatcgcgcgggcgggcgggcggggtctggcggtttgaacgagacgaagacggaaccggagccggttgcgggcagtggacgcggttctgccgagagccgaagatggcagtgaacgtatactcaacgtcagtgaccagtgataacctaagtcgacatgacatgctggcctggatcaatgagtctctgcagttgaatctgacaaagatcgaacagttgtgctcaggggctgcgtattgtcagtttatggacatgctgttccctggctccattgccttgaagaaagtgaaattccaagctaagctagaacacgagtacatccagaacttcaaaatactacaagcaggttttaagagaatgggtgttgacaaaataattcctgtggacaaattagtaaaaggaaagtttcaggacaattttgaattcgttcagtggttcaagaagtttttcgatgcaaactatgatggaaaagactatgaccctgtggctgccagacaaggtcaagaaactgcagtggctccttcccttgttgctccagctctgaataaaccgaagaaacctctcacttctagcagtgcagctccccagaggcccatctcaacacagagaaccgctgcggctcctaaggctggccctggtgtggtgcgaaagaaccctggtgtgggcaacggagacgacgaggcagctgagttgatgcagcaggtcaacgtattgaaacttactgttgaagacttggagaaagagagggatttctacttcggaaagctacggaacattgaattgatttgccaggagaacgagggggaaaacgaccctgtattgcagaggattgtagacattctgtatgccacagatgaaggctttgtgatacctgatgaagggggcccacaggaggagcaagaagagtattaacagcctggaccagcagagcaacatcggaattcttcactccaaatcatgtgcttaactgtaaaatactcccttttgttatccttagaggactcactggtttcttttcataagcaaaaagtacctcttcttaaagtgcactttgcagacgtttcactccttttccaataagtttgagttaggagcttttaccttgtagcagagcagtattaacatctagttggttcacctggaaaacagagaggctgaccgtggggctcaccatgcggatgcgggtcacactgaatgctggagagatgttatgtaatatgctgaggtggcgacctcagtggagaaatgtaaagactgaattgaattttaagctaatgtgaaatcagagaatgttgtaataagtaaatgccttaagagtatttaaaatatgcttccacatttcaaaatataaaatgtaacatgacaagagattttgcgtttgacattgtgtctgggaaggaagggccagaccttggaacctttggaacctgctgtcaacaggtcttacagggctgcttgaaccctcataggcctaggctttggtctaaaaggaacatttaaaaagttgccctgtaaagttatttggtgtcattgaccaattgcatcccagctaaaaagcaagaggcatcgttgcctggataatagaggatgtgtttcagccctgagatgttacagttgaagagcttggttttcattgagcatttctctatttttccagttatccccgaaatttctatgtattatattttttggggaagtgaggtgtgcccagttttttaatctaacaactacttttggggacttgcccacatctctgggatttgaatggggattgtatcccattttactgtcttttaggtttacatttaccacgtttctcttctctgctccccttgcccactggggactcctctttggctccttgaagtttgctgcttagagttggaagtgcagcaggcaggtgatcatgctgcaagttctttctggacctctggcaaagggagtggtcagtgaaggccatcgttaccttgggatctgccaggctggggtgttttcggtatctgctgttcacagctctccactgtaatccgaatactttgccagtgcactaatctctttggagataaaattcattagtgtgttactaaatgttaattttcttttgcggaaaatacagtaccgtgtctgaattaattattaatatttaaaatacttcattccttaactctccctcatttgctttgcccacagcctattcagttcctttgtttggcaggattctgcaaaatgtgtctcacccactactgagattgttcagcccctgatgtatttgtattgatttgtttctggtggtagcttgtcctgaaatacttgctttctacacacatttcaggacaagctaccaccagaaacaaatcaatacaaatacatcaggggctgaaatgtgtgtagaaagcaagtattttatgataaaaatgttgtgtagtgcatgctctgtgtggaattcagaggaaaacccagattcagtgattaacaatgccaaaaaatgcaagtaactagccattgttcaaatgacagtggtgctatttctcttttgtggccttttagacttttgttgccctaaaattccattttattgggaacccattttccacctggtctttcttgacagggtttttttctactttaaacagtttctaaataaaattctgtatttcaagagta

SEQ ID NO: 372652 - DNA, 1974 bp, Homo sapiens
ttctgtggatcaggggccgagctccgcccccggcgcgcggctgagtccctctctataaaaggagccggcggaggatgacgagcggctttacgtcggcgcgtaacgagggggtgcgtgtgaggtcatcgcgcgggcgggcgggcggggtctggcggtttgaacgagacgaagacggaaccggagccggttgcgggcagtggacgcggttctgccgagagccgaagatggcagtgaacgtatactcaacgtcagtgaccagtgataacctaagtcgacatgacatgctggcctggatcaatgagtctctgcagttgaatctgacaaagatcgaacagttgtgctcaggggctgcgtattgtcagtttatggacatgctgttccctggctccattgccttgaagaaagtgaaattccaagctaagctagaacacgagtacatccagaacttcaaaatactacaagcaggttttaagagaatgggtgttgacaaaataattcctgtggacaaattagtaaaaggaaagtttcaggacaattttgaattcgttcagtggttcaagaagtttttcgatgcaaactatgatggaaaagactatgaccctgtggctgccagacaaggtcaagaaactgcagtggctccttcccttgttgctccagctctgaataaaccgaagaaacctctcacttctagcagtgcagctccccagaggcccatctcaacacagagaaccgctgcggctcctaaggctggccctggtgtggtgcgaaagaaccctggtgtgggcaacggagacgacgaggcagctgagttgatgcagcaggtcaacgtattgaaacttactgttgaagacttggagaaagagagggatttctacttcggaaagctacggaacattgaattgatttgccaggagaacgagggggaaaacgaccctgtattgcagaggattgtagacattctgtatgccacagatgaaggctttgtgatacctgatgaagggggcccacaggaggagcaagaagagtattaacagcctggaccagcagagcaacatcggaattcttcactccaaatcatgtgcttaactgtaaaatactcccttttgttatccttagaggactcactggtttcttttcataagcaaaaagtacctcttcttaaagtgcactttgcagacgtttcactccttttccaataagtttgagttaggagcttttaccttgtagcagagcagtattaacatctagttggttcacctggaaaacagagaggctgaccgtggggctcaccatgcggatgcgggtcacactgaatgctggagagatgttatgtaatatgctgaggtggcgacctcagtggagaaatgtaaagactgaattgaattttaagctaatgtgaaatcagagaatgttgtaataagtaaatgccttaagagtatttaaaatatgcttccacatttcaaaatataaaatgtaacatgacaagagattttgcgtttgacattgtgtctgggaaggaagggccagaccttggaacctttggaacctgctgtcaacaggtcttacagggctgcttgaaccctcataggcctaggctttggtctaaaaggaacatttaaaaagttgccctgtaaagttatttggtgtcattgaccaattgcatcccagctaaaaagcaagaggcatcgttgcctggataatagaggatgtgtttcagccctgagatgttacagttgaagagcttggttttcattgagcatttctctatttttccagttatccccgaaatttctatgtattatattttttggggaagtgaggtgtgcccagttttttaatctaacaactacttttggggacttgcccacatctctgggaccttgacactgctgaatgttttgtcctccccctttaatattttctaggtacttgcctgcgagcttcctgaactcatttttaccccctgaactctgg

SEQ ID NO: 372653 - DNA, 1988 bp, Homo sapiens
ggcacgaggctccatgtgatcacatggagtatgctgtgaactgccatgtgatcacctgggagaggattatcagccactttgatatttttgcatttggacatttctggggctgggccatgaaggccttgctgatccgtagttacggtctctgctggacaatcagtattacctgggagctgactgagctcttcttcatgcatctcctccccaattttgccgagtgctggtgggatcaagtcattctggacatcctgttgtgcaatggcggtggcatttggctgggcatggtcgtttgccggtttttagagatgaggacttaccactgggcaagcttcaaggacattcataccaccaccgggaagatcaagagagctgttctgcagttcactcctgctagctggacctatgttcgatggtttgaccccaaatcttcttttcagagagtagctggagtgtaccttttcatgatcatctggcagctgactgagttgaataccttcttcttgaagcatatctttgtgttccaagccagtcatccattaagttggggtagaattctctttattggtggcatcacagctcccacagtgagacagtactacgcttacctcaccgacacacagtgcaagcgcgtaggaacacaatgctgggtgtttggggtcattggtttcctggaggccattgtttgcataaaatttggacaagatctcttctctaagacccaaatactctatgttgtgctttggcttctttgcgtggctttcaccactttcctctgtctgtacggcatgatttggtatgcagaacactatggtcaccgagaaaagacctactcggagtgtgaagatggcacctacagtccagagatctcctggcatcacaggaaagggacaaaaggttctgaagacagcccacccaagcatgcaggcaacaacgaaagccattcttccaggagaaggaatcggcattccaagtcaaaagtcaccaatggcgttggaaagaaatgaaaaaccctggttaatcaaagatgttccagagtgcctagaactgagagggaaatggaactcatttggaactccccgtgaggaggtcgaggcgcacagggcaagcaggaagaggcgagggcacttgggggtcattatttgagatcgtaagtcttgtttcccacagacctggccgcgtcaggcagatcatcgcctggggggcctttgccaacgtggggtctcttctaacttcagcacttgacatgcggtcaccggtggcagcgcggtgtgttgaagggaaacggtagctattcattcacagttgccaagagcagctccgcgcctgctggatcgtggatgcagcgtaaacatcttccttcagacgaggcattaaccccatggttaatggactggtcaccagtttttattttatttttatgaatctacctttccattgattgatttaagttcaggccacttttctgtcttttatttggttactgttgttatttgtttttaagttaggatgctttttaacagcctttagaagccgctgctgaaattgatactgggggaagggttccccttccttctagagcagaaaagggagagaggtgttgtattcctgtttggtaacctcagtctcctgtaagacctcctaccacatggcgagtatacaccaatcaggagagggtagctgcctgcataggagcctcgcttccgattattcccttcccaatattattcatccagacttagccacagtgcacaaaagcaaacctgctagagaggcagtgaacaccacagcttctccccagctaggtgccttttacatcgggtttgttctccttccatggtgtgttgctgacattgtcactgagtcccatgtgaggtgctggtgagtattacctttcatctgtgccatgctctagaaccttgaccttgatagttcaccacctctgatggatccctgttttaaataaaaacgattcactttaaagccta

SEQ ID NO: 372654 - DNA, 111 bp, Homo sapiens
aattcaagcttctaacgatgtacggggacatgctctagaaccttgaccttgatagttcaccacctctgatggatccctgttttaaataaaaacgattcactttaaagccta

SEQ ID NO: 372655 - DNA, 3243 bp, Homo sapiens
cagagccccctcctgaggcttctcacactgcgctaattagccagcatggttgagttttcactacatcagccagggaaaaacacaaaacaaaaccaatcaccctctactgggccgcgaaaacctaaaggcccttgaggccctggggcgcggtctggacgcgggtgcgccggaacctgaaccctcgccaggagcgcgatcctcgtgctggggcagctcctgctttacctgtggcgaggcctgcttcccgtagcgggtgaccccgggaccgaccaactcgctgggccgcacgtcccgtcccgccgcgccgcacgccggctcctcagcccgccctacacagcgcagccgcgctcccgggcccacgtgggccgcgcccggagtgggcgagaccatgtgccgggttacgcggggagacagcgggctacgtgctctgaaaagagccagccaggggccccggctacccttctccggctcgctattcctctgaagtcctgtggacttggagtctgaaaattcctcgagtggtagagatgcctcagctaggatgacagcgtggggacggccggcggcgtcccctgccccaggccgcggtggcggcgccgcgaccccgccctctcgcgcctgtccttccctctgctcccagcctttgctgggcgccagacccggctttgccgtccggctattagcctactgtggctagtcacccccggggtcccggccttctcgggctggggccgccgccaccgcggcaggacggggaggcgggccatggcgtcctgcgtggggagccggaccctaagcaaggatgatgtgaactacaaaatgcatttccggatgatcaacgagcagcaagtggaggacatcaccattgacttcttctaccggccgcataccatcaccctgctcagcttcaccatcgtcagcctcatgtacttcgcctttaccagggatgactctgttccagaagacaacatctggagaggcatcctctctgttattttcttctttcttatcatcagtgtgttagctttccccaatggtccgttcactcgacctcatccagccttatggcgaatggtttttggactcagtgtgctctacttcctgttcctggtattcctactcttcctgaatttcgagcaggttaaatctctaatgtattggctagatccaaatcttcgatacgccacaagggaagcagatgtcatggagtatgctgtgaactgccatgtgatcacctgggagaggattatcagccactttgatatttttgcatttggacatttctggggctgggccatgaaggccttgctgatccgtagttacggtctctgctggacaatcagtattacctgggagctgactgagctcttcttcatgcatctcctccccaattttgccgagtgctggtgggatcaagtcattctggacatcctgttgtgcaatggcggtggcatttggctgggcatggtcgtttgccggtttttagagatgaggacttaccactgggcaagcttcaaggacattcataccaccaccgggaagatcaagagagctgttctgcagttcactcctgctagctggacctatgttcgatggtttgaccccaaatcttcttttcagagagtagctggagtgtaccttttcatgatcatctggcagctgactgagttgaataccttcttcttgaagcatatctttgtgttccaagccagtcatccattaagttggggtagaattctctttattggtggcatcacagctcccacagtgagacagtactacgcttacctcaccgacacacagtgcaagcgcgtaggaacacaatgctgggtgtttggggtcattggtttcctggaggccattgtttgcataaaatttggacaagatctcttctctaagacccaaatactctatgttgtgctttggcttctttgcgtggctttcaccactttcctctgtctgtacggcatgatttggtatgcagaacactatggtcaccgagaaaagacctactcggagtgtgaagatggcacctacagtccagagatctcctggcatcacaggaaagggacaaaaggttctgaagacagcccacccaagcatgcaggcaacaacgaaagccattcttccaggagaaggaatcggcattccaagtcaaaagtcaccaatggcgttggaaagaaatgaaaaaccctggttaatcaaagatgttccagagtgcctagaactgagagggaaatggaactcatttggaactccccgtgaggaggtcgaggcgcacagggcaagcaggaagaggcgagggcacttgggggtcattatttgagatcgtaagtcttgtttcccacagacctggccgcgtcaggcagatcatcgcctggggggcctttgccaacgtggggtctcttctaacttcagcacttgacatgcggtcaccggtggcagcgcggtgtgttgaagggaaacggtagctattcattcacagttgccaagagcagctccgcgcctgctggatcgtggatgcagcgtaaacatcttccttcagacgaggcattaaccccatggttaatggactggtcaccagtttttattttatttttatgaatctacctttccattgattgatttaagttcaggccacttttctgtcttttatttggttactgttgttatttgtttttaagttaggatgctttttaacagcctttagaagccgctgctgaaattgatactgggggaagggttccccttccttctagagcagaaaagggagagaggtgttgtattcctgtttggtaacctcagtctcctgtaagacctcctaccacatggcgagtatacaccaatcaggagagggtagctgcctgcataggagcctcgcttccgattattcccttcccaatattattcatccagacttagccacagtgcacaaaagcaaacctgctagagaggcagtgaacaccacagcttctccccagctaggtgccttttacatcgggtttgttctccttccatggtgtgttgctgacattgtcactgagtcccatgtgaggtgctggtgagtattacctttcatctgtgccatgctctagaaccttgaccttgatagttcaccacctctgatggatccctgttttaaataaaaacgattcactttaaagcctaaaaaaaaaatactctaaggggggccccgtacccatttttccttattgtagttgttttaactccgctttattgccg

SEQ ID NO: 372656 - DNA, 2302 bp, Homo sapiens
ttcagtctctctctctctctctcacacacacacacacacacccacacatgtgcacacacgtacacacacgcatgcacccacatgcaaacgcacacacatgatgatgactgtgctgtccagagcctctttccctggagctcctgggcagctgggacattttacttgttaaggtccgttcactcgacctcatccagccttatggcgaatggtttttggactcagtgtgctctacttcctgttcctggtattcctactcttcctgaatttcgagcaggttaaatctctaatgtattggctagatccaaatcttcgatacgccacaagggaagcagatgtcatggagtatgctgtgaactgccatgtgatcacctgggagaggattatcagccactttgatatttttgcatttggacatttctggggctgggccatgaaggccttgctgatccgtagttacggtctctgctggacaatcagtattacctgggagctgactgagctcttcttcatgcatctcctccccaattttgccgagtgctggtgggatcaagtcattctggacatcctgttgtgcaatggcggtggcatttggctgggcatggtcgtttgccggtttttagagatgaggacttaccactgggcaagcttcaaggacattcataccaccaccgggaagatcaagagagctgttctgcagttcactcctgctagctggacctatgttcgatggtttgaccccaaatcttcttttcagagagtagctggagtgtaccttttcatgatcatctggcagctgactgagttgaataccttcttcttgaagcatatctttgtgttccaagccagtcatccattaagttggggtagaattctctttattggtggcatcacagctcccacagtgagacagtactacgcttacctcaccgacacacagtgcaagcgcgtaggaacacaatgctgggtgtttggggtcattggtttcctggaggccattgtttgcataaaatttggacaagatctcttctctaagacccaaatactctatgttgtgctttggcttctttgcgtggctttcaccactttcctctgtctgtacggcatgatttggtatgcagaacactatggtcaccgagaaaagacctactcggagtgtgaagatggcacctacagtccagagatctcctggcatcacaggaaagggacaaaaggttctgaagacagcccacccaagcatgcaggcaacaacgaaagccattcttccaggagaaggaatcggcattccaagtcaaaagtcaccaatggcgttggaaagaaatgaaaaaccctggttaatcaaagatgttccagagtgcctagaactgagagggaaatggaactcatttggaactccccgtgaggaggtcgaggcgcacagggcaagcaggaagaggcgagggcacttgggggtcattatttgagatcgtaagtcttgtttcccacagacctggccgcgtcaggcagatcatcgcctggggggcctttgccaacgtggggtctcttctaacttcagcacttgacatgcggtcaccggtggcagcgcggtgtgttgaagggaaacggtagctattcattcacagttgccaagagcagctccgcgcctgctggatcgtggatgcagcgtaaacatcttccttcagacgaggcattaaccccatggttaatggactggtcaccagtttttattttatttttatgaatctacctttccattgattgatttaagttcaggccacttttctgtcttttatttggttactgttgttatttgtttttaagttaggatgctttttaacagcctttagaagccgctgctgaaattgatactgggggaagggttccccttccttctagagcagaaaagggagagaggtgttgtattcctgtttggtaacctcagtctcctgtaagacctcctaccacatggcgagtatacaccaatcaggagagggtagctgcctgcataggagcctcgcttccgattattcccttcccaatattattcatccagacttagccacagtgcacaaaagcaaacctgctagagaggcagtgaacaccacagcttctccccagctaggtgccttttacatcgggtttgttctccttccatggtgtgttgctgacattgtcactgagtcccatgtgaggtgctggtgagtattacctttcatctgtgccatgctctagaaccttgaccttgatagttcaccacctctgatggatccctgttttaaataaaaacgattcactttaaagccta

SEQ ID NO: 372657 - DNA, 1402 bp, Homo sapiens
tatttacaccttcagtctaaagaacttaaggcatgttgtggaagattgattctgcatcacctgtgagaggaaagaaccttgtttttatagcagagaaatataagcacagggaggttctgtcacttgccagtgatgatcccagcctgggagaggcagggatgcatcatgctcgcctttttgccctgccacttctcccagggagttcctaaaattcctgcactaagcctgtctctctccctagacctactcggagtgtgaagatggcacctacagtccagagatctcctggcatcacaggaaagggacaaaaggttctgaagacagcccacccaagcatgcaggcaacaacgaaagccattcttccaggagaaggaatcggcattccaagtcaaaagtcaccaatggcgttggaaagaaatgaaaaaccctggttaatcaaagatgttccagagtgcctagaactgagagggaaatggaactcatttggaactccccgtgaggaggtcgaggcgcacagggcaagcaggaagaggcgagggcacttgggggtcattatttgagatcgtaagtcttgtttcccacagacctggccgcgtcaggcagatcatcgcctggggggcctttgccaacgtggggtctcttctaacttcagcacttgacatgcggtcaccggtggcagcgcggtgtgttgaagggaaacggtagctattcattcacagttgccaagagcagctccgcgcctgctggatcgtggatgcagcgtaaacatcttccttcagacgaggcattaaccccatggttaatggactggtcaccagtttttattttatttttatgaatctacctttccattgattgatttaagttcaggccacttttctgtcttttatttggttactgttgttatttgtttttaagttaggatgctttttaacagcctttagaagccgctgctgaaattgatactgggggaagggttccccttccttctagagcagaaaagggagagaggtgttgtattcctgtttggtaacctcagtctcctgtaagacctcctaccacatggcgagtatacaccaatcaggagagggtagctgcctgcataggagcctcgcttccgattattcccttcccaatattattcatccagacttagccacagtgcacaaaagcaaacctgctagagaggcagtgaacaccacagcttctccccagctaggtgccttttacatcgggtttgttctccttccatggtgtgttgctgacattgtcactgagtcccatgtgaggtgctggtgagtattacctttcatctgtgccatgctctagaaccttgaccttgatagttcaccacctctgatggatccctgttttaaataaaaacgattcactttaaagccta

SEQ ID NO: 372658 - DNA, 1471 bp, Homo sapiens
ccttggttgcagggcaggatgggcaccgcgtggtgtgtgttttaattgcccctcgtttgggcttccgtttcacttgtgctctcacttctggtcctcaccatcatgaccatgtccatcatacacaggacagatgtacacacgcttcaggaaccacccagactttggggcgctattgcgttgaaccccgcgccaccgcgtgtgctccttcagtactagttctgtgtttgagagcctcgccttcatttatgaatgaggccactagggggagtgcacgtatcagggaaggacctgttccccggcaagcctagggcggtctggaaagggacagtcaccaatctccagagcccagggtgacggtgtgctctgattcctttggccaggttctgaagacagcccacccaagcatgcaggcaacaacgaaagccattcttccaggagaaggaatcggcattccaagtcaaaagtcaccaatggcgttggaaagaaatgaaaaaccctggttaatcaaagatgttccagagtgcctagaactgagagggaaatggaactcatttggaactccccgtgaggaggtcgaggcgcacagggcaagcaggaagaggcgagggcacttgggggtcattatttgagatcgtaagtcttgtttcccacagacctggccgcgtcaggcagatcatcgcctggggggcctttgccaacgtggggtctcttctaacttcagcacttgacatgcggtcaccggtggcagcgcggtgtgttgaagggaaacggtagctattcattcacagttgccaagagcagctccgcgcctgctggatcgtggatgcagcgtaaacatcttccttcagacgaggcattaaccccatggttaatggactggtcaccagtttttattttatttttatgaatctacctttccattgattgatttaagttcaggccacttttctgtcttttatttggttactgttgttatttgtttttaagttaggatgctttttaacagcctttagaagccgctgctgaaattgatactgggggaagggttccccttccttctagagcagaaaagggagagaggtgttgtattcctgtttggtaacctcagtctcctgtaagacctcctaccacatggcgagtatacaccaatcaggagagggtagctgcctgcataggagcctcgcttccgattattcccttcccaatattattcatccagacttagccacagtgcacaaaagcaaacctgctagagaggcagtgaacaccacagcttctccccagctaggtgccttttacatcgggtttgttctccttccatggtgtgttgctgacattgtcactgagtcccatgtgaggtgctggtgagtattacctttcatctgtgccatgctctagaaccttgaccttgatagttcaccacctctgatggatccctgttttaaataaaaacgattcactttaaagccta

SEQ ID NO: 372659 - DNA, 2120 bp, Homo sapiens
cagagccccctcctgaggcttctcacactgcgctaattagccagcatggttgagttttcactacatcagccagggaaaaacacaaaacaaaaccaatcaccctctactgggccgcgaaaacctaaaggcccttgaggccctggggcgcggtctggacgcgggtgcgccggaacctgaaccctcgccaggagcgcgatcctcgtgctggggcagctcctgctttacctgtggcgaggcctgcttcccgtagcgggtgaccccgggaccgaccaactcgctgggccgcacgtcccgtcccgccgcgccgcacgccggctcctcagcccgccctacacagcgcagccgcgctcccgggcccacgtgggccgcgcccggagtgggcgagaccatgtgccgggttacgcggggagacagcgggctacgtgctctgaaaagagccagccaggggccccggctacccttctccggctcgctattcctctgaagtcctgtggacttggagtctgaaaattcctcgagtggtagagatgcctcagctaggatgacagcgtggggacggccggcggcgtcccctgccccaggccgcggtggcggcgccgcgaccccgccctctcgcgcctgtccttccctctgctcccagcctttgctgggcgccagacccggctttgccgtccggctattagcctactgtggctagtcacccccggggtcccggccttctcgggctggggccgccgccaccgcggcaggacggggaggcgggccatggcgtcctgcgtggggagccggaccctaagcaaggatgatgtgaactacaaaatgcatttccggatgatcaacgagcagcaagtggaggacatcaccattgacttcttctaccggccgcataccatcaccctgctcagcttcaccatcgtcagcctcatgtacttcgcctttaccagggatgactctgttccagaagacaacatctggagaggcatcctctctgttattttcttctttcttatcatcagtgtgttagctttccccaatggtccgttcactcgacctcatccagccttatggcgaatggtttttggactcagtgtgctctacttcctgttcctggtattcctactcttcctgaatttcgagcaggttaaatctctaatgtattggctagatccaaatcttcgatacgccacaagggaagcagatgtcatggagtatgctgtgaactgccatgtgatcacctgggagaggattatcagccactttgatatttttgcatttggacatttctggggctgggccatgaaggccttgctgatccgtagttacggtctctgctggacaatcagtattacctgggagctgactgagctcttcttcatgcatctcctccccaattttgccgagtgctggtgggatcaagtcattctggacatcctgttgtgcaatggcggtggcatttggctgggcatggtcgtttgccggtttttagagatgaggacttaccactgggcaagcttcaaggacattcataccaccaccgggaagatcaagagagctgttctgcagttcactcctgctagctggacctatgttcgatggtttgaccccaaatcttcttttcagagagtagctggagtgtaccttttcatgatcatctggcagctgactgagttgaataccttcttcttgaagcatatctttgtgttccaagccagtcatccattaagttggggtagaattctctttattggtggcatcacagctcccacagtgagacagtactacgcttacctcaccgacacacagtgcaagcgcgtaggaacacaatgctgggtgtttgggtgagtaatctgttattgtggagatttaaaaaccacttaagccctaattttatttgggtatttcttgaccctgtgttaagagcctttcagtataatttttctatgaagacaggtggactagattttatatatctatatctatatctatatatacatagatatatcttttcatctttaatattcccttttctgatttaagttaaggaatagttacttggcaaattataaaacaagagtatagaaatggctctcttattttggccgggtgcagtggctcatgcc

SEQ ID NO: 372660 - DNA, 899 bp, Homo sapiens
tttttttgataggctttaaagtgaatcgtttttatttaaaacagggatccatcagaggtggtgaactatcaaggtcaaggttctagagcatggcacagatgaaaggtaatactcaccagcacctcacgtggggtctcttctaacttcagcacttgacatgcggtcaccggtggcagcgcggtgtgttgaagggaaacggtagctattcattcacagttgccaagagcagctccgcgcctgctggatcgtggatgcagcgtaaacatcttccttcagacgaggcattaaccccatggttaatggactggtcaccagtttttattttatttttatgaatctacctttccattgattgatttaagttcaggccacttttctgtcttttatttggttactgttgttatttgtttttaagttaggatgctttttaacagcctttagaagccgctgctgaaattgatactgggggaagggttccccttccttctagagcagaaaagggagagaggtgttgtattcctgtttggtaacctcagtctcctgtaagacctcctaccacatggcgagtatacaccaatcaggagagggtagctgcctgcataggagcctcgcttccgattattcccttcccaatattattcatccagacttagccacagtgcacaaaagcaaacctgctagagaggcagtgaacaccacagcttctccccagctaggtgccttttacatcgggtttgttctccttccatggtgtgttgctgacattgtcactgagtcccatgtgaggtgctggtgagtattacctttcatctgtgccatgctctagaaccttgaccttgatagttcaccacctctgatggatccctgttttaaataaaaacgattcactttaaagccta

SEQ ID NO: 372661 - DNA, 2380 bp, Homo sapiens
tggcgaattcggcacgaggcagcctttgctgggcgccagacccggctttgccgtccggctattagcctactgtggctagtcacccccggggtcccggccttctcgggctggggccgccgccaccgcggcaggacggggaggcgggccatggcgtcctgcgtggggagccggaccctaagcaaggatgatgtgaactacaaaatgcatttccggatgatcaacgagcagcaagtggaggacatcaccattgacttcttctaccggccgcataccatcaccctgctcagcttcaccatcgtcagcctcatgtacttcgcctttaccagggatgactctgttccagaagacaacatctggagaggcatcctctctgttattttcttctttcttatcatcagtgtgttagctttccccaatggagtatgctgtgaactgccatgtgatcacctgggagaggattatcagccactttgatatttttgcatttggacatttctggggctgggccatgaaggccttgctgatccgtagttacggtctctgctggacaatcagtattacctgggagctgactgagctcttcttcatgcatctcctccccaattttgccgagtgctggtgggatcaagtcattctggacatcctgttgtgcaatggcggtggcatttggctgggcatggtcgtttgccggtttttagagatgaggacttaccactgggcaagcttcaaggacattcataccaccaccgggaagatcaagagagctgttctgcagttcactcctgctagctggacctatgttcgatggtttgaccccaaatcttcttttcagagagtagctggagtgtaccttttcatgatcatctggcagctgactgagttgaataccttcttcttgaagcatatctttgtgttccaagccagtcatccattaagttggggtagaattctctttattggtggcatcacagctcccacagtgagacagtactacgcttacctcaccgacacacagtgcaagcgcgtaggaacacaatgctgggtgtttggggtcattggtttcctggaggccattgtttgcataaaatttggacaagatctcttctctaagacccaaatactctatgttgtgctttggcttctttgcgtggctttcaccactttcctctgtctgtacggcatgatttggtatgcagaacactatggtcaccgagaaaagacctactcggagtgtgaagatggcacctacagtccagagatctcctggcatcacaggaaagggacaaaaggttctgaagacagcccacccaagcatgcaggcaacaacgaaagccattcttccaggagaaggaatcggcattccaagtcaaaagtcaccaatggcgttggaaagaaatgaaaaaccctggttaatcaaagatgttccagagtgcctagaactgagagggaaatggaactcatttggaactccccgtgaggaggtcgaggcgcacagggcaagcaggaagaggcgagggcacttgggggtcattatttgagatcgtaagtcttgtttcccacagacctggccgcgtcaggcagatcatcgcctggggggcctttgccaacgtggggtctcttctaacttcagcacttgacatgcggtcaccggtggcagcgcggtgtgttgaagggaaacggtagctattcattcacagttgccaagagcagctccgcgcctgctggatcgtggatgcagcgtaaacatcttccttcagacgaggcattaaccccatggttaatggactggtcaccagtttttattttatttttatgaatctacctttccattgattgatttaagttcaggccacttttctgtcttttatttggttactgttgttatttgtttttaagttaggatgctttttaacagcctttagaagccgctgctgaaattgatactgggggaagggttccccttccttctagagcagaaaagggagagaggtgttgtattcctgtttggtaacctcagtctcctgtaagacctcctaccacatggcgagtatacaccaatcaggagagggtagctgcctgcataggagcctcgcttccgattattcccttcccaatattattcatccagacttagccacagtgcacaaaagcaaacctgctagagaggcagtgaacaccacagcttctccccagctaggtgccttttacatcgggtttgttctccttccatggtgtgttgctgacattgtcactgagtcccatgtgaggtgctggtgagtattacctttcatctgtgccatgctctagaaccttgaccttgatagttcaccacctctgatggatccctgttttaaataaaaacgattcactttaaagccta

SEQ ID NO: 372662 - DNA, 3168 bp, Homo sapiens
cagagccccctcctgaggcttctcacactgcgctaattagccagcatggttgagttttcactacatcagccagggaaaaacacaaaacaaaaccaatcaccctctactgggccgcgaaaacctaaaggcccttgaggccctggggcgcggtctggacgcgggtgcgccggaacctgaaccctcgccaggagcgcgatcctcgtgctggggcagctcctgctttacctgtggcgaggcctgcttcccgtagcgggtgaccccgggaccgaccaactcgctgggccgcacgtcccgtcccgccgcgccgcacgccggctcctcagcccgccctacacagcgcagccgcgctcccgggcccacgtgggccgcgcccggagtgggcgagaccatgtgccgggttacgcggggagacagcgggctacgtgctctgaaaagagccagccaggggccccggctacccttctccggctcgctattcctctgaagtcctgtggacttggagtctgaaaattcctcgagtggtagagatgcctcagctaggatgacagcgtggggacggccggcggcgtcccctgccccaggccgcggtggcggcgccgcgaccccgccctctcgcgcctgtccttccctctgctcccagcctttgctgggcgccagacccggctttgccgtccggctattagcctactgtggctagtcacccccggggtcccggccttctcgggctggggccgccgccaccgcggcaggacggggaggcgggccatggcgtcctgcgtggggagccggaccctaagcaaggatgatgtgaactacaaaatgcatttccggatgatcaacgagcagcaagtggaggacatcaccattgacttcttctaccggccgcataccatcaccctgctcagcttcaccatcgtcagcctcatgtacttcgcctttaccagggatgactctgttccagaagacaacatctggagaggcatcctctctgttattttcttctttcttatcatcagtgtgttagctttccccaatggtccgttcactcgacctcatccagccttatggcgaatggtttttggactcagtgtgctctacttcctgttcctggtattcctactcttcctgaatttcgagcaggttaaatctctaatgtattggctagatccaaatcttcgatacgccacaagggaagcagatgtcatggagtatgctgtgaactgccatgtgatcacctgggagaggattatcagccactttgatatttttgcatttggacatttctggggctgggccatgaaggccttgctgatccgtagttacggtctctgctggacaatcagtattacctgggagctgactgagctcttcttcatgcatctcctccccaattttgccgagtgctggtgggatcaagtcattctggacatcctgttgtgcaatggcggtggcatttggctgggcatggtcgtttgccggtttttagagatgaggacttaccactgggcaagcttcaaggacattcataccaccaccgggaagatcaagagagctgttctgcagttcactcctgctagctggacctatgttcgatggtttgaccccaaatcttcttttcagagagtagctggagtgtaccttttcatgatcatctggcagctgactgagttgaataccttcttcttgaagcatatctttgtgttccaagccagtcatccattaagttggggtagaattctctttattggtggcatcacagctcccacagtgagacagtactacgcttacctcaccgacacacagtgcaagcgcgtaggaacacaatgctgggtgtttggggtcattggtttcctggaggccattgtttgcataaaatttggacaagatctcttctctaagacccaaatactctatgttgtgctttggcttctttgcgtggctttcaccactttcctctgtctgtacggcatgatttggtatgcagaacactatggtcaccgagaaaagacctactcggagtgtgaagatggcacctacagtccagagatctcctggcatcacaggaaagggacaaaaggttctgaagacagcccacccaagcatgcaggcaacaacgaaagccattcttccaggagaaggaatcggcattccaagtcaaaagtcaccaatggcgttggaaagaaatgaaaaaccctggttaatcaaagatgttccagagtgcctagaactgagagggaaatggaactcatttggaactccccgtgaggaggtcgaggcgcacagggcaagcaggaagaggcgagggcacttgggggtcattatttgagatcgtaagtcttgtttcccacagacctggccgcgtcaggcagatcatcgcctggggggcctttgccaacgtggggtctcttctaacttcagcacttgacatgcggtcaccggtggcagcgcggtgtgttgaagggaaacggtagctattcattcacagttgccaagagcagctccgcgcctgctggatcgtggatgcagcgtaaacatcttccttcagacgaggcattaaccccatggttaatggactggtcaccagtttttattttatttttatgaatctacctttccattgattgatttaagttcaggccacttttctgtcttttatttggttactgttgttatttgtttttaagttaggatgctttttaacagcctttagaagccgctgctgaaattgatactgggggaagggttccccttccttctagagcagaaaagggagagaggtgttgtattcctgtttggtaacctcagtctcctgtaagacctcctaccacatggcgagtatacaccaatcaggagagggtagctgcctgcataggagcctcgcttccgattattcccttcccaatattattcatccagacttagccacagtgcacaaaagcaaacctgctagagaggcagtgaacaccacagcttctccccagctaggtgccttttacatcgggtttgttctccttccatggtgtgttgctgacattgtcactgagtcccatgtgaggtgctggtgagtattacctttcatctgtgccatgctctagaaccttgaccttgatagttcaccacctctgatggatccctgttttaaataaaaacgattcactttaaagccta

SEQ ID NO: 372663 - DNA, 2861 bp, Homo sapiens
  misc_feature (2787)..(2787): n is a, c, g, or t
  misc_feature (2799)..(2799): n is a, c, g, or t
cagagccccctcctgaggcttctcacactgcgctaattagccagcatggttgagttttcactacatcagccagggaaaaacacaaaacaaaaccaatcaccctctactgggccgcgaaaacctaaaggcccttgaggccctggggcgcggtctggacgcgggtgcgccggaacctgaaccctcgccaggagcgcgatcctcgtgctggggcagctcctgctttacctgtggcgaggcctgcttcccgtagcgggtgaccccgggaccgaccaactcgctgggccgcacgtcccgtcccgccgcgccgcacgccggctcctcagcccgccctacacagcgcagccgcgctcccgggcccacgtgggccgcgcccggagtgggcgagaccatgtgccgggttacgcggggagacagcgggctacgtgctctgaaaagagccagccaggggccccggctacccttctccggctcgctattcctctgaagtcctgtggacttggagtctgaaaattcctcgagtggtagagatgcctcagctaggatgacagcgtggggacggccggcggcgtcccctgccccaggccgcggtggcggcgccgcgaccccgccctctcgcgcctgtccttccctctgctcccagcctttgctgggcgccagacccggctttgccgtccggctattagcctactgtggctagtcacccccggggtcccggccttctcgggctggggccgccgccaccgcggcaggacggggaggcgggccatggcgtcctgcgtggggagccggaccctaagcaaggatgatgtgaactacaaaatgcatttccggatgatcaacgagcagcaagtggaggacatcaccattgacttcttctaccggccgcataccatcaccctgctcagcttcaccatcgtcagcctcatgtacttcgcctttaccagggatgactctgttccagaagacaacatctggagaggcatcctctctgttattttcttctttcttatcatcagtgtgttagctttccccaatggtccgttcactcgacctcatccagccttatggcgaatggtttttggactcagtgtgctctacttcctgttcctggtattcctactcttcctgaatttcgagcaggttaaatctctaatgtattggctagatccaaatcttcgatacgccacaagggaagcagatgtcatggagtatgctgtgaactgccatgtgatcacctgggagaggattatcagccactttgatatttttgcatttggacatttctggggctgggccatgaaggccttgctgatccgtagttacggtctctgctggacaatcagtattacctgggagctgactgagctcttcttcatgcatctcctccccaattttgccgagtgctggtgggatcaagtcattctggacatcctgttgtgcaatggcggtggcatttggctgggcatggtcgtttgccggtttttagagatgaggacttaccactgggcaagcttcaaggacattcataccaccaccgggaagatcaagagagctgttctgcagttcactcctgctagctggacctatgttcgatggtttgaccccaaatcttcttttcagagagtagctggagtgtaccttttcatgatcatctggcagctgactgagttgaataccttcttcttgaagcatatctttgtgttccaagccagtcatccattaagttggggtagaattctctttattggtggcatcacagctcccacagtgagacagtactacgcttacctcaccgacacacagtgcaagcgcgtaggaacacaatgctgggtgtttggggtcattggtttcctggaggccattgtttgcataaaatttggacaagatctcttctctaagacccaaatactctatgttgtgctttggcttctttgcgtggctttcaccactttcctctgtctgtacggcatgatttggtatgcagaacactatggtcaccgagaaaagacctactcggagtgtgaagatggcacctacagtccagagatctcctggcatcacaggaaagggacaaaaggttctgaagacagcccacccaagcatgcaggcaacaacgaaagccattcttccaggagaaggaatcggcattccaagtcaaaagtcaccaatggcgttggaaagaaatgaaaaaccctggttaatcaaagatgttccagagtgcctagaactgagagggaaatggaactcatttggaactccccgtgaggaggtcgaggcgcacagggcaagcaggaagaggcgagggcacttgggggtcattatttgagatcgtaagtcttgtttcccacagacctggccgcgtcaggcagatcatcgcctggggggcctttgccaacgtggggtctcttctaacttcagcacttgacatgcggtcaccggtggcagcgcggtgtgttgaagggaaacggtagctattcattcacagttgccaagagcagctccgcgcctgctggatcgtggatgcagcgtaaacatcttccttcagacgaggcattaaccccatggttaatggactggtcaccagtttttattttatttttatgaatctacctttccattgattgatttaagttcaggccacttttctgtcttttatttggttactgttgttatttgtttttaagttaggatgctttttaacagcctttagcccctataccttctgcataatgaattaactagaaataactttgcaaggagaccagagctaagaccccctaaacctcnacagttaaatcnacaaactgctcgccagaacactacgaccacagccatttaggtagggatcctctagatgaccc

SEQ ID NO: 372664 - DNA, 2422 bp, Homo sapiens
cagagccccctcctgaggcttctcacactgcgctaattagccagcatggttgagttttcactacatcagccagggaaaaacacaaaacaaaaccaatcaccctctactgggccgcgaaaacctaaaggcccttgaggccctggggcgcggtctggacgcgggtgcgccggaacctgaaccctcgccaggagcgcgatcctcgtgctggggcagctcctgctttacctgtggcgaggcctgcttcccgtagcgggtgaccccgggaccgaccaactcgctgggccgcacgtcccgtcccgccgcgccgcacgccggctcctcagcccgccctacacagcgcagccgcgctcccgggcccacgtgggccgcgcccggagtgggcgagaccatgtgccgggttacgcggggagacagcgggctacgtgctctgaaaagagccagccaggggccccggctacccttctccggctcgctattcctctgaagtcctgtggacttggagtctgaaaattcctcgagtggtagagatgcctcagctaggatgacagcgtggggacggccggcggcgtcccctgccccaggccgcggtggcggcgccgcgaccccgccctctcgcgcctgtccttccctctgctcccagcctttgctgggcgccagacccggctttgccgtccggctattagcctactgtggctagtcacccccggggtcccggccttctcgggctggggccgccgccaccgcggcaggacggggaggcgggccatggcgtcctgcgtggggagccggaccctaagcaaggatgatgtgaactacaaaatgcatttccggatgatcaacgagcagcaagtggaggacatcaccattgacttcttctaccggccgcataccatcaccctgctcagcttcaccatcgtcagcctcatgtacttcgcctttaccagggatgactctgttccagaagacaacatctggagaggcatcctctctgttattttcttctttcttatcatcagtgtgttagctttccccaatggtccgttcactcgacctcatccagccttatggcgaatggtttttggactcagtgtgctctacttcctgttcctggtattcctactcttcctgaatttcgagcaggttaaatctctaatgtattggctagatccaaatcttcgatacgccacaagggaagcagatgtcatggagtatgctgtgaactgccatgtgatcacctgggagaggattatcagccactttgatatttttgcatttggacatttctggggctgggccatgaaggccttgctgatccgtagttacggtctctgctggacaatcagtattacctgggagctgactgagctcttcttcatgcatctcctccccaattttgccgagtgctggtgggatcaagtcattctggacatcctgttgtgcaatggcggtggcatttggctgggcatggtcgtttgccggtttttagagatgaggacttaccactgggcaagcttcaaggacattcataccaccaccgggaagatcaagagagctgttctgcagttcactcctgctagctggacctatgttcgatggtttgaccccaaatcttcttttcagagagtagctggagtgtaccttttcatgatcatctggcagctgactgagttgaataccttcttcttgaagcatatctttgtgttccaagccagtcatccattaagttggggtagaattctctttattggtggcatcacagctcccacagtgagacagtactacgcttacctcaccgacacacagtgcaagcgcgtaggaacacaatgctgggtgtttggggtcattggtttcctggaggccattgtttgcataaaatttggacaagatctcttctctaagacccaaatactctatgttgtgctttggcttctttgcgtggctttcaccactttcctctgtctgtacggcatgatttggtatgcagaacactatggtcaccgagaaaagacctactcggagtgtgaagatggcacctacagtccagagatctcctggcatcacaggaaagggacaaaaggttctgaaggacagccccaccccaagcatgcgtgtgcaaccaacgaaagccaattcttcccagcgacacaggcacatcgcgccattcccaacgtcgcaacgaaggtccaccaactgcgcgtcgggacaagaaatggacacacacccctggtctcaatccaaagcatgtacccagaagcatgccgtagaactgacagaggcgcacatggggaacctccattccggcaaccatcccccgccgaagagaccgtcggacgcgccccaccgggcactgccaggccaaaccaggccgaacgccccccctgcccgcgcccacacaccctcgccgcactccaccacagccacg

SEQ ID NO: 372665 - DNA, 1448 bp, Homo sapiens
cagagccccctcctgaggcttctcacactgcgctaattagccagcatggttgagttttcactacatcagccagggaaaaacacaaaacaaaaccaatcaccctctactgggccgcgaaaacctaaaggcccttgaggccctggggcgcggtctggacgcgggtgcgccggaacctgaaccctcgccaggagcgcgatcctcgtgctggggcagctcctgctttacctgtggcgaggcctgcttcccgtagcgggtgaccccgggaccgaccaactcgctgggccgcacgtcccgtcccgccgcgccgcacgccggctcctcagcccgccctacacagcgcagccgcgctcccgggcccacgtgggccgcgcccggagtgggcgagaccatgtgccgggttacgcggggagacagcgggctacgtgctctgaaaagagccagccaggggccccggctacccttctccggctcgctattcctctgaagtcctgtggacttggagtctgaaaattcctcgagtggtagagatgcctcagctaggatgacagcgtggggacggccggcggcgtcccctgccccaggccgcggtggcggcgccgcgaccccgccctctcgcgcctgtccttccctctgctcccagcctttgctgggcgccagacccggctttgccgtccggctattagcctactgtggctagtcacccccggggtcccggccttctcgggctggggccgccgccaccgcggcaggacggggaggcgggccatggcgtcctgcgtggggagccggaccctaagcaaggatgatgtgaactacaaaatgcatttccggatgatcaacgagcagcaagtggaggacatcaccattgacttcttctaccggccgcataccatcaccctgctcagcttcaccatcgtcagcctcatgtacttcgcctttaccagggatgactctgttccagaagacaacatctggagaggcatcctctctgttattttcttctttcttatcatcagtgtgttagctttccccaatggtccgttcactcgacctcatccagccttatggcgaatggtttttggactcagtgtgctctacttcctgttcctggtattcctactcttcctgaatttcgagcaggttaaatctctaatgtattggctagatccaaatcttcgatacgccacaagggaagcagatgtcatggtatgtacttgtcagtggcctcttggagaaactcgtagactctttcttgggtgtaagaggtaatagacttgacattttaaattgttccttctctgtatttcctgtgtagttacctaaaaaccaggtctctgggagggttgttgagttgcatggttgtccacaggtgatagagttcagggaaagaaaatcctctcattacgcaaaggggtctgtgaggaagaatgcacactttatcgtcagac

SEQ ID NO: 372666 - DNA, 439 bp, Homo sapiens
acctgtttcggtaatgcgaactcattagggctatgctcctactcagcttttgtgcaagcaactctagataaagtgctactcaaatatcccccaaatctgtcaccaacttaattcagacaccagaaaaaaacaaaaacttagagaaacagaggtagtccaaagacatgttagggagacaattgtggtaaggtggaatttctcatgtgaatttaaaagtttatttaaaagtgaatgtaaaaatctacttcctcctcttcccaggcagctaataacctagctttattgttaatcagaaaaaaataataaatataaaaatgtaggtttggcacggtggttcacgcctgtaatcccagcactttgggaggccaaggtgggaagatcacctgaggcctggaattcgacaccagcctgggcaacatagcgaaactttgcctctacc

SEQ ID NO: 372667 - DNA, 455 bp, Homo sapiens
gaaacatcctcatctcaattaatccataagtcacatcacaggtttttgtgttggttttgttttgtttttctgtcaccacgattctccatccaatggctcttgtggaataaagcaatgcacagaagtggcactaagaagtctgttttttttgtttttgtttttgtttttagagatagcatcttggcccgggcgtggtggctcacgcctataatcccagcactttgggaggctgaggtgggtggatcacaaggtcagggtttcgagatcagcttggccaatatagtgaaaccctgtctctactaaaaatccaaaaaaaaaaaaaaaaaatcagccaggtgtggtggcacacacctgtagtcccagctacttgggaggccaagggacggaggttgcagtgagccaagatcacgccactgcactccagcctgggcaacaagagtgagattccatctcaa

SEQ ID NO: 372668 - DNA, 620 bp, Homo sapiens
tagaaataaaatatataccagttaagaataatttattatttaggccaggcatggtataatctcagcactttgagaccctgtctcgttatacctgtaatcccagcgctttgagagactgaggcaggaggatcacttgaggccaggagttcaagacgagctggggcaacatagcaagaccccatctctacaaaaaataattttttcaaaaaagagtaattggttatacacttctgaagagccaataaacaatctctacttagacaacttaaagttatttcaattattactttataacattttttaaacttttattgaagttcagtggtacaagtgcaggtttgttacataggtaaacttggtcatgggggtttgttgtgcaggttatttcatcacttaggtattaagcctagtacctattagttatttttcctgatcctcttcctcctcccaccctccaccctccaaaaggccccagtatgtgatgttcccctctgtgtccatgtgttctcatcatttagctcccacttataagtgagaacaggcagtattcagttttctgttcctatgttagtttgctaactttataacatttaacataaaaataggaagttttattttta

SEQ ID NO: 372669 - DNA, 402 bp, Homo sapiens
aacagtcatttaacactgtgccaccccttcccctaagctggcatagtaccactcacagagattttccctagacccatggttgctagtgaaggagggaattggaggtgaatattcgatctccccactggtctaggaatcttcatgcgaagtccattctggtcctatttgatcagaaccattgggagtgtcaggaaagcttaactacttggggtgaggtggaaacaatgacctgggtgttcatcacagaaagctgatctcggcactctgatcagtggggatgccaagttaaacaaactggccaggaccatagtgcctcaggggcacaatccagaggaaggcccaaatccccagctgggttttccacaaatcccaggtgcgtgagtggagccttcctctagctca

SEQ ID NO: 372670 - DNA, 534 bp, Homo sapiens
tgaaaggggagaaaaggcttgtcgctaggccaccattactcccgctagcacgcagttcataggccaacactcaccttaagaagtactccctttagagggtgctcccagttagagcacatttcttatgccattctattccattcattcaagaagacactcactgagtgtctattctaatactttagaatgatttcagcagtatcttggaagtttgggaacccgcatcaggaatagctcaggagaggatgttttgtcttcctgcctgacaggcatcaccagcaatcagagtagggtgccctgtgcgtgacctgacccttgtctgtgtggccacctgtgtggtgcttgccctctggcagcctggagcccactgggcagcagtgttggcaacgttgcagaaggcatctgaactctagggctgtcctcactgttgacttattattttattagatttatgcagcagcctgcctccaaagaagaaatttggtgtgttttttcattgggaagtaattccagactgcaggaaaaaagcattta

SEQ ID NO: 372671 - DNA, 315 bp, Homo sapiens
gtgcacgtgcacacacacacagaggcatatacacacatgcttaacatattgcaaagaaagtctgcctgtaatcccagcaggtcaaggcagaaggatcgcttgagcccaggagttcaaaaccagcttgggcaatatagtgaaatcttgtctctacaaaaactaaagagttagcttggcatggtagtgtacatctgtagtcccagctacttgggagactgaggcagaggatcacttgagccaggaggttgaggctgcattgagctgtgatcatgccactgcactccagcctggaagacggagcaagaccttgtctca

SEQ ID NO: 372672 - DNA, 373 bp, Homo sapiens
atagccgcacgcagaagaatgaaattggatccttgttgtacaccatatacaatcagtaactcaaaatgaataacaactgaaaatataaggtctgagactgtagaactcccacaagaaaacataggggacaaaacagctctttgactttggtcttggcaataattttttgaatactacaccaaaggcacaggcaacaaaagcaaaaatacgtgtgactatatcacactaaaaagcttcttgcacgaaaaaaagaaaaaaatcaacaaaacgaaaaaacaacctacaaaatagtagaaaatatttgcaaaccatatttgtgataaggggttaagtatccaaaatctataaggaactcaccagcttaatggcaaaa

SEQ ID NO: 372673 - DNA, 335 bp, Homo sapiens
gcaagcaccagctccacatagtgacacagtaccggaagggcaaggattctctgtgtgcccagggaaagtggttttatgataggaaggacagtggcttatagtagtgtgtctggagttggttccttcggtgggttcatggtctcgctgacttcaagaccgtggaccttggcagtgagtggtacagctcttaaagatggcacggacccaaagagtgagcagtagcaaggtttattgtgaagagcaaaagaacaaagctttcacagcgtggaaggggacccaagcaggttgctgctgctggctggggtggccagcttttattcccttatttgtcccct

SEQ ID NO: 372674 - DNA, 417 bp, Homo sapiens
gtatatcttcttgggagaaatatctattcaaatcatttgcccattttaaaattgggttctctttttttttaatggttgagttgtaagagttttttatatattctggaaattagctccttatcaaatgtattatttgcagttattttctcccatctggtggatcatcttttcattttctcgatgttatcatttgaagcacaaaacgtttccattttcatgaagtagaatgtatcttttgtcatatatgattttgttattgtatctaagtaaaattgcctaactcaaggtcatgaatatttatggcatatgttttcttctaaggagctgtatagttttaggctctttccatttatatttatggatcccgtgttgaggttcactttgatgtaggggtgtggacataatgttctaaattca

SEQ ID NO: 372675 - DNA, 222 bp, Homo sapiens
gcctaccttggcctcccaaagtgctgggattagaggcatgaaccactgcgtgcagcagatcctacttattaatagaagtgtcagatgtgtgatcatccttaatccaccatacttggcacctagtttggtactagcagaagtgtagggctcttggtgtggctcaaagcttcacaaaatttaaactcgttactgagttgttcaatatgttggtcttgttgaatt

SEQ ID NO: 372676 - DNA, 385 bp, Homo sapiens
aaatcatccctagattacttataatacctgatacaatataaatgctaaatagctgtaacactgtatctttaaaatttacattattttttgttgttgtattattatttttattgtatttttaaaaaatattttccatctacagtcagtagaatccacggatacagaacctatggataggaaggaccaactgtatcttttagtgttttgaggttcttgaattctcaggtcgtttgctttcctttgctttctcccaagtcttgttttacaatttgctttagtcattcactgaaactttaaaaaacattagaaaacctcacagtttgtaaatctttttccctattatatatatcataagataggagcttaaataaagagttttagaaac

SEQ ID NO: 372677 - DNA, 2835 bp, Homo sapiens
gaacattgaggatggcgcgtgcccgcggctccccgtgccccccgctgccgcccggtaggatgtcctggccccacggggcattgctcttcctctggctcttctccccacccctgggggccggtggaggtggagtggccgtgacgtctgccgccggagggggctccccgccggccacctcctgccccgtggcctgctcctgcagcaaccaggccagccgggtgatctgcacacggagagacctggccgaggtcccagccagcatcccggtcaacacgcggtacctgaacctgcaagagaacggcatccaggtgatccggacggacacgttcaagcacctgcggcacctggagattctgcagctgagcaagaacctggtgcgcaagatcgaggtgggcgccttcaacgggctgcccagcctcaacacgctggagctttttgacaaccggctgaccacggtgcccacgcaggccttcgagtacctgtccaagctgcgggagctctggctgcggaacaaccccatcgagagcatcccctcctacgccttcaaccgcgtgccctcgctgcggcgcctggacctgggcgagctcaagcggctggaatacatctcggaggcggccttcgaggggctggtcaacctgcgctacctcaacctgggcatgtgcaacctcaaggacatccccaacctgacggccctggtgcgcctggaggagctggagctgtcgggcaaccggctggacctgatccgcccgggctccttccagggtctcaccagcctgcgcaagctgtggctcatgcacgcccaggtagccaccatcgagcgcaacgccttcgacgacctcaagtcgctggaggagctcaacctgtcccacaacaacctgatgtcgctgccccacgacctcttcacgcccctgcaccgcctcgagcgcgtgcacctcaaccacaacccctggcattgcaactgcgacgtgctctggctgagctggtggctcaaggagacggtgcccagcaacacgacgtgctgcgcccgctgtcatgcgcccgccggcctcaaggggcgctacattggggagctggaccagtcgcatttcacctgctatgcgcccgtcatcgtggagccgcccacggacctcaacgtcaccgagggcatggctgccgagctcaaatgccgcacgggcacctccatgacctccgtcaactggctgacgcccaacggcaccctcatgacccacggctcctaccgcgtgcgcatctccgtcctgcatgacggcacgcttaacttcaccaacgtcaccgtgcaggacacgggccagtacacgtgcatggtgacgaactcagccggcaacaccaccgcctcggccacgctcaacgtctcggccgtggaccccgtggcggccgggggcaccggcagcggcgggggcggccctgggggcagtggtggtgttggagggggcagtggcggctacacctacttcaccacggtgaccgtggagaccctggagacgcagcccggagaggaggccctgcagccgcgggggacggagaaggaaccgccagggcccacgacagacggtgtctggggtgggggccggcctggggacgcggccggccctgcctcgtcttctaccacggcacccgccccgcgctcctcgcggcccacggagaaggcgttcacggtgcccatcacggatgtgacggagaacgccctcaaggacctggacgacgtcatgaagaccaccaaaatcatcatcggctgcttcgtggccatcacgttcatggccgcggtgatgctcgtggccttctacaagctgcgcaagcagcaccagctccacaagcaccacgggcccacgcgcaccgtggagatcatcaacgtggaggacgagctgcccgccgcctcggccgtgtccgtggccgccgcggccgccgcggccagtgggggtggtgtgggcggggacagccacctggccctgcccgccctggagcgagaccacctcaaccaccaccactacgtggctgccgccttcaaggcgcactacagcagcaaccccagcggcgggggctgcgggggcaaaggcccgcctggcctcaactccatccacgaacctctgctcttcaagagcggctccaaggagaacgtgcaagagacgcagatctgaggcggcggggccgggcgggcgaggggcgtggagccccccacccaggtcccagcccgggcgcagcctgaccgggacccctccctcccacagcccagcccaccttctgggaccacgcagggaattggggagaggtggcttccagccccatctggggctcggacccccagtaaggacagggtggggctccaggagcggagtctctgggatcctcgcctcacccccgccaatccccggtgacgggaggggacgtgggacccaggagaagtggcctgagttctccgcgtttcctcctcgctctcccaccaagcgttccgggcccgccgccttccaggggagagaggagctttctccaggggtgtcctttcccctcggccccaaacaccttccttttacggttcagtttttgcagtttgacgcccgtccctccctcccactcctccgccctcaaaactgaagagatggacacgtcgccagagctcccgtcccagcgcccggctctgctcccggccggcggtccctgtcgtcggcgcgggggggagcctccacccgccccagccccacctgccccacagacacttttgatactgaagggaggtttgcgtcaacgactacctgctctgtaattactttaaaaaaaaaacatggaaaaagtaaaaaaatattttttttggtcatgaaagca

SEQ ID NO: 372678 - DNA, 1051 bp, Homo sapiens
  misc_feature (14)..(14): n is a, c, g, or t
  misc_feature (17)..(17): n is a, c, g, or t
  misc_feature (35)..(35): n is a, c, g, or t
  misc_feature (40)..(40): n is a, c, g, or t
  misc_feature (42)..(42): n is a, c, g, or t
agttccatttattnggntacaccattattgaaacncccgntntgggtttaaaagcagctgtcggccgattcgggatgacatgagatgcgcgtccgcgtcccgtgccccgctgcgccgtagatgtcctggccccacggggcattgctcttcctctggctcttctccccacccctgggggccggtggaggtggagtggccgtgacgtctgccgccggagggggctccccgccggccacctcctgccccgtggcctgctcctgcagcaaccaggccagccgggtgatctgcacacggagagacctggccgaggtcccagccagcatcccggtcaacacgcggtacctgaacctgcaagagaacggcatccaggtgatccggacggacacgttcaagcacctgcggcacctggagattctgcagctgagcaagaacctggtgcgcaagatcgaggtgggcgccttcaacgggctgcccagcctcaacacgctggagctttttgacaaccggctgaccacggtgcccacgcaggccttcgagtacctgtccaagctgcgggagctctggctgcggaacaaccccatcgagagcatcccctcctacgccttcaaccgcgtgccctcgctgcggcgcctggacctgggcgagctcaagcggctggaatacatctcggaggcggccttcgaggggctggtcaacctgcgctacctcaacctgggcatgtgcaacctcaaggacatccccaacctgacggccctggtgcgcctggaggagctggagctgtcgggcaaccggctggacctgatccgcccgggctccttccagggtctcaccagcctgcgcaagctgtggctcatgcacgcccaggtagccaccatcgagcgcaacgccttcgacgacctcaagtcgctggaggagctcaacctgtcccacctgccccacagacacttttgatactgaagggaggtttgcgtcaacgactacctgctctgtaattactttaaaaaaaaaacatggaaaaagtaaaaaaatattttttttggtcatgaaagca

SEQ ID NO: 372679 - DNA, 2896 bp, Homo sapiens
  misc_feature (14)..(14): n is a, c, g, or t
  misc_feature (17)..(17): n is a, c, g, or t
  misc_feature (35)..(35): n is a, c, g, or t
  misc_feature (40)..(40): n is a, c, g, or t
  misc_feature (42)..(42): n is a, c, g, or t
agttccatttattnggntacaccattattgaaacncccgntntgggtttaaaagcagctgtcggccgattcgggatgacatgagatgcgcgtccgcgtcccgtgccccgctgcgccgtagatgtcctggccccacggggcattgctcttcctctggctcttctccccacccctgggggccggtggaggtggagtggccgtgacgtctgccgccggagggggctccccgccggccacctcctgccccgtggcctgctcctgcagcaaccaggccagccgggtgatctgcacacggagagacctggccgaggtcccagccagcatcccggtcaacacgcggtacctgaacctgcaagagaacggcatccaggtgatccggacggacacgttcaagcacctgcggcacctggagattctgcagctgagcaagaacctggtgcgcaagatcgaggtgggcgccttcaacgggctgcccagcctcaacacgctggagctttttgacaaccggctgaccacggtgcccacgcaggccttcgagtacctgtccaagctgcgggagctctggctgcggaacaaccccatcgagagcatcccctcctacgccttcaaccgcgtgccctcgctgcggcgcctggacctgggcgagctcaagcggctggaatacatctcggaggcggccttcgaggggctggtcaacctgcgctacctcaacctgggcatgtgcaacctcaaggacatccccaacctgacggccctggtgcgcctggaggagctggagctgtcgggcaaccggctggacctgatccgcccgggctccttccagggtctcaccagcctgcgcaagctgtggctcatgcacgcccaggtagccaccatcgagcgcaacgccttcgacgacctcaagtcgctggaggagctcaacctgtcccacaacaacctgatgtcgctgccccacgacctcttcacgcccctgcaccgcctcgagcgcgtgcacctcaaccacaacccctggcattgcaactgcgacgtgctctggctgagctggtggctcaaggagacggtgcccagcaacacgacgtgctgcgcccgctgtcatgcgcccgccggcctcaaggggcgctacattggggagctggaccagtcgcatttcacctgctatgcgcccgtcatcgtggagccgcccacggacctcaacgtcaccgagggcatggctgccgagctcaaatgccgcacgggcacctccatgacctccgtcaactggctgacgcccaacggcaccctcatgacccacggctcctaccgcgtgcgcatctccgtcctgcatgacggcacgcttaacttcaccaacgtcaccgtgcaggacacgggccagtacacgtgcatggtgacgaactcagccggcaacaccaccgcctcggccacgctcaacgtctcggccgtggaccccgtggcggccgggggcaccggcagcggcgggggcggccctgggggcagtggtggtgttggagggggcagtggcggctacacctacttcaccacggtgaccgtggagaccctggagacgcagcccggagaggaggccctgcagccgcgggggacggagaaggaaccgccagggcccacgacagacggtgtctggggtgggggccggcctggggacgcggccggccctgcctcgtcttctaccacggcacccgccccgcgctcctcgcggcccacggagaaggcgttcacggtgcccatcacggatgtgacggagaacgccctcaaggacctggacgacgtcatgaagaccaccaaaatcatcatcggctgcttcgtggccatcacgttcatggccgcggtgatgctcgtggccttctacaagctgcgcaagcagcaccagctccacaagcaccacgggcccacgcgcaccgtggagatcatcaacgtggaggacgagctgcccgccgcctcggccgtgtccgtggccgccgcggccgccgcggccagtgggggtggtgtgggcggggacagccacctggccctgcccgccctggagcgagaccacctcaaccaccaccactacgtggctgccgccttcaaggcgcactacagcagcaaccccagcggcgggggctgcgggggcaaaggcccgcctggcctcaactccatccacgaacctctgctcttcaagagcggctccaaggagaacgtgcaagagacgcagatctgaggcggcggggccgggcgggcgaggggcgtggagccccccacccaggtcccagcccgggcgcagcctgaccgggacccctccctcccacagcccagcccaccttctgggaccacgcagggaattggggagaggtggcttccagccccatctggggctcggacccccagtaaggacagggtggggctccaggagcggagtctctgggatcctcgcctcacccccgccaatccccggtgacgggaggggacgtgggacccaggagaagtggcctgagttctccgcgtttcctcctcgctctcccaccaagcgttccgggcccgccgccttccaggggagagaggagctttctccaggggtgtcctttcccctcggccccaaacaccttccttttacggttcagtttttgcagtttgacgcccgtccctccctcccactcctccgccctcaaaactgaagagatggacacgtcgccagagctcccgtcccagcgcccggctctgctcccggccggcggtccctgtcgtcggcgcgggggggagcctccacccgccccagccccacctgccccacagacacttttgatactgaagggaggtttgcgtcaacgactacctgctctgtaattactttaaaaaaaaaacatggaaaaagtaaaaaaatattttttttggtcatgaaagca

SEQ ID NO: 372680 - DNA, 2508 bp, Homo sapiens
aaattcagctcgtttccgagcacattctgcagctgagcaagaacctggtgcgcaagatcgaggtgggcgccttcaacgggctgcccagcctcaacacgctggagctttttgacaaccggctgaccacggtgcccacgcaggccttcgagtacctgtccaagctgcgggagctctggctgcggaacaaccccatcgagagcatcccctcctacgccttcaaccgcgtgccctcgctgcggcgcctggacctgggcgagctcaagcggctggaatacatctcggaggcggccttcgaggggctggtcaacctgcgctacctcaacctgggcatgtgcaacctcaaggacatccccaacctgacggccctggtgcgcctggaggagctggagctgtcgggcaaccggctggacctgatccgcccgggctccttccagggtctcaccagcctgcgcaagctgtggctcatgcacgcccaggtagccaccatcgagcgcaacgccttcgacgacctcaagtcgctggaggagctcaacctgtcccacaacaacctgatgtcgctgccccacgacctcttcacgcccctgcaccgcctcgagcgcgtgcacctcaaccacaacccctggcattgcaactgcgacgtgctctggctgagctggtggctcaaggagacggtgcccagcaacacgacgtgctgcgcccgctgtcatgcgcccgccggcctcaaggggcgctacattggggagctggaccagtcgcatttcacctgctatgcgcccgtcatcgtggagccgcccacggacctcaacgtcaccgagggcatggctgccgagctcaaatgccgcacgggcacctccatgacctccgtcaactggctgacgcccaacggcaccctcatgacccacggctcctaccgcgtgcgcatctccgtcctgcatgacggcacgcttaacttcaccaacgtcaccgtgcaggacacgggccagtacacgtgcatggtgacgaactcagccggcaacaccaccgcctcggccacgctcaacgtctcggccgtggaccccgtggcggccgggggcaccggcagcggcgggggcggccctgggggcagtggtggtgttggagggggcagtggcggctacacctacttcaccacggtgaccgtggagaccctggagacgcagcccggagaggaggccctgcagccgcgggggacggagaaggaaccgccagggcccacgacagacggtgtctggggtgggggccggcctggggacgcggccggccctgcctcgtcttctaccacggcacccgccccgcgctcctcgcggcccacggagaaggcgttcacggtgcccatcacggatgtgacggagaacgccctcaaggacctggacgacgtcatgaagaccaccaaaatcatcatcggctgcttcgtggccatcacgttcatggccgcggtgatgctcgtggccttctacaagctgcgcaagcagcaccagctccacaagcaccacgggcccacgcgcaccgtggagatcatcaacgtggaggacgagctgcccgccgcctcggccgtgtccgtggccgccgcggccgccgcggccagtgggggtggtgtgggcggggacagccacctggccctgcccgccctggagcgagaccacctcaaccaccaccactacgtggctgccgccttcaaggcgcactacagcagcaaccccagcggcgggggctgcgggggcaaaggcccgcctggcctcaactccatccacgaacctctgctcttcaagagcggctccaaggagaacgtgcaagagacgcagatctgaggcggcggggccgggcgggcgaggggcgtggagccccccacccaggtcccagcccgggcgcagcctgaccgggacccctccctcccacagcccagcccaccttctgggaccacgcagggaattggggagaggtggcttccagccccatctggggctcggacccccagtaaggacagggtggggctccaggagcggagtctctgggatcctcgcctcacccccgccaatccccggtgacgggaggggacgtgggacccaggagaagtggcctgagttctccgcgtttcctcctcgctctcccaccaagcgttccgggcccgccgccttccaggggagagaggagctttctccaggggtgtcctttcccctcggccccaaacaccttccttttacggttcagtttttgcagtttgacgcccgtccctccctcccactcctccgccctcaaaactgaagagatggacacgtcgccagagctcccgtcccagcgcccggctctgctcccggccggcggtccctgtcgtcggcgcgggggggagcctccacccgccccagccccacctgccccacagacacttttgatactgaagggaggtttgcgtcaacgactacctgctctgtaattactttaaaaaaaaaacatggaaaaagtaaaaaaatattttttttggtcatgaaagca

SEQ ID NO: 372681 - DNA, 3159 bp, Homo sapiens
catatttggctagtggaaaaacaaagaccattcgacacatggtcgccaatgtgcgaggaaaccacatcgcttctgggagcacagacacatggaatgggaaaacgctaaaaatcccacctgttactccatccatcctggattgctgcattatcagagtggactattccttagctgtatacattcacattcctggtgctaaaaaattgatgctcgaactgccattagtgatcggtacaattccatataatggttttggcagcagaaactccagcattgccagccagttcagtatggatatgagctggttgacactgaccctgccagagcagcctgaagcaccaccaaattatgcagatgtggtatcagaggaagaattctctagacacattcctccttaccctcaaccccctaactgtgagggagaagtgtgctgtcctgtgtttgcctgtatacaagaattccggtttcaacccccacctctttattcagaggttgacccacatcctagcgacgtagaagagagccagcctgtttccttcattctctgaacgtatttcagaaatcactgtgttcatcatcaaattagaatgttggttcttttccttctgcctttttgggaaagagacaggaaagattcacttgaaaacataaatgaacgtcaagactgaaggcaatagaaattaaagaatgtgagaaagttctggtgggccggcaggattgccgcacaagtttatatgatggtcgtatatatatccctgttaaaaactgggatgaagatgtgcaaagtcacagaatgtaatggaagtcctgatggttacagagtaagtgaaagggtgcctgcgctgacgtgagagaaaggaatctgtaaacagtggaaacactgtgggagtttcccatggtgttttgaagagtggaacgaaggcgatatgaactgaaggggtgaagacttgattttggagagggcaacaaaacaagggtgtgtgtgcataggagaatggcccactccaaatacgaagtgagatcctgagtctttgggtgcttcatgatttcctaccatattcaggcctaaagacattgaaaaagcatcttttcttgagatcatggtcatatgaggtcctaatgaagtactacagttttcattctttcaagggtagactaaaatatagtttataaatcggcagtacagtattatgaaaccaagaaagggtttcttgaaaagcttgtcggttcaaagaggaaagatgaatttcaatgtggatatacgtttgattttcctcatatcttatttacctaggagcatgtcagagaaagaagggagagaaaaggttgcatctgcaggatgccttgataactacacagtcccaaataaaaggcctttttctaacctacctctaatggggttatcagatatgtttttaaatctctcgccctgagtactcttcttgggagttgctgctgtttacagccacagtctcatctatcactaaatatgaaactgggccaaggggaaaattcagtaagttagcgttaaatggaagtaaatatatgtatacctaagagaatgtcaaaataaacaccaaaccaaaagaaggtaggagtgccatttttagaaaagacacaactttaattcctgtcaagagacctaggtctactgatggcagtcactgcattgtacattattccagttcttcagtaattctgtttaaactgtgattttctttattgtgttggtgcaatattttattatcatttaacctcaggatattcagaccaacaggattgtgttgctgctgaaagtctgagcagtgttttaccgtccccagcccccctcccacatggtcacatgttcacttgcttttccttccatctgttggttttgtgagctgagagcatctctggacacatggaagggagccagggattcctgtgatacagattttgaaccagcagagtactttggttttcttcatgtcctaagggtttgatccagaaaccctggtgcttcccctgcagaatactgtacttcatttaacagaatgattgatttttctttcaatcagcatgttcaccaaaaatagaaaagttcttctaaggttaaattttgtatttaaaagttagttggccatttgatcagggaattttctacacacattaggcaaatgtatgcttttcatcctctgggcttacctctctcctctgcaatcctggaagcattgtgcatagttctttcattgtaagccgctatttaaattcccacaatgcaaaactgttagaccagtaattgtgctactgaaattgtcacaaaacgttattccttgatttggtttttaaattttgcttttgtgtgtgtgtctttaaacaggtaatgtgtatttaagtgttgtctaaacagttgatttttactttagaaaagatcatcttcaactgtttattgacttctgagttatatagttcatgccctgccaaggcattgttcgactccatgatactaaaacataatgaaagaaacaaactccagtatggagaagagaaagtttaattatttggttccatctagaaaagcaacaacttaaaggaatccttcactaggattgtcttatcacctttattagataaatcatgaagtgtccctgtgaaattgaagtgaaactatctctgtaggacttaagagaatagctaaaaggtgtgacttgccttattgaactgatactggcatatctgactgtaagcagtaggttgaagatatcattttatgaatgtggagaattctacattgaaacagaaaatacctgggaatgaagattaaaaatgtagctgctgttatttgcttggtgattcccctcttgctcttctttagtttgaaaaaacaaaaacgtggccttggaattttcattttgatgcagaaattttgaaattgaaaatgtgcatgttttggtgcacaaaatccttctgtgggcaaaactttgtttttgttttgcacagtaagaaacaataggcaagcgttatgtttttggtaagttaactatgaaagctttcttatttttattattaaaaatgtaacaatttaacccacaggaaaaaaaattactttgtatgcttgtttgaaccctatgggttcgttttattaataaaattattacactaatgctaaaaaaaaaa

SEQ ID NO: 372682 - DNA, 1560 bp, Homo sapiens
catatttggctagtggaaaaacaaagaccattcgacacatggtcgccaatgtgcgaggaaaccacatcgcttctgggagcacagacacatggaatgggaaaacgctaaaaatcccacctgttactccatccatcctggattgctgcattatcagagtggactattccttagctgtatacattcacattcctggtgctaaaaaattgatgctcgaactgccattagtgatcggtacaattccatataatggttttggcagcagaaactccagcattgccagccagttcagtatggatatgagctggttgacactgaccctgccagagcagcctgaagcaccaccaaattatgcagatgtggtatcagaggaagaattctctagacacattcctccttaccctcaaccccctaactgtgagggagaagtgtgctgtcctgtgtttgcctgtatacaagaattccggtttcaacccccacctctttattcagaggttgacccacatcctagcgacgtagaagagagccagcctgtttccttcattctctgaacgtatttcagaaatcactgtgttcatcatcaaattagaatgttggttcttttccttctgcctttttgggaaagagacaggaaagattcacttgaaaacataaatgaacgtcaagactgaaggcaatagaaattaaagaatgtgagaaagttctggtgggccggcaggattgccgcacaagtttatatgatggtcgtatatatatccctgttaaaaactgggatgaagatgtgcaaagtcacagaatgtaatggaagtcctgatggttacagagtaagtgaaagggtgcctgcgctgacgtgagagaaaggaatctgtaaacagtggaaacactgtgggagtttcccatggtgttttgaagagtggaacgaaggcgatatgaactgaaggggtgaagacttgattttggagagggcaacaaaacaagggtgtgtgtgcataggagaatggcccactccaaatacgaagtgagatcctgagtctttgggtgcttcatgatttcctaccatattcaggcctaaagacattgaaaaagcatcttttcttgagatcatggtcatatgaggtcctaatgaagtactacagttttcattctttcaagggtagactaaaatatagtttataaatcggcagtacagtattatgaaaccaagaaagggtttcttgaaaagcttgtcggttcaaagaggaaagatgaatttcaatgtgaaaacacgttttgttgagggctgtactttttaccccctttaagtgctttaacaggatatacgtttgattttcctcatatcttatttacctaggagcatgtcagagaaagaagggagagaaaaggttgcatctgcaggatgccttgataactacacagtcccaaataaaaggcctttttctaacctacctctaatggggttatcagatatgtttttaaatctctcgccctgagtactcttcttgggagttgctgctgtttacagccacagtctcatctatcgcattcgagtcctctgagtcagcc

SEQ ID NO: 372683 - DNA, 3213 bp, Homo sapiens
catatttggctagtggaaaaacaaagaccattcgacacatggtcgccaatgtgcgaggaaaccacatcgcttctgggagcacagacacatggaatgggaaaacgctaaaaatcccacctgttactccatccatcctggattgctgcattatcagagtggactattccttagctgtatacattcacattcctggtgctaaaaaattgatgctcgaactgccattagtgatcggtacaattccatataatggttttggcagcagaaactccagcattgccagccagttcagtatggatatgagctggttgacactgaccctgccagagcagcctgaagcaccaccaaattatgcagatgtggtatcagaggaagaattctctagacacattcctccttaccctcaaccccctaactgtgagggagaagtgtgctgtcctgtgtttgcctgtatacaagaattccggtttcaacccccacctctttattcagaggttgacccacatcctagcgacgtagaagagagccagcctgtttccttcattctctgaacgtatttcagaaatcactgtgttcatcatcaaattagaatgttggttcttttccttctgcctttttgggaaagagacaggaaagattcacttgaaaacataaatgaacgtcaagactgaaggcaatagaaattaaagaatgtgagaaagttctggtgggccggcaggattgccgcacaagtttatatgatggtcgtatatatatccctgttaaaaactgggatgaagatgtgcaaagtcacagaatgtaatggaagtcctgatggttacagagtaagtgaaagggtgcctgcgctgacgtgagagaaaggaatctgtaaacagtggaaacactgtgggagtttcccatggtgttttgaagagtggaacgaaggcgatatgaactgaaggggtgaagacttgattttggagagggcaacaaaacaagggtgtgtgtgcataggagaatggcccactccaaatacgaagtgagatcctgagtctttgggtgcttcatgatttcctaccatattcaggcctaaagacattgaaaaagcatcttttcttgagatcatggtcatatgaggtcctaatgaagtactacagttttcattctttcaagggtagactaaaatatagtttataaatcggcagtacagtattatgaaaccaagaaagggtttcttgaaaagcttgtcggttcaaagaggaaagatgaatttcaatgtgaaaacacgttttgttgagggctgtactttttaccccctttaagtgctttaacaggatatacgtttgattttcctcatatcttatttacctaggagcatgtcagagaaagaagggagagaaaaggttgcatctgcaggatgccttgataactacacagtcccaaataaaaggcctttttctaacctacctctaatggggttatcagatatgtttttaaatctctcgccctgagtactcttcttgggagttgctgctgtttacagccacagtctcatctatcactaaatatgaaactgggccaaggggaaaattcagtaagttagcgttaaatggaagtaaatatatgtatacctaagagaatgtcaaaataaacaccaaaccaaaagaaggtaggagtgccatttttagaaaagacacaactttaattcctgtcaagagacctaggtctactgatggcagtcactgcattgtacattattccagttcttcagtaattctgtttaaactgtgattttctttattgtgttggtgcaatattttattatcatttaacctcaggatattcagaccaacaggattgtgttgctgctgaaagtctgagcagtgttttaccgtccccagcccccctcccacatggtcacatgttcacttgcttttccttccatctgttggttttgtgagctgagagcatctctggacacatggaagggagccagggattcctgtgatacagattttgaaccagcagagtactttggttttcttcatgtcctaagggtttgatccagaaaccctggtgcttcccctgcagaatactgtacttcatttaacagaatgattgatttttctttcaatcagcatgttcaccaaaaatagaaaagttcttctaaggttaaattttgtatttaaaagttagttggccatttgatcagggaattttctacacacattaggcaaatgtatgcttttcatcctctgggcttacctctctcctctgcaatcctggaagcattgtgcatagttctttcattgtaagccgctatttaaattcccacaatgcaaaactgttagaccagtaattgtgctactgaaattgtcacaaaacgttattccttgatttggtttttaaattttgcttttgtgtgtgtgtctttaaacaggtaatgtgtatttaagtgttgtctaaacagttgatttttactttagaaaagatcatcttcaactgtttattgacttctgagttatatagttcatgccctgccaaggcattgttcgactccatgatactaaaacataatgaaagaaacaaactccagtatggagaagagaaagtttaattatttggttccatctagaaaagcaacaacttaaaggaatccttcactaggattgtcttatcacctttattagataaatcatgaagtgtccctgtgaaattgaagtgaaactatctctgtaggacttaagagaatagctaaaaggtgtgacttgccttattgaactgatactggcatatctgactgtaagcagtaggttgaagatatcattttatgaatgtggagaattctacattgaaacagaaaatacctgggaatgaagattaaaaatgtagctgctgttatttgcttggtgattcccctcttgctcttctttagtttgaaaaaacaaaaacgtggccttggaattttcattttgatgcagaaattttgaaattgaaaatgtgcatgttttggtgcacaaaatccttctgtgggcaaaactttgtttttgttttgcacagtaagaaacaataggcaagcgttatgtttttggtaagttaactatgaaagctttcttatttttattattaaaaatgtaacaatttaacccacaggaaaaaaaattactttgtatgcttgtttgaaccctatgggttcgttttattaataaaattattacactaatgctaaaaaaaaaa

SEQ ID NO: 372684 - DNA, 1119 bp, Homo sapiens
catatttggctagtggaaaaacaaagaccattcgacacatggtcgccaatgtgcgaggaaaccacatcgcttctgggagcacagacacatggaatgggaaaacgctaaaaatcccacctgttactccatccatcctggattgctgcattatcagagtggactattccttagctgtatacattcacattcctggtgctaaaaaattgatgctcgaactgccattagtgatcggtacaattccatataatggttttggcagcagaaactccagcattgccagccagttcagtatggatatgagctggttgacactgaccctgccagagcagcctgaagcaccaccaaattatgcagatgtggtatcagaggaagaattctctagacacattcctccttaccctcaaccccctaactgtgagggagaagtgtgctgtcctgtgtttgcctgtatacaagaattccggtttcaacccccacctctttattcagaggttgacccacatcctagcgacgtagaagagagccagcctgtttccttcattctctgaacgtatttcagaaatcactgtgttcatcatcaaattagaatgttggttcttttccttctgcctttttgggaaagagacaggaaagattcacttgaaaacataaatgaacgtcaagactgaaggcaatagaaattaaagaatgtgagaaagttctggtgggccggcaggattgccgcacaagtttatatgatggtcgtatatatatccctgttaaaaactgggatgaagatgtgcaaagtcacagaatgtaatggaagtcctgatggttacagagtaagtgaaagggtgcctgcgctgacgtgagagaaaggaatctgtaaacagtggaaacactgtgggagtttcccatggtgttttgaagagtggaacgaaggcgatatgaactgaaggggtgaagacttgattttggagagggcaacaaaacaagggtgtgtgtgcataggagaatggcccactccaaatacgaagtgagatcctgagtctttgggtgcttcatgatttcctaccatattcaggcctaaagacattgaaaaagcatctcaaataaaaggaacattttttttccctcttt

SEQ ID NO: 372685 - DNA, 470 bp, Homo sapiens
ctactactactaaattcgcggccgcgtcgacgccactgccccgacagggggtcaagagaacctactctgaggtgagtgtccaggtcacctagtttggggccttgggtaccaactccctcacccaggcactctttagagctgtggtaaagagcaggcttctggctgggcatggtggctcacgcctgtagtccctgcactttgggaaaccaaggagggtggatcccttgagctcaggagtttgagaccagcctgggcaacatggcgaaaccgtgtctctacaaaaattagcctggtgtggtggcatgtggctgtagtcatagctacttgggaggcagaggtgggaggatcgcctgaacccagaaagttgagggtgcagttagctgtgatcgctcccctgcacttcaggctgggcaacagggtctcactcctgttgtcgacgcggccgcgaatttagtagtagtaggggccgc

SEQ ID NO: 372686 - DNA, 979 bp, Homo sapiens
gcgtgggagaagaagaaggaggttcctgctgtgccagaaacccttaagaaaaagcgaaggaatttcgcagagctgaagatcaagcgcctgagaaagaagtttgcccaaaagatgcttcgaaaggcaaggaggaagccactgcatctgttggctcagggccccagcctgtgcaagcagggcgcctgggctgttgtgtctcctgtctgtgccgatctctattaaaggactccctcttgaaaaaaaaaaaatataaaagagaataaaaataaaaaaataaaaaaaaaagaaaaagaagagaaaaaaaaaggaaaaaaaaaagaaaaaaaagaagaaaaaaaacaagataaaaagaaacaaagaagaaggaaaaaggaaaaaagaacagaaaggaaataaagagaaagaagagacagatcacagtagaaataggggagcagcaccataattaggaagatagagaagtaaatataagataacacaataaaaagatgaacaagaagggagagagaagaagaagtagataatgagtacaagtagaagaagcggacaagaaaaataacgtaagaaaagaaggagagtagggctaaaaaaacaagaaagataagtcaaatgaaaagcggaagatataagaagacaggagagagagagagaaaatgttaaagatagaaagaggagagaggaggaaagaaacagagacgaggaggagccgcaggcgaaaccggagcagagcaacacacaacgccaggggacgggacggaagggcataggaggggcagagggagacacaggggctggcagggagcatgaaagcaaagcgaagcacgacaggcgtacgaaccagaggcgcggggagaacgaaaagacgcggcgaacgacaggacgggggaagagcggaaaaggagaaggggaggagagcggacgggacggccgaagaggaagaccgggcagcgacagcgggtagtaggggcggggggggggg

SEQ ID NO: 372687 - DNA, 3815 bp, Homo sapiens
agccagagcagctgagttccagataaaaactgtcagacccggcctgtaggctgctccattgccaatgaactccatgaaccccatgaaacctgccctgccccctgcgccacacggtgatggttcattcgcatatgagtctgtgccttggcaacaaagcgccactcagccggctggatcgctgtctgtggtcactactgtgtggggagttggcaacgcgacacagagccaggttttggggaaccccatgggccctgcagggagtccctctggcagctccatgatgcctggtgtggcagggggcagctccgccttgacctccccacagtgcctgggacagcaggcgtttgctgaaggcggcgccaacaagggctacgtgcagcaaggcgtgtacagccgcgggggctaccctggggcccccggcttcaccaccgggtatgcaggcggcccggggggcctgggcctcccctcacatgctgcaagaccctccactgacttcacgcaagcggcagctgctgcagctgtggctgctgcggcagccactgccaccgccacagccacagccaccgtggctgctctccaggagaagcagagccaggagctgagccagtatggagcgatgggggccggacagtcttttaacagccagtttctgcagcatggaggtccccgggggcctagtgtccccgctggcatgaaccctactggcataggaggggtaatgggcccctctggcctctcccccttggctatgaaccccacccgggcagcaggaatgacacccttgtatgcagggcagcgtctgccccaacatgggtatcctgggcctccccaggcccagccactgccccgacagggggtcaagagaacctactctgaggtgtatccagggcagcagtatctgcaaggaggccagtatgcacccagcaccgcccagtttgcgcccagccctgggcagccccctgccccctccccttcctaccctgggcacaggctgcccctgcagcagggcatgacccagtccctgtccgtgcctggccccacgggactgcattataaggcctacccgttccatcccgggctatcccagttccccactgccagggaaccccacgccacccatgaccccaagcagcagcgtcccttacatgtcaccaaaccaagaggtcaagtctcccttcttgcctgatctcaagcccaacctcaactccttgcactcatcgccctctggaagcgggccttgtgacgagttgcggctgaccttccctgtgcgcgatggggtggtcctggagcccttccgcctgcagcacaacctggctgtaagcaaccatgtcttccagctgcgagactcagtctacaagaccctgataatgaggcctgacctggagctgcaattcaagtgctaccaccacgaggaccggcagatgaacaccaactggccagcctcggtgcaggtcagcgtcaatgccacgccgctcaccatcgagcgtggcgacaacaagacctcgcacaagccactctacctgaagcatgtgtgccagccaggccgcaacaccatccagatcaccgtcaccgcctgctgctgctcccacctcttcgtgctgcagctagtgcaccgcccatccgtccgctcggtgctgcagggcctcctcaaaaagcgcctcctgcctgctgagcactgcatcaccaagataaagcggaacttcagcagcggcaccatccctggcacccctgggcccaacggagaggacggggtggagcagacagctatcaaggtgtccctgaagtgccccatcaccttccgcaggatccagctccctgcccgaggtcatgactgtcgccacatacagtgctttgacctggagtcgtacctgcagctcaactgtgagcgggggacttggaggtgtcctgtgtgcaacaagacagctttgctggagggcctggaggtggaccagtacatgctgggcatcctgatttacattcagaactctgactatgaggagatcaccatcgaccccacgtgcagctggaagccagtgcccgtgaagcctgacatgcacatcaaggaggagccggatgggccagcactgaagcgctgccgcaccgtgagccccgcccacgtgctcatgcccagcgtgatggagatgatcgccgccctgggccccggcgctgccccctttgcccccctgcagcccccctcagtccctgcccccagcgactaccctggccagggttccagcttcctggggcctggaactttccctgagtccttcccacccaccacgcccagcaccccaacccttgctgagttcaccccgggaccaccccccatctcctaccagtctgacattcccagcagcctcctgacttcagagaagtctaccgcctgcctcccaagccagatggcaccagcaggtcacctggaccccactcacaatcctgggacaccaggactacacacctccaaccttggggcccctccaggtccccagctgcaccattcaaaccctcccccagcgtcccggcagtccttgggccaagcgagcttaggacctacgggtgaactggccttcagtcctgccacaggcgtgatggggccccccagcatgtctggagccggggaggccccagaaccagctctggacctgctcccggaactgaccaaccctgatgagctactgtcctacttgggcccacccgacctccctacgaacaacaatgacgacctgctttctctgtttgagaacaactgatcctgtgtttaccccaagcccggcggggacacgctcacagatgtcaccacagccctgcccttcatgcccagccccatgggacacccggtggtctttcccaaacctcccccaaaacacacctggagccagagccttctgccgccagccctgcccctgaattggaagcagccctgtgctcgatgggaggggctcccaggccggcagcccttgccacctccctctgccaagcctgctgctgcagaacggtttttgctgaggtgcccctgcccagccctgtccagccttgtccacacacacatctcacgcccctggtctcacagcctcacaccttgtccttccacccctgcctgcccccacccagcctgcttcttgtccagcattgatccttctgtttcaacaactcctccactgggcagagctgggcatctggcagggctggctctgtcccctgggcctttggctccagtggcccctgtgcccagcagtccagctcttggaacctcgctgaatggcagcctcttgggggcctggagctctggcagcccagccgtgtgtggtgtcaggttcctctccccaccccagcttcaagcagaggcctcggggtgggggagctacaaagcacaacaatgtacatagtgtagaaacactaacagctgggagaggggagccagctgtccagccagcatgttcctgttgtacagcccggtctccctgcgcgctctgctccttcccatgtgcagacagatcagggaggaacctccaatgggtgggggacagtgagcttcggcctggccgaggtgggtgggtgggctctcagattcagctctgtgtaaagattctctagcgggctgcgctcccaagttccccttctctgtgaaagtgaagaattagtacagctgtgttttttaaagccacctctctgtctccaccccatgggcccacacccaggtgggggaggaggaagccactgcatctgttggctcagggccccagcctgtgcaagcagggcgcctgggctgttgtgtctcctgtctgtgccgatctctattaaaggactccctcttg

SEQ ID NO: 372688 - DNA, 4088 bp, Homo sapiens
agccagagcagctgagttccagataaaaactgtcagacccggcctgtaggctgctccattgccaatgaactccatgaaccccatgaaacctgccctgccccctgcgccacacggtgatggttcattcgcatatgagtctgtgccttggcaacaaagcgccactcagccggctggatcgctgtctgtggtcactactgtgtggggagttggcaacgcgacacagagccaggttttggggaaccccatgggccctgcagggagtccctctggcagctccatgatgcctggtgtggcagggggcagctccgccttgacctccccacagtgcctgggacagcaggcgtttgctgaaggcggcgccaacaagggctacgtgcagcaaggcgtgtacagccgcgggggctaccctggggcccccggcttcaccaccgggtatgcaggcggcccggggggcctgggcctcccctcacatgctgcaagaccctccactgacttcacgcaagcggcagctgctgcagctgtggctgctgcggcagccactgccaccgccacagccacagccaccgtggctgctctccaggagaagcagagccaggagctgagccagtatggagcgatgggggccggacagtcttttaacagccagtttctgcagcatggaggtccccgggggcctagtgtccccgctggcatgaaccctactggcataggaggggtaatgggcccctctggcctctcccccttggctatgaaccccacccgggcagcaggaatgacacccttgtatgcagggcagcgtctgccccaacatgggtatcctgggcctccccaggcccagccactgccccgacagggggtcaagagaacctactctgaggtgtatccagggcagcagtatctgcaaggaggccagtatgcacccagcaccgcccagtttgcgcccagccctgggcagccccctgccccctccccttcctaccctgggcacaggctgcccctgcagcagggcatgacccagtccctgtccgtgcctggccccacgggactgcattataagcccacagagcagttcaacgggcagggcgccagcttcaacgggggcagcgtcagctacagccaacctggcctgagtggggtagggggcctggccgggaggatgggccgggaggctcacagggtgggcatatggagagagggcgaccgggcaggcacccctggggccgcctcctgtccacctctgttatcatggttcccagtgggtgcgccgtgaacagactccactcccatccaccctggcaatctgccttgactgtttgtgctcaaccctacagcctacccgttccatcccgggctatcccagttccccactgccagggaaccccacgccacccatgaccccaagcagcagcgtcccttacatgtcaccaaaccaagaggtcaagtctcccttcttgcctgatctcaagcccaacctcaactccttgcactcatcgccctctggaagcgggccttgtgacgagttgcggctgaccttccctgtgcgcgatggggtggtcctggagcccttccgcctgcagcacaacctggctgtaagcaaccatgtcttccagctgcgagactcagtctacaagaccctgataatgaggcctgacctggagctgcaattcaagtgctaccaccacgaggaccggcagatgaacaccaactggccagcctcggtgcaggtcagcgtcaatgccacgccgctcaccatcgagcgtggcgacaacaagacctcgcacaagccactctacctgaagcatgtgtgccagccaggccgcaacaccatccagatcaccgtcaccgcctgctgctgctcccacctcttcgtgctgcagctagtgcaccgcccatccgtccgctcggtgctgcagggcctcctcaaaaagcgcctcctgcctgctgagcactgcatcaccaagataaagcggaacttcagcagcggcaccatccctggcacccctgggcccaacggagaggacggggtggagcagacagctatcaaggtgtccctgaagtgccccatcaccttccgcaggatccagctccctgcccgaggtcatgactgtcgccacatacagtgctttgacctggagtcgtacctgcagctcaactgtgagcgggggacttggaggtgtcctgtgtgcaacaagacagctttgctggagggcctggaggtggaccagtacatgctgggcatcctgatttacattcagaactctgactatgaggagatcaccatcgaccccacgtgcagctggaagccagtgcccgtgaagcctgacatgcacatcaaggaggagccggatgggccagcactgaagcgctgccgcaccgtgagccccgcccacgtgctcatgcccagcgtgatggagatgatcgccgccctgggccccggcgctgccccctttgcccccctgcagcccccctcagtccctgcccccagcgactaccctggccagggttccagcttcctggggcctggaactttccctgagtccttcccacccaccacgcccagcaccccaacccttgctgagttcaccccgggaccaccccccatctcctaccagtctgacattcccagcagcctcctgacttcagagaagtctaccgcctgcctcccaagccagatggcaccagcaggtcacctggaccccactcacaatcctgggacaccaggactacacacctccaaccttggggcccctccaggtccccagctgcaccattcaaaccctcccccagcgtcccggcagtccttgggccaagcgagcttaggacctacgggtgaactggccttcagtcctgccacaggcgtgatggggccccccagcatgtctggagccggggaggccccagaaccagctctggacctgctcccggaactgaccaaccctgatgagctactgtcctacttgggcccacccgacctccctacgaacaacaatgacgacctgctttctctgtttgagaacaactgatcctgtgtttaccccaagcccggcggggacacgctcacagatgtcaccacagccctgcccttcatgcccagccccatgggacacccggtggtctttcccaaacctcccccaaaacacacctggagccagagccttctgccgccagccctgcccctgaattggaagcagccctgtgctcgatgggaggggctcccaggccggcagcccttgccacctccctctgccaagcctgctgctgcagaacggtttttgctgaggtgcccctgcccagccctgtccagccttgtccacacacacatctcacgcccctggtctcacagcctcacaccttgtccttccacccctgcctgcccccacccagcctgcttcttgtccagcattgatccttctgtttcaacaactcctccactgggcagagctgggcatctggcagggctggctctgtcccctgggcctttggctccagtggcccctgtgcccagcagtccagctcttggaacctcgctgaatggcagcctcttgggggcctggagctctggcagcccagccgtgtgtggtgtcaggttcctctccccaccccagcttcaagcagaggcctcggggtgggggagctacaaagcacaacaatgtacatagtgtagaaacactaacagctgggagaggggagccagctgtccagccagcatgttcctgttgtacagcccggtctccctgcgcgctctgctccttcccatgtgcagacagatcagggaggaacctccaatgggtgggggacagtgagcttcggcctggccgaggtgggtgggtgggctctcagattcagctctgtgtaaagattctctagcgggctgcgctcccaagttccccttctctgtgaaagtgaagaattagtacagctgtgttttttaaagccacctctctgtctccaccccatgggcccacacccaggtgggggaggaggaagccactgcatctgttggctcagggccccagcctgtgcaagcagggcgcctgggctgttgtgtctcctgtctgtgccgatctctattaaaggactccctcttg

SEQ ID NO: 372689 - DNA, 4106 bp, Homo sapiens
agccagagcagctgagttccagataaaaactgtcagacccggcctgtaggctgctccattgccaatgaactccatgaaccccatgaaacctgccctgccccctgcgccacacggtgatggttcattcgcatatgagtctgtgccttggcaacaaagcgccactcagccggctggatcgctgtctgtggtcactactgtgtggggagttggcaacgcgacacagagccaggttttggggaaccccatgggccctgcagggagtccctctggcagctccatgatgcctggtgtggcagggggcagctccgccttgacctccccacagtgcctgggacagcaggcgtttgctgaaggcggcgccaacaagggctacgtgcagcaaggcgtgtacagccgcgggggctaccctggggcccccggcttcaccaccgggtatgcaggcggcccggggggcctgggcctcccctcacatgctgcaagaccctccactgacttcacgcaagcggcagctgctgcagctgtggctgctgcggcagccactgccaccgccacagccacagccaccgtggctgctctccaggagaagcagagccaggagctgagccagtatggagcgatgggggccggacagtcttttaacagccagtttctgcagcatggaggtccccgggggcctagtgtccccgctggcatgaaccctactggcataggaggggtaatgggcccctctggcctctcccccttggctatgaaccccacccgggcagcaggaatgacacccttgtatgcagggcagcgtctgccccaacatgggtatcctgggcctccccaggcccagccactgccccgacagggggtcaagagaacctactctgaggtgtatccagggcagcagtatctgcaaggaggccagtatgcacccagcaccgcccagtttgcgcccagccctgggcagccccctgccccctccccttcctaccctgggcacaggctgcccctgcagcagggcatgacccagtccctgtccgtgcctggccccacgggactgcattataaggcctacccgttccatcccgggctatcccagttccccactgccagggaaccccacgccacccatgaccccaagcagcagcgtcccttacatgtcaccaaaccaagaggtcaagtctcccttcttgcctgatctcaagcccaacctcaactccttgcactcatcgccctctggaagcgggccttgtgacgagttgcggctgaccttccctgtgcgcgatggggtggtcctggagcccttccgcctgcagcacaacctggctgtaagcaaccatgtcttccagctgcgagactcagtctacaagaccctgataatgaggcctgacctggagctgcaattcaagtgctaccaccacgaggaccggcagatgaacaccaactggccagcctcggtgcaggtcagcgtcaatgccacgccgctcaccatcgagcgtggcgacaacaagacctcgcacaagccactctacctgaagcatgtgtgccagccaggccgcaacaccatccagatcaccgtcaccgcctgctgctgctcccacctcttcgtgctgcagctagtgcaccgcccatccgtccgctcggtgctgcagggcctcctcaaaaagcgcctcctgcctgctgagcactgcatcaccaagataaagcggaacttcagcagcggcaccatccctggcacccctgggcccaacggagaggacggggtggagcagacagctatcaaggtgtccctgaagtgccccatcaccttccgcaggatccagctccctgcccgaggtcatgactgtcgccacatacagtgctttgacctggagtcgtacctgcagctcaactgtgagcgggggacttggaggtgtcctgtgtgcaacaagacagctttgctggagggcctggaggtggaccagtacatgctgggcatcctgatttacattcagaactctgactatgaggagatcaccatcgaccccacgtgcagctggaagccagtgcccgtgaagcctgacatgcacatcaaggaggagccggatgggccagcactgaagcgctgccgcaccgtgagccccgcccacgtgctcatgcccagcgtgatggagatgatcgccgccctgggccccggcgctgccccctttgcccccctgcagcccccctcagtccctgcccccagcgactaccctggccagggttccagcttcctggggcctggaactttccctgagtccttcccacccaccacgcccagcaccccaacccttgctgagttcaccccgggaccaccccccatctcctaccagtctgacattcccagcagcctcctgacttcagagaagtctaccgcctgcctcccaagccagatggcaccagcaggtcacctggaccccactcacaatcctgggacaccaggactacacacctccaaccttggggcccctccaggtccccagctgcaccattcaaaccctcccccagcgtcccggcagtccttgggccaagcgagcttaggacctacgggtgaactggccttcagtcctgccacaggcgtgatggggccccccagcatgtctggagccggggaggccccagaaccagctctggacctgctcccggaactgaccaaccctgatgagctactgtcctacttgggcccacccgacctccctacgaacaacaatgacgacctgctttctctgtttgagaacaactgatcctgtgtttaccccaagcccggcggggacacgctcacagatgtcaccacagccctgcccttcatgcccagccccatgggacacccggtggtctttcccaaacctcccccaaaacacacctggagccagagccttctgccgccagccctgcccctgaattggaagcagccctgtgctcgatgggaggggctcccaggccggcagcccttgccacctccctctgccaagcctgctgctgcagaacggtttttgctgaggtgcccctgcccagccctgtccagccttgtccacacacacatctcacgcccctggtctcacagcctcacaccttgtccttccacccctgcctgcccccacccagcctgcttcttgtccagcattgatccttctgtttcaacaactcctccactgggcagagctgggcatctggcagggctggctctgtcccctgggcctttggctccagtggcccctgtgcccagcagtccagctcttggaacctcgctgaatggcagcctcttgggggcctggagctctggcagcccagccgtgtgtggtgtcaggttcctctccccaccccagcttcaagcagaggcctcggggtgggggagctacaaagcacaacaatgtacatagtgtagaaacactaacagctgggagaggggagccagctgtccagccagcatgttcctgttgtacagcccggtctccctgcgcgctctgctccttcccatgtgcagacagatcagggaggaacctccaatgggtgggggacagtgagcttcggcctggccgaggtgggtgggtgggctctcagattcagctctgtgtaaagattctctagcgggctgcgctcccaagttccccttctctgtgaaagtgaagaattagtacagctgtgttttttaaagccacctctctgtctccaccccatgggcccacacccaggtgggggaggaggaagccactgcatctgttggctcagggccccagcctgtgcaagcagggcgcctgggctgttgtgtctcctgtctgtgccgatctctattaaaggactccctcttggtgggcctggccgagtccctcctttgtgctcccagggactattttctcctcgtaagccagcgacctgcctaaagcttgggctgtgcctgcaaagcttgtgcaggacctgggggccaggtcgaccttcaggtggcttttggggccccaggttgagctctggatgtttcaagccaaggctcggctattcccgccccatagtaaatttccttttccctggaattttccaagttggcttcagctgaagagctgttttgtgaagcatcccaggcttgcccaggagagacatttgcc

SEQ ID NO: 372690 - DNA, 4242 bp, Homo sapiens
agccagagcagctgagttccagataaaaactgtcagacccggcctgtaggctgctccattgccaatgaactccatgaaccccatgaaacctgccctgccccctgcgccacacggtgatggttcattcgcatatgagtctgtgccttggcaacaaagcgccactcagccggctggatcgctgtctgtggtcactactgtgtggggagttggcaacgcgacacagagccaggttttggggaaccccatgggccctgcagggagtccctctggcagctccatgatgcctggtgtggcagggggcagctccgccttgacctccccacagtgcctgggacagcaggcgtttgctgaaggcggcgccaacaagggctacgtgcagcaaggcgtgtacagccgcgggggctaccctggggcccccggcttcaccaccgggtatgcaggcggcccggggggcctgggcctcccctcacatgctgcaagaccctccactgacttcacgcaagcggcagctgctgcagctgtggctgctgcggcagccactgccaccgccacagccacagccaccgtggctgctctccaggagaagcagagccaggagctgagccagtatggagcgatgggggccggacagtcttttaacagccagtttctgcagcatggaggtccccgggggcctagtgtccccgctggcatgaaccctactggcataggaggggtaatgggcccctctggcctctcccccttggctatgaaccccacccgggcagcaggaatgacacccttgtatgcagggcagcgtctgccccaacatgggtatcctgggcctccccaggcccagccactgccccgacagggggtcaagagaacctactctgaggtgtatccagggcagcagtatctgcaaggaggccagtatgcacccagcaccgcccagtttgcgcccagccctgggcagccccctgccccctccccttcctaccctgggcacaggctgcccctgcagcagggcatgacccagtccctgtccgtgcctggccccacgggactgcattataaggcctacccgttccatcccgggctatcccagttccccactgccagggaaccccacgccacccatgaccccaagcagcagcgtcccttacatgtcaccaaaccaagaggtcaagtctcccttcttgcctgatctcaagcccaacctcaactccttgcactcatcgccctctggaagcgggccttgtgacgagttgcggctgaccttccctgtgcgcgatggggtggtcctggagcccttccgcctgcagcacaacctggctgtaagcaaccatgtcttccagctgcgagactcagtctacaagaccctgataatgaggcctgacctggagctgcaattcaagtgctaccaccacgaggaccggcagatgaacaccaactggccagcctcggtgcaggtcagcgtcaatgccacgccgctcaccatcgagcgtggcgacaacaagacctcgcacaagccactctacctgaagcatgtgtgccagccaggccgcaacaccatccagatcaccgtcaccgcctgctgctgctcccacctcttcgtgctgcagctagtgcaccgcccatccgtccgctcggtgctgcagggcctcctcaaaaagcgcctcctgcctgctgagcactgcatcaccaagataaagcggaacttcagcagcggcaccatccctggcacccctgggcccaacggagaggacggggtggagcagacagctatcaaggtgtccctgaagtgccccatcaccttccgcaggatccagctccctgcccgaggtcatgactgtcgccacatacagtgctttgacctggagtcgtacctgcagctcaactgtgagcgggggacttggaggtgtcctgtgtgcaacaagacagctttgctggagggcctggaggtggaccagtacatgctgggcatcctgatttacattcagaactctgactatgaggagatcaccatcgaccccacgtgcagctggaagccagtgcccgtgaagcctgacatgcacatcaaggaggagccggatgggccagcactgaagcgctgccgcaccgtgagccccgcccacgtgctcatgcccagcgtgatggagatgatcgccgccctgggccccggcgctgccccctttgcccccctgcagcccccctcagtccctgcccccagcgactaccctggccagggttccagcttcctggggcctggaactttccctgagtccttcccacccaccacgcccagcaccccaacccttgctgagttcaccccgggaccaccccccatctcctaccagtctgacattcccagcagcctcctgacttcagagaagtctaccgcctgcctcccaagccagatggcaccagcaggtcacctggaccccactcacaatcctgggacaccaggactacacacctccaaccttggggcccctccaggtccccagctgcaccattcaaaccctcccccagcgtcccggcagtccttgggccaagcgagcttaggacctacgggtgaactggccttcagtcctgccacaggcgtgatggggccccccagcatgtctggagccggggaggccccagaaccagctctggacctgctcccggaactgaccaaccctgatgagctactgtcctacttgggcccacccgacctccctacgaacaacaatgacgacctgctttctctgtttgagaacaactgatcctgtgtttaccccaagcccggcggggacacgctcacagatgtcaccacagccctgcccttcatgcccagccccatgggacacccggtggtctttcccaaacctcccccaaaacacacctggagccagagccttctgccgccagccctgcccctgaattggaagcagccctgtgctcgatgggaggggctcccaggccggcagcccttgccacctccctctgccaagcctgctgctgcagaacggtttttgctgaggtgcccctgcccagccctgtccagccttgtccacacacacatctcacgcccctggtctcacagcctcacaccttgtccttccacccctgcctgcccccacccagcctgcttcttgtccagcattgatccttctgtttcaacaactcctccactgggcagagctgggcatctggcagggctggctctgtcccctgggcctttggctccagtggcccctgtgcccagcagtccagctcttggaacctcgctgaatggcagcctcttgggggcctggagctctggcagcccagccgtgtgtggtgtcaggttcctctccccaccccagcttcaagcagaggcctcggggtgggggagctacaaagcacaacaatgtacatagtgtagaaacactaacagctgggagaggggagccagctgtccagccagcatgttcctgttgtacagcccggtctccctgcgcgctctgctccttcccatgtgcagacagatcagggaggaacctccaatgggtgggggacagtgagcttcggcctggccgaggtgggtgggtgggctctcagattcagctctgtgtaaagattctctagcgggctgcgctcccaagttccccttctctgtgaaagtgaagaattagtacagctgtgttttttaaagccacctctctgtctccaccccatgggcccacacccaggtgggggaggaggaagccactgcatctgttggctcagggccccagcctgtgcaagcagggcgcctgggctgttgtgtctcctgtctgtgccgatctctattaaaggactccctcttggtgggcaaaaaaaaaaaaaaaaaaaaaaaaaaaaaaaaaaaaagggggggggggaaaaaaaatacccccgcggggggccacgagtcatcagcagcggctcccgcgtgcctggggaaagagaggggccccaatatagggaggccggtttaatagaagaagggagcggggcgcggcggttatacaccacgcgggaagggggaacaaccgcgctaggcgtggggagacctctggggaaggcagacctaaccatggggggggggccacattgtggacccaacactcctaaagagaaattaaaaagcctacagcgaaacatagaacttgcgaggtgcatacggggggcaaccacacctgagcattagctggcgacagaaagttagggacccgggacgttaatcagggcaatactaccggggcagatataaaa

SEQ ID NO: 372691 - DNA, 4276 bp, Homo sapiens
agccagagcagctgagttccagataaaaactgtcagacccggcctgtaggctgctccattgccaatgaactccatgaaccccatgaaacctgccctgccccctgcgccacacggtgatggttcattcgcatatgagtctgtgccttggcaacaaagcgccactcagccggctggatcgctgtctgtggtcactactgtgtggggagttggcaacgcgacacagagccaggttttggggaaccccatgggccctgcagggagtccctctggcagctccatgatgcctggtgtggcagggggcagctccgccttgacctccccacagtgcctgggacagcaggcgtttgctgaaggcggcgccaacaagggctacgtgcagcaaggcgtgtacagccgcgggggctaccctggggcccccggcttcaccaccgggtatgcaggcggcccggggggcctgggcctcccctcacatgctgcaagaccctccactgacttcacgcaagcggcagctgctgcagctgtggctgctgcggcagccactgccaccgccacagccacagccaccgtggctgctctccaggagaagcagagccaggagctgagccagtatggagcgatgggggccggacagtcttttaacagccagtttctgcagcatggaggtccccgggggcctagtgtccccgctggcatgaaccctactggcataggaggggtaatgggcccctctggcctctcccccttggctatgaaccccacccgggcagcaggaatgacacccttgtatgcagggcagcgtctgccccaacatgggtatcctgggcctccccaggcccagccactgccccgacagggggtcaagagaacctactctgaggtgtatccagggcagcagtatctgcaaggaggccagtatgcacccagcaccgcccagtttgcgcccagccctgggcagccccctgccccctccccttcctaccctgggcacaggctgcccctgcagcagggcatgacccagtccctgtccgtgcctggccccacgggactgcattataagcccacagagcagttcaacgggcagggcgccagcttcaacgggggcagcgtcagctacagccaacctggcctgagtgggcctacccgttccatcccgggctatcccagttccccactgccagggaaccccacgccacccatgaccccaagcagcagcgtcccttacatgtcaccaaaccaagaggtcaagtctcccttcttgcctgatctcaagcccaacctcaactccttgcactcatcgccctctggaagcgggccttgtgacgagttgcggctgaccttccctgtgcgcgatggggtggtcctggagcccttccgcctgcagcacaacctggctgtaagcaaccatgtcttccagctgcgagactcagtctacaagaccctgataatgaggcctgacctggagctgcaattcaagtgctaccaccacgaggaccggcagatgaacaccaactggccagcctcggtgcaggtcagcgtcaatgccacgccgctcaccatcgagcgtggcgacaacaagacctcgcacaagccactctacctgaagcatgtgtgccagccaggccgcaacaccatccagatcaccgtcaccgcctgctgctgctcccacctcttcgtgctgcagctagtgcaccgcccatccgtccgctcggtgctgcagggcctcctcaaaaagcgcctcctgcctgctgagcactgcatcaccaagataaagcggaacttcagcagcggcaccatccctggcacccctgggcccaacggagaggacggggtggagcagacagctatcaaggtgtccctgaagtgccccatcaccttccgcaggatccagctccctgcccgaggtcatgactgtcgccacatacagtgctttgacctggagtcgtacctgcagctcaactgtgagcgggggacttggaggtgtcctgtgtgcaacaagacagctttgctggagggcctggaggtggaccagtacatgctgggcatcctgatttacattcagaactctgactatgaggagatcaccatcgaccccacgtgcagctggaagccagtgcccgtgaagcctgacatgcacatcaaggaggagccggatgggccagcactgaagcgctgccgcaccgtgagccccgcccacgtgctcatgcccagcgtgatggagatgatcgccgccctgggccccggcgctgccccctttgcccccctgcagcccccctcagtccctgcccccagcgactaccctggccagggaatgtcccaaggccaattcccttggcagcaatgagaagaaatgcccttttccaaatagcgacttctgcaaaacccgctgttgtttgtgggtggttccagcttcctggggcctggaactttccctgagtccttcccacccaccacgcccagcaccccaacccttgctgagttcaccccgggaccaccccccatctcctaccagtctgacattcccagcagcctcctgacttcagagaagtctaccgcctgcctcccaagccagatggcaccagcaggtcacctggaccccactcacaatcctgggacaccaggactacacacctccaaccttggggcccctccaggtccccagctgcaccattcaaaccctcccccagcgtcccggcagtccttgggccaagcgagcttaggacctacgggtgaactggccttcagtcctgccacaggcgtgatggggccccccagcatgtctggagccggggaggccccagaaccagctctggacctgctcccggaactgaccaaccctgatgagctactgtcctacttgggcccacccgacctccctacgaacaacaatgacgacctgctttctctgtttgagaacaactgatcctgtgtttaccccaagcccggcggggacacgctcacagatgtcaccacagccctgcccttcatgcccagccccatgggacacccggtggtctttcccaaacctcccccaaaacacacctggagccagagccttctgccgccagccctgcccctgaattggaagcagccctgtgctcgatgggaggggctcccaggccggcagcccttgccacctccctctgccaagcctgctgctgcagaacggtttttgctgaggtgcccctgcccagccctgtccagccttgtccacacacacatctcacgcccctggtctcacagcctcacaccttgtccttccacccctgcctgcccccacccagcctgcttcttgtccagcattgatccttctgtttcaacaactcctccactgggcagagctgggcatctggcagggctggctctgtcccctgggcctttggctccagtggcccctgtgcccagcagtccagctcttggaacctcgctgaatggcagcctcttgggggcctggagctctggcagcccagccgtgtgtggtgtcaggttcctctccccaccccagcttcaagcagaggcctcggggtgggggagctacaaagcacaacaatgtacatagtgtagaaacactaacagctgggagaggggagccagctgtccagccagcatgttcctgttgtacagcccggtctccctgcgcgctctgctccttcccatgtgcagacagatcagggaggaacctccaatgggtgggggacagtgagcttcggcctggccgaggtgggtgggtgggctctcagattcagctctgtgtaaagattctctagcgggctgcgctcccaagttccccttctctgtgaaagtgaagaattagtacagctgtgttttttaaagccacctctctgtctccaccccatgggcccacacccaggtgggggaggaggaagccactgcatctgttggctcagggccccagcctgtgcaagcagggcgcctgggctgttgtgtctcctgtctgtgccgatctctattaaaggactccctcttggtgggcctggccgagtccctcctttgtgctcccagggactattttctcctcgtaagccagcgacctgcctaaagcttgggctgtgcctgcaaagcttgtgcaggacctgggggccaggtcgaccttcaggtggcttttggggccccaggttgagctctggatgtttcaagccaaggctcggctattcccgccccatagtaaatttccttttccctggaattttccaagttggcttcagctgaagagctgttttgtgaagcatcccaggcttgcccaggagagacatttgcc

SEQ ID NO: 372692 - DNA, 2331 bp, Homo sapiens
gtccagtcttcctgccctacccccaagggtgaccatcgttagcatctgtctttgcagaaatactctgtacagtgctttgacctggagtcgtacctgcagctcaactgtgagcgggggacttggaggtgtcctgtgtgcaacaagacagctttgctggagggcctggaggtggaccagtacatgctgggcatcctgatttacattcagaactctgactatgaggagatcaccatcgaccccacgtgcagctggaagccagtgcccgtgaagcctgacatgcacatcaaggaggagccggatgggccagcactgaagcgctgccgcaccgtgagccccgcccacgtgctcatgcccagcgtgatggagatgatcgccgccctgggccccggcgctgccccctttgcccccctgcagcccccctcagtccctgcccccagcgactaccctggccagggttccagcttcctggggcctggaactttccctgagtccttcccacccaccacgcccagcaccccaacccttgctgagttcaccccgggaccaccccccatctcctaccagtctgacattcccagcagcctcctgacttcagagaagtctaccgcctgcctcccaagccagatggcaccagcaggtcacctggaccccactcacaatcctgggacaccaggactacacacctccaaccttggggcccctccaggtccccagctgcaccattcaaaccctcccccagcgtcccggcagtccttgggccaagcgagcttaggacctacgggtgaactggccttcagtcctgccacaggcgtgatggggccccccagcatgtctggagccggggaggccccagaaccagctctggacctgctcccggaactgaccaaccctgatgagctactgtcctacttgggcccacccgacctccctacgaacaacaatgacgacctgctttctctgtttgagaacaactgatcctgtgtttaccccaagcccggcggggacacgctcacagatgtcaccacagccctgcccttcatgcccagccccatgggacacccggtggtctttcccaaacctcccccaaaacacacctggagccagagccttctgccgccagccctgcccctgaattggaagcagccctgtgctcgatgggaggggctcccaggccggcagcccttgccacctccctctgccaagcctgctgctgcagaacggtttttgctgaggtgcccctgcccagccctgtccagccttgtccacacacacatctcacgcccctggtctcacagcctcacaccttgtccttccacccctgcctgcccccacccagcctgcttcttgtccagcattgatccttctgtttcaacaactcctccactgggcagagctgggcatctggcagggctggctctgtcccctgggcctttggctccagtggcccctgtgcccagcagtccagctcttggaacctcgctgaatggcagcctcttgggggcctggagctctggcagcccagccgtgtgtggtgtcaggttcctctccccaccccagcttcaagcagaggcctcggggtgggggagctacaaagcacaacaatgtacatagtgtagaaacactaacagctgggagaggggagccagctgtccagccagcatgttcctgttgtacagcccggtctccctgcgcgctctgctccttcccatgtgcagacagatcagggaggaacctccaatgggtgggggacagtgagcttcggcctggccgaggtgggtgggtgggctctcagattcagctctgtgtaaagattctctagcgggctgcgctcccaagttccccttctctgtgaaagtgaagaattagtacagctgtgttttttaaagccacctctctgtctccaccccatgggcccacacccaggtgggggaggaggaagccactgcatctgttggctcagggccccagcctgtgcaagcagggcgcctgggctgttgtgtctcctgtctgtgccgatctctattaaaggactccctcttggtgggcctggccgagtccctcctttgtgctcccagggactattttctcctcgtaagccagcgacctgcctaaagcttgggctgtgcctgcaaagcttgtgcaggacctgggggccaggtcgaccttcaggtggcttttggggccccaggttgagctctggatgtttcaagccaaggctcggctattcccgccccatagtaaatttccttttccctggaattttccaagttggcttcagctgaagagctgttttgtgaagcatcccaggcttgcccaggagagacatttgcc

SEQ ID NO: 372693 - DNA, 4206 bp, Homo sapiens
agccagagcagctgagttccagataaaaactgtcagacccggcctgtaggctgctccattgccaatgaactccatgaaccccatgaaacctgccctgccccctgcgccacacggtgatggttcattcgcatatgagtctgtgccttggcaacaaagcgccactcagccggctggatcgctgtctgtggtcactactgtgtggggagttggcaacgcgacacagagccaggttttggggaaccccatgggccctgcagggagtccctctggcagctccatgatgcctggtgtggcagggggcagctccgccttgacctccccacagtgcctgggacagcaggcgtttgctgaaggcggcgccaacaagggctacgtgcagcaaggcgtgtacagccgcgggggctaccctggggcccccggcttcaccaccgggtatgcaggcggcccggggggcctgggcctcccctcacatgctgcaagaccctccactgacttcacgcaagcggcagctgctgcagctgtggctgctgcggcagccactgccaccgccacagccacagccaccgtggctgctctccaggagaagcagagccaggagctgagccagtatggagcgatgggggccggacagtcttttaacagccagtttctgcagcatggaggtccccgggggcctagtgtccccgctggcatgaaccctactggcataggaggggtaatgggcccctctggcctctcccccttggctatgaaccccacccgggcagcaggaatgacacccttgtatgcagggcagcgtctgccccaacatgggtatcctgggcctccccaggcccagccactgccccgacagggggtcaagagaacctactctgaggtgtatccagggcagcagtatctgcaaggaggccagtatgcacccagcaccgcccagtttgcgcccagccctgggcagccccctgccccctccccttcctaccctgggcacaggctgcccctgcagcagggcatgacccagtccctgtccgtgcctggccccacgggactgcattataagcccacagagcagttcaacgggcagggcgccagcttcaacgggggcagcgtcagctacagccaacctggcctgagtgggcctacccgttccatcccgggctatcccagttccccactgccagggaaccccacgccacccatgaccccaagcagcagcgtcccttacatgtcaccaaaccaagaggtcaagtctcccttcttgcctgatctcaagcccaacctcaactccttgcactcatcgccctctggaagcgggccttgtgacgagttgcggctgaccttccctgtgcgcgatggggtggtcctggagcccttccgcctgcagcacaacctggctgtaagcaaccatgtcttccagctgcgagactcagtctacaagaccctgataatgaggcctgacctggagctgcaattcaagtgctaccaccacgaggaccggcagatgaacaccaactggccagcctcggtgcaggtcagcgtcaatgccacgccgctcaccatcgagcgtggcgacaacaagacctcgcacaagccactctacctgaagcatgtgtgccagccaggccgcaacaccatccagatcaccgtcaccgcctgctgctgctcccacctcttcgtgctgcagctagtgcaccgcccatccgtccgctcggtgctgcagggcctcctcaaaaagcgcctcctgcctgctgagcactgcatcaccaagataaagcggaacttcagcagcggcaccatccctggcacccctgggcccaacggagaggacggggtggagcagacagctatcaaggtgtccctgaagtgccccatcaccttccgcaggatccagctccctgcccgaggtcatgactgtcgccacatacagtgctttgacctggagtcgtacctgcagctcaactgtgagcgggggacttggaggtgtcctgtgtgcaacaagacagctttgctggagggcctggaggtggaccagtacatgctgggcatcctgatttacattcagaactctgactatgaggagatcaccatcgaccccacgtgcagctggaagccagtgcccgtgaagcctgacatgcacatcaaggaggagccggatgggccagcactgaagcgctgccgcaccgtgagccccgcccacgtgctcatgcccagcgtgatggagatgatcgccgccctgggccccggcgctgccccctttgcccccctgcagcccccctcagtccctgcccccagcgactaccctggccagggaatgtcccaaggccaattcccttggcagcaatgagaagaaatgcccttttccaaatagcgacttctgcaaaacccgctgttgtttgtgggtggttccagcttcctggggcctggaactttccctgagtccttcccacccaccacgcccagcaccccaacccttgctgagttcaccccgggaccaccccccatctcctaccagtctgacattcccagcagcctcctgacttcagagaagtctaccgcctgcctcccaagccagatggcaccagcaggtcacctggaccccactcacaatcctgggacaccaggactacacacctccaaccttggggcccctccaggtccccagctgcaccattcaaaccctccacaggcgtgatggggccccccagcatgtctggagccggggaggccccagaaccagctctggacctgctcccggaactgaccaaccctgatgagctactgtcctacttgggcccacccgacctccctacgaacaacaatgacgacctgctttctctgtttgagaacaactgatcctgtgtttaccccaagcccggcggggacacgctcacagatgtcaccacagccctgcccttcatgcccagccccatgggacacccggtggtctttcccaaacctcccccaaaacacacctggagccagagccttctgccgccagccctgcccctgaattggaagcagccctgtgctcgatgggaggggctcccaggccggcagcccttgccacctccctctgccaagcctgctgctgcagaacggtttttgctgaggtgcccctgcccagccctgtccagccttgtccacacacacatctcacgcccctggtctcacagcctcacaccttgtccttccacccctgcctgcccccacccagcctgcttcttgtccagcattgatccttctgtttcaacaactcctccactgggcagagctgggcatctggcagggctggctctgtcccctgggcctttggctccagtggcccctgtgcccagcagtccagctcttggaacctcgctgaatggcagcctcttgggggcctggagctctggcagcccagccgtgtgtggtgtcaggttcctctccccaccccagcttcaagcagaggcctcggggtgggggagctacaaagcacaacaatgtacatagtgtagaaacactaacagctgggagaggggagccagctgtccagccagcatgttcctgttgtacagcccggtctccctgcgcgctctgctccttcccatgtgcagacagatcagggaggaacctccaatgggtgggggacagtgagcttcggcctggccgaggtgggtgggtgggctctcagattcagctctgtgtaaagattctctagcgggctgcgctcccaagttccccttctctgtgaaagtgaagaattagtacagctgtgttttttaaagccacctctctgtctccaccccatgggcccacacccaggtgggggaggaggaagccactgcatctgttggctcagggccccagcctgtgcaagcagggcgcctgggctgttgtgtctcctgtctgtgccgatctctattaaaggactccctcttggtgggcctggccgagtccctcctttgtgctcccagggactattttctcctcgtaagccagcgacctgcctaaagcttgggctgtgcctgcaaagcttgtgcaggacctgggggccaggtcgaccttcaggtggcttttggggccccaggttgagctctggatgtttcaagccaaggctcggctattcccgccccatagtaaatttccttttccctggaattttccaagttggcttcagctgaagagctgttttgtgaagcatcccaggcttgcccaggagagacatttgcc

SEQ ID NO: 372694 - DNA, 2024 bp, Homo sapiens
  misc_feature (12)..(12): n is a, c, g, or t
aacgttaatagnggtggaacactaattgaaacacccctcgggtgttaacaacagcaggcggtacggcggaagttgggatgactgtccctggaccataatagaaactcattctagaagttcaacatgaaactcattctagaagttcaacatgaaaaagttaggaagaacagctccaagcagaaaatcctaggggcatggaattccaccaccagcattcaccttggggcatcacggtggggatccccacgcaggctgatgcacagagggagtgtggagtggctgcactccctcacatcccgtttcctggtggtattgaacagcatgttgccagctgttctggccccagagcaaccttgcagggaggtcccagggggtggcgtgtgcctctttgagcacatgcaggcctatggtggggccccgcacccggcctgtgtgtgaggaggggctgctcagcatccccactgtgcctggagacagggccgggatgtggtgacaggatggtcactcaggtgtggccagtcagtgaccaaagctgctaacagagttcactttgtcctcagctgctcccggaactgaccaaccctgatgagctactgtcctacttgggcccacccgacctccctacgaacaacaatgacgacctgctttctctgtttgagaacaactgatcctgtgtttaccccaagcccggcggggacacgctcacagatgtcaccacagccctgcccttcatgcccagccccatgggacacccggtggtctttcccaaacctcccccaaaacacacctggagccagagccttctgccgccagccctgcccctgaattggaagcagccctgtgctcgatgggaggggctcccaggccggcagcccttgccacctccctctgccaagcctgctgctgcagaacggtttttgctgaggtgcccctgcccagccctgtccagccttgtccacacacacatctcacgcccctggtctcacagcctcacaccttgtccttccacccctgcctgcccccacccagcctgcttcttgtccagcattgatccttctgtttcaacaactcctccactgggcagagctgggcatctggcagggctggctctgtcccctgggcctttggctccagtggcccctgtgcccagcagtccagctcttggaacctcgctgaatggcagcctcttgggggcctggagctctggcagcccagccgtgtgtggtgtcaggttcctctccccaccccagcttcaagcagaggcctcggggtgggggagctacaaagcacaacaatgtacatagtgtagaaacactaacagctgggagaggggagccagctgtccagccagcatgttcctgttgtacagcccggtctccctgcgcgctctgctccttcccatgtgcagacagatcagggaggaacctccaatgggtgggggacagtgagcttcggcctggccgaggtgggtgggtgggctctcagattcagctctgtgtaaagattctctagcgggctgcgctcccaagttccccttctctgtgaaagtgaagaattagtacagctgtgttttttaaagccacctctctgtctccaccccatgggcccacacccaggtgggggaggaggaagccactgcatctgttggctcagggccccagcctgtgcaagcagggcgcctgggctgttgtgtctcctgtctgtgccgatctctattaaaggactccctcttggtgggcctggccgagtccctcctttgtgctcccagggactattttctcctcgtaagccagcgacctgcctaaagcttgggctgtgcctgcaaagcttgtgcaggacctgggggccaggtcgaccttcaggtggcttttggggccccaggttgagctctggatgtttcaagccaaggctcggctattcccgccccatagtaaatttccttttccctggaattttccaagttggcttcagctgaagagctgttttgtgaagcatcccaggcttgcccaggagagacatttgcc

SEQ ID NO: 372695 - DNA, 2666 bp, Homo sapiens
agccagagcagctgagttccagataaaaactgtcagacccggcctgtaggctgctccattgccaatgaactccatgaaccccatgaaacctgccctgccccctgcgccacacggtgatggttcattcgcatatgagtctgtgccttggcaacaaagcgccactcagccggctggatcgctgtctgtggtcactactgtgtggggagttggcaacgcgacacagagccaggttttggggaaccccatgggccctgcagggagtccctctggcagctccatgatgcctggtgtggcagggggcagctccgccttgacctccccacagtgcctgggacagcaggcgtttgctgaaggcggcgccaacaagggctacgtgcagcaaggcgtgtacagccgcgggggctaccctggggcccccggcttcaccaccgggtatgcaggcggcccggggggcctgggcctcccctcacatgctgcaagaccctccactgacttcacgcaagcggcagctgctgcagctgtggctgctgcggcagccactgccaccgccacagccacagccaccgtggctgctctccaggagaagcagagccaggagctgagccagtatggagcgatgggggccggacagtcttttaacagccagtttctgcagcatggaggtccccgggggcctagtgtccccgctggcatgaaccctactggcataggaggggtaatgggcccctctggcctctcccccttggctatgaaccccacccgggcagcaggaatgacacccttgtatgcagggcagcgtctgccccaacatgggtatcctgggcctccccaggcccagccactgccccgacagggggtcaagagaacctactctgaggtgtatccagggcagcagtatctgcaaggaggccagtatgcacccagcaccgcccagtttgcgcccagccctgggcagccccctgccccctccccttcctaccctgggcacaggctgcccctgcagcagggcatgacccagtccctgtccgtgcctggccccacgggactgcattataagcccacagagcagttcaacgggcagggcgccagcttcaacgggggcagcgtcagctacagccaacctggcctgagtgggcctacccgttccatcccgggctatcccagttccccactgccagggaaccccacgccacccatgaccccaagcagcagcgtcccttacatgtcaccaaaccaagaggtcaagtctcccttcttgcctgatctcaagcccaacctcaactccttgcactcatcgccctctggaagcgggccttgtgacgagttgcggctgaccttccctgtgcgcgatggggtggtcctggagcccttccgcctgcagcacaacctggctgtaagcaaccatgtcttccagctgcgagactcagtctacaagaccctgataatgaggcctgacctggagctgcaattcaagtgctaccaccacgaggaccggcagatgaacaccaactggccagcctcggtgcaggtcagcgtcaatgccacgccgctcaccatcgagcgtggcgacaacaagacctcgcacaagccactctacctgaagcatgtgtgccagccaggccgcaacaccatccagatcaccgtcaccgcctgctgctgctcccacctcttcgtgctgcagctagtgcaccgcccatccgtccgctcggtgctgcagggcctcctcaaaaagcgcctcctgcctgctgagcactgcatcaccaagataaagcggaacttcagcagcggcaccatccctggcacccctgggcccaacggagaggacggggtggagcagacagctatcaaggtgtccctgaagtgccccatcaccttccgcaggatccagctccctgcccgaggtcatgactgtcgccacatacagtgctttgacctggagtcgtacctgcagctcaactgtgagcgggggacttggaggtgtcctgtgtgcaacaagacagctttgctggagggcctggaggtggaccagtacatgctgggcatcctgatttacattcagaactctgactatgaggagatcaccatcgaccccacgtgcagctggaagccagtgcccgtgaagcctgacatgcacatcaaggaggagccggatgggccagcactgaagcgctgccgcaccgtgagccccgcccacgtgctcatgcccagcgtgatggagatgatcgccgccctgggccccggcgctgccccctttgcccccctgcagcccccctcagtccctgcccccagcgactaccctggccagggtaagtacagcaggctagccttgaacctcagatgaccctgggcatatggctcctctccccagatcagtctcctcacctgcaagaatgtggctatgcaggtcacacacctaggttatcagtgttgccacacaaaacaatgacccggggcacctccagcccctcccatctcagggacgtggcggtgaaggcacagtctcagctatggtcccaggaaacagacagtggggctccacccttccttccccgtttggattaaggggctcctggctggaacacctcacaggactggccccatctggggccccctctgggacccacctcacacgcgtggtgtattccgcgctggtatttccgaagatc

SEQ ID NO: 372696 - DNA, 1764 bp, Homo sapiens
agccagagcagctgagttccagataaaaactgtcagacccggcctgtaggctgctccattgccaatgaactccatgaaccccatgaaacctgccctgccccctgcgccacacggtgatggttcattcgcatatgagtctgtgccttggcaacaaagcgccactcagccggctggatcgctgtctgtggtcactactgtgtggggagttggcaacgcgacacagagccaggttttggggaaccccatgggccctgcagggagtccctctggcagctccatgatgcctggtgtggcagggggcagctccgccttgacctccccacagtgcctgggacagcaggcgtttgctgaaggcggcgccaacaagggctacgtgcagcaaggcgtgtacagccgcgggggctaccctggggcccccggcttcaccaccgggtatgcaggcggcccggggggcctgggcctcccctcacatgctgcaagaccctccactgacttcacgcaagcggcagctgctgcagctgtggctgctgcggcagccactgccaccgccacagccacagccaccgtggctgctctccaggagaagcagagccaggagctgagccagtatggagcgatgggggccggacagtcttttaacagccagtttctgcagcatggaggtccccgggggcctagtgtccccgctggcatgaaccctactggcataggaggggtaatgggcccctctggcctctcccccttggctatgaaccccacccgggcagcaggaatgacacccttgtatgcagggcagcgtctgccccaacatgggtatcctgggcctccccaggcccagccactgccccgacagggggtcaagagaacctactctgaggtgtatccagggcagcagtatctgcaaggaggccagtatgcacccagcaccgcccagtttgcgcccagccctgggcagccccctgccccctccccttcctaccctgggcacaggctgcccctgcagcagggcatgacccagtccctgtccgtgcctggccccacgggactgcattataagcccacagagcagttcaacgggcagggcgccagcttcaacgggggcagcgtcagctacagccaacctggcctgagtggggtagggggcctggccgggaggatgggccgggaggctcacagggtgggcatatggagagagggcgaccgggcaggcacccctggggccgcctcctgtccacctctgttatcatggttcccagtgggtgcgccgtgaacagactccactcccatccaccctggcaatctgccttgactgtttgtgctcaaccctacagcctacccgttccatcccgggctatcccagttccccactgccagggaaccccacgccacccatgaccccaagcagcagcgtcccttacatgtcaccaaaccaagaggtcaagtctcccttcttgcctgatctcaagcccaacctcaactccttgcactcatcgccctctggtaagtctgtccactcttgggacagcggggtgacaaggccagggtgggcatgggggaatcacaggactccagagagtcctgtaggagcttgggggacaggggatggctgccatatccctaagaaaagggctgggtgtggtggctcacacttgtaatcccagcaccttcggaggctgagcacaagagttcaaggttaccgtgagtgtgatcttgccactgcacttcaacctgggtcccaaagcaagaccctgtcttaaaaaaaaa

SEQ ID NO: 372697 - DNA, 1389 bp, Homo sapiens
agccagagcagctgagttccagataaaaactgtcagacccggcctgtaggctgctccattgccaatgaactccatgaaccccatgaaacctgccctgccccctgcgccacacggtgatggttcattcgcatatgagtctgtgccttggcaacaaagcgccactcagccggctggatcgctgtctgtggtcactactgtgtggggagttggcaacgcgacacagagccaggttttggggaaccccatgggccctgcagggagtccctctggcagctccatgatgcctggtgtggcagggggcagctccgccttgacctccccacagtgcctgggacagcaggcgtttgctgaaggcggcgccaacaagggctacgtgcagcaaggcgtgtacagccgcgggggctaccctggggcccccggcttcaccaccgggtatgcaggcggcccggggggcctgggcctcccctcacatgctgcaagaccctccactgacttcacgcaagcggcagctgctgcagctgtggctgctgcggcagccactgccaccgccacagccacagccaccgtggctgctctccaggagaagcagagccaggagctgagccagtatggagcgatgggggccggacagtcttttaacagccagtttctgcagcatggaggtccccgggggcctagtgtccccgctggcatgaaccctactggcataggaggggtaatgggcccctctggcctctcccccttggctatgaaccccacccgggcagcaggaatgacacccttgtatgcagggcagcgtctgccccaacatgggtatcctgggcctccccaggcccagccactgccccgacagggggtcaagagaacctactctgaggtgtatccagggcagcagtatctgcaaggaggccagtatgcacccagcaccgcccagtttgcgcccagccctgggcagccccctgccccctccccttcctaccctgggcacaggctgcccctgcagcagggcatgacccagtccctgtccgtgcctggccccacgggactgcattataagcccacagagcagttcaacgggcagggcgccagcttcaacgggggcagcgtcagctacagccaacctggcctgagtggggtagggggcctggccgggaggatgggccgggaggctcacagggtgggcatatggagagagggcgaccgggcaggcacccctggggccgcctcctgtccacctctgttatcatggttcccagtgggtgcgccgtgaacagactccactcccatccaccctggcaatctgccttgactgtttgtgctcaaccctacagcctacccgtcttccacagcctacccgtcttccacagcctacccgtcttccacagccta

SEQ ID NO: 372698 - DNA, 399 bp, Homo sapiens
ccacccttccttccccgtttggattaaggggctcctggctggaacacctcacaggactggccccatctggggccccctctgggacccacctcacacgcgtggtgcgtttgtttgtggctgctcccattcctataacctccgagaccttcactcctaggaatgtcccaaggccaattcccttggcagcaatgagaagaaatgcccttttccaaatagcgacttctgcaaaacccgctgttgtttgtgggtgagcactgcaagtcccacccatgccacagccagcctccctcctggctcctctgccagcggtggccttccccagccctcacccaggccccgactctcctctcacaggttccagcttcctggggcctggaactttccctgagtccttcccac

SEQ ID NO: 372699 - DNA, 3892 bp, Homo sapiens
agccagagcagctgagttccagataaaaactgtcagacccggcctgtaggctgctccattgccaatgaactccatgaaccccatgaaacctgccctgccccctgcgccacacggtgatggttcattcgcatatgagtctgtgccttggcaacaaagcgccactcagccggctggatcgctgtctgtggtcactactgtgtggggagttggcaacgcgacacagagccaggttttggggaaccccatgggccctgcagggagtccctctggcagctccatgatgcctggtgtggcagggggcagctccgccttgacctccccacagtgcctgggacagcaggcgtttgctgaaggcggcgccaacaagggctacgtgcagcaaggcgtgtacagccgcgggggctaccctggggcccccggcttcaccaccgggtatgcaggcggcccggggggcctgggcctcccctcacatgctgcaagaccctccactgacttcacgcaagcggcagctgctgcagctgtggctgctgcggcagccactgccaccgccacagccacagccaccgtggctgctctccaggagaagcagagccaggagctgagccagtatggagcgatgggggccggacagtcttttaacagccagtttctgcagcatggaggtccccgggggcctagtgtccccgctggcatgaaccctactggcataggaggggtaatgggcccctctggcctctcccccttggctatgaaccccacccgggcagcaggaatgacacccttgtatgcagggcagcgtctgccccaacatgggtatcctgggcctccccaggcccagccactgccccgacagggggtcaagagaacctactctgaggtgtatccagggcagcagtatctgcaaggaggccagtatgcacccagcaccgcccagtttgcgcccagccctgggcagccccctgccccctccccttcctaccctgggcacaggctgcccctgcagcagggcatgacccagtccctgtccgtgcctggccccacgggactgcattataagcccacagagcagttcaacgggcagggcgccagcttcaacgggggcagcgtcagctacagccaacctggcctgagtgggcctacccgttccatcccgggctatcccagttccccactgccagggaaccccacgccacccatgaccccaagcagcagcgtcccttacatgtcaccaaaccaagaggtcaagtctcccttcttgcctgatctcaagcccaacctcaactccttgcactcatcgccctctggaagcgggccttgtgacgagttgcggctgaccttccctgtgcgcgatggggtggtcctggagcccttccgcctgcagcacaacctggctgtaagcaaccatgtcttccagctgcgagactcagtctacaagaccctgataatgaggcctgacctggagctgcaattcaagtgctaccaccacgaggaccggcagatgaacaccaactggccagcctcggtgcaggtcagcgtcaatgccacgccgctcaccatcgagcgtggcgacaacaagacctcgcacaagccactctacctgaagcatgtgtgccagccaggccgcaacaccatccagatcaccgtcaccgcctgctgctgctcccacctcttcgtgctgcagctagtgcaccgcccatccgtccgctcggtgctgcagggcctcctcaaaaagcgcctcctgcctgctgagcactgcatcaccaagataaagcggaacttcagcagcggcaccatccctggcacccctgggcccaacggagaggacggggtggagcagacagctatcaaggtgtccctgaagtgccccatcaccttccgcaggatccagctccctgcccgaggtcatgactgtcgccacatacagtgctttgacctggagtcgtacctgcagctcaactgtgagcgggggacttggaggtgtcctgtgtgcaacaagacagctttgctggagggcctggaggtggaccagtacatgctgggcatcctgatttacattcagaactctgactatgaggagatcaccatcgaccccacgtgcagctggaagccagtgcccgtgaagcctgacatgcacatcaaggaggagccggatgggccagcactgaagcgctgccgcaccgtgagccccgcccacgtgctcatgcccagcgtgatggagatgatcgccgccctgggccccggcgctgccccctttgcccccctgcagcccccctcagtccctgcccccagcgactaccctggccagggttccagcttcctggggcctggaactttccctgagtccttcccacccaccacgcccagcaccccaacccttgctgagttcaccccgggaccaccccccatctcctaccagtctgacattcccagcagcctcctgacttcagagaagtctaccgcctgcctcccaagccagatggcaccagcaggtcacctggaccccactcacaatcctgggacaccaggactacacacctccaaccttggggcccctccaggtccccagctgcaccattcaaaccctcccccagcgtcccggcagtccttgggccaagcgagcttaggacctacgggtgaactggccttcagtcctgccacaggcgtgatggggccccccagcatgtctggagccggggaggccccagaaccagctctggacctgctcccggaactgaccaaccctgatgagctactgtcctacttgggcccacccgacctccctacgaacaacaatgacgacctgctttctctgtttgagaacaactgatcctgtgtttaccccaagcccggcggggacacgctcacagatgtcaccacagccctgcccttcatgcccagccccatgggacacccggtggtctttcccaaacctcccccaaaacacacctggagccagagccttctgccgccagccctgcccctgaattggaagcagccctgtgctcgatgggaggggctcccaggccggcagcccttgccacctccctctgccaagcctgctgctgcagaacggtttttgctgaggtgcccctgcccagccctgtccagccttgtccacacacacatctcacgcccctggtctcacagcctcacaccttgtccttccacccctgcctgcccccacccagcctgcttcttgtccagcattgatccttctgtttcaacaactcctccactgggcagagctgggcatctggcagggctggctctgtcccctgggcctttggctccagtggcccctgtgcccagcagtccagctcttggaacctcgctgaatggcagcctcttgggggcctggagctctggcagcccagccgtgtgtggtgtcaggttcctctccccaccccagcttcaagcagaggcctcggggtgggggagctacaaagcacaacaatgtacatagtgtagaaacactaacagctgggagaggggagccagctgtccagccagcatgttcctgttgtacagcccggtctccctgcgcgctctgctccttcccatgtgcagacagatcagggaggaacctccaatgggtgggggacagtgagcttcggcctggccgaggtgggtgggtgggctctcagattcagctctgtgtaaagattctctagcgggctgcgctcccaagttccccttctctgtgaaagtgaagaattagtacagctgtgttttttaaagccacctctctgtctccaccccatgggcccacacccaggtgggggaggaggaagccactgcatctgttggctcagggccccagcctgtgcaagcagggcgcctgggctgttgtgtctcctgtctgtgccgatctctattaaaggactccctcttg

SEQ ID NO: 372700 - DNA, 3546 bp, Homo sapiens
tgtggcattctgaccagtgcaggagcagctcctggggtttgggatccagttccgaaaggaccctctacaagattcatatatctcaggggtatcctgtgcagggagcagcaggtgggtacccaaaacatttgaatgttctttatggaaaagtgtcattccttctacttgctgcagagaaatccattgagaggacaggccctcgctgctggccatgtaccctttctgggtgcatgggcagagctaacctccctgggagcctgggtgcgccgggtggtgcagcttgggggaggagaggaggagggcttagcgtgcttttgtcttttcagcccctccaacctgtttgatcattttcctctgtggctatgattgctttaagtagtgttacttgtagattatttggaaaatacaagagagtgtaaagaagaccgtgtatggtgggcttctagggtcaggtccagggggcccggcaggggtcaggttggagccccaggtgcatgcagttttctctcccgcagcccacagagcagttcaacgggcagggcgccagcttcaacgggggcagcgtcagctacagccaacctggcctgagtggggtagggggcctggccgggaggatgggccgggaggctcacagggtgggcatatggagagagggcgaccgggcaggcacccctggggccgcctcctgtccacctctgttatcatggttcccagtgggtgcgccgtgaacagactccactcccatccaccctggcaatctgccttgactgtttgtgctcaaccctacagcctacccgttccatcccgggctatcccagttccccactgccagggaaccccacgccacccatgaccccaagcagcagcgtcccttacatgtcaccaaaccaagaggtcaagtctcccttcttgcctgatctcaagcccaacctcaactccttgcactcatcgccctctggaagcgggccttgtgacgagttgcggctgaccttccctgtgcgcgatggggtggtcctggagcccttccgcctgcagcacaacctggctgtaagcaaccatgtcttccagctgcgagactcagtctacaagaccctgataatgaggcctgacctggagctgcaattcaagtgctaccaccacgaggaccggcagatgaacaccaactggccagcctcggtgcaggtcagcgtcaatgccacgccgctcaccatcgagcgtggcgacaacaagacctcgcacaagccactctacctgaagcatgtgtgccagccaggccgcaacaccatccagatcaccgtcaccgcctgctgctgctcccacctcttcgtgctgcagctagtgcaccgcccatccgtccgctcggtgctgcagggcctcctcaaaaagcgcctcctgcctgctgagcactgcatcaccaagataaagcggaacttcagcagcggcaccatccctggcacccctgggcccaacggagaggacggggtggagcagacagctatcaaggtgtccctgaagtgccccatcaccttccgcaggatccagctccctgcccgaggtcatgactgtcgccacatacagtgctttgacctggagtcgtacctgcagctcaactgtgagcgggggacttggaggtgtcctgtgtgcaacaagacagctttgctggagggcctggaggtggaccagtacatgctgggcatcctgatttacattcagaactctgactatgaggagatcaccatcgaccccacgtgcagctggaagccagtgcccgtgaagcctgacatgcacatcaaggaggagccggatgggccagcactgaagcgctgccgcaccgtgagccccgcccacgtgctcatgcccagcgtgatggagatgatcgccgccctgggccccggcgctgccccctttgcccccctgcagcccccctcagtccctgcccccagcgactaccctggccagggttccagcttcctggggcctggaactttccctgagtccttcccacccaccacgcccagcaccccaacccttgctgagttcaccccgggaccaccccccatctcctaccagtctgacattcccagcagcctcctgacttcagagaagtctaccgcctgcctcccaagccagatggcaccagcaggtcacctggaccccactcacaatcctgggacaccaggactacacacctccaaccttggggcccctccaggtccccagctgcaccattcaaaccctcccccagcgtcccggcagtccttgggccaagcgagcttaggacctacgggtgaactggccttcagtcctgccacaggcgtgatggggccccccagcatgtctggagccggggaggccccagaaccagctctggacctgctcccggaactgaccaaccctgatgagctactgtcctacttgggcccacccgacctccctacgaacaacaatgacgacctgctttctctgtttgagaacaactgatcctgtgtttaccccaagcccggcggggacacgctcacagatgtcaccacagccctgcccttcatgcccagccccatgggacacccggtggtctttcccaaacctcccccaaaacacacctggagccagagccttctgccgccagccctgcccctgaattggaagcagccctgtgctcgatgggaggggctcccaggccggcagcccttgccacctccctctgccaagcctgctgctgcagaacggtttttgctgaggtgcccctgcccagccctgtccagccttgtccacacacacatctcacgcccctggtctcacagcctcacaccttgtccttccacccctgcctgcccccacccagcctgcttcttgtccagcattgatccttctgtttcaacaactcctccactgggcagagctgggcatctggcagggctggctctgtcccctgggcctttggctccagtggcccctgtgcccagcagtccagctcttggaacctcgctgaatggcagcctcttgggggcctggagctctggcagcccagccgtgtgtggtgtcaggttcctctccccaccccagcttcaagcagaggcctcggggtgggggagctacaaagcacaacaatgtacatagtgtagaaacactaacagctgggagaggggagccagctgtccagccagcatgttcctgttgtacagcccggtctccctgcgcgctctgctccttcccatgtgcagacagatcagggaggaacctccaatgggtgggggacagtgagcttcggcctggccgaggtgggtgggtgggctctcagattcagctctgtgtaaagattctctagcgggctgcgctcccaagttccccttctctgtgaaagtgaagaattagtacagctgtgttttttaaagccacctctctgtctccaccccatgggcccacacccaggtgggggaggaggaagccactgcatctgttggctcagggccccagcctgtgcaagcagggcgcctgggctgttgtgtctcctgtctgtgccgatctctattaaaggactccctcttg

SEQ ID NO: 372701 - DNA, 4499 bp, Homo sapiens
agccagagcagctgagttccagataaaaactgtcagacccggcctgtaggctgctccattgccaatgaactccatgaaccccatgaaacctgccctgccccctgcgccacacggtgatggttcattcgcatatgagtctgtgccttggcaacaaagcgccactcagccggctggatcgctgtctgtggtcactactgtgtggggagttggcaacgcgacacagagccaggttttggggaaccccatgggccctgcagggagtccctctggcagctccatgatgcctggtgtggcagggggcagctccgccttgacctccccacagtgcctgggacagcaggcgtttgctgaaggcggcgccaacaagggctacgtgcagcaaggcgtgtacagccgcgggggctaccctggggcccccggcttcaccaccgggtatgcaggcggcccggggggcctgggcctcccctcacatgctgcaagaccctccactgacttcacgcaagcggcagctgctgcagctgtggctgctgcggcagccactgccaccgccacagccacagccaccgtggctgctctccaggagaagcagagccaggagctgagccagtatggagcgatgggggccggacagtcttttaacagccagtttctgcagcatggaggtccccgggggcctagtgtccccgctggcatgaaccctactggcataggaggggtaatgggcccctctggcctctcccccttggctatgaaccccacccgggcagcaggaatgacacccttgtatgcagggcagcgtctgccccaacatgggtatcctgggcctccccaggcccagccactgccccgacagggggtcaagagaacctactctgaggtgtatccagggcagcagtatctgcaaggaggccagtatgcacccagcaccgcccagtttgcgcccagccctgggcagccccctgccccctccccttcctaccctgggcacaggctgcccctgcagcagggcatgacccagtccctgtccgtgcctggccccacgggactgcattataaggcctacccgttccatcccgggctatcccagttccccactgccagggaaccccacgccacccatgaccccaagcagcagcgtcccttacatgtcaccaaaccaagaggtcaagtctcccttcttgcctgatctcaagcccaacctcaactccttgcactcatcgccctctggaagcgggccttgtgacgagttgcggctgaccttccctgtgcgcgatggggtggtcctggagcccttccgcctgcagcacaacctggctgtaagcaaccatgtcttccagctgcgagactcagtctacaagaccctgataatgaggcctgacctggagctgcaattcaagtgctaccaccacgaggaccggcagatgaacaccaactggccagcctcggtgcaggtcagcgtcaatgccacgccgctcaccatcgagcgtggcgacaacaagacctcgcacaagccactctacctgaagcatgtgtgccagccaggccgcaacaccatccagatcaccgtcaccgcctgctgctgctcccacctcttcgtgctgcagctagtgcaccgcccatccgtccgctcggtgctgcagggcctcctcaaaaagcgcctcctgcctgctgagcactgcatcaccaagataaagcggaacttcagcagcggcaccatccctggcacccctgggcccaacggagaggacggggtggagcagacagctatcaaggtgtccctgaagtgccccatcaccttccgcaggatccagctccctgcccgaggtcatgactgtcgccacatacagtgctttgacctggagtcgtacctgcagctcaactgtgagcgggggacttggaggtgtcctgtgtgcaacaagacagctttgctggagggcctggaggtggaccagtacatgctgggcatcctgatttacattcagaactctgactatgaggagatcaccatcgaccccacgtgcagctggaagccagtgcccgtgaagcctgacatgcacatcaaggaggagccggatgggccagcactgaagcgctgccgcaccgtgagccccgcccacgtgctcatgcccagcgtgatggagatgatcgccgccctgggccccggcgctgccccctttgcccccctgcagcccccctcagtccctgcccccagcgactaccctggccagggttccagcttcctggggcctggaactttccctgagtccttcccacccaccacgcccagcaccccaacccttgctgagttcaccccgggaccaccccccatctcctaccagtctgacattcccagcagcctcctgacttcagagaagtctaccgcctgcctcccaagccagatggcaccagcaggtcacctggaccccactcacaatcctgggacaccaggactacacacctccaaccttggggcccctccaggtccccagctgcaccattcaaaccctcccccagcgtcccggcagtccttgggccaagcgagcttaggacctacgggtgaactggccttcagtcctgccacaggcgtgatggggccccccagcatgtctggagccggggaggccccagaaccagctctggacctgctcccggaactgaccaaccctgatgagctactgtcctacttgggcccacccgacctccctacgaacaacaatgacgacctgctttctctgtttgagaacaactgatcctgtgtttaccccaagcccggcggggacacgctcacagatgtcaccacagccctgcccttcatgcccagccccatgggacacccggtggtctttcccaaacctcccccaaaacacacctggagccagagccttctgccgccagccctgcccctgaattggaagcagccctgtgctcgatgggaggggctcccaggccggcagcccttgccacctccctctgccaagcctgctgctgcagaacggtttttgctgaggtgcccctgcccagccctgtccagccttgtccacacacacatctcacgcccctggtctcacagcctcacaccttgtccttccacccctgcctgcccccacccagcctgcttcttgtccagcattgatccttctgtttcaacaactcctccactgggcagagctgggcatctggcagggctggctctgtcccctgggcctttggctccagtggcccctgtgcccagcagtccagctcttggaacctcgctgaatggcagcctcttgggggcctggagctctggcagcccagccgtgtgtggtgtcaggttcctctccccaccccagcttcaagcagaggcctcggggtgggggagctacaaagcacaacaatgtacatagtgtagaaacactaacagctgggagaggggagccagctgtccagccagcatgttcctgttgtacagcccggtctccctgcgcgctctgctccttcccatgtgcagacagatcagggaggaacctccaatgggtgggggacagtgagcttcggcctggccgaggtgggtgggtgggctctcagattcagctctgtgtaaagattctctagcgggctgcgctcccaagttccccttctctgtgaaagtgaagaattagtacagctgtgttttttaaagccacctctctgtctccaccccatgggcccacacccaggtgggggaggaggaagccactgcatctgttggctcagggccccagcctgtgcaagcagggcgcctgggctgttgtgtctcctgtctgtgccgatctctattaaaggactccctcttgaaaaaaaaaaaaaaaaacaacaaacaaggagggcgggcgagccacctaggaaagaaccacccacgaggagcggaccacaaggctagcgcgcggacaccgcgagttaacaggagtagccacagaggggggccccacataagggagcagcgcgacgtatagaacggcgcagaagacagagagtgcgccgtaactgattctgtgcacaattgttgtttgttatgcgtgtggggcaacagcggtgccaatcactggggggggcatctctttcagtgcgtcagacagataacacgcctagtaaaagaattctgtgaaggagtgagacacccatattatgggagaaccaaaaatactagcacgtaagaggacgacaacttatgtgagacccgagtttctatctggagggtgaaaaccatagttcgaggaagtctgtaagacacagtgtcgcaatcaatgcatgggtgaggtgaaaaagacgttatcggagtcgggcacccgagtaccgggctagccgcgctggcgacggaaaccacgaattgagccgacgtacacagagagcgacacgcagccgcaaatatggcaacgcgcacgagcgccgctccgcacacaccacctatccgagcaccacaaacacactatatctcccaaacccgacgaaggcacacactctaacagcccccaacacag

SEQ ID NO: 372702 - DNA, 2952 bp, Homo sapiens
agaagtgtatggttcccaactgtactaagtaggtgagaagctgaagtcctcaagtgttcatcttccaacttttcccagtctgtggtctgtctttggatcagcaataattgcctgaacagctactatggcttcgttgatttttgtctgtagctctctgagctcctctatgtgcagcaaccgcagaatttgagcagcttcattaagaactgcatctcctgtgtcaaaaccaagaatatgtttgtctaaagcaacaggtaagccctcttttgtttgatttgccttagcaactgcatcctgtgtcaggcgctcctgaaccaaaatccgaattgccttaagcattaccaggtaatcatcatgacactctacctgaagcatgtgtgccagccaggccgcaacaccatccagatcaccgtcaccgcctgctgctgctcccacctcttcgtgctgcagctagtgcaccgcccatccgtccgctcggtgctgcagggcctcctcaaaaagcgcctcctgcctgctgagcactgcatcaccaagataaagcggaacttcagcagcggcaccatccctggcacccctgggcccaacggagaggacggggtggagcagacagctatcaaggtgtccctgaagtgccccatcaccttccgcaggatccagctccctgcccgaggtcatgactgtcgccacatacagtgctttgacctggagtcgtacctgcagctcaactgtgagcgggggacttggaggtgtcctgtgtgcaacaagacagctttgctggagggcctggaggtggaccagtacatgctgggcatcctgatttacattcagaactctgactatgaggagatcaccatcgaccccacgtgcagctggaagccagtgcccgtgaagcctgacatgcacatcaaggaggagccggatgggccagcactgaagcgctgccgcaccgtgagccccgcccacgtgctcatgcccagcgtgatggagatgatcgccgccctgggccccggcgctgccccctttgcccccctgcagcccccctcagtccctgcccccagcgactaccctggccagggttccagcttcctggggcctggaactttccctgagtccttcccacccaccacgcccagcaccccaacccttgctgagttcaccccgggaccaccccccatctcctaccagtctgacattcccagcagcctcctgacttcagagaagtctaccgcctgcctcccaagccagatggcaccagcaggtcacctggaccccactcacaatcctgggacaccaggactacacacctccaaccttggggcccctccaggtccccagctgcaccattcaaaccctcccccagcgtcccggcagtccttgggccaagcgagcttaggacctacgggtgaactggccttcagtcctgccacaggcgtgatggggccccccagcatgtctggagccggggaggccccagaaccagctctggacctgctcccggaactgaccaaccctgatgagctactgtcctacttgggcccacccgacctccctacgaacaacaatgacgacctgctttctctgtttgagaacaactgatcctgtgtttaccccaagcccggcggggacacgctcacagatgtcaccacagccctgcccttcatgcccagccccatgggacacccggtggtctttcccaaacctcccccaaaacacacctggagccagagccttctgccgccagccctgcccctgaattggaagcagccctgtgctcgatgggaggggctcccaggccggcagcccttgccacctccctctgccaagcctgctgctgcagaacggtttttgctgaggtgcccctgcccagccctgtccagccttgtccacacacacatctcacgcccctggtctcacagcctcacaccttgtccttccacccctgcctgcccccacccagcctgcttcttgtccagcattgatccttctgtttcaacaactcctccactgggcagagctgggcatctggcagggctggctctgtcccctgggcctttggctccagtggcccctgtgcccagcagtccagctcttggaacctcgctgaatggcagcctcttgggggcctggagctctggcagcccagccgtgtgtggtgtcaggttcctctccccaccccagcttcaagcagaggcctcggggtgggggagctacaaagcacaacaatgtacatagtgtagaaacactaacagctgggagaggggagccagctgtccagccagcatgttcctgttgtacagcccggtctccctgcgcgctctgctccttcccatgtgcagacagatcagggaggaacctccaatgggtgggggacagtgagcttcggcctggccgaggtgggtgggtgggctctcagattcagctctgtgtaaagattctctagcgggctgcgctcccaagttccccttctctgtgaaagtgaagaattagtacagctgtgttttttaaagccacctctctgtctccaccccatgggcccacacccaggtgggggaggaggaagccactgcatctgttggctcagggccccagcctgtgcaagcagggcgcctgggctgttgtgtctcctgtctgtgccgatctctattaaaggactccctcttggtgggcctggccgagtccctcctttgtgctcccagggactattttctcctcgtaagccagcgacctgcctaaagcttgggctgtgcctgcaaagcttgtgcaggacctgggggccaggtcgaccttcaggtggcttttggggccccaggttgagctctggatgtttcaagccaaggctcggctattcccgccccatagtaaatttccttttccctggaattttccaagttggcttcagctgaagagctgttttgtgaagcatcccaggcttgcccaggagagacatttgcc

SEQ ID NO: 372703 - DNA, 3880 bp, Homo sapiens
agccagagcagctgagttccagataaaaactgtcagacccggcctgtaggctgctccattgccaatgaactccatgaaccccatgaaacctgccctgccccctgcgccacacggtgatggttcattcgcatatgagtctgtgccttggcaacaaagcgccactcagccggctggatcgctgtctgtggtcactactgtgtggggagttggcaacgcgacacagagccaggttttggggaaccccatgggccctgcagggagtccctctggcagctccatgatgcctggtgtggcagggggcagctccgccttgacctccccacagtgcctgggacagcaggcgtttgctgaaggcggcgccaacaagggctacgtgcagcaaggcgtgtacagccgcgggggctaccctggggcccccggcttcaccaccgggtatgcaggcggcccggggggcctgggcctcccctcacatgctgcaagaccctccactgacttcacgcaagcggcagctgctgcagctgtggctgctgcggcagccactgccaccgccacagccacagccaccgtggctgctctccaggagaagcagagccaggagctgagccagtatggagcgatgggggccggacagtcttttaacagccagtttctgcagcatggaggtccccgggggcctagtgtccccgctggcatgaaccctactggcataggaggggtaatgggcccctctggcctctcccccttggctatgaaccccacccgggcagcaggaatgacacccttgtatgcagggcagcgtctgccccaacatgggtatcctgggcctccccaggcccagccactgccccgacagggggtcaagagaacctactctgaggtgtatccagggcagcagtatctgcaaggaggccagtatgcacccagcaccgcccagtttgcgcccagccctgggcagccccctgccccctccccttcctaccctgggcacaggctgcccctgcagcagggcatgacccagtccctgtccgtgcctggccccacgggactgcattataagcccacagagcagttcaacgggcagggcgccagcttcaacgggggcagcgtcagctacagccaacctggcctgagtgggcctacccgttccatcccgggctatcccagttccccactgccagggaaccccacgccacccatgaccccaagcagcagcgtcccttacatgtcaccaaaccaagaggtcaagtctcccttcttgcctgatctcaagcccaacctcaactccttgcactcatcgccctctggaagcgggccttgtgacgagttgcggctgaccttccctgtgcgcgatggggtggtcctggagcccttccgcctgcagcacaacctggctgtaagcaaccatgtcttccagctgcgagactcagtctacaagaccctgataatgaggcctgacctggagctgcaattcaagtgctaccaccacgaggaccggcagatgaacaccaactggccagcctcggtgcaggtcagcgtcaatgccacgccgctcaccatcgagcgtggcgacaacaagacctcgcacaagccactctacctgaagcatgtgtgccagccaggccgcaacaccatccagatcaccgtcaccgcctgctgctgctcccacctcttcgtgctgcagctagtgcaccgcccatccgtccgctcggtgctgcagggcctcctcaaaaagcgcctcctgcctgctgagcactgcatcaccaagataaagcggaacttcagcagcggcaccatccctggcacccctgggcccaacggagaggacggggtggagcagacagctatcaaggtgtccctgaagtgccccatcaccttccgcaggatccagctccctgcccgaggtcatgactgtcgccacatacagtgctttgacctggagtcgtacctgcagctcaactgtgagcgggggacttggaggtgtcctgtgtgcaacaagacagctttgctggagggcctggaggtggaccagtacatgctgggcatcctgatttacattcagaactctgactatgaggagatcaccatcgaccccacgtgcagctggaagccagtgcccgtgaagcctgacatgcacatcaaggaggagccggatgggccagcactgaagcgctgccgcaccgtgagccccgcccacgtgctcatgcccagcgtgatggagatgatcgccgccctgggccccggcgctgccccctttgcccccctgcagcccccctcagtccctcccccagcgtcccggcagtccttgggccaagcgagcttaggacctacgggtgaactggccttcagtcctgccacaggcgtgatggggccccccagcatgtctggagccggggaggccccagaaccagctctggacctgctcccggaactgaccaaccctgatgagctactgtcctacttgggcccacccgacctccctacgaacaacaatgacgacctgctttctctgtttgagaacaactgatcctgtgtttaccccaagcccggcggggacacgctcacagatgtcaccacagccctgcccttcatgcccagccccatgggacacccggtggtctttcccaaacctcccccaaaacacacctggagccagagccttctgccgccagccctgcccctgaattggaagcagccctgtgctcgatgggaggggctcccaggccggcagcccttgccacctccctctgccaagcctgctgctgcagaacggtttttgctgaggtgcccctgcccagccctgtccagccttgtccacacacacatctcacgcccctggtctcacagcctcacaccttgtccttccacccctgcctgcccccacccagcctgcttcttgtccagcattgatccttctgtttcaacaactcctccactgggcagagctgggcatctggcagggctggctctgtcccctgggcctttggctccagtggcccctgtgcccagcagtccagctcttggaacctcgctgaatggcagcctcttgggggcctggagctctggcagcccagccgtgtgtggtgtcaggttcctctccccaccccagcttcaagcagaggcctcggggtgggggagctacaaagcacaacaatgtacatagtgtagaaacactaacagctgggagaggggagccagctgtccagccagcatgttcctgttgtacagcccggtctccctgcgcgctctgctccttcccatgtgcagacagatcagggaggaacctccaatgggtgggggacagtgagcttcggcctggccgaggtgggtgggtgggctctcagattcagctctgtgtaaagattctctagcgggctgcgctcccaagttccccttctctgtgaaagtgaagaattagtacagctgtgttttttaaagccacctctctgtctccaccccatgggcccacacccaggtgggggaggaggaagccactgcatctgttggctcagggccccagcctgtgcaagcagggcgcctgggctgttgtgtctcctgtctgtgccgatctctattaaaggactccctcttggtgggcctggccgagtccctcctttgtgctcccagggactattttctcctcgtaagccagcgacctgcctaaagcttgggctgtgcctgcaaagcttgtgcaggacctgggggccaggtcgaccttcaggtggcttttggggccccaggttgagctctggatgtttcaagccaaggctcggctattcccgccccatagtaaatttccttttccctggaattttccaagttggcttcagctgaagagctgttttgtgaagcatcccaggcttgcccaggagagacatttgcc

SEQ ID NO: 372704 - DNA, 3566 bp, Homo sapiens
agccagagcagctgagttccagataaaaactgtcagacccggcctgtaggctgctccattgccaatgaactccatgaaccccatgaaacctgccctgccccctgcgccacacggtgatggttcattcgcatatgagtctgtgccttggcaacaaagcgccactcagccggctggatcgctgtctgtggtcactactgtgtggggagttggcaacgcgacacagagccaggttttggggaaccccatgggccctgcagggagtccctctggcagctccatgatgcctggtgtggcagggggcagctccgccttgacctccccacagtgcctgggacagcaggcgtttgctgaaggcggcgccaacaagggctacgtgcagcaaggcgtgtacagccgcgggggctaccctggggcccccggcttcaccaccgggtatgcaggcggcccggggggcctgggcctcccctcacatgctgcaagaccctccactgacttcacgcaagcggcagctgctgcagctgtggctgctgcggcagccactgccaccgccacagccacagccaccgtggctgctctccaggagaagcagagccaggagctgagccagtatggagcgatgggggccggacagtcttttaacagccagtttctgcagcatggaggtccccgggggcctagtgtccccgctggcatgaaccctactggcataggaggggtaatgggcccctctggcctctcccccttggctatgaaccccacccgggcagcaggaatgacacccttgtatgcagggcagcgtctgccccaacatgggtatcctgggcctccccaggcccagccactgccccgacagggggtcaagagaacctactctgaggtgtatccagggcagcagtatctgcaaggaggccagtatgcacccagcaccgcccagtttgcgcccagccctgggcagccccctgccccctccccttcctaccctgggcacaggctgcccctgcagcagggcatgacccagtccctgtccgtgcctggccccacgggactgcattataagcccacagagcagttcaacgggcagggcgccagcttcaacgggggcagcgtcagctacagccaacctggcctgagtgggcctacccgttccatcccgggctatcccagttccccactgccagggaaccccacgccacccatgaccccaagcagcagcgtcccttacatgtcaccaaaccaagaggtcaagtctcccttcttgcctgatctcaagcccaacctcaactccttgcactcatcgccctctggaagcgggccttgtgacgagttgcggctgaccttccctgtgcgcgatggggtggtcctggagcccttccgcctgcagcacaacctggctgtaagcaaccatgtcttccagctgcgagactcagtctacaagaccctgataatgaggcctgacctggagctgcaattcaagtgctaccaccacgaggaccggcagatgaacaccaactggccagcctcggtgcaggtcagcgtcaatgccacgccgctcaccatcgagcgtggcgacaacaagacctcgcacaagccactctacctgaagcatgtgtgccagccaggccgcaacaccatccagatcaccgtcaccgcctgctgctgctcccacctcttcgtgctgcagctagtgcaccgcccatccgtccgctcggtgctgcagggcctcctcaaaaagcgcctcctgcctgctgagcactgcatcaccaagataaagcggaacttcagcagcggcaccatccctggcacccctgggcccaacggagaggacggggtggagcagacagctatcaaggtgtccctgaagtgccccatcaccttccgcaggatccagctccctgcccgaggtcatgactgtcgccacatacagtgctttgacctggagtcgtacctgcagctcaactgtgagcgggggacttggaggtgtcctgtgtgcaacaagacagctttgctggagggcctggaggtggaccagtacatgctgggcatcctgatttacattcagaactctgactatgaggagatcaccatcgaccccacgtgcagctggaagccagtgcccgtgaagcctgacatgcacatcaaggaggagccggatgggccagcactgaagcgctgccgcaccgtgagccccgcccacgtgctcatgcccagcgtgatggagatgatcgccgccctgggccccggcgctgccccctttgcccccctgcagcccccctcagtccctgcccccagcgactaccctggccagggttccagcttcctggggcctggaactttccctgagtccttcccacccaccacgcccagcaccccaacccttgctgagttcaccccgggaccaccccccatctcctaccagtctgacattcccagcagcctcctgacttcagagaagtctaccgcctgcctcccaagccagatggcaccagcaggtcacctggaccccactcacaatcctgggacaccaggactacacacctccaaccttggggcccctccaggtccccagctgcaccattcaaaccctcccccagcgtcccggcagtccttgggccaagcgagcttaggacctacgggtgaactggccttcagtcctgccacaggcgtgatggggccccccagcatgtctggagccggggaggccccagaaccagctctggacctgctcccggaactgaccaaccctgatgagctactgtcctacttgggcccacccgacctccctacgaacaacaatgacgacctgctttctctgtttgagaacaactgatcctgtgtttaccccaagcccggcggggacacgctcacagatgtcaccacagccctgcccttcatgcccagccccatgggacacccggtggtctttcccaaacctcccccaaaacacacctggagccagagccttctgccgccagccctgcccctgaattggaagcagccctgtgctcgatgggaggggctcccaggccggcagcccttgccacctccctctgccaagcctgctgctgcagaacggtttttgctgaggtgcccctgcccagccctgtccagccttgtccacacacacatctcacgcccctggtctcacagcctcacaccttgtccttccacccctgcctgcccccacccagcctgcttcttgtccagcattgatccttctgtttcaacaactcctccactgggcagagctgggcatctggcagggctggctctgtcccctgggcctttggctccagtggcccctgtgcccagcagtccagctcttggaacctcgctgaatggcagcctcttgggggcctggagctctggcagcccagccgtgtgtggtgtcaggttcctctccccaccccagcttcaagcagaggcctcggggtgggggagctacaaagcacaacaatgtacatagtgtagaaacactaacagctgggagaggggagccagctgtccagccagcatgttcctgttgtgtctcctgtctgtgccgatctctattaaaggactccctcttg

SEQ ID NO: 372705 - DNA, 2610 bp, Homo sapiens
agccagagcagctgagttccagataaaaactgtcagacccggcctgtaggctgctccattgccaatgaactccatgaaccccatgaaacctgccctgccccctgcgccacacggtgatggttcattcgcatatgagtctgtgccttggcaacaaagcgccactcagccggctggatcgctgtctgtggtcactactgtgtggggagttggcaacgcgacacagagccaggttttggggaaccccatgggccctgcagggagtccctctggcagctccatgatgcctggtgtggcagggggcagctccgccttgacctccccacagtgcctgggacagcaggcgtttgctgaaggcggcgccaacaagggctacgtgcagcaaggcgtgtacagccgcgggggctaccctggggcccccggcttcaccaccgggtatgcaggcggcccggggggcctgggcctcccctcacatgctgcaagaccctccactgacttcacgcaagcggcagctgctgcagctgtggctgctgcggcagccactgccaccgccacagccacagccaccgtggctgctctccaggagaagcagagccaggagctgagccagtatggagcgatgggggccggacagtcttttaacagccagtttctgcagcatggaggtccccgggggcctagtgtccccgctggcatgaaccctactggcataggaggggtaatgggcccctctggcctctcccccttggctatgaaccccacccgggcagcaggaatgacacccttgtatgcagggcagcgtctgccccaacatgggtatcctgggcctccccaggcccagccactgccccgacagggggtcaagagaacctactctgaggtgtatccagggcagcagtatctgcaaggaggccagtatgcacccagcaccgcccagtttgcgcccagccctgggcagccccctgccccctccccttcctaccctgggcacaggctgcccctgcagcagggcatgacccagtccctgtccgtgcctggccccacgggactgcattataagcccacagagcagttcaacgggcagggcgccagcttcaacgggggcagcgtcagctacagccaacctggcctgagtgggcctacccgttccatcccgggctatcccagttccccactgccagggaaccccacgccacccatgaccccaagcagcagcgtcccttacatgtcaccaaaccaagaggtcaagtctcccttcttgcctgatctcaagcccaacctcaactccttgcactcatcgccctctggaagcgggccttgtgacgagttgcggctgaccttccctgtgcgcgatggggtggtcctggagcccttccgcctgcagcacaacctggctgtaagcaaccatgtcttccagctgcgagactcagtctacaagaccctgataatgaggcctgacctggagctgcaattcaagtgctaccaccacgaggaccggcagatgaacaccaactggccagcctcggtgcaggtcagcgtcaatgccacgccgctcaccatcgagcgtggcgacaacaagacctcgcacaagccactctacctgaagcatgtgtgccagccaggccgcaacaccatccagatcaccgtcaccgcctgctgctgctcccacctcttcgtgctgcagctagtgcaccgcccatccgtccgctcggtgctgcagggcctcctcaaaaagcgcctcctgcctgctgagcactgcatcaccaagataaagcggaacttcagcagcggcaccatccctggcacccctgggcccaacggagaggacggggtggagcagacagctatcaaggtgtccctgaagtgccccatcaccttccgcaggatccagctccctgcccgaggtcatgactgtcgccacatacagtgctttgacctggagtcgtacctgcagctcaactgtgagcgggggacttggaggtgtcctgtgtgcaacaagacagctttgctggagggcctggaggtggaccagtacatgctgggcatcctgatttacattcagaactctgactatgaggagatcaccatcgaccccacgtgcagctggaagccagtgcccgtgaagcctgacatgcacatcaaggaggagccggatgggccagcactgaagcgctgccgcaccgtgagccccgcccacgtgctcatgcccagcgtgatggagatgatcgccgccctgggccccggcgctggtttttggatcagctagtacggaccacgtttgtagcatggcacagtcgtgggatagcggcggtgaaactttttgcgcacccatcgcaggggagtacgtcgtagacggcgtgacggccgggttctcatcagatgcatcaagttgaccccacgcatagttgacttggatagattgattcggcgtcgctcctttagagaccacaagagaagacgttggcttaaaaatattgtccttcaagacattaaagaacaggaagaggagggagaaagtgatagcgaagcagcaacgcaggagacgtcaaagagagaaataactcagagagagacagtagaagtacaggtagacaggcgacgacaacgcgcaga

SEQ ID NO: 372706 - DNA, 1811 bp, Homo sapiens
agccagagcagctgagttccagataaaaactgtcagacccggcctgtaggctgctccattgccaatgaactccatgaaccccatgaaacctgccctgccccctgcgccacacggtgatggttcattcgcatatgagtctgtgccttggcaacaaagcgccactcagccggctggatcgctgtctgtggtcactactgtgtggggagttggcaacgcgacacagagccaggttttggggaaccccatgggccctgcagggagtccctctggcagctccatgatgcctggtgtggcagggggcagctccgccttgacctccccacagtgcctgggacagcaggcgtttgctgaaggcggcgccaacaagggctacgtgcagcaaggcgtgtacagccgcgggggctaccctggggcccccggcttcaccaccgggtatgcaggcggcccggggggcctgggcctcccctcacatgctgcaagaccctccactgacttcacgcaagcggcagctgctgcagctgtggctgctgcggcagccactgccaccgccacagccacagccaccgtggctgctctccaggagaagcagagccaggagctgagccagtatggagcgatgggggccggacagtcttttaacagccagtttctgcagcatggaggtccccgggggcctagtgtccccgctggcatgaaccctactggcataggaggggtaatgggcccctctggcctctcccccttggctatgaaccccacccgggcagcaggaatgacacccttgtatgcagggcagcgtctgccccaacatgggtatcctgggcctccccaggcccagccactgccccgacagggggtcaagagaacctactctgaggtgtatccagggcagcagtatctgcaaggaggccagtatgcacccagcaccgcccagtttgcgcccagccctgggcagccccctgccccctccccttcctaccctgggcacaggctgcccctgcagcagggcatgacccagtccctgtccgtgcctggccccacgggactgcattataagcccacagagcagttcaacgggcagggcgccagcttcaacgggggcagcgtcagctacagccaacctggcctgagtggggtagggggcctggccgggaggatgggccgggaggctcacagggtgggcatatggagagagggcgaccgggcaggcacccctggggccgcctcctgtccacctctgttatcatggttcccagtgggtgcgccgtgaacagactccactcccatccaccctggcaatctgccttgactgtttgtgctcaaccctacagcctacccgttccatcccgggctatcccagttccccactgccagggaaccccacgccacccatgaccccaagcagcagcgtcccttacatgtcaccaaaccaagaggtcaagtctcccttcttgcctgatctcaagcccaacctcaactccttgcactcatcgccctctggaagcgggccttgtgacgagttgcggctgaccttccctgtgcgcgatggggtggtcctggagcccttccgcctgcagcacaacctggctgtaagcaaccatgtcttccagctgcgagactcagtctacaagaccctgataatgaggtgagctccgcctggcccccacctgacccccacgaggctctgttcctcctcggtggaggaggaagccactgcatctgttggctcagggccccagcctgtgcaagcagggcgcctgggctgttgtgtctcctgtctgtgccgatctctattaaaggactccctcttg

SEQ ID NO: 372707 - DNA, 430 bp, Homo sapiens
  misc_feature (1)..(1): n is a, c, g, or t
ncggtaccggtgtatccaccggcaggtgtactccaccggcaggtgtactcaggaggtcaagtctcccttcttgcctgatctcaagcccaacctcaactccttgcactcatcgccctctggaagcgggccttgtgacgagttgcggctgaccttccctgtgcgcgatggggtggtcctggagcccttccgcctgcagcacaacctggctgtaagcaaccatgtcttccagctgcgagactcagtctacaagaccctgataatgaggtgagctccgcctggcccccacctgacccccacgaggctctgttcctcctcggtggaggaggaagccactgcatctgttggctcagggccccagcctgtgcaagcagggcgcctgggctgttgtgtctcctgtctgtgccgatctctattaaaggactccctcttg

SEQ ID NO: 372708 - DNA, 1560 bp, Homo sapiens
acgtcatttcggggcgaccctcttcttggcgtagagttttcagattgctcttgggaaccatgccgaaagtagtgtctcggtcagtagtctgctctgacactcgggaccgggaggaatatgacgacggcgagaagcccctccatgtttactactgtttgtgcggccagatggtcctagtgctggactgccagttagagaaattgcccatgaggccccgggaccggtcccgtgtgattgatgctgccaaacatgcccataagttttgtaacacagaagatgaggagactatgtatctgcggagacctgaaggcattgaacgacagtacaggaagaaatgtgcaaagtgtggactgccgctcttctaccaatcccagccaaagaatgctcctgttaccttcattgtggatggagcagtagtcaagtttggccagggctttgggaaaacgaacatatatactcagaaacaagagcctcctaagaaggtgatgatgaccaaacggaccaaagacatgggcaagttcagttctgtcaccgtgtctaccattgatgaagaggaagaggagattgaggctagggaagttgctgactcatatgcacagaatgccaaagtgattgaaaaacagctggagcgcaaaggcatgagcaagaggcgactgcaagagctggctgaattggaagccaagaaagcgaaaatgaaggggaccttgattgacaaccagttcaaataaccaggcctttttctaagccctagactagaggcaagcatttagatcaggaggcaaagtaatttcttgattacatagacggattcctatttatgccctagcagaaggctttacgttgtttcccattgattctcctacattcagtgaggtctttaactgagtccatttaacttgctttcttttttttttttttttttgagatagagtcttgctctttcgcccaggatggagtgcagtggtgcgatctcggctcactgcaacctccgcctcccgggttcaggcagttctcctgcctcagcctcctgagtagctgggattacaggcatgtgccaccacgcctgggcaacatggtgaaaccctgtctctactaaaatacaaaagaaattagccaggtgtggcggcatacccctgtggtcacggctacttgggaggcagaggcaggagaattgcttgaactcgggaggtggaggttgcagtgagctgagattgcaccactgtactccagcactctagcctgggcgacagagtgagactctgtctctacaaaaaaaaaaaaaaaaaaaagtaacccaagggagggagctaccctctagtcgggcagctgatactgcttccttgcatggatacatgggagggagacgttatagattaagaaatgatagcaagataaacaaaatgatttgttgggtatcttttactttacatttgttatttgcagaggagtgttgtatatatagatgttattttatgtcacactgcttcaatgatacctatatccatgtgtttgtatccatgtttttatccattcaactgtattaaaaagtgttgggacagg

SEQ ID NO: 372709 - DNA, 2303 bp, Homo sapiens
acgtcatttcggggcgaccctcttcttggcgtagagttttcagattgctcttgggaaccatgccgaaagtagtgtctcggtcagtagtctgctctgacactcgggaccgggaggaatatgacgacggcgagaagcccctccatgtttactactgtttgtgcggccagatggtcctagtgctggactgccagttagagaaattgcccatgaggccccgggaccggtcccgtgtgattgatgctgccaaacatgcccataagttttgtaacacagaagatgaggagactatgtatctgcggagacctgaaggcattgaacgacagtacaggaagaaatgtgcaaagtgtggactgccgctcttctaccaatcccagccaaagaatgctcctgttaccttcattgtggatggagcagtagtcaagtttggccagggctttgggaaaacgaacatatatactcagaaacaagagcctcctaagaaggtgatgatgaccaaacggaccaaagacatgggcaagttcagttctgtcaccgtgtctaccattgatgaagaggaagaggagattgaggctagggaagttgctgactcatatgcacagaatgccaaagtgattgaaaaacagctggagcgcaaaggcatgagcaagaggcgactgcaagagctggctgaattggaagccaagaaagcgaaaatgaaggggaccttgattgacaaccagttcaaataaccaggcctttttctaagccctagactagaggcaagcatttagatcaggaggcaaagtaatttcttgattacatagacggattcctatttatgccctagcagaaggctttacgttgtttcccattgattctcctacattcagtgaggtctttaactgagtccatttaacttgctttcttttttttttttttttttgagatagagtcttgctctttcgcccaggatggagtgcagtggtgcgatctcggctcactgcaacctccgcctcccgggttcaggcagttctcctgcctcagcctcctgagtagctgggattacaggcatgtgccaccacgcctggctaatttttgtatttttagtagagacgggttccaccgtgttggccaggctggtctccaactcctgacctcaaatgatccacccacctaggcctcccaaagtgctgggattacaggagtgagccaccgtgcccagccttgccctgctttctaggagatggagttttctgaatttttctgtatttaggttttctgtactattttttgtccacttgatgcaaacttcttcagctgtgtagaaactttatgaatagatgagtgcttgagtgtctccagtctctaaagtggctgcttttattctttcttcaaagttaataacatgttgcaagatttttggacaaaatattatggtgtgtcataggaaaagcaccatgaattatatttaggtatagcaagtcagatcctttgaagtgactctgtctctgttcttagaagggttcttggaattggctgtggtttgaatctttctactgtcagaggagacccattaaaagccagaatctgcataaagctttctttacttcaaacactgaagctgtaggcgagccatcccgtatcgactttatactcaaagaaggaaaagccagattgcagtgagtgggtaggacagctcagatccaaatgaaagtagggtctcaagtaacccaagggtggccgggtacggtggctcacgcctgtagtcctagcagtttgggaggcagaggtgggcagattgcctgagctcaggagtttgagaccagcctgggcaacatggtgaaaccctgtctctactaaaatacaaaagaaattagccaggtgtggcggcatacccctgtggtcacggctacttgggaggcagaggcaggagaattgcttgaactcgggaggtggaggttgcagtgagctgagattgcaccactgtactccagcactctagcctgggcgacagagtgagactctgtctctacaaaaaaaaaaaaaaaaaaaagtaacccaagggagggagctaccctctagtcgggcagctgatactgcttccttgcatggatacatgggagggagacgttatagattaagaaatgatagcaagataaacaaaatgatttgttgggtatcttttactttacatttgttatttgcagaggagtgttgtatatatagatgttattttatgtcacactgcttcaatgatacctatatccatgtgtttgtatccatgtttttatccattcaactgtattaaaaagtgttgggacagg

SEQ ID NO: 372710 - DNA, 961 bp, Homo sapiens
acgtcatttcggggcgaccctcttcttggcgtagagttttcagattgctcttgggaaccatgccgaaagtagtgtctcggtcagtagtctgctctgacactcgggaccgggaggaatatgacgacggcgagaagcccctccatgtttactactgtttgtgcggccagatggtcctagtgctggactgccagttagagaaattgcccatgaggccccgggaccggtcccgtgtgattgatgctgccaaacatgcccataagttttgtaacacagaagatgaggagactatgtatctgcggagacctgaaggcattgaacgacagtacaggaagaaatgtgcaaagtgtggactgccgctcttctaccaatcccagccaaagaatgctcctgttaccttcattgtggatggagcagtagtcaagtttggccagggctttgggaaaacgaacatatatactcagaaacaagagcctcctaagaaggtgatgatgaccaaacggaccaaagacatgggcaagttcagttctgtcaccgtgtctaccattgatgaagaggaagaggagattgaggctagggaagttgctgactcatatgcacagaatgccaaagtgattgaaaaacagctggagcgcaaaggcatgagcaagaggcgactgcaagagctggctgaattggaagccaagaaagcgaaaatgaaggggaccttgattgacaaccagttcaaataaccaggcctttttctaagccctagactagaggcaagcatttagatcaggaggcaaagtaatttcttgattacatagacggattcctatttatgccctagcagaaggctttacgttgtttcccattgattctcctacattcagtgaggtctttaactgagtccatttaacttgctttctttttggaacctgctttccaaaaaaaaaaaaaggcccggggggggcccctaggggga

SEQ ID NO: 372711 - DNA, 2329 bp, Homo sapiens
ccgcgacgcgccacagacacacacagacccgcgcggaccttgctgtgagccgctgttatcggagaggagattgctcttgggaaccatgccgaaagtagtgtctcggtcagtagtctgctctgacactcgggaccgggaggaatatgacgacggcgagaagcccctccatgtttactactgtttgtgcggccagatggtcctagtgctggactgccagttagagaaattgcccatgaggccccgggaccggtcccgtgtgattgatgctgccaaacatgcccataagttttgtaacacagaagatgaggagactatgtatctgcggagacctgaaggcattgaacgacagtacaggaagaaatgtgcaaagtgtggactgccgctcttctaccaatcccagccaaagaatgctcctgttaccttcattgtggatggagcagtagtcaagtttggccagggctttgggaaaacgaacatatatactcagaaacaagagcctcctaagaaggtgatgatgaccaaacggaccaaagacatgggcaagttcagttctgtcaccgtgtctaccattgatgaagaggaagaggagattgaggctagggaagttgctgactcatatgcacagaatgccaaagtgattgaaaaacagctggagcgcaaaggcatgagcaagaggcgactgcaagagctggctgaattggaagccaagaaagcgaaaatgaaggggaccttgattgacaaccagttcaaataaccaggcctttttctaagccctagactagaggcaagcatttagatcaggaggcaaagtaatttcttgattacatagacggattcctatttatgccctagcagaaggctttacgttgtttcccattgattctcctacattcagtgaggtctttaactgagtccatttaacttgctttcttttttttttttttttttgagatagagtcttgctctttcgcccaggatggagtgcagtggtgcgatctcggctcactgcaacctccgcctcccgggttcaggcagttctcctgcctcagcctcctgagtagctgggattacaggcatgtgccaccacgcctggctaatttttgtatttttagtagagacgggttccaccgtgttggccaggctggtctccaactcctgacctcaaatgatccacccacctaggcctcccaaagtgctgggattacaggagtgagccaccgtgcccagccttgccctgctttctaggagatggagttttctgaatttttctgtatttaggttttctgtactattttttgtccacttgatgcaaacttcttcagctgtgtagaaactttatgaatagatgagtgcttgagtgtctccagtctctaaagtggctgcttttattctttcttcaaagttaataacatgttgcaagatttttggacaaaatattatggtgtgtcataggaaaagcaccatgaattatatttaggtatagcaagtcagatcctttgaagtgactctgtctctgttcttagaagggttcttggaattggctgtggtttgaatctttctactgtcagaggagacccattaaaagccagaatctgcataaagctttctttacttcaaacactgaagctgtaggcgagccatcccgtatcgactttatactcaaagaaggaaaagccagattgcagtgagtgggtaggacagctcagatccaaatgaaagtagggtctcaagtaacccaagggtggccgggtacggtggctcacgcctgtagtcctagcagtttgggaggcagaggtgggcagattgcctgagctcaggagtttgagaccagcctgggcaacatggtgaaaccctgtctctactaaaatacaaaagaaattagccaggtgtggcggcatacccctgtggtcacggctacttgggaggcagaggcaggagaattgcttgaactcgggaggtggaggttgcagtgagctgagattgcaccactgtactccagcactctagcctgggcgacagagtgagactctgtctctacaaaaaaaaaaaaaaaaaaaagtaacccaagggagggagctaccctctagtcgggcagctgatactgcttccttgcatggatacatgggagggagacgttatagattaagaaatgatagcaagataaacaaaatgatttgttgggtatcttttactttacatttgttatttgcagaggagtgttgtatatatagatgttattttatgtcacactgcttcaatgatacctatatccatgtgtttgtatccatgtttttatccattcaactgtattaaaaagtgttgggacagg

SEQ ID NO: 372712 - DNA, 1989 bp, Homo sapiens
aatatgtaaataaaaacattggcacttttaaataggtcatcctgtcccaaagaggtagtgtttcccccaatacccacagcccctcacacaggcgtgtgcgcacacactcacggctcatggatcctgttttggtgaaccggactgacttcttcttgcctgccactccaggtgatgatgaccaaacggaccaaagacatgggcaagttcagttctgtcaccgtgtctaccattgatgaagaggaagaggagattgaggctagggaagttgctgactcatatgcacagaatgccaaagtgattgaaaaacagctggagcgcaaaggcatgagcaagaggcgactgcaagagctggctgaattggaagccaagaaagcgaaaatgaaggggaccttgattgacaaccagttcaaataaccaggcctttttctaagccctagactagaggcaagcatttagatcaggaggcaaagtaatttcttgattacatagacggattcctatttatgccctagcagaaggctttacgttgtttcccattgattctcctacattcagtgaggtctttaactgagtccatttaacttgctttcttttttttttttttttttgagatagagtcttgctctttcgcccaggatggagtgcagtggtgcgatctcggctcactgcaacctccgcctcccgggttcaggcagttctcctgcctcagcctcctgagtagctgggattacaggcatgtgccaccacgcctggctaatttttgtatttttagtagagacgggttccaccgtgttggccaggctggtctccaactcctgacctcaaatgatccacccacctaggcctcccaaagtgctgggattacaggagtgagccaccgtgcccagccttgccctgctttctaggagatggagttttctgaatttttctgtatttaggttttctgtactattttttgtccacttgatgcaaacttcttcagctgtgtagaaactttatgaatagatgagtgcttgagtgtctccagtctctaaagtggctgcttttattctttcttcaaagttaataacatgttgcaagatttttggacaaaatattatggtgtgtcataggaaaagcaccatgaattatatttaggtatagcaagtcagatcctttgaagtgactctgtctctgttcttagaagggttcttggaattggctgtggtttgaatctttctactgtcagaggagacccattaaaagccagaatctgcataaagctttctttacttcaaacactgaagctgtaggcgagccatcccgtatcgactttatactcaaagaaggaaaagccagattgcagtgagtgggtaggacagctcagatccaaatgaaagtagggtctcaagtaacccaagggtggccgggtacggtggctcacgcctgtagtcctagcagtttgggaggcagaggtgggcagattgcctgagctcaggagtttgagaccagcctgggcaacatggtgaaaccctgtctctactaaaatacaaaagaaattagccaggtgtggcggcatacccctgtggtcacggctacttgggaggcagaggcaggagaattgcttgaactcgggaggtggaggttgcagtgagctgagattgcaccactgtactccagcactctagcctgggcgacagagtgagactctgtctctacaaaaaaaaaaaaaaaaaaaagtaacccaagggagggagctaccctctagtcgggcagctgatactgcttccttgcatggatacatgggagggagacgttatagattaagaaatgatagcaagataaacaaaatgatttgttgggtatcttttactttacatttgttatttgcagaggagtgttgtatatatagatgttattttatgtcacactgcttcaatgatacctatatccatgtgtttgtatccatgtttttatccattcaactgtattaaaaagtgttgggacagg

SEQ ID NO: 372713 - DNA, 1448 bp, Homo sapiens
ttaatatccagactgtataaggaattcaaactcaatagcaaaaactcaatccgatttttttttttttgagatagagtcttgctctttcgcccaggatggagtgcagtggtgcgatctcggctcactgcaacctccgcctcccgggttcaggcagttctcctgcctcagcctcctgagtagctgggattacaggcatgtgccaccacgcctggctaatttttgtatttttagtagagacgggttccaccgtgttggccaggctggtctccaactcctgacctcaaatgatccacccacctaggcctcccaaagtgctgggattacaggagtgagccaccgtgcccagccttgccctgctttctaggagatggagttttctgaatttttctgtatttaggttttctgtactattttttgtccacttgatgcaaacttcttcagctgtgtagaaactttatgaatagatgagtgcttgagtgtctccagtctctaaagtggctgcttttattctttcttcaaagttaataacatgttgcaagatttttggacaaaatattatggtgtgtcataggaaaagcaccatgaattatatttaggtatagcaagtcagatcctttgaagtgactctgtctctgttcttagaagggttcttggaattggctgtggtttgaatctttctactgtcagaggagacccattaaaagccagaatctgcataaagctttctttacttcaaacactgaagctgtaggcgagccatcccgtatcgactttatactcaaagaaggaaaagccagattgcagtgagtgggtaggacagctcagatccaaatgaaagtagggtctcaagtaacccaagggtggccgggtacggtggctcacgcctgtagtcctagcagtttgggaggcagaggtgggcagattgcctgagctcaggagtttgagaccagcctgggcaacatggtgaaaccctgtctctactaaaatacaaaagaaattagccaggtgtggcggcatacccctgtggtcacggctacttgggaggcagaggcaggagaattgcttgaactcgggaggtggaggttgcagtgagctgagattgcaccactgtactccagcactctagcctgggcgacagagtgagactctgtctctacaaaaaaaaaaaaaaaaaaaagtaacccaagggagggagctaccctctagtcgggcagctgatactgcttccttgcatggatacatgggagggagacgttatagattaagaaatgatagcaagataaacaaaatgatttgttgggtatcttttactttacatttgttatttgcagaggagtgttgtatatatagatgttattttatgtcacactgcttcaatgatacctatatccatgtgtttgtatccatgtttttatccattcaactgtattaaaaagtgttgggacagg

SEQ ID NO: 372714 - DNA, 978 bp, Homo sapiens
aggtgacactatagacaatttgtacaaaaacaggcggtacggtccggaattcccgggaagattgctcttgggaaccatgccgaaagtagtgtctcggtcagtagtctgctctgacactcgggaccgggaggaatatgacgacggcgagaagcccctccatgtttactactgtttgtgcggccagatggtcctagtgctggactgccagttagagaaattgcccatgaggccccgggaccggtcccgtgtgattgatgctgccaaacatgcccataagttttgtaacacagaagatgaggagactatgtatctgcggagacctgaaggcattgaacgacagtacaggaagaaatgtgcaaagtgtggactgccgctcttctaccaatcccagccaaagaatgctcctgttaccttcattgtggatggagcagtagtcaagtttggccagggctttgggaaaacgaacatatatactcagaaacaagagcctcctaagaaggtgatgatgaccaaacggaccaaagacatgggcaagttcagttctgtcaccgtgtctaccattgatgaagaggaagaggagattgaggctagggaagttgctgactcatatgcacagaatgccaaagtgattgaaaaacagctggagcgcaaaggcatgagcaagaggcgactgcaagagctggctgaattggaagccaagaaagcgaaaatgaaggggaccttgattgacaaccagttcaaataaccaggcctttttctaagccctagactagaggcaagcatttagatcaggaggcaaagtaatttcttgattacatagacggattcctatttatgccctagcagaaggctttacgttgtttcccattgattctcctacattcagtgaggtctttaactgagtccatttaacttgctttctttttggaacctgctttccaaaaaaaaaaaaaggcccggggggggcccctaggggga

SEQ ID NO: 372715 - DNA, 2020 bp, Homo sapiens
acgtcatttcggggcgaccctcttcttggcgtagagttttcagattgctcttgggaaccatgccgaaagtagtgtctcggtcagtagtctgctctgacactcgggaccgggaggaatatgacgacggcgagaagcccctccatgtttactactgtttgtgcggccagatggtcctagtgctggactgccagttagagaaattgcccatgaggccccgggaccggtcccgtgtgattgatgctgccaaacatgcccataagttttgtaacacagaagatgaggagactatgtatctgcggagacctgaaggcattgaacgacagtacaggaagaaatgtgcaaagtgtggactgccgctcttctaccaatcccagccaaagaatgctcctgttaccttcattgtggatggagcagtagtcaagtttggccagggctttgggaaaacgaacatatatactcagaaacaagagcctcctaagaaggtgatgatgaccaaacggaccaaagacatgggcaagttcagttctgtcaccgtgtctaccattgatgaagaggaagaggagattgaggctagggaagttgctgactcatatgcacagaatgccaaagtgattgaaaaacagctggagcgcaaaggcatgagcaagaggcgactgcaagagctggctgaattggaagccaagaaagcgaaaatgaaggggaccttgattgacaaccagttcaaataaccaggcctttttctaagccctagactagaggcaagcatttagatcaggaggcaaagtaatttcttgattacatagacggattcctatttatgccctagcagaaggctttacgttgtttcccattgattctcctacattcagtgaggtctttaactgagtccatttaacttgctttcttttttttttttttttttgagatagagtcttgctctttcgcccaggatggagtgcagtggtgcgatctcggctcactgcaacctccgcctcccgggttcaggcagttctcctgcctcagcctcctgagtagctgggattacaggcatgtgccaccacgcctggctaatttttgtatttttagtagagacgggttccaccgtgttggccaggctggtctccaactcctgacctcaaatgatccacccacctaggcctcccaaagtgctgggattacaggagtgagccaccgtgcccagccttgccctgctttctaggagatggagttttctgaatttttctgtatttaggttttctgtactattttttgtccacttgatgcaaacttcttcagctgtgtagaaactttatgaatagatgagtgcttgagtgtctccagtctctaaagtggctgcttttattctttcttcaaagttaataacatgttgcaagatttttggacaaaatattatggtgtgtcataggaaaagcaccatgaattatatttaggtatagcaagtcagatcctttgaagtgactctgtctctgttcttagaagggttcttggaattggctgtggtttgaatctttctactgtcagaggagacccattaaaagccagaatctgcataaagctttctttacttcaaacactgaagctgtaggcgagccatcccgtatcgactttatactcaaagaaggaaaagccagattgcagtgagtgggtaggacagctcagatccaaatgaaagtagggtctcaagtaacccaagggtggccgggtacggtggctcacgcctgtagtcctagcagtttgggaggcagaggtgggcagattgcctgagctcaggagtttgagaccagcctgggcaacatggtgaaaccctgtctctactaaaatacaaaagaaattagccaggtgtggttcaagcgattctcctgcctcagcctcccaagtagctgggattacaggcacccgccaccatgcctagctaatttttgtatttttagtagagacggagtttcaccgtgttggccaggctggtcttgaactcctgagctcaggtgatccacctgcc

SEQ ID NO: 372716 - DNA, 2776 bp, Homo sapiens
ggcacgaggctcaaccccttctctcgtaggcccttctaccctccccgaagccgggctcccgggttccgcttccacagggccgccccctctcctccgagatccaacgcctcgcccctcggtaagaggcccaggactcagcccacggccccgccccccacttggctagtccgcccctggcgagacccctgctctcacccacccaggacttctcgctcccaggccgggtcctctcaccgtcaaggcccgccccctgccaacggtcctcacccattagccgaaggccccgcccctcacagattgccgcagggcaggggcggagacagcccgggccgtcccaggctccgcccccggaagcctcacttccgggcgcgagcacgccccgcctcgccccggcggcagagaggagactatggaacgtcaggtgctgctgagcgagcccgaggaggcggcggctctgtatcggggccttagccgccagcccgcgctgagcgccgcctgcctgggcccggaggtcaccacgcagtacggcggccaataccggacggtgcacactgagtggacccagagggacctggaacgcatggagaacattcgattctgccgccaatacctggtgttccatgacggggactcagtggtgtttgcaggacctgcaggcaacagtgtggagacccggggggaactgctgagcagagagtctccttcaggcaccatgaaagctgtgctgcgcaaggctggaggcacgggccctggggaagagaagcagttcctggaggtctgggagaagaaccggaagctcaagagcttcaacctgtcagcgctggagaaacatgggcctgtttatgaggatgactgctttggctgcctgtcctggtcgcactcggagacacacttgttgtatgtggcagagaagaagcgccccaaggccgagtccttctttcagaccaaagccttggacgtcagtgccagcgatgatgagatagccaggctgaagaagccagaccaagccatcaagggggatcagtttgtgttttatgaagactggggagaaaacatggtttccaaaagcatccctgtgctctgcgtgctggatgtcgagagtggcaacatctctgtgcttgagggggtccctgagaatgtgtcccctggacaggcattttgggcccctggagatgctggtgtggtgtttgtgggctggtggcatgagcccttccggttgggcatccgcttttgcaccaatcgcaggtcagccctgtattatgtggacctcatcggggggaagtgtgagctcctctcggatgactccctggctgtctcttctccccggctgagcccagaccaatgtcgcattgtctacctgcagtacccatctctgatcccccatcaccaatgcagccagctgtgcctgtatgactggtataccaaggttacctcagtggtggtagatgttgtgcctcggcagctgggagagaacttctctgggatctactgcagccttctgcctttgggatgctggtcagctgacagccagagagtggtctttgactcggctcagcgcagccggcaggacctgtttgctgtggacacccaagtgggcactgtgacctccctcacagctggagggtcaggtgggagctggaagttgctcacaattgaccaggacctcatggtggcacagttttccacacccagcctacctccaaccctgaaagttgggttcctgccttctgcagggaaggagcagtcagtgttgtgggtgtccctggaggaggccgagcccattcccgacatccactggggcatccgggtgctacagccacccccagagcaagagaatgtgcagtatgctggccttgactttgaagcaatcctgctgcagcctggcagccctccagataagacccaagtgcccatggtggtcatgccccacggggggccccattcatcctttgtcactgcctggatgctgttcccagccatgctttgcaagatgggctttgcggtactactagtgaactatcgtggctccacgggctttggccaggacagcatcctctccctcccaggcaatgtgggccaccaggatgtgaaggatgtccagtttgcagtggaacaggtgctccaggaggaacactttgatgcaagccatgtggcccttatgggtggttcccatggtggcttcatttcctgccacttgattggtcagtacccagagacctacagggcctgcgtggcccggaaccccgtgatcaacatcgcctccatgttgggctccactgacatccctgactggtgcgtggtggaggctggctttcctttcagcagtgactgcctgccagacctcagcgtgtgggctgagatgctggacaaatcgcccatcagatacatccctcaggtgaagacaccactgttactgatgttgggccaggaggaccggcgtgtgcccttcaagcagggcatggagtattaccgtgccctcaagacccggaatgtgcctgttcggctcctgctctatcccaaaagcacccacgcattatcagaggtggaggtggagtcagacagcttcatgaatgctgtgctctggctacgcacacacttgggcagctgaagccctgccattctgcatgagctgatcagcctgtgccacacttcgctcttgaggagctcaacggtctggcagggcagcaggaggctttctgggctctggactccacggatgcgtgggcagaggaatgtgggctatgtagtcataataaattaggacacagagcctggt

SEQ ID NO: 372717 - DNA, 446 bp, Homo sapiens
taactcggccctcttctccgaaaggcaccatgaaagctgtgctgcgcaaggctggaggcacgggccctggggaagagaagcagttcctggaggtctgggagaagaaccggaagctcaagagcttcaacctgtcagcgctggagaaacatgggcctgtttatgaggatgactgctttggctgcctgtcctggtcgcactcggagacacacttgttgtatgtggcagagaagaagcgccccaaggccgagtccttctttcagaccaaagccttggacgtcagtgccagcgatgatgagatagccaggctgaagaagccagaccaagccatcaaggtgctcgtggtcaatccacgaaggcccggcagggcagccctggggctcagtgtgctcccttcccatactgtgcctgtcagacctggggaggcactagcttttaggaagcagagc

SEQ ID NO: 372718 - DNA, 226 bp, Homo sapiens
gcggccgcctactactactactaccactgctcgaattcaagcttctaacgatgtacggggacctgccattctgcatgagctgatcagcctgtgccacacttcgctcttgaggagctcaacggtctggcagggcagcaggaggctttctgggctctggactccacggatgcgtgggcagaggaatgtgggctatgtagtcataataaattaggacacagagcctggt

SEQ ID NO: 372719 - DNA, 2658 bp, Homo sapiens
ggcacgaggctcaaccccttctctcgtaggcccttctaccctccccgaagccgggctcccgggttccgcttccacagggccgccccctctcctccgagatccaacgcctcgcccctcggtaagaggcccaggactcagcccacggccccgccccccacttggctagtccgcccctggcgagacccctgctctcacccacccaggacttctcgctcccaggccgggtcctctcaccgtcaaggcccgccccctgccaacggtcctcacccattagccgaaggccccgcccctcacagattgccgcagggcaggggcggagacagcccgggccgtcccaggctccgcccccggaagcctcacttccgggcgcgagcacgccccgcctcgccccggcggcagagaggagactatggaacgtcaggtgctgctgagcgagcccgaggaggcggcggctctgtatcggggccttagccgccagcccgcgctgagcgccgcctgcctgggcccggaggtcaccacgcagtacggcggccaataccggacggtgcacactgagtggacccagagggacctggaacgcatggagaacattcgattctgccgccaatacctggtgttccatgacggggactcagtggtgtttgcaggacctgcaggcaacagtgtggagacccggggggaactgctgagcagagagtctccttcaggcaccatgaaagctgtgctgcgcaaggctggaggcacgggccctggggaagagaagcagttcctggaggtctgggagaagaaccggaagctcaagagcttcaacctgtcagcgctggagaaacatgggcctgtttatgaggatgactgctttggctgcctgtcctggtcgcactcggagacacacttgttgtatgtggcagagaagaagcgccccaaggccgagtccttctttcagaccaaagccttggacgtcagtgccagcgatgatgagatagccaggctgaagaagccagaccaagccatcaagggggatcagtttgtgttttatgaagactggggagaaaacatggtttccaaaagcatccctgtgctctgcgtgctggatgtcgagagtggcaacatctctgtgcttgagggggtccctgagaatgtgtcccctggacaggcattttgggcccctggagatgctggtgtggtgtttgtgggctggtggcatgagcccttccggttgggcatccgcttttgcaccaatcgcaggtcagccctgtattatgtggacctcatcggggggaagtgtgagctcctctcggatgactccctggctgtctcttctccccggctgagcccagaccaatgtcgcattgtctacctgcagtacccatctctgatcccccatcaccaatgcagccagctgtgcctgtatgactggtataccaaggttacctcagtggtggtagatgttgtgcctcggcagctgggagagaacttctctgggatctactgcagccttctgcctttgggatgctggtcagctgacagccagagagtggtctttgactcggctcagcgcagccggcaggacctgtttgctgtggacacccaagtgggcactgtgacctccctcacagctggagggtcaggtgggagctggaagttgctcacaattgaccaggacctcatggtggcacagttttccacacccagcctacctccaaccctgaaagttgggttcctgccttctgcagggaaggagcagtcagtgttgtgggtgtccctggaggaggccgagcccattcccgacatccactggggcatccgggtgctacagccacccccagagcaagagaatgtgcagtatgctggccttgactttgaagcaatcctgctgcagcctggcagccctccagataagacccaagtgcccatggtggtcatgccccacgcatcctctccctcccaggcaatgtgggccaccaggatgtgaaggatgtccagtttgcagtggaacaggtgctccaggaggaacactttgatgcaagccatgtggcccttatgggtggttcccatggtggcttcatttcctgccacttgattggtcagtacccagagacctacagggcctgcgtggcccggaaccccgtgatcaacatcgcctccatgttgggctccactgacatccctgactggtgcgtggtggaggctggctttcctttcagcagtgactgcctgccagacctcagcgtgtgggctgagatgctggacaaatcgcccatcagatacatccctcaggtgaagacaccactgttactgatgttgggccaggaggaccggcgtgtgcccttcaagcagggcatggagtattaccgtgccctcaagacccggaatgtgcctgttcggctcctgctctatcccaaaagcacccacgcattatcagaggtggaggtggagtcagacagcttcatgaatgctgtgctctggctacgcacacacttgggcagctgaagccctgccattctgcatgagctgatcagcctgtgccacacttcgctcttgaggagctcaacggtctggcagggcagcaggaggctttctgggctctggactccacggatgcgtgggcagaggaatgtgggctatgtagtcataataaattaggacacagagcctggt

SEQ ID NO: 372720 - DNA, 2485 bp, Homo sapiens
aattaggctaggtagagcctggtgttgaatcggcaccgagactatggaacgtcaggtgagggctcggcccgcggtccccgtggtccctgcagcccgggccgggcctgaccctggtgtgtcccctgcgcaggtgctgctgagcgagcccgaggaggcggcggctctgtatcggggccttagccgccagcccgcgctgagcgccgcctgcctgggcccggaggtcaccacgcagtacggcggccaataccggacggtgcacactgagtggacccagagggacctggaacgcatggagaacattcgattctgccgccaatacctggtgttccatgacggggactcagtggtgtttgcaggacctgcaggcaacagtgtggagacccggggggaactgctgagcagagagtctccttcaggcaccatgaaagctgtgctgcgcaaggctggaggcacgggccctggggaagagaagcagttcctggaggtctgggagaagaaccggaagctcaagagcttcaacctgtcagcgctggagaaacatgggcctgtttatgaggatgactgctttggctgcctgtcctggtcgcactcggagacacacttgttgtatgtggcagagaagaagcgccccaaggccgagtccttctttcagaccaaagccttggacgtcagtgccagcgatgatgagatagccaggctgaagaagccagaccaagccatcaagggggatcagtttgtgttttatgaagactggggagaaaacatggtttccaaaagcatccctgtgctctgcgtgctggatgtcgagagtggcaacatctctgtgcttgagggggtccctgagaatgtgtcccctggacaggcattttgggcccctggagatgctggtgtggtgtttgtgggctggtggcatgagcccttccggttgggcatccgcttttgcaccaatcgcaggtcagccctgtattatgtggacctcatcggggggaagtgtgagctcctctcggatgactccctggctgtctcttctccccggctgagcccagaccaatgtcgcattgtctacctgcagtacccatctctgatcccccatcaccaatgcagccagctgtgcctgtatgactggtataccaaggttacctcagtggtggtagatgttgtgcctcggcagctgggagagaacttctctgggatctactgcagccttctgcctttgggatgctggtcagctgacagccagagagtggtctttgactcggctcagcgcagccggcaggacctgtttgctgtggacacccaagtgggcactgtgacctccctcacagctggagggtcaggtgggagctggaagttgctcacaattgaccaggacctcatggtggcacagttttccacacccagcctacctccaaccctgaaagttgggttcctgccttctgcagggaaggagcagtcagtgttgtgggtgtccctggaggaggccgagcccattcccgacatccactggggcatccgggtgctacagccacccccagagcaagagaatgtgcagtatgctggccttgactttgaagcaatcctgctgcagcctggcagccctccagataagacccaagtgcccatggtggtcatgccccacggggggccccattcatcctttgtcactgcctggatgctgttcccagccatgctttgcaagatgggctttgcggtactactagtgaactatcgtggctccacgggctttggccaggacagcatcctctccctcccaggcaatgtgggccaccaggatgtgaaggatgtccagtttgcagtggaacaggtgctccaggaggaacactttgatgcaagccatgtggcccttatgggtggttcccatggtggcttcatttcctgccacttgattggtcagtacccagagacctacagggcctgcgtggcccggaaccccgtgatcaacatcgcctccatgttgggctccactgacatccctgactggtgcgtggtggaggctggctttcctttcagcagtgactgcctgccagacctcagcgtgtgggctgagatgctggacaaatcgcccatcagatacatccctcaggtgaagacaccactgttactgatgttgggccaggaggaccggcgtgtgcccttcaagcagggcatggagtattaccgtgccctcaagacccggaatgtgcctgttcggctcctgctctatcccaaaagcacccacgcattatcagaggtggaggtggagtcagacagcttcatgaatgctgtgctctggctacgcacacacttgggcagctgaagccctgccattctgcatgagctgatcagcctgtgccacacttcgctcttgaggagctcaacggtctggcagggcagcaggaggctttctgggctctggactccacggatgcgtgggcagaggaatgtgggctatgtagtcataataaattaggacacagagcctggt

SEQ ID NO: 372721 - DNA, 2778 bp, Homo sapiens
taaaaagaaaggccttacatatttattactgaatccagccaaccaagcgggttcataacagaattcagagaaggaaaacacgtcgaaatctccaaaataggggtgacattttcagctgtgattatggtaacatgatcgtgaccttcagaacagcataaatatgtgtgccatctcagtggtgcaatctccttatagacccagctgggttcttctccaagtgtctcctttgggagttgtcacctgatttatattcttccagttttcatccgaatccacgggggaaggggacgatttggctttggtttctgggccaggaatcgcttaactcctgaaagtctgggtgagaagactgtggcgagcagcggagctcaaagaacacaccacgagtggcggagaaaggaagagagactatggaacgtcagggtgctgctgagcgagcccgaggaggcggcggctctgtatcggggccttagccgccagcccgcgctgagcgccgcctgcctgggcccggaggtcaccacgcagtacggcggccaataccggacggtgcacactgagtggacccagagggacctggaacgcatggagaacattcgattctgccgccaatacctggtgttccatgacggggactcagtggtgtttgcaggacctgcaggcaacagtgtggagacccggggggaactgctgagcagagagtctccttcaggcaccatgaaagctgtgctgcgcaaggctggaggcacgggccctggggaagagaagcagttcctggaggtctgggagaagaaccggaagctcaagagcttcaacctgtcagcgctggagaaacatgggcctgtttatgaggatgactgctttggctgcctgtcctggtcgcactcggagacacacttgttgtatgtggcagagaagaagcgccccaaggccgagtccttctttcagaccaaagccttggacgtcagtgccagcgatgatgagatagccaggctgaagaagccagaccaagccatcaagggggatcagtttgtgttttatgaagactggggagaaaacatggtttccaaaagcatccctgtgctctgcgtgctggatgtcgagagtggcaacatctctgtgcttgagggggtccctgagaatgtgtcccctggacaggcattttgggcccctggagatgctggtgtggtgtttgtgggctggtggcatgagcccttccggttgggcatccgcttttgcaccaatcgcaggtcagccctgtattatgtggacctcatcggggggaagtgtgagctcctctcggatgactccctggctgtctcttctccccggctgagcccagaccaatgtcgcattgtctacctgcagtacccatctctgatcccccatcaccaatgcagccagctgtgcctgtatgactggtataccaaggttacctcagtggtggtagatgttgtgcctcggcagctgggagagaacttctctgggatctactgcagccttctgcctttgggatgctggtcagctgacagccagagagtggtctttgactcggctcagcgcagccggcaggacctgtttgctgtggacacccaagtgggcactgtgacctccctcacagctggagggtcaggtgggagctggaagttgctcacaattgaccaggacctcatggtggcacagttttccacacccagcctacctccaaccctgaaagttgggttcctgccttctgcagggaaggagcagtcagtgttgtgggtgtccctggaggaggccgagcccattcccgacatccactggggcatccgggtgctacagccacccccagagcaagagaatgtgcagtatgctggccttgactttgaagcaatcctgctgcagcctggcagccctccagataagacccaagtgcccatggtggtcatgccccacggggggccccattcatcctttgtcactgcctggatgctgttcccagccatgctttgcaagatgggctttgcggtactactagtgaactatcgtggctccacgggctttggccaggacagcatcctctccctcccaggcaatgtgggccaccaggatgtgaaggatgtccagtttgcagtggaacaggtgctccaggaggaacactttgatgcaagccatgtggcccttatgggtggttcccatggtggcttcatttcctgccacttgattggtcagtacccagagacctacagggcctgcgtggcccggaaccccgtgatcaacatcgcctccatgttgggctccactgacatccctgactggtgcgtggtggaggctggctttcctttcagcagtgactgcctgccagacctcagcgtgtgggctgagatgctggacaaatcgcccatcagatacatccctcaggtgaagacaccactgttactgatgttgggccaggaggaccggcgtgtgcccttcaagcagggcatggagtattaccgtgccctcaagacccggaatgtgcctgttcggctcctgctctatcccaaaagcacccacgcattatcagaggtggaggtggagtcagacagcttcatgaatgctgtgctctggctacgcacacacttgggcagctgaagccctgccattctgcatgagctgatcagcctgtgccacacttcgctcttgaggagctcaacggtctggcagggcagcaggaggctttctgggctctggactccacggatgcgtgggcagaggaatgtgggctatgtagtcataataaattaggacacagagcctggt

SEQ ID NO: 372722 - DNA, 2649 bp, Homo sapiens
ggcacgaggctcaaccccttctctcgtaggcccttctaccctccccgaagccgggctcccgggttccgcttccacagggccgccccctctcctccgagatccaacgcctcgcccctcggtaagaggcccaggactcagcccacggccccgccccccacttggctagtccgcccctggcgagacccctgctctcacccacccaggacttctcgctcccaggccgggtcctctcaccgtcaaggcccgccccctgccaacggtcctcacccattagccgaaggccccgcccctcacagattgccgcagggcaggggcggagacagcccgggccgtcccaggctccgcccccggaagcctcacttccgggcgcgagcacgccccgcctcgccccggcggcagagaggagactatggaacgtcaggtgctgctgagcgagcccgaggaggcggcggctctgtatcggggccttagccgccagcccgcgctgagcgccgcctgcctgggcccggaggtcaccacgcagtacggcggccaataccggacggtgcacactgactgctgagcagagagtctccttcaggcaccatgaaagctgtgctgcgcaaggctggaggcacgggccctggggaagagaagcagttcctggaggtctgggagaagaaccggaagctcaagagcttcaacctgtcagcgctggagaaacatgggcctgtttatgaggatgactgctttggctgcctgtcctggtcgcactcggagacacacttgttgtatgtggcagagaagaagcgccccaaggccgagtccttctttcagaccaaagccttggacgtcagtgccagcgatgatgagatagccaggctgaagaagccagaccaagccatcaagggggatcagtttgtgttttatgaagactggggagaaaacatggtttccaaaagcatccctgtgctctgcgtgctggatgtcgagagtggcaacatctctgtgcttgagggggtccctgagaatgtgtcccctggacaggcattttgggcccctggagatgctggtgtggtgtttgtgggctggtggcatgagcccttccggttgggcatccgcttttgcaccaatcgcaggtcagccctgtattatgtggacctcatcggggggaagtgtgagctcctctcggatgactccctggctgtctcttctccccggctgagcccagaccaatgtcgcattgtctacctgcagtacccatctctgatcccccatcaccaatgcagccagctgtgcctgtatgactggtataccaaggttacctcagtggtggtagatgttgtgcctcggcagctgggagagaacttctctgggatctactgcagccttctgcctttgggatgctggtcagctgacagccagagagtggtctttgactcggctcagcgcagccggcaggacctgtttgctgtggacacccaagtgggcactgtgacctccctcacagctggagggtcaggtgggagctggaagttgctcacaattgaccaggacctcatggtggcacagttttccacacccagcctacctccaaccctgaaagttgggttcctgccttctgcagggaaggagcagtcagtgttgtgggtgtccctggaggaggccgagcccattcccgacatccactggggcatccgggtgctacagccacccccagagcaagagaatgtgcagtatgctggccttgactttgaagcaatcctgctgcagcctggcagccctccagataagacccaagtgcccatggtggtcatgccccacggggggccccattcatcctttgtcactgcctggatgctgttcccagccatgctttgcaagatgggctttgcggtactactagtgaactatcgtggctccacgggctttggccaggacagcatcctctccctcccaggcaatgtgggccaccaggatgtgaaggatgtccagtttgcagtggaacaggtgctccaggaggaacactttgatgcaagccatgtggcccttatgggtggttcccatggtggcttcatttcctgccacttgattggtcagtacccagagacctacagggcctgcgtggcccggaaccccgtgatcaacatcgcctccatgttgggctccactgacatccctgactggtgcgtggtggaggctggctttcctttcagcagtgactgcctgccagacctcagcgtgtgggctgagatgctggacaaatcgcccatcagatacatccctcaggtgaagacaccactgttactgatgttgggccaggaggaccggcgtgtgcccttcaagcagggcatggagtattaccgtgccctcaagacccggaatgtgcctgttcggctcctgctctatcccaaaagcacccacgcattatcagaggtggaggtggagtcagacagcttcatgaatgctgtgctctggctacgcacacacttgggcagctgaagccctgccattctgcatgagctgatcagcctgtgccacacttcgctcttgaggagctcaacggtctggcagggcagcaggaggctttctgggctctggactccacggatgcgtgggcagaggaatgtgggctatgtagtcataataaattaggacacagagcctggt

SEQ ID NO: 372723 - DNA, 2093 bp, Homo sapiens
taactcggccctcttctccgaaaggcaccatgaaagctgtgctgcgcaaggctggaggcacgggccctggggaagagaagcagttcctggaggtctgggagaagaaccggaagctcaagagcttcaacctgtcagcgctggagaaacatgggcctgtttatgaggatgactgctttggctgcctgtcctggtcgcactcggagacacacttgttgtatgtggcagagaagaagcgccccaaggccgagtccttctttcagaccaaagccttggacgtcagtgccagcgatgatgagatagccaggctgaagaagccagaccaagccatcaagggggatcagtttgtgttttatgaagactggggagaaaacatggtttccaaaagcatccctgtgctctgcgtgctggatgtcgagagtggcaacatctctgtgcttgagggggtccctgagaatgtgtcccctggacaggcattttgggcccctggagatgctggtgtggtgtttgtgggctggtggcatgagcccttccggttgggcatccgcttttgcaccaatcgcaggtcagccctgtattatgtggacctcatcggggggaagtgtgagctcctctcggatgactccctggctgtctcttctccccggctgagcccagaccaatgtcgcattgtctacctgcagtacccatctctgatcccccatcaccaatgcagccagctgtgcctgtatgactggtataccaaggttacctcagtggtggtagatgttgtgcctcggcagctgggagagaacttctctgggatctactgcagccttctgcctttgggatgctggtcagctgacagccagagagtggtctttgactcggctcagcgcagccggcaggacctgtttgctgtggacacccaagtgggcactgtgacctccctcacagctggagggtcaggtgggagctggaagttgctcacaattgaccaggacctcatggtggcacagttttccacacccagcctacctccaaccctgaaagttgggttcctgccttctgcagggaaggagcagtcagtgttgtgggtgtccctggaggaggccgagcccattcccgacatccactggggcatccgggtgctacagccacccccagagcaagagaatgtgcagtatgctggccttgactttgaagcaatcctgctgcagcctggcagccctccagataagacccaagtgcccatggtggtcatgccccacggggggccccattcatcctttgtcactgcctggatgctgttcccagccatgctttgcaagatgggctttgcggtactactagtgaactatcgtggctccacgggctttggccaggacagcatcctctccctcccaggcaatgtgggccaccaggatgtgaaggatgtccagtttgcagtggaacaggtgctccaggaggaacactttgatgcaagccatgtggcccttatgggtggttcccatggtggcttcatttcctgccacttgattggtcagtacccagagacctacagggcctgcgtggcccggaaccccgtgatcaacatcgcctccatgttgggctccactgacatccctgactggtgcgtggtggaggctggctttcctttcagcagtgactgcctgccagacctcagcgtgtgggctgagatgctggacaaatcgcccatcagatacatccctcaggtgaagacaccactgttactgatgttgggccaggaggaccggcgtgtgcccttcaagcagggcatggagtattaccgtgccctcaagacccggaatgtgcctgttcggctcctgctctatcccaaaagcacccacgcattatcagaggtggaggtggagtcagacagcttcatgaatgctgtgctctggctacgcacacacttgggcagctgaagccctgccattctgcatgagctgatcagcctgtgccacacttcgctcttgaggagctcaacggtctggcagggcagcaggaggctttctgggctctggactccacggatgcgtgggcagaggaatgtgggctatgtagtcataataaattaggacacagagcctggt

SEQ ID NO: 372724 - DNA, 2638 bp, Homo sapiens
ggcacgaggctcaaccccttctctcgtaggcccttctaccctccccgaagccgggctcccgggttccgcttccacagggccgccccctctcctccgagatccaacgcctcgcccctcggtaagaggcccaggactcagcccacggccccgccccccacttggctagtccgcccctggcgagacccctgctctcacccacccaggacttctcgctcccaggccgggtcctctcaccgtcaaggcccgccccctgccaacggtcctcacccattagccgaaggccccgcccctcacagattgccgcagggcaggggcggagacagcccgggccgtcccaggctccgcccccggaagcctcacttccgggcgcgagcacgccccgcctcgccccggcggcagagaggagactatggaacgtcaggtgctgctgagcgagcccgaggaggcggcggctctgtatcggggccttagccgccagcccgcgctgagcgccgcctgcctgggcccggaggtcaccacgcagtacggcggccaataccggacggtgcacactgagtggacccagagggacctggaacgcatggagaacattcgattctgccgccaatacctggtgttccatgacggggactcagtggtgtttgcaggacctgcaggcaacagtgtggagacccggggggaactgctgagcagagagtctccttcaggcaccatgaaagctgtgctgcgcaaggctggaggcacgggccctggggaagagaagcagttcctggaggtctgggagaagaaccggaagctcaagagcttcaacctgtcagcgctggagaaacatgggcctgtttatgaggatgactgctttggctgcctgtcctggtcgcactcggagacacacttgttgtatgtggcagagaagaagcgccccaaggccgagtccttctttcagaccaaagccttggacgtcagtgccagcgatgatgagatagccaggctgaagaagccagaccaagccatcaaggcattttgggcccctggagatgctggtgtggtgtttgtgggctggtggcatgagcccttccggttgggcatccgcttttgcaccaatcgcaggtcagccctgtattatgtggacctcatcggggggaagtgtgagctcctctcggatgactccctggctgtctcttctccccggctgagcccagaccaatgtcgcattgtctacctgcagtacccatctctgatcccccatcaccaatgcagccagctgtgcctgtatgactggtataccaaggttacctcagtggtggtagatgttgtgcctcggcagctgggagagaacttctctgggatctactgcagccttctgcctttgggatgctggtcagctgacagccagagagtggtctttgactcggctcagcgcagccggcaggacctgtttgctgtggacacccaagtgggcactgtgacctccctcacagctggagggtcaggtgggagctggaagttgctcacaattgaccaggacctcatggtggcacagttttccacacccagcctacctccaaccctgaaagttgggttcctgccttctgcagggaaggagcagtcagtgttgtgggtgtccctggaggaggccgagcccattcccgacatccactggggcatccgggtgctacagccacccccagagcaagagaatgtgcagtatgctggccttgactttgaagcaatcctgctgcagcctggcagccctccagataagacccaagtgcccatggtggtcatgccccacggggggccccattcatcctttgtcactgcctggatgctgttcccagccatgctttgcaagatgggctttgcggtactactagtgaactatcgtggctccacgggctttggccaggacagcatcctctccctcccaggcaatgtgggccaccaggatgtgaaggatgtccagtttgcagtggaacaggtgctccaggaggaacactttgatgcaagccatgtggcccttatgggtggttcccatggtggcttcatttcctgccacttgattggtcagtacccagagacctacagggcctgcgtggcccggaaccccgtgatcaacatcgcctccatgttgggctccactgacatccctgactggtgcgtggtggaggctggctttcctttcagcagtgactgcctgccagacctcagcgtgtgggctgagatgctggacaaatcgcccatcagatacatccctcaggtgaagacaccactgttactgatgttgggccaggaggaccggcgtgtgcccttcaagcagggcatggagtattaccgtgccctcaagacccggaatgtgcctgttcggctcctgctctatcccaaaagcacccacgcattatcagaggtggaggtggagtcagacagcttcatgaatgctgtgctctggctacgcacacacttgggcagctgaagccctgccattctgcatgagctgatcagcctgtgccacacttcgctcttgaggagctcaacggtctggcagggcagcaggaggctttctgggctctggactccacggatgcgtgggcagaggaatgtgggctatgtagtcataataaattaggacacagagcctggt

SEQ ID NO: 372725 - DNA, 2642 bp, Homo sapiens
ggcacgaggctcaaccccttctctcgtaggcccttctaccctccccgaagccgggctcccgggttccgcttccacagggccgccccctctcctccgagatccaacgcctcgcccctcggtaagaggcccaggactcagcccacggccccgccccccacttggctagtccgcccctggcgagacccctgctctcacccacccaggacttctcgctcccaggccgggtcctctcaccgtcaaggcccgccccctgccaacggtcctcacccattagccgaaggccccgcccctcacagattgccgcagggcaggggcggagacagcccgggccgtcccaggctccgcccccggaagcctcacttccgggcgcgagcacgccccgcctcgccccggcggcagagaggagactatggaacgtcaggtgctgctgagcgagcccgaggaggcggcggctctgtatcggggccttagccgccagcccgcgctgagcgccgcctgcctgggcccggaggtcaccacgcagtacggcggccaataccggacggtgcacactgagtggacccagagggacctggaacgcatggagaacattcgattctgccgccaatacctggtgttccatgacggggactcagtggtgtttgcaggacctgcaggcaacagtgtggagacccggggggaactgctgagcagagagtctccttcaggcaccatgaaagctgtgctgcgcaaggctggaggcacgggccctggggaagagaagcagttcctggaggtctgggagaagaaccggaagctcaagagcttcaacctgtcagcgctggagaaacatgggcctgtttatgaggatgactgctttggctgcctgtcctggtcgcactcggagacacacttgttgtatgtggcagagaagaagcgccccaaggccgagtccttctttcagaccaaagccttggacgtcagtgccagcgatgatgagatagccaggctgaagaagccagaccaagccatcaagggggatcagtttgtgttttatgaagactggggagaaaacatggtttccaaaagcatccctgtgctctgcgtgctggatgtcgagagtggcaacatctctgtgcttgagggggtccctgagaatgtgtcccctggacaggcattttgggcccctggagatgctggtgtggtgtttgtgggctggtggcatgagcccttccggttgggcatccgcttttgcaccaatcgcaggtcagccctgtattatgtggacctcatcggggggaagtgtgagctcctctcggatgactccctggctgtctcttctccccggctgagcccagaccaatgtcgcattgtctacctgcagtacccatctctgatcccccatcaccaatgcagccagctgtgcctgtatgactggtataccaaggttacctcagtggtggtagatgttgtgcctcggcagctgggagagaacttctctgggatctactgcagccttctgcctttgggatgctggtcagctgacagccagagagtggtctttgactcggctcagcgcagccggcaggacctgtttgctgtggacacccaagtgggcactgtgacctccctcacagctggagggtcaggtgggagctggaagttgctcacaattgaccaggacctcatggtggcacagttttccacacccagcctacctccaaccctgaaagttgggttcctgccttctgcagggaaggagcagtcagtgttgtgggtgtccctggaggaggccgagcccattcccgacatccactggggcatccgggtgctacagccacccccagagcaagagaatgtgcagtatgctggccttgactttgaagcaatcctgctgcagcctggcagccctccagataagacccaagtgcccatggtggtcatgccccacggggggccccattcatcctttgtcactgcctggatgctgttcccagccatgctttgcaagatgggctttgcggtactactagtgaactatcgtggctccacgggctttggccaggacagcatcctctccctcccaggcaatgtgggccaccaggatgtgaaggatgtccagtttgcagtggaacaggtgctccaggaggaacactttgatgcaagccatgtggcccttatgggtggttcccatggtggcttcatttcctgccacttgattggtcagtacccagagacctacagggcctgcgtggcccggaaccccgtgatcaacatcgcctccatgttgggctccactgacatccctgactggtgcgtggtggaggctggctttcctttcagcagtgactgcctgccagacctcagcgtgtgggctgagatgctggacaaatcgcccatcagatacatccctcaggtgaagacaccactgttactgatgttgggccaggaggaccggcgtgtgcccttcaagcagggcatggagtattaccgtgccctcaagacccggaatgtgcctgttcggcatatggcatcaaggctgggcctaacccagtctcatgaccttgtgaatccagtccacaaacacagagacacgcgtgaagacagctggccagcgggaccttgcgcatactcggttggggattataattccttccaggacc

SEQ ID NO: 372726 - DNA, 3484 bp, Homo sapiens
  misc_feature (3001)..(3002): n is a, c, g, or t
aattaggctaggtagagcctggtgttgaatcggcaccgagactatggaacgtcaggtgagggctcggcccgcggtccccgtggtccctgcagcccgggccgggcctgaccctggtgtgtcccctgcgcaggtgctgctgagcgagcccgaggaggcggcggctctgtatcggggccttagccgccagcccgcgctgagcgccgcctgcctgggcccggaggtcaccacgcagtacggcggccaataccggacggtgcacactgagtggacccagagggacctggaacgcatggagaacattcgattctgccgccaatacctggtgttccatgacggggactcagtggtgtttgcaggacctgcaggcaacagtgtggagacccggggggaactgctgagcagagagtctccttcaggcaccatgaaagctgtgctgcgcaaggctggaggcacgggccctggggaagagaagcagttcctggaggtctgggagaagaaccggaagctcaagagcttcaacctgtcagcgctggagaaacatgggcctgtttatgaggatgactgctttggctgcctgtcctggtcgcactcggagacacacttgttgtatgtggcagagaagaagcgccccaaggccgagtccttctttcagaccaaagccttggacgtcagtgccagcgatgatgagatagccaggctgaagaagccagaccaagccatcaagggggatcagtttgtgttttatgaagactggggagaaaacatggtttccaaaagcatccctgtgctctgcgtgctggatgtcgagagtggcaacatctctgtgcttgagggggtccctgagaatgtgtcccctggacaggcattttgggcccctggagatgctggtgtggtgtttgtgggctggtggcatgagcccttccggttgggcatccgcttttgcaccaatcgcaggtcagccctgtattatgtggacctcatcggggggaagtgtgagctcctctcggatgactccctggctgtctcttctccccggctgagcccagaccaatgtcgcattgtctacctgcagtacccatctctgatcccccatcaccaatgcagccagctgtgcctgtatgactggtataccaaggttacctcagtggtggtagatgttgtgcctcggcagctgggagagaacttctctgggatctactgcagccttctgcctttgggatgctggtcagctgacagccagagagtggtctttgactcggctcagcgcagccggcaggacctgtttgctgtggacacccaagtgggcactgtgacctccctcacagctggagggtcaggtgggagctggaagttgctcacaattgaccaggacctcatggtggcacagttttccacacccagcctacctccaaccctgaaagttgggttcctgccttctgcagggaaggagcagtcagtgttgtgggtgtccctggaggaggccgagcccattcccgacatccactggggcatccgggtgctacagccacccccagagcaagagaatgtgcagtatgctggccttgactttgaagcaatcctgctgcagcctggcagccctccagataagacccaagtgcccatggtggtcatgccccacggggggccccattcatcctttgtcactgcctggatgctgttcccagccatgctttgcaagatgggctttgcggtactactagtgaactatcgtggctccacgggctttggccaggacagcatcctctccctcccaggcaatgtgggccaccaggatgtgaaggatgtccagtttgcagtggaacaggtgctccaggaggaacactttgatgcaagccatgtggcccttatgggtggttcccatggtggcttcatttcctgccacttgattggtcagtacccagagacctacagggcctgcgtggcccggaaccccgtgatcaacatcgcctccatgttgggctccactgacatccctgactggtgcgtggtggaggctggctttcctttcagcagtgactgcctgccagacctcagcgtgtgggctgagatgctggacaaatcgcccatcagatacatccctcaggtgaagacaccactgttactgatgttgggccaggaggaccggcgtgtgcccttcaagcagggcatggagtattaccgtgccctcaagacccggaatgtgcctgttcggctcctgctctatcccaaaagcacccacgcattatcagaggtggaggtggagtcagacagcttcatgaatgctgtgctctggctacgcacacacttgggcagctgaagccctgccattctgcatgagctgatcagcctgtgccacacttcgctcttgaggagctcaacggtctggcagggcagcaggaggctttctgggctctggactccacggatgcgtgggcagaggaatgtgggctatgtagtcataataaattaggacacagagcctggtcaatgactgcgtgaaggagctgagggatgccaatgtccagattgctagtatctcagaggaactggccaagaagacggaagatgctgcccgccagcaagaggagatcacacacctgctatcgcaaatagttgatttgcagaaaaaggcaaaagcttgcgcagtggaaaatgaagaacttgtccagcatctgggggctgctaaggatgcccagcggcacgtcacagccgagctgcgtgacgtggaggacaagtacgcagagtgcatggagatgctgcatgaggcgcaggaagtgagctgaagaacctccgaacaaaccatgccaataccacgtctcgtcgcatccactcactgggcctgtttccatggattcttggcagcagagattgagggaacgatgcgcaaggagctgcagttggaagaggccgagtctcagacatcactcaccagaagcgtgtctttgagacagtaagaacatcacagtgtcagcagagatctctgacccttttccatgaacanncccggctccaaccagtcctcggccatgaactccctcctgtccagctgcgtccatccccccggtccagcttctacggcagcgacataggcaacgtcgtcctcgacaacaagaccaacagcatcattctggaaacagaggcagccgacctgggaaacgatgagcggagtaagaagccggggacgccggcaccccaggctcccacgacctggagacggcgctgaggcgctgtcctgcgccgggagaactacctctcggagaggaggttctttgaggaggagcaagagaggaagctccaggagctggcggagaagggcgagtgcgcagcggctccctcacacccactgagagcatcatgtccctgggcacgcactcccgcttctccgagttcaccggcttctctggatgtccttcagcagccgctcctacctacctgcctgagaagctccagatcgtgaagccgctgctggcaaggttccgccacc

SEQ ID NO: 372727 - DNA, 2347 bp, Homo sapiens
ggcacgaggctcaaccccttctctcgtaggcccttctaccctccccgaagccgggctcccgggttccgcttccacagggccgccccctctcctccgagatccaacgcctcgcccctcggtaagaggcccaggactcagcccacggccccgccccccacttggctagtccgcccctggcgagacccctgctctcacccacccaggacttctcgctcccaggccgggtcctctcaccgtcaaggcccgccccctgccaacggtcctcacccattagccgaaggccccgcccctcacagattgccgcagggcaggggcggagacagcccgggccgtcccaggctccgcccccggaagcctcacttccgggcgcgagcacgccccgcctcgccccggcggcagagaggagactatggaacgtcaggtgctgctgagcgagcccgaggaggcggcggctctgtatcggggccttagccgccagcccgcgctgagcgccgcctgcctgggcccggaggtcaccacgcagtacggcggccaataccggacggtgcacactgactgctgagcagagagtctccttcaggcaccatgaaagctgtgctgcgcaaggctggaggcacgggccctggggaagagaagcagttcctggaggtctgggagaagaaccggaagctcaagagcttcaacctgtcagcgctggagaaacatgggcctgtttatgaggatggcattttgggcccctggagatgctggtgtggtgtttgtgggctggtggcatgagcccttccggttgggcatccgcttttgcaccaatcgcaggtcagccctgtattatgtggacctcatcggggggaagtgtgagctcctctcggatgactccctggctgtctcttctccccggctgagcccagaccaatgtcgcattgtctacctgcagtacccatctctgatcccccatcaccaatgcagccagctgtgcctgtatgactggtataccaaggttacctcagtggtggtagatgttgtgcctcggcagctgggagagaacttctctgggatctactgcagccttctgcctttgggatgctggtcagctgacagccagagagtggtctttgactcggctcagcgcagccggcaggacctgtttgctgtggacacccaagtgggcactgtgacctccctcacagctggagggtcaggtgggagctggaagttgctcacaattgaccaggacctcatggtggcacagttttccacacccagcctacctccaaccctgaaagttgggttcctgccttctgcagggaaggagcagtcagtgttgtgggtgtccctggaggaggccgagcccattcccgacatccactggggcatccgggtgctacagccacccccagagcaagagaatgtgcagtatgctggccttgactttgaagcaatcctgctgcagcctggcagccctccagataagacccaagtgcccatggtggtcatgccccacggggggccccattcatcctttgtcactgcctggatgctgttcccagccatgctttgcaagatgggctttgcggtactactagtgaactatcgtggctccacgggctttggccaggacagcatcctctccctcccaggcaatgtgggccaccaggatgtgaaggatgtccagtttgcagtggaacaggtgctccaggaggaacactttgatgcaagccatgtggcccttatgggtggttcccatggtggcttcatttcctgccacttgattggtcagtacccagagacctacagggcctgcgtggcccggaaccccgtgatcaacatcgcctccatgttgggctccactgacatccctgactggtgcgtggtggaggctggctttcctttcagcagtgactgcctgccagacctcagcgtgtgggctgagatgctggacaaatcgcccatcagatacatccctcaggtgaagacaccactgttactgatgttgggccaggaggaccggcgtgtgcccttcaagcagggcatggagtattaccgtgccctcaagacccggaatgtgcctgttcggctcctgctctatcccaaaagcacccacgcattatcagaggtggaggtggagtcagacagcttcatgaatgctgtgctctggctacgcacacacttgggcagctgaagccctgccattctgcatgagctgatcagcctgtgccacacttcgctcttgaggagctcaacggtctggcagggcagcaggaggctttctgggctctggactccacggatgcgtgggcagaggaatgtgggctatgtagtcataataaattaggacacagagcctggt

SEQ ID NO: 372728 - DNA, 2060 bp, Homo sapiens
ggcacgaggctcaaccccttctctcgtaggcccttctaccctccccgaagccgggctcccgggttccgcttccacagggccgccccctctcctccgagatccaacgcctcgcccctcggtaagaggcccaggactcagcccacggccccgccccccacttggctagtccgcccctggcgagacccctgctctcacccacccaggacttctcgctcccaggccgggtcctctcaccgtcaaggcccgccccctgccaacggtcctcacccattagccgaaggccccgcccctcacagattgccgcagggcaggggcggagacagcccgggccgtcccaggctccgcccccggaagcctcacttccgggcgcgagcacgccccgcctcgccccggcggcagagaggagactatggaacgtcaggtgctgctgagcgagcccgaggaggcggcggctctgtatcggggccttagccgccagcccgcgctgagcgccgcctgcctgggcccggaggtcaccacgcagtacggcggccaataccggacggtgcacactgagtggacccagagggacctggaacgcatggagaacattcgattctgccgccaatacctggtgttccatgacggggactcagtggtgtttgcaggacccatctctgatcccccatcaccaatgcagccagctgtgcctgtatgactggtataccaaggttacctcagtggtggtagatgttgtgcctcggcagctgggagagaacttctctgggatctactgcagccttctgcctttgggatgctggtcagctgacagccagagagtggtctttgactcggctcagcgcagccggcaggacctgtttgctgtggacacccaagtgggcactgtgacctccctcacagctggagggtcaggtgggagctggaagttgctcacaattgaccaggacctcatggtggcacagttttccacacccagcctacctccaaccctgaaagttgggttcctgccttctgcagggaaggagcagtcagtgttgtgggtgtccctggaggaggccgagcccattcccgacatccactggggcatccgggtgctacagccacccccagagcaagagaatgtgcagtatgctggccttgactttgaagcaatcctgctgcagcctggcagccctccagataagacccaagtgcccatggtggtcatgccccacggggggccccattcatcctttgtcactgcctggatgctgttcccagccatgctttgcaagatgggctttgcggtactactagtgaactatcgtggctccacgggctttggccaggacagcatcctctccctcccaggcaatgtgggccaccaggatgtgaaggatgtccagtttgcagtggaacaggtgctccaggaggaacactttgatgcaagccatgtggcccttatgggtggttcccatggtggcttcatttcctgccacttgattggtcagtacccagagacctacagggcctgcgtggcccggaaccccgtgatcaacatcgcctccatgttgggctccactgacatccctgactggtgcgtggtggaggctggctttcctttcagcagtgactgcctgccagacctcagcgtgtgggctgagatgctggacaaatcgcccatcagatacatccctcaggtgaagacaccactgttactgatgttgggccaggaggaccggcgtgtgcccttcaagcagggcatggagtattaccgtgccctcaagacccggaatgtgcctgttcggctcctgctctatcccaaaagcacccacgcattatcagaggtggaggtggagtcagacagcttcatgaatgctgtgctctggctacgcacacacttgggcagctgaagccctgccattctgcatgagctgatcagcctgtgccacacttcgctcttgaggagctcaacggtctggcagggcagcaggaggctttctgggctctggactccacggatgcgtgggcagaggaatgtgggctatgtagtcataataaattaggacacagagcctggt

SEQ ID NO: 372729 - DNA, 1060 bp, Homo sapiens
  misc_feature (7)..(7): n is a, c, g, or t
ccagtgnggcatgcagctggtacaccgtgagggcagagcttgtggaggttgatgtagacgttgaccagcaggtcaccagtggggcatccgggtgctacagccacccccagagcaagagaatgtgcagtatgctggccttgactttgaagcaatcctgctgcagcctggcagccctccagataagacccaagtgcccatggtggtcatgccccacggggggccccattcatcctttgtcactgcctggatgctgttcccagccatgctttgcaagatgggctttgcggtactactagtgaactatcgtggctccacgggctttggccaggacagcatcctctccctcccaggcaatgtgggccaccaggatgtgaaggatgtccagtttgcagtggaacaggtgctccaggaggaacactttgatgcaagccatgtggcccttatgggtggttcccatggtggcttcatttcctgccacttgattggtcagtacccagagacctacagggcctgcgtggcccggaaccccgtgatcaacatcgcctccatgttgggctccactgacatccctgactggtgcgtggtggaggctggctttcctttcagcagtgactgcctgccagacctcagcgtgtgggctgagatgctggacaaatcgcccatcagatacatccctcaggtgaagacaccactgttactgatgttgggccaggaggaccggcgtgtgcccttcaagcagggcatggagtattaccgtgccctcaagacccggaatgtgcctgttcggctcctgctctatcccaaaagcacccacgcattatcagaggtggaggtggagtcagacagcttcatgaatgctgtgctctggctacgcacacacttgggcagctgaagccctgccattctgcatgagctgatcagcctgtgccacacttcgctcttgaggagctcaacggtctggcagggcagcaggaggctttctgggctctggactccacggatgcgtgggcagaggaatgtgggctatgtagtcataataaattaggacacagagcctggt

SEQ ID NO: 372730 - DNA, 1714 bp, Homo sapiens
ggcacgaggctcaaccccttctctcgtaggcccttctaccctccccgaagccgggctcccgggttccgcttccacagggccgccccctctcctccgagatccaacgcctcgcccctcggtaagaggcccaggactcagcccacggccccgccccccacttggctagtccgcccctggcgagacccctgctctcacccacccaggacttctcgctcccaggccgggtcctctcaccgtcaaggcccgccccctgccaacggtcctcacccattagccgaaggccccgcccctcacagattgccgcagggcaggggcggagacagcccgggccgtcccaggctccgcccccggaagcctcacttccgggcgcgagcacgccccgcctcgccccggcggcagagaggagactatggaacgtcaggtgctgctgagcgagcccgaggaggcggcggctctgtatcggggccttagccgccagcccgcgctgagcgccgcctgcctgggcccggaggtcaccacgcagtacggcggccaataccggacggtgcacactgagtggacccagagggacctggaacgcatggagaacattcgattctgccgccaatacctggtgttccatgacggggactcagtggtgtttgcaggacctgcaggcaacagtgtggagacccggggggaactgctgagcagagagtctccttcaggcaccatgaaagctgtgctgcgcaaggctggaggcacgggccctggggaagagaagcagttcctggaggtctgggagaagaaccggaagctcaagagcttcaacctgtcagcgctggagaaacatgggcctgtttatgaggatgactgctttggctgcctgtcctggtcgcactcggagacacacttgttgtatgtggcagagaagaagcgccccaaggccgagtccttctttcagaccaaagccttggacgtcagtgccagcgatgatgagatagccaggctgaagaagccagaccaagccatcaagggggatcagtttgtgttttatgaagactggggagaaaacatggtttccaaaagcatccctgtgctctgcgtgctggatgtcgagagtggcaacatctctgtgcttgagggggtccctgagaatgtgtcccctggacaggcattttgggcccctggagatgctggtgtggtgtttgtgggctggtggcatgagcccttccggttgggcatccgcttttgcaccaatcgcaggtcagccctgtattatgtggacctcatcggggggaagtgtgagctcctctcggatgactccctggctgtctcttctccccggctgagcccagaccaatgtcgcattgtctacctgcagtacccatctctgatcccccatcaccaatgcagccagctgtgcctgtatgactggtataccaaggttacctcagtggtggtagatgttgtgcctcggcagctgggagagaacttctctgggatctactgcagccttctgcctttgggatgctggtcagctgacagccagagagtggtctttgactcggctcagcgcagccggcagggacctgttttgcttgtgggacaacccaagtgggcactggtgacctcccttcacaagttggaggggtcacaggtgggaactggaaattgtcacacattggcacagaactcatgggggccagattacacaacccaattactcaaaccg

SEQ ID NO: 372731 - DNA, 972 bp, Homo sapiens
ataggcatagtagagctggtgtgaatcggccgagggtcatatgctggccttgactttgaagcaatcctgctgcagcctggcagccctccagataagacccaagtgcccatggtggtcatgccccacggggggccccattcatcctttgtcactgcctggatgctgttcccagccatgctttgcaagatgggctttgcggtactactagtgaactatcgtggctccacgggctttggccaggacagcatcctctccctcccaggcaatgtgggccaccaggatgtgaaggatgtccagtttgcagtggaacaggtgctccaggaggaacactttgatgcaagccatgtggcccttatgggtggttcccatggtggcttcatttcctgccacttgattggtcagtacccagagacctacagggcctgcgtggcccggaaccccgtgatcaacatcgcctccatgttgggctccactgacatccctgactggtgcgtggtggaggctggctttcctttcagcagtgactgcctgccagacctcagcgtgtgggctgagatgctggacaaatcgcccatcagatacatccctcaggtgaagacaccactgttactgatgttgggccaggaggaccggcgtgtgcccttcaagcagggcatggagtattaccgtgccctcaagacccggaatgtgcctgttcggctcctgctctatcccaaaagcacccacgcattatcagaggtggaggtggagtcagacagcttcatgaatgctgtgctctggctacgcacacacttgggcagctgaagccctgccattctgcatgagctgatcagcctgtgccacacttcgctcttgaggagctcaacggtctggcagggcagcaggaggctttctgggctctggactccacggatgcgtgggcagaggaatgtgggctatgtagtcataataaattaggacacagagcctggt

SEQ ID NO: 372732 - DNA, 1192 bp, Homo sapiens
  misc_feature (12)..(12): n is a, c, g, or t
  misc_feature (14)..(14): n is a, c, g, or t
  misc_feature (20)..(23): n is a, c, g, or t
  misc_feature (29)..(29): n is a, c, g, or t
  misc_feature (31)..(31): n is a, c, g, or t
gacgaggctatngnggctcnnnnggcttngncccattcatccttgtcactgcctggatgctgttcccagccatgcttgcaagatgggcttgcagccggcaggacctgtttgctgtggacacccaagtgggcactgtgacctccctcacagctggagggtcaggtgggagctggaagttgctcacaattgaccaggacctcatggtggcacagttttccacacccagcctacctccaaccctgaaagttgggttcctgccttctgcagggaaggagcagtcagtgttgtgggtgtccctggaggaggccgagcccattcccgacatccactggggcatccgggtgctacagccacccccagagcaagagaatgtgcagtatgctggccttgactttgaagcaatcctgctgcagcctggcagccctccagataagacccaagtgcccatggtggtcatgccccacgcatcctctccctcccaggcaatgtgggccaccaggatgtgaaggatgtccagtttgcagtggaacaggtgctccaggaggaacactttgatgcaagccatgtggcccttatgggtggttcccatggtggcttcatttcctgccacttgattggtcagtacccagagacctacagggcctgcgtggcccggaaccccgtgatcaacatcgcctccatgttgggctccactgacatccctgactggtgcgtggtggaggctggctttcctttcagcagtgactgcctgccagacctcagcgtgtgggctgagatgctggacaaatcgcccatcagatacatccctcaggtgaagacaccactgttactgatgttgggccaggaggaccggcgtgtgcccttcaagcagggcatggagtattaccgtgccctcaagacccggaatgtgcctgttcggctcctgctctatcccaaaagcacccacgcattatcagaggtggaggtggagtcagacagcttcatgaatgctgtgctctggctacgcacacacttgggcagctgaagccctgccattctgcatgagctgatcagcctgtgccacacttcgctcttgaggagctcaacggtctggcagggcagcaggaggctttctgggctctggactccacggatgcgtgggcagaggaatgtgggctatgtagtcataataaattaggacacagagcctggt

SEQ ID NO: 372733 - DNA, 601 bp, Homo sapiens
agtataaaccgaacagggggtggtgggaacccaggctgacggtgagggtggtggagtttggacaggagcgcgcgggccggcggggaggcccacagaggcactgttgagccctgcggcctggttgaccagactccagtgaggcgtcagcctgttccactggcagctctgtgacgtgtgggctgagatgctggacaaatcgcccatcagatacatccctcaggtgaagacaccactgttactgatgttgggccaggaggaccggcgtgtgcccttcaagcagggcatggagtattaccgtgccctcaagacccggaatgtgcctgttcggctcctgctctatcccaaaagcacccacgcattatcagaggtggaggtggagtcagacagcttcatgaatgctgtgctctggctacgcacacacttgggcagctgaagccctgccattctgcatgagctgatcagcctgtgccacacttcgctcttgaggagctcaacggtctggcagggcagcaggaggctttctgggctctggactccacggatgcgtgggcagaggaatgtgggctatgtagtcataataaattaggacacagagcctggt

SEQ ID NO: 372734 - DNA, 1316 bp, Homo sapiens
ggcacgaggctcaaccccttctctcgtaggcccttctaccctccccgaagccgggctcccgggttccgcttccacagggccgccccctctcctccgagatccaacgcctcgcccctcggtaagaggcccaggactcagcccacggccccgccccccacttggctagtccgcccctggcgagacccctgctctcacccacccaggacttctcgctcccaggccgggtcctctcaccgtcaaggcccgccccctgccaacggtcctcacccattagccgaaggccccgcccctcacagattgccgcagggcaggggcggagacagcccgggccgtcccaggctccgcccccggaagcctcacttccgggcgcgagcacgccccgcctcgccccggcggcagagaggagactatggaacgtcagactgctgagcagagagtctccttcaggcaccatgaaagctgtgctgcgcaaggctggaggcacgggccctggggaagagaagcagttcctggaggtctgggagaagaaccggaagctcaagagcttcaacctgtcagcgctggagaaacatgggcctgtttatgaggatgactgctttggctgcctgtcctggtcgcactcggagacacacttgttgtatgtggcagagaagaagcgccccaaggccgagtccttctttcagaccaaagccttggacgtcagtgccagcgatgatgagatagccaggctgaagaagccagaccaagccatcaaggcattttgggcccctggagatgctggtgtggtgtttgtgggctggtggcatgagcccttccggttgggcatccgcttttgcaccaatcgcaggtcagccctgtattatgtggacctcatcggggggaagtgtgagctcctctcggatgactccctggctgtctcttctccccggctgagcccagaccaatgtcgcattgtctacctgcagtacccatctctgatcccccatcaccaatgcagccagctgtgcctgtatgactggtataccaaggttacctcagtggtggtagatgttgtgcctcggcagctgggagagaacttctctgggatctactgcagccttctgcctttgggatgctggtcagctgacagccagagagtggtctttgactcggctcagcgcagccggcagggacctgttttgcttgtgggacaacccaagtgggcactggtgacctcccttcacaagttggaggggtcacaggtgggaactggaaattgtcacacattggcacagaactcatgggggccagattacacaacccaattactcaaaccg

SEQ ID NO: 372735 - DNA, 982 bp, Homo sapiens
ggcacgaggctcaaccccttctctcgtaggcccttctaccctccccgaagccgggctcccgggttccgcttccacagggccgccccctctcctccgagatccaacgcctcgcccctcggtaagaggcccaggactcagcccacggccccgccccccacttggctagtccgcccctggcgagacccctgctctcacccacccaggacttctcgctcccaggccgggtcctctcaccgtcaaggcccgccccctgccaacggtcctcacccattagccgaaggccccgcccctcacagattgccgcagggcaggggcggagacagcccgggccgtcccaggctccgcccccggaagcctcacttccgggcgcgagcacgccccgcctcgccccggcggcagagaggagactatggaacgtcaggtgctgctgagcgagcccgaggaggcggcggctctgtatcggggccttagccgccagcccgcgctgagcgccgcctgcctgggcccggaggtcaccacgcagtacggcggccaataccggacggtgcacactgagtggacccagagggacctggaacgcatggagaacattcgattctgccgccaatacctggtgttccatgacggggactcagtggtgtttgcaggacctgcaggcaacagtgtggagacccggggggaactgctgagcagagagtctccttcaggcaccatgaaagctgtgctgcgcaaggctggaggcacgggccctggggaagagaagcagttcctggaggtctgggagaagaaccggaagctcaagagcttcaacctgtcagctgccattctgcatgagctgatcagcctgtgccacacttcgctcttgaggagctcaacggtctggcagggcagcaggaggctttctgggctctggactccacggatgcgtgggcagaggaatgtgggctatgtagtcataataaattaggacacagagcctggt

SEQ ID NO: 372736 - DNA, 682 bp, Homo sapiens
tgggcagaagggaagggcagggaggcagccaggccacctatgacacattctttccccttggcagaaagttgggttcctgccttctgcagggaaggagcagtcagtgttgtgggtgtccctggaggaggccgagcccattcccgacatccactggggcatccgggtgctacagccacccccagagcaagagaatgtgcagtatgtggtgagctgggccaggggcagagggatgccttctccaggttccccagcacaaagcctctgcggtgacctttgctacctcctctctcacattgtggggtttctggtgatgacctctaagaggttttctgttcctcttgtggatgggcatgggaagtagcatctagacatctgagcgcctgctctggatatcacctgggcttcaccaggccaaatcatctgtggttggaagacccaggtccaaagaaaataggcctcatacaagcctcagtgaccacacctcatcccgaatgctgttgctgcaggatggggttccctgacgagggcagaagaagtatgagccttctggggtccatgtgtcatggtgtggactaccttggccaggtctctgacccagaggtcagccccacacctgcagctagagatggggccttagttggggaagcccctaggctcaccctgctgactgctgccctctccc

SEQ ID NO: 372737 - DNA, 734 bp, Homo sapiens
ccaggccaaatcatctgtggttggaagacccaggtccaaagaaaataggcctcatacaagcctcagtgaccacacctcatcccgaatgctgttgctgcaggatggggttccctgacgagggcagaagaagtatgagccttctggggtccatgtgtcatggtgtggactaccttggccaggtctctgacccagaggtcagccccacacctgcagctagagatggggccttagttggggaagcccctaggctcaccctgctgactgctgccctctccctgcagcctggccttgactttgaagcaatcctgctgcagcctggcagccctccagataagacccaagtgcccatggtggtcatgccccacgaggcatctggcgttaagagcccttgccctcccagccctcttcctagctggccctttcaccctccgctccctgtctgcaggggggccccattcatcctttgtcactgcctggatgctgttcccagccatgctttgcaagatgggctttgcggtactactaggtgagtgagcagggacccacagttctgttaggactacagtggagtgacgggggtggacctggtttgtataagtaccatgggtgccactctagtctccaggactttctctagcctagacctagtaaccactaccaggaactgctggggcccagcctctggttctgtggcatagtgataacaaggactaactcgggacttccaaggaaag

SEQ ID NO: 372738 - DNA, 2691 bp, Homo sapiens
ggcacgaggctcaaccccttctctcgtaggcccttctaccctccccgaagccgggctcccgggttccgcttccacagggccgccccctctcctccgagatccaacgcctcgcccctcggacttctcgctcccaggccgggtcctctcaccgtcaaggcccgccccctgccaacggtcctcacccattagccgaaggccccgcccctcacagattgccgcagggcaggggcggagacagcccgggccgtcccaggctccgcccccggaagcctcacttccgggcgcgagcacgccccgcctcgccccggcggcagagaggagactatggaacgtcaggtgctgctgagcgagcccgaggaggcggcggctctgtatcggggccttagccgccagcccgcgctgagcgccgcctgcctgggcccggaggtcaccacgcagtacggcggccaataccggacggtgcacactgagtggacccagagggacctggaacgcatggagaacattcgattctgccgccaatacctggtgttccatgacggggactcagtggtgtttgcaggacctgcaggcaacagtgtggagacccggggggaactgctgagcagagagtctccttcaggcaccatgaaagctgtgctgcgcaaggctggaggcacgggccctggggaagagaagcagttcctggaggtctgggagaagaaccggaagctcaagagcttcaacctgtcagcgctggagaaacatgggcctgtttatgaggatgactgctttggctgcctgtcctggtcgcactcggagacacacttgttgtatgtggcagagaagaagcgccccaaggccgagtccttctttcagaccaaagccttggacgtcagtgccagcgatgatgagatagccaggctgaagaagccagaccaagccatcaagggggatcagtttgtgttttatgaagactggggagaaaacatggtttccaaaagcatccctgtgctctgcgtgctggatgtcgagagtggcaacatctctgtgcttgagggggtccctgagaatgtgtcccctggacaggcattttgggcccctggagatgctggtgtggtgtttgtgggctggtggcatgagcccttccggttgggcatccgcttttgcaccaatcgcaggtcagccctgtattatgtggacctcatcggggggaagtgtgagctcctctcggatgactccctggctgtctcttctccccggctgagcccagaccaatgtcgcattgtctacctgcagtacccatctctgatcccccatcaccaatgcagccagctgtgcctgtatgactggtataccaaggttacctcagtggtggtagatgttgtgcctcggcagctgggagagaacttctctgggatctactgcagccttctgcctttgggatgctggtcagctgacagccagagagtggtctttgactcggctcagcgcagccggcaggacctgtttgctgtggacacccaagtgggcactgtgacctccctcacagctggagggtcaggtgggagctggaagttgctcacaattgaccaggacctcatggtggcacagttttccacacccagcctacctccaaccctgaaagttgggttcctgccttctgcagggaaggagcagtcagtgttgtgggtgtccctggaggaggccgagcccattcccgacatccactggggcatccgggtgctacagccacccccagagcaagagaatgtgcagtatgctggccttgactttgaagcaatcctgctgcagcctggcagccctccagataagacccaagtgcccatggtggtcatgccccacggggggccccattcatcctttgtcactgcctggatgctgttcccagccatgctttgcaagatgggctttgcggtactactagtgaactatcgtggctccacgggctttggccaggacagcatcctctccctcccaggcaatgtgggccaccaggatgtgaaggatgtccagtttgcagtggaacaggtgctccaggaggaacactttgatgcaagccatgtggcccttatgggtggttcccatggtggcttcatttcctgccacttgattggtcagtacccagagacctacagggcctgcgtggcccggaaccccgtgatcaacatcgcctccatgttgggctccactgacatccctgactggtgcgtggtggaggctggctttcctttcagcagtgactgcctgccagacctcagcgtgtgggctgagatgctggacaaatcgcccatcagatacatccctcaggtgaagacaccactgttactgatgttgggccaggaggaccggcgtgtgcccttcaagcagggcatggagtattaccgtgccctcaagacccggaatgtgcctgttcggctcctgctctatcccaaaagcacccacgcattatcagaggtggaggtggagtcagacagcttcatgaatgctgtgctctggctacgcacacacttgggcagctgaagccctgccattctgcatgagctgatcagcctgtgccacacttcgctcttgaggagctcaacggtctggcagggcagcaggaggctttctgggctctggactccacggatgcgtgggcagaggaatgtgggctatgtagtcataataaattaggacacagagcctggt

SEQ ID NO: 372739 - DNA, 3248 bp, Homo sapiens
ggcacgaggctcaaccccttctctcgtaggcccttctaccctccccgaagccgggctcccgggttccgcttccacagggccgccccctctcctccgagatccaacgcctcgcccctcggtaagaggcccaggactcagcccacggccccgccccccacttggctagtccgcccctggcgagacccctgctctcacccacccaggacttctcgctcccaggccgggtcctctcaccgtcaaggcccgccccctgccaacggtcctcacccattagccgaaggccccgcccctcacagattgccgcagggcaggggcggagacagcccgggccgtcccaggctccgcccccggaagcctcacttccgggcgcgagcacgccccgcctcgccccggcggcagagaggagactatggaacgtcaggtgctgctgagcgagcccgaggaggcggcggctctgtatcggggccttagccgccagcccgcgctgagcgccgcctgcctgggcccggaggtcaccacgcagtacggcggccaataccggacggtgcacactgagtggacccagagggacctggaacgcatggagaacattcgattctgccgccaatacctggtgttccatgacggggactcagtggtgtttgcaggacctgcaggcaacagtgtggagacccggggggaactgctgagcagagagtctccttcaggcaccatgaaagctgtgctgcgcaaggctggaggcacgggccctggggaagagaagcagttcctggaggtctgggagaagaaccggaagctcaagagcttcaacctgtcagcgctggagaaacatgggcctgtttatgaggatgactgctttggctgcctgtcctggtcgcactcggagacacacttgttgtatgtggcagagaagaagcgccccaaggccgagtccttctttcagaccaaagccttggacgtcagtgccagcgatgatgagatagccaggctgaagaagccagaccaagccatcaagggggatcagtttgtgttttatgaagactggggagaaaacatggtttccaaaagcatccctgtgctctgcgtgctggatgtcgagagtggcaacatctctgtgcttgagggggtccctgagaatgtgtcccctggacaggcattttgggcccctggagatgctggtgtggtgtttgtgggctggtggcatgagcccttccggttgggcatccgcttttgcaccaatcgcaggtcagccctgtattatgtggacctcatcggggggaagtgtgagctcctctcggatgactccctggctgtctcttctccccggctgagcccagaccaatgtcgcattgtctacctgcagtacccatctctgatcccccatcaccaatgcagccagctgtgcctgtatgactggtataccaaggttacctcagtggtggtagatgttgtgcctcggcagctgggagagaacttctctgggatctactgcagccttctgcctttgggatgctggtcagctgacagccagagagtggtctttgactcggctcagcgcagccggcaggacctgtttgctgtggacacccaagtgggcactgtgacctccctcacagctggagggtcaggtgggagctggaagttgctcacaattgaccaggacctcatggtggcacagttttccacacccagcctacctccaaccctgaaagttgggttcctgccttctgcagggaaggagcagtcagtgttgtgggtgtccctggaggaggccgagcccattcccgacatccactggggcatccgggtgctacagccacccccagagcaagagaatgtgcagtatgctggccttgactttgaagcaatcctgctgcagcctggcagccctccagataagacccaagtgcccatggtggtcatgccccacggggggccccattcatcctttgtcactgcctggatgctgttcccagccatgctttgcaagatgggctttgcggtactactagtgaactatcgtggctccacgggctttggccaggacagcatcctctccctcccaggcaatgtgggccaccaggatgtgaaggatgtccagtttgcagtggaacaggtgctccaggaggaacactttgatgcaagccatgtggcccttatgggtggttcccatggtggcttcatttcctgccacttgattggtcagtacccagagacctacagggcctgcgtggcccggaaccccgtgatcaacatcgcctccatgttgggctccactgacatccctgactggtgcgtggtggaggctggctttcctttcagcagtgactgcctgccagacctcagcgtgtgggctgagatgctggacaaatcgcccatcagatacatccctcaggtgaagacaccactgttactgatgttgggccaggaggaccggcgtgtgcccttcaagcagggcatggagtattaccgtgccctcaagacccggaatgtgcctgttcggctcctgctctatcccaaaagcacccacgcattatcagaggtggaggtggagtcagacagcttcatgaatgctgtgctctggctacgcacacacttgggcagctgaagccctgccattctgcatgagctgatcagcctgtgccacacttcgctcttgaggagctcaacggtctggcagggcagcaggaggctttctgggctctggactccacggatgcgtgggcagaggaatgtgggctatgtagtcataataaattaggacacagagcctggttcctgctggtactttgtaccaaaccatccccaaccccacctcccactctggggtgcagagaccctaggttctgggtgtggcagccacaagggcttcatctgcctccagtgtgagaagggagggaacagtgagaggcttagcctctgcctgtcctggcaaccaggactctgtaccagcctagcttccctgctgcagccccttccattagcaactactctgtaccacccttcccaagagtatgtctggaggactagtgtgaggccctgtctttccacggcacccatgggcaaaagtagtcccagggacattgccttggttggggaagcccctaggctggacagatcacctagcccagggtgtgctgggctcaagccacccgagccctagcaaggagtcactgacacatttcctggaagcaaaggctaagaagcatctgtacaggcataaagaggaaacaaggcaatatgtctga

SEQ ID NO: 372740 - DNA, 2397 bp, Homo sapiens
taggatacgagcctggatgaaatcggacgaggggaacgtcaggtgctgctgagcgagcccgaggaggcggcggctctgtatcggggccttagccgccagcccgcgctgagcgccgcctgcctgggcccggaggtcaccacgcagtacggcggccaataccggacggtgcacactgagtggacccagagggacctggaacgcatggagaacattcgattctgccgccaatacctggtgttccatgacggggactcagtggtgtttgcaggacctgcaggcaacagtgtggagacccggggggaactgctgagcagagagtctccttcaggcaccatgaaagctgtgctgcgcaaggctggaggcacgggccctggggaagagaagcagttcctggaggtctgggagaagaaccggaagctcaagagcttcaacctgtcagcgctggagaaacatgggcctgtttatgaggatgactgctttggctgcctgtcctggtcgcactcggagacacacttgttgtatgtggcagagaagaagcgccccaaggccgagtccttctttcagaccaaagccttggacgtcagtgccagcgatgatgagatagccaggctgaagaagccagaccaagccatcaagggggatcagtttgtgttttatgaagactggggagaaaacatggtttccaaaagcatccctgtgctctgcgtgctggatgtcgagagtggcaacatctctgtgcttgagggggtccctgagaatgtgtcccctggacaggcattttgggcccctggagatgctggtgtggtgtttgtgggctggtggcatgagcccttccggttgggcatccgcttttgcaccaatcgcaggtcagccctgtattatgtggacctcatcggggggaagtgtgagctcctctcggatgactccctggctgtctcttctccccggctgagcccagaccaatgtcgcattgtctacctgcagtacccatctctgatcccccatcaccaatgcagccagctgtgcctgtatgactggtataccaaggttacctcagtggtggtagatgttgtgcctcggcagctgggagagaacttctctgggatctactgcagccttctgcctttgggatgctggtcagctgacagccagagagtggtctttgactcggctcagcgcagccggcaggacctgtttgctgtggacacccaagtgggcactgtgacctccctcacagctggagggtcaggtgggagctggaagttgctcacaattgaccaggacctcatggtggcacagttttccacacccagcctacctccaaccctgaaagttgggttcctgccttctgcagggaaggagcagtcagtgttgtgggtgtccctggaggaggccgagcccattcccgacatccactggggcatccgggtgctacagccacccccagagcaagagaatgtgcagtatgctggccttgactttgaagcaatcctgctgcagcctggcagccctccagataagacccaagtgcccatggtggtcatgccccacggggggccccattcatcctttgtcactgcctggatgctgttcccagccatgctttgcaagatgggctttgcggtactactagtgaactatcgtggctccacgggctttggccaggacagcatcctctccctcccaggcaatgtgggccaccaggatgtgaaggatgtccagtttgcagtggaacaggtgctccaggaggaacactttgatgcaagccatgtggcccttatgggtggttcccatggtggcttcatttcctgccacttgattggtcagtacccagagacctacagggcctgcgtggcccggaaccccgtgatcaacatcgcctccatgttgggctccactgacatccctgactggtgcgtggtggaggctggctttcctttcagcagtgactgcctgccagacctcagcgtgtgggctgagatgctggacaaatcgcccatcagatacatccctcaggtgaagacaccactgttactgatgttgggccaggaggaccggcgtgtgcccttcaagcagggcatggagtattaccgtgccctcaagacccggaatgtgcctgttcggctcctgctctatcccaaaagcacccacgcattatcagaggtggaggtggagtcagacagcttcatgaatgctgtgctctggctacgcacacacttgggcagctgaagccctgccattctgcatgagctgatcagcctgtgccacacttcgctcttgaggagctcaacggtctggcagggcagcaggaggctttctgggctctggactccacggatgcgtgggcagaggaatgtgggctatgtagtcataataaattaggacacagagcctggt

SEQ ID NO: 372741 - DNA, 2699 bp, Homo sapiens
ggcacgaggctcaaccccttctctcgtaggcccttctaccctccccgaagccgggctcccgggttccgcttccacagggccgccccctctcctccgagatccaacgcctcgcccctcggtaagaggcccaggactcagcccacggccccgccccccacttggctagtccgcccctggcgagacccctgctctcacccacccaggacttctcgctcccaggccgggtcctctcaccgtcaaggcccgccccctgccaacggtcctcacccattagccgaaggccccgcccctcacagattgccgcagggcaggggcggagacagcccgggccgtcccaggctccgcccccggaagcctcacttccgggcgcgagcacgccccgcctcgccccggcggcagagaggagactatggaacgtcaggtgctgctgagcgagcccgaggaggcggcggctctgtatcggggccttagccgccagcccgcgctgagcgccgcctgcctgggcccggaggtcaccacgcagtacggcggccaataccggacggtgcacactgagtggacccagagggacctggaacgcatggagaacattcgattctgccgccaatacctggtgttccatgacggggactcagtggtgtttgcaggacctgcaggcaacagtgtggagacccggggggaactgctgagcagagagtctccttcaggcaccatgaaagctgtgctgcgcaaggctggaggcacgggccctggggaagagaagcagttcctggaggtctgggagaagaaccggaagctcaagagcttcaacctgtcagcgctggagaaacatgggcctgtttatgaggatgactgctttggctgcctgtcctggtcgcactcggagacacacttgttgtatgtggcagagaagaagcgccccaaggccgagtccttctttcagaccaaagccttggacgtcagtgccagcgatgatgagatagccaggctgaagaagccagaccaagccatcaagggggatcagtttgtgttttatgaagactggggagaaaacatggtttccaaaagcatccctgtgctctgcgtgctggatgtcgagagtggcaacatctctgtgcttgagggggtccctgagaatgtgtcccctggacaggcattttgggcccctggagatgctggtgtggtgtttgtgggctggtggcatgagcccttccggttgggcatccgcttttgcaccaatcgcaggtcagccctgtattatgtggacctcatcggggggaagtgtgagctcctctcggatgactccctggctgtctcttctccccggctgagcccagaccaatgtcgcattgtctacctgcagtacccatctctgatcccccatcaccaatgcagccagctgtgcctgtatgactggtataccaaggttacctcagtggtggtagatgttgtgcctcggcagctgggagagaacttctctgggatctactgcagccttctgcctttgggatgctggtcagctgacagccagagagtggtctttgactcggctcagcgcagccggcaggacctgtttgctgtggacacccaagtgggcactgtgacctccctcacagctggagggtcaggtgggagctggaagttgctcacaattgaccaggacctcatggtggcacagttttccacacccagcctacctccaaccctgaaagttgggttcctgccttctgcagggaaggagcagtcagtgttgtgggtgtccctggaggaggccgagcccattcccgacatccactggggcatccgggtgctacagccacccccagagcaagagaatgtgcagtatgctggccttgactttgaagcaatcctgctgcagcctggcagccctccagataagacccaagtgcccatggtggtcatgccccacggggggccccattcatcctttgtcactgcctggatgctgttcccagccatgctttgcaagatgggctttgcggtactactagtgaactatcgtggctccacgggctttggccaggacagcatcctctccctcccaggcaatgtgggccaccaggatgtgaaggatgtccagtttgcagtggaacaggtgctccaggaggaacactttgatgcaagccatgtggcccttatgggtggttcccatggtggcttcatttcctgccacttgattggtcagtacccagagacctacagggcctgcgtggcccggaaccccgtgatcaacatcgcctccatgttgggctccactgacatccctgactggtgcgtggtggaggctggctttcctttcagcagtgactgcctgccagacctcagcgtgtgggctgagatgctggacaaatcgcccatcagatacatccctcaggtgaagacaccactgttactgatgttgggccaggaggaccggcgtgtgcccttcaagcagggcatggagtattaccgtgccctcaagacccggaatgtgcctgttcggctcctgctctatcccaaaagcacccacgcattatcagaggtggaggtggagtcagacagcttcatgaatgctgtgctctggctacgcacacacttgggcagctgaagccaggctttctgggctctggactccacggatgcgtgggcagaggaatgtgggctatgtagtcataataaattaggacacagagcctggt

SEQ ID NO: 372742 - DNA, 2340 bp, Homo sapiens
ggcacgaggctcaaccccttctctcgtaggcccttctaccctccccgaagccgggctcccgggttccgcttccacagggccgccccctctcctccgagatccaacgcctcgcccctcgagtggacccagagggacctggaacgcatggagaacattcgattctgccgccaatacctggtgttccatgacggggactcagtggtgtttgcaggacctgcaggcaacagtgtggagacccggggggaactgctgagcagagagtctccttcaggcaccatgaaagctgtgctgcgcaaggctggaggcacgggccctggggaagagaagcagttcctggaggtctgggagaagaaccggaagctcaagagcttcaacctgtcagcgctggagaaacatgggcctgtttatgaggatgactgctttggctgcctgtcctggtcgcactcggagacacacttgttgtatgtggcagagaagaagcgccccaaggccgagtccttctttcagaccaaagccttggacgtcagtgccagcgatgatgagatagccaggctgaagaagccagaccaagccatcaagggggatcagtttgtgttttatgaagactggggagaaaacatggtttccaaaagcatccctgtgctctgcgtgctggatgtcgagagtggcaacatctctgtgcttgagggggtccctgagaatgtgtcccctggacaggcattttgggcccctggagatgctggtgtggtgtttgtgggctggtggcatgagcccttccggttgggcatccgcttttgcaccaatcgcaggtcagccctgtattatgtggacctcatcggggggaagtgtgagctcctctcggatgactccctggctgtctcttctccccggctgagcccagaccaatgtcgcattgtctacctgcagtacccatctctgatcccccatcaccaatgcagccagctgtgcctgtatgactggtataccaaggttacctcagtggtggtagatgttgtgcctcggcagctgggagagaacttctctgggatctactgcagccttctgcctttgggatgctggtcagctgacagccagagagtggtctttgactcggctcagcgcagccggcaggacctgtttgctgtggacacccaagtgggcactgtgacctccctcacagctggagggtcaggtgggagctggaagttgctcacaattgaccaggacctcatggtggcacagttttccacacccagcctacctccaaccctgaaagttgggttcctgccttctgcagggaaggagcagtcagtgttgtgggtgtccctggaggaggccgagcccattcccgacatccactggggcatccgggtgctacagccacccccagagcaagagaatgtgcagtatgctggccttgactttgaagcaatcctgctgcagcctggcagccctccagataagacccaagtgcccatggtggtcatgccccacggggggccccattcatcctttgtcactgcctggatgctgttcccagccatgctttgcaagatgggctttgcggtactactagtgaactatcgtggctccacgggctttggccaggacagcatcctctccctcccaggcaatgtgggccaccaggatgtgaaggatgtccagtttgcagtggaacaggtgctccaggaggaacactttgatgcaagccatgtggcccttatgggtggttcccatggtggcttcatttcctgccacttgattggtcagtacccagagacctacagggcctgcgtggcccggaaccccgtgatcaacatcgcctccatgttgggctccactgacatccctgactggtgcgtggtggaggctggctttcctttcagcagtgactgcctgccagacctcagcgtgtgggctgagatgctggacaaatcgcccatcagatacatccctcaggtgaagacaccactgttactgatgttgggccaggaggaccggcgtgtgcccttcaagcagggcatggagtattaccgtgccctcaagacccggaatgtgcctgttcggctcctgctctatcccaaaagcacccacgcattatcagaggtggaggtggagtcagacagcttcatgaatgctgtgctctggctacgcacacacttgggcagctgaagccctgccattctgcatgagctgatcagcctgtgccacacttcgctcttgaggagctcaacggtctggcagggcagcaggaggctttctgggctctggactccacggatgcgtgggcagaggaatgtgggctatgtagtcataataaattaggacacagagcctggt

SEQ ID NO: 372743 - DNA, 2216 bp, Homo sapiens
gcccaggctccgcccccggaagctcacttccgggcgcgagcccgaggaggcggcggctctgtatcggggactcagtggtgtttgcaggacctgcaggcaacagtgtggagacccggggggaactgctgagcagagagtctccttcaggcaccatgaaagctgtgctgcgcaaggctggaggcacgggccctggggaagagaagcagttcctggaggtctgggagaagaaccggaagctcaagagcttcaacctgtcagcgctggagaaacatgggcctgtttatgaggatgactgctttggctgcctgtcctggtcgcactcggagacacacttgttgtatgtggcagagaagaagcgccccaaggccgagtccttctttcagaccaaagccttggacgtcagtgccagcgatgatgagatagccaggctgaagaagccagaccaagccatcaagggggatcagtttgtgttttatgaagactggggagaaaacatggtttccaaaagcatccctgtgctctgcgtgctggatgtcgagagtggcaacatctctgtgcttgagggggtccctgagaatgtgtcccctggacaggcattttgggcccctggagatgctggtgtggtgtttgtgggctggtggcatgagcccttccggttgggcatccgcttttgcaccaatcgcaggtcagccctgtattatgtggacctcatcggggggaagtgtgagctcctctcggatgactccctggctgtctcttctccccggctgagcccagaccaatgtcgcattgtctacctgcagtacccatctctgatcccccatcaccaatgcagccagctgtgcctgtatgactggtataccaaggttacctcagtggtggtagatgttgtgcctcggcagctgggagagaacttctctgggatctactgcagccttctgcctttgggatgctggtcagctgacagccagagagtggtctttgactcggctcagcgcagccggcaggacctgtttgctgtggacacccaagtgggcactgtgacctccctcacagctggagggtcaggtgggagctggaagttgctcacaattgaccaggacctcatggtggcacagttttccacacccagcctacctccaaccctgaaagttgggttcctgccttctgcagggaaggagcagtcagtgttgtgggtgtccctggaggaggccgagcccattcccgacatccactggggcatccgggtgctacagccacccccagagcaagagaatgtgcagtatgctggccttgactttgaagcaatcctgctgcagcctggcagccctccagataagacccaagtgcccatggtggtcatgccccacggggggccccattcatcctttgtcactgcctggatgctgttcccagccatgctttgcaagatgggctttgcggtactactagtgaactatcgtggctccacgggctttggccaggacagcatcctctccctcccaggcaatgtgggccaccaggatgtgaaggatgtccagtttgcagtggaacaggtgctccaggaggaacactttgatgcaagccatgtggcccttatgggtggttcccatggtggcttcatttcctgccacttgattggtcagtacccagagacctacagggcctgcgtggcccggaaccccgtgatcaacatcgcctccatgttgggctccactgacatccctgactggtgcgtggtggaggctggctttcctttcagcagtgactgcctgccagacctcagcgtgtgggctgagatgctggacaaatcgcccatcagatacatccctcaggtgaagacaccactgttactgatgttgggccaggaggaccggcgtgtgcccttcaagcagggcatggagtattaccgtgccctcaagacccggaatgtgcctgttcggctcctgctctatcccaaaagcacccacgcattatcagaggtggaggtggagtcagacagcttcatgaatgctgtgctctggctacgcacacacttgggcagctgaagccctgccattctgcatgagctgatcagcctgtgccacacttcgctcttgaggagctcaacggtctggcagggcagcaggaggctttctgggctctggactccacggatgcgtgggcagaggaatgtgggctatgtagtcataataaattaggacacagagcctggt

SEQ ID NO: 372744 - DNA, 2255 bp, Homo sapiens
agagggagatctctgccccctggggctgagagaccccaacctttccccaagctgaagctgcagggtattgaggtaccagccagatgtcttcccacaaaggatctgtggtggcacaggggaatggggctcctgcaggcaacagtgtggagacccggggggaactgctgagcagagagtctccttcaggcaccatgaaagctgtgctgcgcaaggctggaggcacgggccctggggaagagaagcagttcctggaggtctgggagaagaaccggaagctcaagagcttcaacctgtcagcgctggagaaacatgggcctgtttatgaggatgactgctttggctgcctgtcctggtcgcactcggagacacacttgttgtatgtggcagagaagaagcgccccaaggccgagtccttctttcagaccaaagccttggacgtcagtgccagcgatgatgagatagccaggctgaagaagccagaccaagccatcaagggggatcagtttgtgttttatgaagactggggagaaaacatggtttccaaaagcatccctgtgctctgcgtgctggatgtcgagagtggcaacatctctgtgcttgagggggtccctgagaatgtgtcccctggacaggcattttgggcccctggagatgctggtgtggtgtttgtgggctggtggcatgagcccttccggttgggcatccgcttttgcaccaatcgcaggtcagccctgtattatgtggacctcatcggggggaagtgtgagctcctctcggatgactccctggctgtctcttctccccggctgagcccagaccaatgtcgcattgtctacctgcagtacccatctctgatcccccatcaccaatgcagccagctgtgcctgtatgactggtataccaaggttacctcagtggtggtagatgttgtgcctcggcagctgggagagaacttctctgggatctactgcagccttctgcctttgggatgctggtcagctgacagccagagagtggtctttgactcggctcagcgcagccggcaggacctgtttgctgtggacacccaagtgggcactgtgacctccctcacagctggagggtcaggtgggagctggaagttgctcacaattgaccaggacctcatggtggcacagttttccacacccagcctacctccaaccctgaaagttgggttcctgccttctgcagggaaggagcagtcagtgttgtgggtgtccctggaggaggccgagcccattcccgacatccactggggcatccgggtgctacagccacccccagagcaagagaatgtgcagtatgctggccttgactttgaagcaatcctgctgcagcctggcagccctccagataagacccaagtgcccatggtggtcatgccccacggggggccccattcatcctttgtcactgcctggatgctgttcccagccatgctttgcaagatgggctttgcggtactactagtgaactatcgtggctccacgggctttggccaggacagcatcctctccctcccaggcaatgtgggccaccaggatgtgaaggatgtccagtttgcagtggaacaggtgctccaggaggaacactttgatgcaagccatgtggcccttatgggtggttcccatggtggcttcatttcctgccacttgattggtcagtacccagagacctacagggcctgcgtggcccggaaccccgtgatcaacatcgcctccatgttgggctccactgacatccctgactggtgcgtggtggaggctggctttcctttcagcagtgactgcctgccagacctcagcgtgtgggctgagatgctggacaaatcgcccatcagatacatccctcaggtgaagacaccactgttactgatgttgggccaggaggaccggcgtgtgcccttcaagcagggcatggagtattaccgtgccctcaagacccggaatgtgcctgttcggctcctgctctatcccaaaagcacccacgcattatcagaggtggaggtggagtcagacagcttcatgaatgctgtgctctggctacgcacacacttgggcagctgaagccctgccattctgcatgagctgatcagcctgtgccacacttcgctcttgaggagctcaacggtctggcagggcagcaggaggctttctgggctctggactccacggatgcgtgggcagaggaatgtgggctatgtagtcataataaattaggacacagagcctggt

SEQ ID NO: 372745 - DNA, 2612 bp, Homo sapiens
ggcacgaggctcaaccccttctctcgtaggcccttctaccctccccgaagccgggctcccgggttccgcttccacagggccgccccctctcctccgagatccaacgcctcgcccctcggtaagaggcccaggactcagcccacggccccgccccccacttggctagtccgcccctggcgagacccctgctctcacccacccaggacttctcgctcccaggccgggtcctctcaccgtcaaggcccgccccctgccaacggtcctcacccattagccgaaggccccgcccctcacagattgccgcagggcaggggcggagacagcccgggccgtcccaggctccgcccccggaagcctcacttccgggcgcgagcacgccccgcctcgccccggcggcagagaggagactatggaacgtcaggtgctgctgagcgagcccgaggaggcggcggctctgtatcggggccttagccgccagcccgcgctgagcgccgcctgcctgggcccggaggtcaccacgcagtacggcggccaataccggacggtgcacactgagtggacccagagggacctggaacgcatggagaacattcgattctgccgccaatacctggtgttccatgacggggactcagtggtgtttgcaggacctgcaggcaacagtgtggagacccggggggaactgctgagcagagagtctccttcaggcaccatgaaagctgtgctgcgcaaggctggaggcacgggccctggggaagagaagcagttcctggaggtctgggagaagaaccggaagctcaagagcttcaacctgtcagcgctggagaaacatgggcctgtttatgaggatgggggatcagtttgtgttttatgaagactggggagaaaacatggtttccaaaagcatccctgtgctctgcgtgctggatgtcgagagtggcaacatctctgtgcttgagggggtccctgagaatgtgtcccctggacaggcattttgggcccctggagatgctggtgtggtgtttgtgggctggtggcatgagcccttccggttgggcatccgcttttgcaccaatcgcaggtcagccctgtattatgtggacctcatcggggggaagtgtgagctcctctcggatgactccctggctgtctcttctccccggctgagcccagaccaatgtcgcattgtctacctgcagtacccatctctgatcccccatcaccaatgcagccagctgtgcctgtatgactggtataccaaggttacctcagtggtggtagatgttgtgcctcggcagctgggagagaacttctctgggatctactgcagccttctgcctttgggatgctggtcagctgacagccagagagtggtctttgactcggctcagcgcagccggcaggacctgtttgctgtggacacccaagtgggcactgtgacctccctcacagctggagggtcaggtgggagctggaagttgctcacaattgaccaggacctcatggtggcacagttttccacacccagcctacctccaaccctgaaagttgggttcctgccttctgcagggaaggagcagtcagtgttgtgggtgtccctggaggaggccgagcccattcccgacatccactggggcatccgggtgctacagccacccccagagcaagagaatgtgcagtatgctggccttgactttgaagcaatcctgctgcagcctggcagccctccagataagacccaagtgcccatggtggtcatgccccacggggggccccattcatcctttgtcactgcctggatgctgttcccagccatgctttgcaagatgggctttgcggtactactagtgaactatcgtggctccacgggctttggccaggacagcatcctctccctcccaggcaatgtgggccaccaggatgtgaaggatgtccagtttgcagtggaacaggtgctccaggaggaacactttgatgcaagccatgtggcccttatgggtggttcccatggtggcttcatttcctgccacttgattggtcagtacccagagacctacagggcctgcgtggcccggaaccccgtgatcaacatcgcctccatgttgggctccactgacatccctgactggtgcgtggtggaggctggctttcctttcagcagtgactgcctgccagacctcagcgtgtgggctgagatgctggacaaatcgcccatcagatacatccctcaggtgaagacaccactgttactgatgttgggccaggaggaccggcgtgtgcccttcaagcagggcatggagtattaccgtgccctcaagacccggaatgtgcctgttcggctcctgctctatcccaaaagcacccacgcattatcagaggtggaggtggagtcagacagcttcatgaatgctgtgctctggctacgcacacacttgggcagctgaagccctgccattctgcatgagctgatcagcctgtgccacacttcgctcttgaggagctcaacggtctggcagggcagcaggaggctttctgggctctggactccacggatgcgtgggcagaggaatgtgggctatgtagtcataataaattaggacacagagcctggt

SEQ ID NO: 372746 - DNA, 2866 bp, Homo sapiens
ggcacgaggctcaaccccttctctcgtaggcccttctaccctccccgaagccgggctcccgggttccgcttccacagggccgccccctctcctccgagatccaacgcctcgcccctcggtaagaggcccaggactcagcccacggccccgccccccacttggctagtccgcccctggcgagacccctgctctcacccacccaggacttctcgctcccaggccgggtcctctcaccgtcaaggcccgccccctgccaacggtcctcacccattagccgaaggccccgcccctcacagattgccgcagggcaggggcggagacagcccgggccgtcccaggctccgcccccggaagcctcacttccgggcgcgagcacgccccgcctcgccccggcggcagagaggagactatggaacgtcaggtgctgctgagcgagcccgaggaggcggcggctctgtatcggggccttagccgccagcccgcgctgagcgccgcctgcctgggcccggaggtcaccacgcagtacggcggccaataccggacggtgcacactgagtggacccagagggacctggaacgcatggagaacattcgattctgccgccaatacctggtgttccatgacggggactcagtggtgtttgcaggacctgcaggcaacagtgtggagacccggggggaactgctgagcagagagtctccttcaggcaccatgaaagctgtgctgcgcaaggctggaggcacgggccctggggaagagaagcagttcctggaggtctgggagaagaaccggaagctcaagagcttcaacctgtcagcgctggagaaacatgggcctgtttatgaggatgactgctttggctgcctgtcctggtcgcactcggagacacacttgttgtatgtggcagagaagaagcgccccaaggccgagtccttctttcagaccaaagccttggacgtcagtgccagcgatgatgagatagccaggctgaagaagccagaccaagccatcaagggggatcagtttgtgttttatgaagactggggagaaaacatggtttccaaaagcatccctgtgctctgcgtgctggatgtcgagagtggcaacatctctgtgcttgagggggtccctgagaatgtgtcccctggacaggcattttgggcccctggagatgctggtgtggtgtttgtgggctggtggcatgagcccttccggttgggcatccgcttttgcaccaatcgcaggtcagccctgtattatgtggacctcatcggggggaagtgtgagctcctctcggatgactccctggctgtctcttctccccggctgagcccagaccaatgtcgcattgtctacctgcagtacccatctctgatcccccatcaccaatgcagccagctgtgcctgtatgactggtataccaaggttacctcagtggtggtagatgttgtgcctcggcagctgggagagaacttctctgggatctactgcagccttctgcctttgggatgctggtcagctgacagccagagagtggtctttgactcggctcagcgcagccggcaggacctgtttgctgtggacacccaagtgggcactgtgacctccctcacagctggagggtcaggtgggagctggaagttgctcacaattgaccaggacctcatggtggcacagttttccacacccagcctacctccaaccctgaaagttgggttcctgccttctgcagggaaggagcagtcagtgttgtgggtgtccctggaggaggccgagcccattcccgacatccactggggcatccgggtgctacagccacccccagagcaagagaatgtgcagtatgctggccttgactttgaagcaatcctgctgcagcctggcagccctccagataagacccaagtgcccatggtggtcatgccccacggggggccccattcatcctttgtcactgcctggatgctgttcccagccatgctttgcaagatgggctttgcggtactactagtgaactatcgtggctccacgggctttggccaggacagcatcctctccctcccaggcaatgtgggccaccaggatgtgaaggatgtccagtttgcagtggaacaggtgctccaggaggaacactttgatgcaagccatgtggcccttatgggtggttcccatggtggcttcatttcctgccacttgattggtcagtacccagagacctacagggcctgcgtggcccggaaccccgtgatcaacatcgcctccatgttgggctccactgacatccctgactggtgcgtggtggaggctggctttcctttcagcagtgactgcctgccagacctcagcgtgtgggctgagatgctggacaaatcgcccatcagatacatccctcaggtgaagacaccactgttactgatgttgggccaggaggaccggcgtgtgcccttcaagcagggcatggagtattaccgtgccctcaagacccggaatgtgcctgttcggtgagtgcagcatgaaggccctggcagctggtgggcaggtgagcacaggaggaccctccaaccttaaatgttgctgactaatccctacaggctcctgctctatcccaaaagcacccacgcattatcagaggtggaggtggagtcagacagcttcatgaatgctgtgctctggctacgcacacacttgggcagctgaagccctgccattctgcatgagctgatcagcctgtgccacacttcgctcttgaggagctcaacggtctggcagggcagcaggaggctttctgggctctggactccacggatgcgtgggcagaggaatgtgggctatgtagtcataataaattaggacacagagcctggt

SEQ ID NO: 372747 - DNA, 2545 bp, Homo sapiens
ggcacgaggctcaaccccttctctcgtaggcccttctaccctccccgaagccgggctcccgggttccgcttccacagggccgccccctctcctccgagatccaacgcctcgcccctcggtaagaggcccaggactcagcccacggccccgccccccacttggctagtccgcccctggcgagacccctgctctcacccacccaggacttctcgctcccaggccgggtcctctcaccgtcaaggcccgccccctgccaacggtcctcacccattagccgaaggccccgcccctcacagattgccgcagggcaggggcggagacagcccgggccgtcccaggctccgcccccggaagcctcacttccgggcgcgagcacgccccgcctcgccccggcggcagagaggagactatggaacgtcaggtgctgctgagcgagcccgaggaggcggcggctctgtatcggggccttagccgccagcccgcgctgagcgccgcctgcctgggcccggaggtcaccacgcagtacggcggccaataccggacggtgcacactgagtggacccagagggacctggaacgcatggagaacattcgattctgccgccaatacctggtgttccatgacggggactcagtggtgtttgcaggacctgcaggcaacagtgtggagacccggggggaactgctgagcagagagtctccttcaggcaccatgaaagctgtgctgcgcaaggctggaggcacgggccctggggaagagaagcagttcctggaggtctgggagaagaaccggaagctcaagagcttcaacctgtcagcgctggagaaacatgggcctgtttatgaggatgactgctttggctgcctgtcctggtcgcactcggagacacacttgttgtatgtggcagagaagaagcgccccaaggccgagtccttctttcagaccaaagccttggacgtcagtgccagcgatgatgagatagccaggctgaagaagccagaccaagccatcaagggggatcagtttgtgttttatgaagactggggagaaaacatggtttccaaaagcatccctgtgctctgcgtgctggatgtcgagagtggcaacatctctgtgcttgagggggtccctgagaatgtgtcccctggacaggcattttgggcccctggagatgctggtgtggtgtttgtgggctggtggcatgagcccttccggttgggcatccgcttttgcaccaatcgcaggtcagccctgtattatgtggacctcatcggggggaagtgtgagctcctctcggatgactccctggctgtctcttctccccggctgagcccagaccaatgtcgcattgtctacctgcagtacccatctctgatcccccatcaccaatgcagccagctgtgcctgtatgactggtataccaaggttacctcagtggtggtagatgttgtgcctcggcagctgggagagaacttctctgggatctactgcagccttctgcctttgggatgctggtcagctgacagccagagagtggtctttgactcggctcagcgcagccggcaggacctgtttgctgtggacacccaagtgggcactgtgacctccctcacagctggagggtcaggtgggagctggaagttgctcacaattgaccaggacctcatggtggcacagttttccacacccagcctacctccaaccctgaaagttgggttcctgccttctgcagggaaggagcagtcagtgttgtgggtgtccctggaggaggccgagcccattcccgacatccactggggcatccgggtgctacagccacccccagagcaagagaatgtgcagtatgctggccttgactttgaagcaatcctgctgcagcctggcagccctccagataagacccaagtgcccatggtggtcatgccccacggggggccccattcatcctttgtcactgcctggatgctgttcccagccatgctttgcaagatgggctttgcggtactactagtgaactatcgtggctccacgggctttggccaggacagcatcctctccctcccaggcaatgtgggccaccaggatgtgaaggatgtccagtttgcagtggaacaggtgctccaggaggaacactttgatgcaagccatgtggcccttatgggtggttcccatggtggcttcatttcctgccacttgattggtcagtacccagagacctacagggcctgcgtggcccggaaccccgtgatcaacatcgcctccatgttgggctccactgacatccctgactggtgcgtggtggaggctggctttcctttcagcagtgactgcctgccagacctcagcgtgtgggctgagatgctggacaaatcgcccatcagatacatccctcaggtgaagacaccactgttactgatgttgggccaggaggaccggcgtgtgcccttcaagcagggcatggagtattaccgtgccctcaagagcgaagtgtggcacaggctgatcagctcatgcagaatggcagggcttcagctgccgtcgacc

SEQ ID NO: 372748 - DNA, 1893 bp, Homo sapiens
tcaaggaaggtagaggcgcgggttttcggcgtctgggagaagaaccggaagctcaagagcttcaacctgtcagcgctggagaaacatgggcctgtttatgaggatgactgctttggctgcctgtcctggtcgcactcggagacacacttgttgtatgtggcagagaagaagcgccccaaggccgagtccttctttcagaccaaagccttggacgtcagtgccagcgatgatgagatagccaggctgaagaagccagaccaagccatcaaggcattttgggcccctggagatgctggtgtggtgtttgtgggctggtggcatgagcccttccggttgggcatccgcttttgcaccaatcgcaggtcagccctgtattatgtggacctcatcggggggaagtgtgagctcctctcggatgactccctggctgtctcttctccccggctgagcccagaccaatgtcgcattgtctacctgcagtacccatctctgatcccccatcaccaatgcagccagctgtgcctgtatgactggtataccaaggttacctcagtggtggtagatgttgtgcctcggcagctgggagagaacttctctgggatctactgcagccttctgcctttgggatgctggtcagctgacagccagagagtggtctttgactcggctcagcgcagccggcaggacctgtttgctgtggacacccaagtgggcactgtgacctccctcacagctggagggtcaggtgggagctggaagttgctcacaattgaccaggacctcatggtggcacagttttccacacccagcctacctccaaccctgaaagttgggttcctgccttctgcagggaaggagcagtcagtgttgtgggtgtccctggaggaggccgagcccattcccgacatccactggggcatccgggtgctacagccacccccagagcaagagaatgtgcagtatgctggccttgactttgaagcaatcctgctgcagcctggcagccctccagataagacccaagtgcccatggtggtcatgccccacggggggccccattcatcctttgtcactgcctggatgctgttcccagccatgctttgcaagatgggctttgcggtactactagtgaactatcgtggctccacgggctttggccaggacagcatcctctccctcccaggcaatgtgggccaccaggatgtgaaggatgtccagtttgcagtggaacaggtgctccaggaggaacactttgatgcaagccatgtggcccttatgggtggttcccatggtggcttcatttcctgccacttgattggtcagtacccagagacctacagggcctgcgtggcccggaaccccgtgatcaacatcgcctccatgttgggctccactgacatccctgactggtgcgtggtggaggctggctttcctttcagcagtgactgcctgccagacctcagcgtgtgggctgagatgctggacaaatcgcccatcagatacatccctcaggtgaagacaccactgttactgatgttgggccaggaggaccggcgtgtgcccttcaagcagggcatggagtattaccgtgccctcaagacccggaatgtgcctgttcggctcctgctctatcccaaaagcacccacgcattatcagaggtggaggtggagtcagacagcttcatgaatgctgtgctctggctacgcacacacttgggcagctgaagccctgccattctgcatgagctgatcagcctgtgccacacttcgctcttgaggagctcaacggtctggcagggcagcaggaggctttctgggctctggactccacggatgcgtgggcagaggaatgtgggctatgtagtcataataaattaggacacagagcctggt

SEQ ID NO: 372749 - DNA, 2069 bp, Homo sapiens
ggcacgaggctcaaccccttctctcgtaggcccttctaccctccccgaagccgggctcccgggttccgcttccacagggccgccccctctcctccgagatccaacgcctcgcccctcggtaagaggcccaggactcagcccacggccccgccccccacttggctagtccgcccctggcgagacccctgctctcacccacccaggacttctcgctcccaggccgggtcctctcaccgtcaaggcccgccccctgccaacggtcctcacccattagccgaaggccccgcccctcacagattgccgcagggcaggggcggagacagcccgggccgtcccaggctccgcccccggaagcctcacttccgggcgcgagcacgccccgcctcgccccggcggcagagaggagactatggaacgtcaggtgctgctgagcgagcccgaggaggcggcggctctgtatcggggccttagccgccagcccgcgctgagcgccgcctgcctgggcccggaggtcaccacgcagtacggcggccaataccggacggtgcacactgagtggacccagagggacctggaacgcatggagaacattcgattctgccgccaatacctggtgttccatgacggggactcagtggtgtttgcaggacctgcaggcaacagtgtggagacccggggggaactgctgagcagagagtctccttcaggcaccatgaaagctgtgctgcgcaaggctggaggcacgggccctggggaagagaagcagttcctggaggtctgggagaagaaccggaagctcaagagcttcaacctgtcagcgctggagaaacatgggcctgtttatgaggatgactgctttggctgcctgtcctggtcgcactcggagacacacttgttgtatgtggcagagaagaagcgccccaaggccgagtccttctttcagaccaaagccttggacgtcagtgccagcgatgatgagatagccaggctgaagaagccagaccaagccatcaagggggatcagtttgtgttttatgaagactggggagaaaacatggtttccaaaagcatccctgtgctctgcgtgctggatgtcgagagtggcaacatctctgtgcttgagggggtccctgagaatgtgtcccctggacaggcattttgggcccctggagatgctggtgtggtgtttgtgggctggtggcatgagcccttccggttgggcatccgcttttgcaccaatcgcaggtcagccctgtattatgtggacctcatcggggggaagtgtgagctcctctcggatgactccctggctgtctcttctccccggctgagcccagaccaatgtcgcattgtctacctgcagtacccatctctgatcccccatcaccaatgcagccagctgtgcctgtatgactggtataccaaggttacctcagtggtggtagatgttgtgcctcggcagctgggagagaacttctctgggatctactgcagccttctgcctttgggatgctggtcagctgacagccagagagtggtctttgactcggctcagcgcagccggcaggacctgtttgctgtggacacccaagtgggcactgtgacctccctcacagctggagggtcaggtgggagctggaagttgctcacaattgaccaggacctcatggtggcacagttttccacacccagcctacctccaaccctgaaagttgggttcctgccttctgcagggaaggagcagtcagtgttgtgggtgtccctggaggaggccgagcccattcccgacatccactggggcatccgggtgctacagccacccccagagcaagagaatgtgcagtatgtcagacagcttcatgaatgctgtgctctggctacgcacacacttgggcagctgaagccctgccattctgcatgagctgatcagcctgtgccacacttcgctcttgaggagctcaacggtctggcagggcagcaggaggctttctgggctctggactccacggatgcgtgggcagaggaatgtgggctatgtagtcataataaattaggacacagagcctggt

SEQ ID NO: 372750 - DNA, 1719 bp, Homo sapiens
ggcacgaggctcaaccccttctctcgtaggcccttctaccctccccgaagccgggctcccgggttccgcttccacagggccgccccctctcctccgagatccaacgcctcgcccctcggtaagaggcccaggactcagcccacggccccgccccccacttggctagtccgcccctggcgagacccctgctctcacccacccaggacttctcgctcccaggccgggtcctctcaccgtcaaggcccgccccctgccaacggtcctcacccattagccgaaggccccgcccctcacagattgccgcagggcaggggcggagacagcccgggccgtcccaggctccgcccccggaagcctcacttccgggcgcgagcacgccccgcctcgccccggcggcagagaggagactatggaacgtcaggtgctgctgagcgagcccgaggaggcggcggctctgtatcggggccttagccgccagcccgcgctgagcgccgcctgcctgggcccggaggtcaccacgcagtacggcggccaataccggacggtgcacactgagtggacccagagggacctggaacgcatggagaacattcgattctgccgccaatacctggtgttccatgacggggactcagtggtgtttgcaggacctgcaggcaacagtgtggagacccggggggaactgctgagcagagagtctccttcaggcaccatgaaagctgtgctgcgcaaggctggaggcacgggccctggggaagagaagcagttcctggaggtctgggagaagaaccggaagctcaagagcttcaacctgtcagcgctggagaaacatgggcctgtttatgaggatgactgctttggctgcctgtcctggtcgcactcggagacacacttgttgtatgtggcagagaagaagcgccccaaggccgagtccttctttcagaccaaagccttggacgtcagtgccagcgatgatgagatagccaggctgaagaagccagaccaagccatcaagggggatcagtttgtgttttatgaagactggggagaaaacatggtttccaaaagcatccctgtgctctgcgtgctggatgtcgagagtggcaacatctctgtgcttgagggggtccctgagaatgtgtcccctggacaggcattttgggcccctggagatgctggtgtggtgtttgtgggctggtggcatgagcccttccggttgggcatccgcttttgcaccaatcgcaggtcagccctgtattatgtggacctcatcggggggaagtgtgagctcctctcggatgactccctggctgtctcttctccccggctgagcccagaccaatgtcgcattgtctacctgcagtacccatctctgatcccccatcaccaatgcagccagctgtgcctgtatgactggtataccaaggttacctcagtggtggtagatgttgtgcctcggcagctgggagaggaactcttctgggatcctactgcaggcttctgccttggggatgcctggtcagtgacaggcagcagagtgggctcggattcggttcagacgcaaccggtaaggacctgttggctgtggacccccacatgggcactgggacctggccaaacagtgagggccagctgcaccggaagttgccaccatctggcaggacctctgggcagcaagttccacacccacttacatcaacccagaaacgggatcacaca

SEQ ID NO: 372751 - DNA, 1000 bp, Homo sapiens
  misc_feature (7)..(7): n is a, c, g, or t
agtcaangccagcatactgcaggctgcagcaggattgcttcaaagtcaaggccagcatactgcacattctcctggccttgactttgaagcaatcctgctgcagcctggcagccctccagataagacccaagtgcccatggtggtcatgccccacggggggccccattcatcctttgtcactgcctggatgctgttcccagccatgctttgcaagatgggctttgcggtactactagtgaactatcgtggctccacgggctttggccaggacagcatcctctccctcccaggcaatgtgggccaccaggatgtgaaggatgtccagtttgcagtggaacaggtgctccaggaggaacactttgatgcaagccatgtggcccttatgggtggttcccatggtggcttcatttcctgccacttgattggtcagtacccagagacctacagggcctgcgtggcccggaaccccgtgatcaacatcgcctccatgttgggctccactgacatccctgactggtgcgtggtggaggctggctttcctttcagcagtgactgcctgccagacctcagcgtgtgggctgagatgctggacaaatcgcccatcagatacatccctcaggtgaagacaccactgttactgatgttgggccaggaggaccggcgtgtgcccttcaagcagggcatggagtattaccgtgccctcaagacccggaatgtgcctgttcggctcctgctctatcccaaaagcacccacgcattatcagaggtggaggtggagtcagacagcttcatgaatgctgtgctctggctacgcacacacttgggcagctgaagccctgccattctgcatgagctgatcagcctgtgccacacttcgctcttgaggagctcaacggtctggcagggcagcaggaggctttctgggctctggactccacggatgcgtgggcagaggaatgtgggctatgtagtcataataaattaggacacagagcctggt

SEQ ID NO: 372752 - DNA, 1381 bp, Homo sapiens
ggcacgaggctcaaccccttctctcgtaggcccttctaccctccccgaagccgggctcccgggttccgcttccacagggccgccccctctcctccgagatccaacgcctcgcccctcggtaagaggcccaggactcagcccacggccccgccccccacttggctagtccgcccctggcgagacccctgctctcacccacccaggacttctcgctcccaggccgggtcctctcaccgtcaaggcccgccccctgccaacggtcctcacccattagccgaaggccccgcccctcacagattgccgcagggcaggggcggagacagcccgggccgtcccaggctccgcccccggaagcctcacttccgggcgcgagcacgccccgcctcgccccggcggcagagaggagactatggaacgtcaggtgctgctgagcgagcccgaggaggcggcggctctgtatcggggccttagccgccagcccgcgctgagcgccgcctgcctgggcccggaggtcaccacgcagtacggcggccaataccggacggtgcacactgagtggacccagagggacctggaacgcatggagaacattcgattctgccgccaatacctggtgttccatgacggggactcagtggtgtttgcaggacctgcaggcaacagtgtggagacccggggggaactgctgagcagagagtctccttcaggcaccatgaaagctgtgctgcgcaaggctggaggcacgggccctggggaagagaagcagttcctggaggtctgggagaagaaccggaagctcaagagcttcaacctgtcagcgctggagaaacatgggcctgtttatgaggatgactgctttggctgcctgtcctggtcgcactcggagacacacttgttgtatgtggcagagaagaagcgccccaaggccgagtccttctttcagaccaaagccttggacgtcagtgccagcgatgatgagatagccaggctgaagaagccagaccaagccatcaagggggatcagtttgtgttttatgaagactggggagaaaacatggtttccaaaagcatccctgtgctctgcgtgctggatgtcgagagtggcaacatctctgtgcttgagggggtccctgagaatgtgtcccctggacaggcattttgggcccctggagatgctggtgtggtgtttgtgggctggtggcatgagcccttccggttgggcatccgcttttgcaccaatcgcaggtcagcctgtattatgtggacctcatcggggggggagtgtgagctcctctgggttgactcccggtggtcctcttccggttgacccggacatgttgcttggtaccgggggccattttggtcccttcatgggcgtggc

SEQ ID NO: 372753 - DNA, 709 bp, Homo sapiens
agtataaaccgaacaggcttccacatcaattgtgacctcattctcaacagcgaggcacctaatccgtgcctgatccgtctttgcaacaccaccaatgaccaatatgaaatcaggtccactgacagatgctcaagtgtgcgtggtggaggctggctttcctttcagcagtgactgcctgccagacctcagcgtgtgggctgagatgctggacaaatcgcccatcagatacatccctcaggtgaagacaccactgttactgatgttgggccaggaggaccggcgtgtgcccttcaagcagggcatggagtattaccgtgccctcaagacccggaatgtgcctgttcggtgagtgcagcatgaaggccctggcagctggtgggcaggtgagcacaggaggaccctccaaccttaaatgttgctgactaatccctacaggctcctgctctatcccaaaagcacccacgcattatcagaggtggaggtggagtcagacagcttcatgaatgctgtgctctggctacgcacacacttgggcagctgaagccctgccattctgcatgagctgatcagcctgtgccacacttcgctcttgaggagctcaacggtctggcagggcagcaggaggctttctgggctctggactccacggatgcgtgggcagaggaatgtgggctatgtagtcataataaattaggacacagagcctggt

SEQ ID NO: 372754 - DNA, 936 bp, Homo sapiens
ggcacgaggctcaaccccttctctcgtaggcccttctaccctccccgaagccgggctcccgggttccgcttccacagggccgccccctctcctccgagatccaacgcctcgcccctcggtaagaggcccaggactcagcccacggccccgccccccacttggctagtccgcccctggcgagacccctgctctcacccacccaggacttctcgctcccaggccgggtcctctcaccgtcaaggcccgccccctgccaacggtcctcacccattagccgaaggccccgcccctcacagattgccgcagggcaggggcggagacagcccgggccgtcccaggctccgcccccggaagcctcacttccgggcgcgagcacgccccgcctcgccccggcggcagagaggagactatggaacgtcaggtgctgctgagcgagcccgaggaggcggcggctctgtatcggggccttagccgccagcccgcgctgagcgccgcctgcctgggcccggaggtcaccacgcagtacggcggccaataccggacggtgcacactggtgtgtgtgcgaaggggaactggagggcatggagtattaccgtgccctcaagacccggaatgtgcctgttcggctcctgctctatcccaaaagcacccacgcattatcagaggtggaggtggagtcagacagcttcatgaatgctggacaaatcgcccatcagatacatccctcaggtgaagacaccactgttactgatgttgggccaggaggaccggctgccattctgcatgagctgatcagcctgtgccacacttcgctcttgaggagctcaacggtctggcagggcagcaggaggctttctgggctctggactccacggatgcgtgggcagaggaatgtgggctatgtagtcataataaattaggacacagagcctggt

SEQ ID NO: 372755 - DNA, 1621 bp, Homo sapiens
aaatactaaccacagagggagaggcagcaagaggagaggcataaattcaggatctcacccttcattccacagacacacatagcctctctgcccacctctgcttcctctaggaacacaggagttccagatcacatcgagttcaccatgaattcactcagtgaagccaacaccaagttcatgttcgacctgttccaacagttcagaaaatcaaaagagaacaacatcttctattcccctatcagcatcacatcagcattagggatggtcctcttaggagccaaagacaacactgcacaacagattaagaaggttcttcactttgatcaagtcacagagaacaccacaggaaaagctgcaacatatcatgttgataggtcaggaaatgttcatcaccagtttcaaaagcttctgactgaattcaacaaatccactgatgcatatgagctgaagatcgccaacaagctcttcggagaaaaaacgtatctatttttacaggaatatttagatgccatcaagaaattttaccagaccagtgtggaatctgttgattttgcaaatgctccagaagaaagtcgaaagaagattaactcctgggtggaaagtcaaacgaatgaaaaaattaaaaacctaattcctgaaggtaatattggcagcaataccacattggttcttgtgaacgcaatctatttcaaagggcagtgggagaagaaatttaataaagaagatactaaagaggaaaaattttggccaaacaagcttgaagagaaactcactgctgagaaattgatggaatggacaagtttgcagaatatgagagagacacgtgtcgatttacacttacctcggttcaaagtggaagagagctatgacctcaaggacacgttgagaaccatgggaatggtggatatcttcaatggggatgcagacctctcaggcatgaccgggagccgcggtctcgtgctatctggagtcctacacaaggcctttgtggaggttacagaggagggagcagaagctgcagctgccaccgctgtagtaggattcggatcatcacctacttcaactaatgaagagttccattgtaatcaccctttcctattcttcataaggcaaaataagaccaacagcatcctcttctatggcagattctcatccccgtagatgcaattagtctgtcactccatttggaaaatgttcacctgcagatgttctggtaaactgattgctggcaacaacagattctcttggctcatatttcttttctttctcatcttgatgatgatcgtcatcatcaagaatttaatgattaaaatagcatgcctttctctctttctcttaataagcccacatataaatgtactttttcttccagaaaaattctccttgaggaaaaatgtccaaaataagatgaatcacttaataccgtatcttctaaatttgaaatataattctgtttgtgacctgttttaaatgaaccaaaccaaatcatactttttctttgaatttagcaacctagaaacacacatttctttgaatttaggtgatacctaaatccttcttatgtttctaaattttgtgattctataaaacacatcatcaataaaatagtgacataaaatca

SEQ ID NO: 372756 - DNA, 1534 bp, Homo sapiens
  misc_feature (1520)..(1520): n is a, c, g, or t
aaatactaaccacagagggagaggcagcaagaggagaggcataaattcaggatctcacccttcattccacagacacacatagcctctctgcccacctctgcttcctctaggaacacaggagttccagatcacatcgagttcaccatgaattcactcagtgaagccaacaccaagttcatgttcgacctgttccaacagttcagaaaatcaaaagagaacaacatcttctattcccctatcagcatcacatcagcattagggatggtcctcttaggagccaaagacaacactgcacaacagattaagaaggttcttcactttgatcaagtcacagagaacaccacaggaaaagctgcaacatatcatgttgataggtcaggaaatgttcatcaccagtttcaaaagcttctgactgaattcaacaaatccactgatgcatatgagctgaagatcgccaacaagctcttcggagaaaaaacgtatctatttttacaggaatatttagatgccatcaagaaattttaccagaccagtgtggaatctgttgattttgcaaatgctccagaagaaagtcgaaagaagattaactcctgggtggaaagtcaaacgaatgaaaaaattaaaaacctaattcctgaaggtaatattggcagcaataccacattggttcttgtgaacgcaatctatttcaaagggcagtgggagaagaaatttaataaagaagatactaaagaggaaaaattttggccaaacaagaatacatacaagtccatacagatgatgaggcaatacacatcttttcattttgcctcgctggaggatgtacaggccaaggtcctggaaataccatacaaaggcaaagatctaagcatgattgtgttgctgccaaatgaaatcgatggtctccagaagcttgaagagaaactcactgctgagaaattgatggaatggacaagtttgcagaatatgagagagacacgtgtcgatttacacttacctcggttcaaagtggaagagagctatgacctcaaggacacgttgagaaccatgggaatggtggatatcttcaatggggatgcagacctctcaggcatgaccgggagccgcggtctcgtgctatctggagtcctacacaaggcctttgtggaggttacagaggagggagcagaagctgcagctgccaccgctgtagtaggattcggatcatcacctacttcaactaatgaagagttccattgtaatcaccctttcctattcttcataaggcaaaataagaccaacagcatcctcttctatggcagattctcatccccgtagatgcaattagtctgtcactccatttggaaaatgttcacctgcagatgttctggtaaactgattgctggcaacaacagattctcttggctcatatttcttttctttctcatcttgatgatgatcgtcatcatcaagaatttaatgattaaaatagcatgcctttctctctttctcttaataagcccacaggtagcataccccancaggtagcagtacc

SEQ ID NO: 372757 - DNA, 1777 bp, Homo sapiens
aaatactaaccacagagggagaggcagcaagaggagaggcataaattcaggatctcacccttcattccacagacacacatagcctctctgcccacctctgcttcctctaggaacacaggagttccagatcacatcgagttcaccatgaattcactcagtgaagccaacaccaagttcatgttcgacctgttccaacagttcagaaaatcaaaagagaacaacatcttctattcccctatcagcatcacatcagcattagggatggtcctcttaggagccaaagacaacactgcacaacagattaagaaggttcttcactttgatcaagtcacagagaacaccacaggaaaagctgcaacatatcatgttgataggtcaggaaatgttcatcaccagtttcaaaagcttctgactgaattcaacaaatccactgatgcatatgagctgaagatcgccaacaagctcttcggagaaaaaacgtatctatttttacaggaatatttagatgccatcaagaaattttaccagaccagtgtggaatctgttgattttgcaaatgctccagaagaaagtcgaaagaagattaactcctgggtggaaagtcaaacgaatgaaaaaattaaaaacctaattcctgaaggtaatattggcagcaataccacattggttcttgtgaacgcaatctatttcaaagggcagtgggagaagaaatttaataaagaagatactaaagaggaaaaattttggccaaacaagaatacatacaagtccatacagatgatgaggcaatacacatcttttcattttgcctcgctggaggatgtacaggccaaggtcctggaaataccatacaaaggcaaagatctaagcatgattgtgttgctgccaaatgaaatcgatggtctccagaagcttgaagagaaactcactgctgagaaattgatggaatggacaagtttgcagaatatgagagagacacgtgtcgatttacacttacctcggttcaaagtggaagagagctatgacctcaaggacacgttgagaaccatgggaatggtggatatcttcaatggggatgcagacctctcaggcatgaccgggagccgcggtctcgtgctatctggagtcctacacaaggcctttgtggaggttacagaggagggagcagaagctgcagctgccaccgctgtagtaggattcggatcatcacctacttcaactaatgaagagttccattgtaatcaccctttcctattcttcataaggcaaaataagaccaacagcatcctcttctatggcagattctcatccccgtagatgcaattagtctgtcactccatttggaaaatgttcacctgcagatgttctggtaaactgattgctggcaacaacagattctcttggctcatatttcttttctttctcatcttgatgatgatcgtcatcatcaagaatttaatgattaaaatagcatgcctttctctctttctcttaataagcccacatataaatgtactttttcttccagaaaaattctccttgaggaaaaatgtccaaaataagatgaatcacttaataccgtatcttctaaatttgaaatataattctgtttgtgacctgttttaaatgaaccaaaccaaatcatactttttctttgaatttagcaacctagaaacacacatttctttgaatttaggtgatacctaaatccttcttatgtttctaaattttgtgattctataaaacacatcatcaataaaatagtgacataaaatca

SEQ ID NO: 372758 - DNA, 289 bp, Homo sapiens
tgactctagaggaccccttagggtcatacaactctgcacaacagattaagaaggttcttcactttgatcaagtcacagagaacaccacaggaaaagctgcaacatatcatgttgataggtcaggaaatgttcatcaccagtttcaaaagcttctgactgaattcaacaaatccactgatgcatatgagctgaagatcgccaacaagctcttcggagaaaaaacgtatctatttttacaggaatatttagatgccatcaagaaattttaccaatcctgcgtggaccctaa

SEQ ID NO: 372759 - DNA, 566 bp, Homo sapiens
aaatactaaccacagagggagaggcagcaagaggagaggcataaattcaggatctcacccttcattccacagacacacatagcctctctgcccacctctgcttcctctaggaacacaggagttccagatcacatcgagttcaccatgaattcactcagtgaagccaacaccaagttcatgttcgacctgttccaacagttcagaaaatcaaaagagaacaacatcttctattcccctatcagcatcacatcagcattagggatggtcctcttaggagccaaagacaacactgcacaacagattaagaaggttcttcactttgatcaagtcacagagaacaccacaggaaaagctgcaacatatcatgttgataggtcaggaaatgttcatcaccagtttcaaaagcttctgactgaattcaacaaatccactgatgcatatgagctgaagatcgccaacaagctcttcggagaaaaaacgtatctatttttacagaaatatttagatgccagcaagaaattttaccagaccagtgttggttccagaatggtaatcagcttatcgat

SEQ ID NO: 372760 - DNA, 868 bp, Homo sapiens
gtctaggatgctggggaaatggttctgttcctttgttggtggtttggaacttattgtcaatttactgaaatcagataacaaagaagttctggcaagtgtatgtgctgccattaccaacatagcaaaagatcaagaaaatttagctgttatcacagatcatggagttgttcctttattgtccaaactggcaaatacaaataacaataaattgagacatcatctagcagaagctatttcacgttgctgtatgtggggcaggaatagagtggccttcggtgagcacaaagcagtggctccactagtgcgttatctgaaatcaaatgacaccaacgtgcatcgggcgacagctcaggccttgtaccaactctcagaagacgccgataactgcatcaccatgcatgagaatggtgcagtaaagcttctactggatatggttgggtcccctgaccaggatctccaggaagctgcagctggttgtatatccaatatccgcaggctggctcttgctacagagaaggcaagatacacttgaaatttaaatggacattacaagctatcaaattctacatgacacaggacatgtcactcccatggccagaaagcctaaattgggaaacagttgttagcaaaccctttcaaccatctaaatgaaaacacacaagttgaaaatgcacagaatgtttttcatctgaaaattgcatggagacttttgtttctatttaatgttttcgagatatgacatgtgataagatggaaagccaataaacctgtgataagtttctaagaatatgagaatatacgtatatgatgtatttttagttcagtgatgcttttgtatttgtggcgattttaataaaggatatggcct

SEQ ID NO: 372761 - DNA, 924 bp, Homo sapiens
gtctaggatgctggggaaatggttctgttcctttgttggtggtttggaacttattgtcaatttactgaaatcagataacaaagaagttctggcaagtgtatgtgctgccattaccaacatagcaaaagatcaagaaaatttagctgttatcacagatcatggagttgttcctttattgtccaaactggcaaatacaaataacaataaattgagacatcatctagcagaagctatttcacgttgctgtatgtggggcaggaatagagtggccttcggtgagcacaaagcagtggctccactagtgcgttatctgaaatcaaatgacaccaacgtgcatcgggcgacagctcaggccttgtaccaactctcagaagacgccgataactgcatcaccatgcatgagaatggtgcagtaaagcttctactggatatggttgggtcccctgaccaggatctccaggaagctgcagctggttgtatatccaatatccgcaggctggctcttgctacagagaaggcaagatacacttgaaatttaaatggacattacaagctatcaaattctacatgacacaggacatgtcactcccatggccagaaagcctaaattgggaaacagttgttagcaaaccctttcaaccatctaaatgaaaacacacaagttgaaaatgcacagaatgtttttcatctgaaaattgcatggagacttttgtttctatttaatgttttcgagatatgacatgtgataagatggaaagccaataaacctgtgataagtttctaagaatatgagaatatacgtatatgatgtatttttagttcagtgatgcttttgtatttgtggcgattttaataaaggatatggcctggtagatgcggccgcccccccattatatactcctcaccacctccctatataaagac

SEQ ID NO: 372762 - DNA, 904 bp, Homo sapiens
  misc_feature (895)..(895): n is a, c, g, or t
  misc_feature (904)..(904): n is a, c, g, or t
gtctaggatgctggggaaatggttctgttcctttgttggtggtttggaacttattgtcaatttactgaaatcagataacaaagaagttctggcaagtgtatgtgctgccattaccaacatagcaaaagatcaagaaaatttagctgttatcacagatcatggagttgttcctttattgtccaaactggcaaatacaaataacaataaattgagacatcatctagcagaagctatttcacgttgctgtatgtggggcaggaatagagtggccttcggtgagcacaaagcagtggctccactagtgcgttatctgaaatcaaatgacaccaacgtgcatcgggcgacagctcaggccttgtaccaactctcagaagacgccgataactgcatcaccatgcatgagaatggtgcagtaaagcttctactggatatggttgggtcccctgaccaggatctccaggaagctgcagctggttgtatatccaatatccgcaggctggctcttgctacagagaaggcaagatacacttgaaatttaaatggacattacaagctatcaaattctacatgacacaggacatgtcactcccatggccagaaagcctaaattgggaaacagttgttagcaaaccctttcaaccatctaaatgaaaacacacaagttgaaaatgcacagaatgtttttcatctgaaaattgcatggagacttttgtttctatttaatgttttcgagatatgacatgtgataagatggaaagccaataaacctgtgataagtttctaagaatatgagaatatacgtatatgatgtatttttagttcagtgatgcttttgtatttgtggcgattttaataaaggatatggcctcgttggcctcagcggtggagctcgtcnggacgtaan

SEQ ID NO: 372763 - DNA, 1210 bp, Homo sapiens
acgccctctggcccctgcctctagccccgcctctcgcctcgccgcctcgccgccctgccaccctgccgccctgccgccctgccgccctgccgccctgccgccctgccgccctgccgccggtggtcgctgcccgtggtgctccgtcgcccccgccacctcacgtcctcccgtgcgtcgggagcgtctcggctacaacatgttgggcatgatcaagaactcgctgttcggaagcgtagagacgtggccttggcaggtcctaagcaaaggggacaaggaagaagttgcctatgaagaaagggcctgtgaaggcggcaaatttgccacagtagaagtgacagataagcctgtggatgaggctctacgggaagcaatgcccaaggtcgcaaagtatgcggggggcaccaatgacaagggaattgggatggggatgacagtccctatttcctttgctgtgttccccaatgaagatggctctctgcagaagaaattaaaagtctggttccggattccaaaccaatttcaaagcgacccaccagctcccagtgacaaaagcgttaagattgaggaacgggaaggcatcactgtctattccatgcagtttggtggttatgccaaggaagcagactacgtagcacaagccacccgtctgcgtgctgccctggagggcacagccacctaccggggggacatctacttctgcacgggttatgaccctcccatgaagccctacggacggcgcaatgagatctggctgttgaagacatgagtgacccactgaaccaagaacttactggaagtgtgcctctgtgtctccttcctcgggggtaaggaggggacagtgcttcccaagttccagctgcaagtccaacttaaccaactttccttcaaagtcagttactgccaattttctgaaaaaagcatgttccatatactaagtctcttttctcacggtaggaaataatacagccaagatatgcagcatccttctcattgatgtagaaaattctgcgatagaccagaaaaatcctggcagcttttctccaggcatctgggtcactaaaaactgattttctaaaattattggatttgtattttgttattaagggggaaaatgtgatttgtgcctgatctttcatctgtgattcttataagagctttgtcttcagaaaaactaaaaataaaaggcattgacttaaacagctgagacaaa

SEQ ID NO: 372764 - DNA, 666 bp, Homo sapiens
ctatctcctccatgatcctgactacaataattaaaaaaaaaaaccacctagcagtttggtggttatgccaaggaagcagactacgtagcacaagccacccgtctgcgtgctgccctggagggcacagccacctaccggggggacatctacttctgcacgggttatgaccctcccatgaagccctacggacggcgcaatgagatctggctgttgaagacatgagtgacccactgaaccaagaacttactggaagtgtgcctctgtgtctccttcctcgggggtaaggaggggacagtgcttcccaagttccagctgcaagtccaacttaaccaactttccttcaaagtcagttactgccaattttctgaaaaaagcatgttccatatactaagtctcttttctcacggtaggaaataatacagccaagatatgcagcatccttctcattgatgtagaaaattctgcgatagaccagaaaaatcctggcagcttttctccaggcatctgggtcactaaaaactgattttctaaaattattggatttgtattttgttattaagggggaaaatgtgatttgtgcctgatctttcatctgtgattcttataagagctttgtcttcagaaaaactaaaaataaaaggcattgacttaaacagctgagacaaa

SEQ ID NO: 372765 - DNA, 739 bp, Homo sapiens
ccccagtcttaccactctagcatgcttgtcataataaacatggtgagtgacttttttctaaagatcccccctctctcagaggtcatgtcctttcgtaaccagcccttgctcttgaacccccaggcagtttggtggttatgccaaggaagcagactacgtagcacaagccacccgtctgcgtgctgccctggagggcacagccacctaccggggggacatctacttctgcacgggttatgaccctcccatgaagccctacggacggcgcaatgagatctggctgttgaagacatgagtgacccactgaaccaagaacttactggaagtgtgcctctgtgtctccttcctcgggggtaaggaggggacagtgcttcccaagttccagctgcaagtccaacttaaccaactttccttcaaagtcagttactgccaattttctgaaaaaagcatgttccatatactaagtctcttttctcacggtaggaaataatacagccaagatatgcagcatccttctcattgatgtagaaaattctgcgatagaccagaaaaatcctggcagcttttctccaggcatctgggtcactaaaaactgattttctaaaattattggatttgtattttgttattaagggggaaaatgtgatttgtgcctgatctttcatctgtgattcttataagagctttgtcttcagaaaaactaaaaataaaaggcattgacttaaacagctgagacaaa

SEQ ID NO: 372766 - DNA, 1742 bp, Homo sapiens
acgccctctggcccctgcctctagccccgcctctcgcctcgccgcctcgccgccctgccaccctgccgccctgccgccctgccgccctgccgccctgccgccctgccgccctgccgccggtggtcgctgcccgtggtgctccgtcgcccccgccacctcacgtcctcccgtgcgtcgggagcgtctcggctacaacatgttgggcatgatcaagaactcgctgttcggaagcgtagagacgtggccttggcaggtcctaagcaaaggggacaaggaagaagttgcctatgaagaaagggcctgtgaaggcggcaaatttgccacagtagaagtgacagataagcctgtggatgaggctctacgggaagcaatgcccaaggtcgcaaagtatgcggggggcaccaatgacaagggaattgggatggggatgacagtccctatttcctttgctgtgttccccaatgaagatggctctctgcagaagaaattaaaagtctggttccggattccaaaccaatttcaaagcgacccaccagctcccagtgacaaaagcgttaagattgaggaacgggaaggcatcactgtctattccatgcagtttggtggttatgccaaggaagcagactacgtagcacaagccacccgtctgcgtgctgccctggagggcacagccacctaccggggggacatctacttctgcacgggttatgaccctcccatgaagccctacggacggcgcaatgagatctggctgttgaagacatgagtgacccactgaaccaagaacttactggaagtgtgcctctgtgtctccttcctcgggggtaaggaggggacagtgcttcccaagttccagctgcaagtccaacttaaccaactttccttcaaagtcagttactgccaattttctgaaaaaagcatgttccatatactaagtctcttttctcacggtaggaaataatacagccaagatatgcagcatccttctcattgatgtagaaaattctgcgatagaccagaaaaatcctggcagcttttctccaggcatctgggtcactaaaaactgattttctaaaattattggatttgtattttgttattaagggggaaaatgtgatttgtgcctgatctttcatctgtgattcttataagagctttgtcttcagaaaaactaaaaataaaaggcattgacttaaacagctgagacaaaaaaaaaaaaaaaaaaaaaaaaaaaaaaaaaaaaaaaaaaaaaaaaaaaaaaaaaaaaaaaaaaaaaaaaaaaaaaaaaaaaaaaaaaaaaaaaaaaaaaaaaaaaaaaacaaaagaaagaaaaaaaaaaagaaaaaaaaaaaggaagaagacaaggagaagcacgaaaaaaacaaacaagaaaagagaaacgagacaaagaggagaagaagaaaaaaaaagacaacacagaagaaaaggcgacaaaacgacatgaaagaacacagcagcgaagagaggcccagcacaaaagcacagagcacaaagcggataaggccggaaggaagacacaacagcgggaaaaaaaaacagaagaggcacgaaaagcagggcacgagcgcgcaaaagggaagacaccccgagaagcacaatatcgcaacaaagacagaagagacgaagcggaagaaaagaaagagagaggcgaacaacacagcgagaggcaggcgacacggagagaagaaagaagagaggaggcaggagcacacggggggggt

SEQ ID NO: 372767 - DNA, 1271 bp, Homo sapiens
  misc_feature (1212)..(1213): n is a, c, g, or t
acgccctctggcccctgcctctagccccgcctctcgcctcgccgcctcgccgccctgccaccctgccgccctgccgccctgccgccctgccgccctgccgccctgccgccctgccgccggtggtcgctgcccgtggtgctccgtcgcccccgccacctcacgtcctcccgtgcgtcgggagcgtctcggctacaacatgttgggcatgatcaagaactcgctgttcggaagcgtagagacgtggccttggcaggtcctaagcaaaggggacaaggaagaagttgcctatgaagaaagggcctgtgaaggcggcaaatttgccacagtagaagtgacagataagcctgtggatgaggctctacgggaagcaatgcccaaggtcgcaaagtatgcggggggcaccaatgacaagggaattgggatggggatgacagtccctatttcctttgctgtgttccccaatgaagatggctctctgcagaagaaattaaaagtctggttccggattccaaaccaatttcaaagcgacccaccagctcccagtgacaaaagcgttaagattgaggaacgggaaggcatcactgtctattccatgcagtttggtggttatgccaaggaagcagactacgtagcacaagccacccgtctgcgtgctgccctggagggcacagccacctaccggggggacatctacttctgcacgggttatgaccctcccatgaagccctacggacggcgcaatgagatctggctgttgaagacatgagtgacccactgaaccaagaacttactggaagtgtgcctctgtgtctccttcctcgggggtaaggaggggacagtgcttcccaagttccagctgcaagtccaacttaaccaactttccttcaaagtcagttactgccaattttctgaaaaaagcatgttccatatactaagtctcttttctcacggtaggaaataatacagccaagatatgcagcatccttctcattgatgtagaaaattctgcgatagaccagaaaaatcctggcagcttttctccaggcatctgggtcactaaaaactgattttctaaaattattggatttgtattttgttattaagggggaaaatgtgatttgtgcctgatctttcatctgtgattcttataagagctttgtcttcagaaaaactaaaaataaaaggcattgacttaaacagctgagacaaacnnagagaaacagaggacgaaacaataaaaaaaaaaaagtaaatggccctctttggcctca

SEQ ID NO: 372768 - DNA, 1262 bp, Homo sapiens
acgccctctggcccctgcctctagccccgcctctcgcctcgccgcctcgccgccctgccaccctgccgccctgccgccctgccgccctgccgccctgccgccctgccgccctgccgccggtggtcgctgcccgtggtgctccgtcgcccccgccacctcacgtcctcccgtgcgtcgggagcgtctcggctacaacatgttgggcatgatcaagaactcgctgttcggaagcgtagagacgtggccttggcaggtcctaagcaaaggggacaaggaagaagttgcctatgaagaaagggcctgtgaaggcggcaaatttgccacagtagaagtgacagataagcctgtggatgaggctctacgggaagcaatgcccaaggtcgcaaagtatgcggggggcaccaatgacaagggaattgggatggggatgacagtccctatttcctttgctgtgttccccaatgaagatggctctctgcagaagaaattaaaagtctggttccggattccaaaccaatttcaaagcgacccaccagctcccagtgacaaaagcgttaagattgaggaacgggaaggcatcactgtctattccatgcagtttggtggttatgccaaggaagcagactacgtagcacaagccacccgtctgcgtgctgccctggagggcacagccacctaccggggggacatctacttctgcacgggttatgaccctcccatgaagccctacggacggcgcaatgagatctggctgttgaagacatgagtgacccactgaaccaagaacttactggaagtgtgcctctgtgtctccttcctcgggggtaaggaggggacagtgcttcccaagttccagctgcaagtccaacttaaccaactttccttcaaagtcagttactgccaattttctgaaaaaagcatgttccatatactaagtctcttttctcacggtaggaaataatacagccaagatatgcagcatccttctcattgatgtagaaaattctgcgatagaccagaaaaatcctggcagcttttctccaggcatctgggtcactaaaaactgattttctaaaattattggatttgtattttgttattaagggggaaaatgtgatttgtgcctgatctttcatctgtgattcttataagagctttgtcttcagaaaaactaaaaataaaaggcattgacttaaacagctgagacaaaagcgcttcgcccgaagcaatttttaaataattttatcgaacaacgactataa

SEQ ID NO: 372769 - DNA, 1080 bp, Homo sapiens
acgccctctggcccctgcctctagccccgcctctcgcctcgccgcctcgccgccctgccaccctgccgccctgccgccctgccgccctgccgccctgccgccctgccgccctgccgccggtggtcgctgcccgtggtgctccgtcgcccccgccacctcacgtcctcccgtgcgtcgggagcgtctcggctacaacatgttgggcatgatcaagaactcgctgttcggaagcgtagagacgtggccttggcaggtcctaagcaaaggggacaaggaagaagttgcctatgaagaaagggcctgtgaaggcggcaaatttgccacagtagaagtgacagataagcctgtggatgaggctctacgggaagcaatgcccaaggtcgcaaagtatgcggggggcaccaatgacaagggaattgggatggggatgacagtccctatttcctttgctgtgttccccaatgaagatggctctctgcagaagaaattaaaagtctggttccggattccaaaccaatttcaaagcgacccaccagctcccagtgacaaaagcgttaagattgaggaacgggaaggcatcactgtctattccatgcagtttggtggttatgccaaggaagcagactacgtagcacaagccacccgtctgcgtgctgccctggagggcacagccacctaccggggggacatctacttctgcacgggttatgaccctcccatgaagccctacggacggcgcaatgagatctggctgttgaagacatgagtgacccactgaaccaagaacttactggaagtgtgcctctgtgtctccttcctcgggggaaataatacagccaagatatgcagcatccttctcattgatgtagaaaattctgcgatagaccagaaaaatcctggcagcttttctccaggcatctgggtcactaaaaactgattttctaaaattattggatttgtattttgttattaagggggaaaatgtgatttgtgcctgatctttcatctgtgattcttataagagctttgtcttcagaaaaactaaaaataaaaggcattgacttaaacagctgagacaaa

SEQ ID NO: 372770 - DNA, 1802 bp, Homo sapiens
  misc_feature (1341)..(1341): n is a, c, g, or t
  misc_feature (1461)..(1461): n is a, c, g, or t
  misc_feature (1570)..(1570): n is a, c, g, or t
  misc_feature (1628)..(1628): n is a, c, g, or t
  misc_feature (1740)..(1740): n is a, c, g, or t
  misc_feature (1747)..(1747): n is a, c, g, or t
acgccctctggcccctgcctctagccccgcctctcgcctcgccgcctcgccgccctgccaccctgccgccctgccgccctgccgccctgccgccctgccgccctgccgccctgccgccggtggtcgctgcccgtggtgctccgtcgcccccgccacctcacgtcctcccgtgcgtcgggagcgtctcggctacaacatgttgggcatgatcaagaactcgctgttcggaagcgtagagacgtggccttggcaggtcctaagcaaaggggacaaggaagaagttgcctatgaagaaagggcctgtgaaggcggcaaatttgccacagtagaagtgacagataagcctgtggatgaggctctacgggaagcaatgcccaaggtcgcaaagtatgcggggggcaccaatgacaagggaattgggatggggatgacagtccctatttcctttgctgtgttccccaatgaagatggctctctgcagaagaaattaaaagtctggttccggattccaaaccaatttcaaagcgacccaccagctcccagtgacaaaagcgttaagattgaggaacgggaaggcatcactgtctattccatgcagtttggtggttatgccaaggaagcagactacgtagcacaagccacccgtctgcgtgctgccctggagggcacagccacctaccggggggacatctacttctgcacgggttatgaccctcccatgaagccctacggacggcgcaatgagatctggctgttgaagacatgagtgacccactgaaccaagaacttactggaagtgtgcctctgtgtctccttcctcgggggtaaggaggggacagtgcttcccaagttccagctgcaagtccaacttaaccaactttccttcaaagtcagttactgccaattttctgaaaaaagcatgttccatatactaagtctcttttctcacggtaggaaataatacagccaagatatgcagcatccttctcattgatgtagaaaattctgcgatagaccagaaaaatcctggcagcttttctccaggcatctgggtcactaaaaactgattttctaaaattattggatttgtattttgttattaagggggaaaatgtgatttgtgcctgatctttcatctgtgattcttataagagctttgtcttcagaaaaactaaaaataaaaggcattgacttaaacagctgagacaaaaaaaaaaaaatgggctcgttggcctcagcgcaggagcgtttggggcggtctcctttagtgagtgtcaattcatgacacttagtgaatgactgtctgagcttggaccgtcggcggcggcgagcggatgagtnttattgaggatggtatacggcgactccaggaccacggcgtacctggcgaagaatatgttgagatacagctcagcgacggcccgcacccgcccgcggcgcggtggctgcggtttcccaggntcgttcgcctgggtggctctcggtacgtccttacgctgcgccgccccgcggcagcactcaccacacagcgtttctctgcgacgtcctatcactaatcggcgccacgcgncgtatgactctgtccctgtatccttgtcccgcgccgtcgcagctcactcgagacgcangcgtgagcacgagcaaacagcccgcccgcctcgctatcacagcgttcattaatctcgtactcccgcaacacgcctctctcccgccccacacccacactcttcccctcctcanatcacantgcatgcttgccgtagcgccaacgccggcaacccgtgtgacgtccacccgcgagt

SEQ ID NO: 372771 - DNA, 1305 bp, Homo sapiens
  misc_feature (1215)..(1215): n is a, c, g, or t
acgccctctggcccctgcctctagccccgcctctcgcctcgccgcctcgccgccctgccaccctgccgccctgccgccctgccgccctgccgccctgccgccctgccgccctgccgccggtggtcgctgcccgtggtgctccgtcgcccccgccacctcacgtcctcccgtgcgtcgggagcgtctcggctacaacatgttgggcatgatcaagaactcgctgttcggaagcgtagagacgtggccttggcaggtcctaagcaaaggggacaaggaagaagttgcctatgaagaaagggcctgtgaaggcggcaaatttgccacagtagaagtgacagataagcctgtggatgaggctctacgggaagcaatgcccaaggtcgcaaagtatgcggggggcaccaatgacaagggaattgggatggggatgacagtccctatttcctttgctgtgttccccaatgaagatggctctctgcagaagaaattaaaagtctggttccggattccaaaccaatttcaaagcgacccaccagctcccagtgacaaaagcgttaagattgaggaacgggaaggcatcactgtctattccatgcagtttggtggttatgccaaggaagcagactacgtagcacaagccacccgtctgcgtgctgccctggagggcacagccacctaccggggggacatctacttctgcacgggttatgaccctcccatgaagccctacggacggcgcaatgagatctggctgttgaagacatgagtgacccactgaaccaagaacttactggaagtgtgcctctgtgtctccttcctcgggggtaaggaggggacagtgcttcccaagttccagctgcaagtccaacttaaccaactttccttcaaagtcagttactgccaattttctgaaaaaagcatgttccatatactaagtctcttttctcacggtaggaaataatacagccaagatatgcagcatccttctcattgatgtagaaaattctgcgatagaccagaaaaatcctggcagcttttctccaggcatctgggtcactaaaaactgattttctaaaattattggatttgtattttgttattaagggggaaaatgtgatttgtgcctgatctttcatctgtgattcttataagagctttgtcttcagaaaaactaaaaataaaaggcattgacttaaacagctgagacaaaggccnaaggagatgggtgggcggataggaggggggggaagggggggaaagaaaaaaaaaaagttggcctctttgccctcacgggggggacttttg

SEQ ID NO: 372772 - DNA, 670 bp, Homo sapiens
aaggaagtcaaatgtgcgacagaaaaaataacaaccacaataacatttcaggccagtacagctgagttatgcctttgaagcagactacgtagcacaagccacccgtctgcgtgctgccctggagggcacagccacctaccggggggacatctacttctgcacgggttatgaccctcccatgaagccctacggacggcgcaatgagatctggctgttgaagacatgagtgacccactgaaccaagaacttactggaagtgtgcctctgtgtctccttcctcgggggtaaggaggggacagtgcttcccaagttccagctgcaagtccaacttaaccaactttccttcaaagtcagttactgccaattttctgaaaaaagcatgttccatatactaagtctcttttctcacggtaggaaataatacagccaagatatgcagcatccttctcattgatgtagaaaattctgcgatagaccagaaaaatcctggcagcttttctccaggcatctgggtcactaaaaactgattttctaaaattattggatttgtattttgttattaagggggaaaatgtgatttgtgcctgatctttcatctgtgattcttataagagctttgtcttcagaaaaactaaaaataaaaggcattgacttaaacagctgagacaaa

SEQ ID NO: 372773 - DNA, 1363 bp, Homo sapiens
acgccctctggcccctgcctctagccccgcctctcgcctcgccgcctcgccgccctgccaccctgccgccctgccgccctgccgccctgccgccctgccgccctgccgccctgccgccggtggtcgctgcccgtggtgctccgtcgcccccgccacctcacgtcctcccgtgcgtcgggagcgtctcggctacaacatgttgggcatgatcaagaactcgctgttcggaagcgtagagacgtggccttggcaggtcctaagcaaaggggacaaggaagaagttgcctatgaagaaagggcctgtgaaggcggcaaatttgccacagtagaagtgacagataagcctgtggatgaggctctacgggaagcaatgcccaaggtcgcaaagtatgcggggggcaccaatgacaagggaattgggatggggatgacagtccctatttcctttgctgtgttccccaatgaagatggctctctgcagaagaaattaaaagtctggttccggattccaaaccaatttcaaagcgacccaccagctcccagtgacaaaagcgttaagattgaggaacgggaaggcatcactgtctattccatctgaaagtgccaaatgtggtgtctagcctggctccatggaatttttaacacggagttctcacacagcatatgatcattcctcaactcgccacttgatgtcactgcatagtcaaatgagcattcaaaattaccctgcagtggtttgtgttatttctgattctgttgaaagcaatgttaatgagatggtagaaggcaaatgtactacttcaaatgcaaaagtactctatcaaataatgcagtgagtgcattcaatgacaaaattaattctaaaatgaaagcctggcgtccttcattcagtcttccttctttatgaccttgtgaagagatgtttacaaagggattatacatttattagcatcgttaattaccggtgcttttagatgaatagaatgctgtgaaaaaaaatagcactatcagaatatgtttagtattcacaagaggcaatagaattatcctcacacttagaccagcagcaacattccagactactgtcctttctctatgcacttaagttagagtttggccttttcagctcatttcagcaccaggttctcaatagggaccaacagcaggagaagtttgatggtcttaatgaaactttcacggtttaaatgaaatgtctagatataaaggaaaaagttggaaaccaggagtttattttcagggtaacctatgctccaacccagttcatcattcagtggccataggacctttggtatattgccagcctcactgtacctcagtttcctcatctgtaagatgggcatga

SEQ ID NO: 372774 - DNA, 1979 bp, Homo sapiens
cccttctttttcctccctcccctccaaccgcgccccccctcccggatggggaaaaaaaaagatgtcagctcctccgctgtagtattgctccttaaaaacccctctctctgaaaatgacatgccctcgcaatgtaactccgaactcgtacgcggagcccttggctgcgcccggcggaggagagcgctatagccggagcgcaggcatgtatatgcagtctgggagtgacttcaattgcggggtgatgaggggctgcgggctcgcgccctcgctctccaagagggacgagggcagcagccccagcctcgccctcaacacctatccgtcctacctctcgcagctggactcctggggcgaccccaaagccgcctatcgcctggaacaacctgttggcaggccgctgtcctcctgctcctacccacctagtgtcaaggaggagaatgtctgctgcatgtacagcgcagagaagcgggcgaaaagtggccccgaggcagctctctactcccaccccttgccggagtcctgccttggggagcacgaggtacccgtgcccagctactaccgcgccagcccgagctactccgcgctggacaagacgccccactgttctggggccaacgacttcgaagcccctttcgagcagcgggccagtctcaacccgcgcgccgaacatctggaatcgcctcagctggggggcaaagtgagtttccctgagacccccaagtccgacagccagacccccagccccaatgaaatcaagacggagcagagcctggcgggccctaaagggagcccctcggagagcgaaaaggagagggccaaagctgccgactccagcccagacacctcggataacgaagcgaaagaggagataaaggcagaaaacaccacaggaaattggctgacagcaaagagcggaaggaagaagaggtgcccctatactaaacaccagacgctggaattggagaaagaatttctgttcaatatgtatttgacgcgagagcgccgcctggagattagcaagaccattaaccttacagacagacaagtcaaaatctggtttcaaaatcgcagaatgaaactcaagaaaatgaaccgagagaatcggatccgggaactgacctccaattttaatttcacctgagagcgcggcctctcctcctcccttcccgctccttcctctccccgcccctcctccctttgtgcctggtgatatatttttttttcctccctgagtataaatgcaatgcgactgcaaaaaaggcaaagacctcagactctccttccaagggacctgtggttcgtgctgcgaagatgcttccacttaaagcatgagaaatggggtgccgggatgtggggtgtggtgtgtgccctcatagatgggggtgggagtgtggctggtgtgtgtgtcaaaccctcactcacccacgcactcacacacagcattctgttctccatgcaaagttaagatcgaatccatccgcttgtaggggaaaaaaaggaaaaaaattaaccagagagggtctgtaatctcgcagagcacaggcagaatcgttccttccttgctgcatttcctccttagactaatagacgttttggaaagttcggctagtgttcgtgtgtttgtcgtagcacccagagcctccaccaaaccctctccatgtctttacctcccagtcgctctaagaatctgcttgaagtctcgtatttgtactgctttctgcttttctcccacccctcctagcacccccacatcccccatctagtaacatctcagaaatttcatccagaggaacaaaaaaattaaaaatagaacatagcaaagcaaagacagaatgcccccccccaaatattgtcctgtccctgtctgggagttgtgttatttaaagatattctgtatgttgtatcttttgcatgtagcttccttaatggagaaaaaaaaacctaataaatttccagaatcataatcctcaaaaaaaag

SEQ ID NO: 372775 - DNA, 1178 bp, Homo sapiens
ccctggctttcgactagcgtccgctgagctccaggctggtggcgcgtcacttagctggggaagaggagataaaggcagaaaacaccacaggaaattggctgacagcaaagagcggaaggaagaagaggtgcccctatactaaacaccagacgctggaattggagaaagaatttctgttcaatatgtatttgacgcgagagcgccgcctggagattagcaagaccattaaccttacagacagacaagtcaaaatctggtttcaaaatcgcagaatgaaactcaagaaaatgaaccgagagaatcggatccgggaactgacctccaattttaatttcacctgagagcgcggcctctcctcctcccttcccgctccttcctctccccgcccctcctccctttgtgcctggtgatatatttttttttcctccctgagtataaatgcaatgcgactgcaaaaaaggcaaagacctcagactctccttccaagggacctgtggttcgtgctgcgaagatgcttccacttaaagcatgagaaatggggtgccgggatgtggggtgtggtgtgtgccctcatagatgggggtgggagtgtggctggtgtgtgtgtcaaaccctcactcacccacgcactcacacacagcattctgttctccatgcaaagttaagatcgaatccatccgcttgtaggggaaaaaaaggaaaaaaattaaccagagagggtctgtaatctcgcagagcacaggcagaatcgttccttccttgctgcatttcctccttagactaatagacgttttggaaagttcggctagtgttcgtgtgtttgtcgtagcacccagagcctccaccaaaccctctccatgtctttacctcccagtcgctctaagaatctgcttgaagtctcgtatttgtactgctttctgcttttctcccacccctcctagcacccccacatcccccatctagtaacatctcagaaatttcatccagaggaacaaaaaaattaaaaatagaacatagcaaagcaaagacagaatgcccccccccaaatattgtcctgtccctgtctgggagttgtgttatttaaagatattctgtatgttgtatcttttgcatgtagcttccttaatggagaaaaaaaaacctaataaatttccagaatcataatcctcaaaaaaaag

SEQ ID NO: 372776 - DNA, 1495 bp, Homo sapiens
ctcccaggcgcgtgctggctgtggtttgctttctcaatgctggtgtcctggggagctgacgtcccccagctcaggtcaggggcttgcaaaaagcctaaaatggcgatcttgggccagggactagggaaggctggggagatggggggagttctctttactgcgttttcccagttgaaaattgtttcctgcgaaacgcgatttgttgtttgtgggtctgatttgtgcgtgcggcttgggctcctgcggcttttggctcggccgggggccttgggcagcgaggctggagccggaagaggtggaggtgaagggctgcccgccacgtccctccctcctccagatgcctggcttggatggcgttggaacagggcatttggaatgttaggagataaaggcagaaaacaccacaggaaattggctgacagcaaagagcggaaggaagaagaggtgcccctatactaaacaccagacgctggaattggagaaagaatttctgttcaatatgtatttgacgcgagagcgccgcctggagattagcaagaccattaaccttacagacagacaagtcaaaatctggtttcaaaatcgcagaatgaaactcaagaaaatgaaccgagagaatcggatccgggaactgacctccaattttaatttcacctgagagcgcggcctctcctcctcccttcccgctccttcctctccccgcccctcctccctttgtgcctggtgatatatttttttttcctccctgagtataaatgcaatgcgactgcaaaaaaggcaaagacctcagactctccttccaagggacctgtggttcgtgctgcgaagatgcttccacttaaagcatgagaaatggggtgccgggatgtggggtgtggtgtgtgccctcatagatgggggtgggagtgtggctggtgtgtgtgtcaaaccctcactcacccacgcactcacacacagcattctgttctccatgcaaagttaagatcgaatccatccgcttgtaggggaaaaaaaggaaaaaaattaaccagagagggtctgtaatctcgcagagcacaggcagaatcgttccttccttgctgcatttcctccttagactaatagacgttttggaaagttcggctagtgttcgtgtgtttgtcgtagcacccagagcctccaccaaaccctctccatgtctttacctcccagtcgctctaagaatctgcttgaagtctcgtatttgtactgctttctgcttttctcccacccctcctagcacccccacatcccccatctagtaacatctcagaaatttcatccagaggaacaaaaaaattaaaaatagaacatagcaaagcaaagacagaatgcccccccccaaatattgtcctgtccctgtctgggagttgtgttatttaaagatattctgtatgttgtatcttttgcatgtagcttccttaatggagaaaaaaaaacctaataaatttccagaatcataatcctcaaaaaaaag

SEQ ID NO: 372777 - DNA, 1189 bp, Homo sapiens
ctcccaggcgcgtgctggctgtggtttgctttctcaatgctggtgtcctggggagctgacgtcccccagctcagaggagataaaggcagaaaacaccacaggaaattggctgacagcaaagagcggaaggaagaagaggtgcccctatactaaacaccagacgctggaattggagaaagaatttctgttcaatatgtatttgacgcgagagcgccgcctggagattagcaagaccattaaccttacagacagacaagtcaaaatctggtttcaaaatcgcagaatgaaactcaagaaaatgaaccgagagaatcggatccgggaactgacctccaattttaatttcacctgagagcgcggcctctcctcctcccttcccgctccttcctctccccgcccctcctccctttgtgcctggtgatatatttttttttcctccctgagtataaatgcaatgcgactgcaaaaaaggcaaagacctcagactctccttccaagggacctgtggttcgtgctgcgaagatgcttccacttaaagcatgagaaatggggtgccgggatgtggggtgtggtgtgtgccctcatagatgggggtgggagtgtggctggtgtgtgtgtcaaaccctcactcacccacgcactcacacacagcattctgttctccatgcaaagttaagatcgaatccatccgcttgtaggggaaaaaaaggaaaaaaattaaccagagagggtctgtaatctcgcagagcacaggcagaatcgttccttccttgctgcatttcctccttagactaatagacgttttggaaagttcggctagtgttcgtgtgtttgtcgtagcacccagagcctccaccaaaccctctccatgtctttacctcccagtcgctctaagaatctgcttgaagtctcgtatttgtactgctttctgcttttctcccacccctcctagcacccccacatcccccatctagtaacatctcagaaatttcatccagaggaacaaaaaaattaaaaatagaacatagcaaagcaaagacagaatgcccccccccaaatattgtcctgtccctgtctgggagttgtgttatttaaagatattctgtatgttgtatcttttgcatgtagcttccttaatggagaaaaaaaaacctaataaatttccagaatcataatcctcaaaaaaaag

SEQ ID NO: 372778 - DNA, 2956 bp, Homo sapiens
tcaatcctctgtgcaatgattccaactccagggatcagtgtctgaagtgaagctacagattgtctggtggataaataatccaagaaggaacgggggatgttatgactttttgagagaaggctaacatgtcatccttgacagataaactttaaaaaattataataatggaaatgaagaaagaaaacaacagaagatgagaatagcaaaagagctagacatttccgacagggtctcaagagcacgctcaagtcattcacatgtttccatcaaatacagacacagatcagggaagattaaaccctactaatttctcgtcggatgcctcacaacaaggtgccttccaagaactaatggccaaaatatccacccacaacacaaataagcttagaaaatctcttcttacaatcctgacacaatggaagtttccctaaaccacccagcatctaatacaaccagcacaaagaacaacaactcggcatttttttactttgagtcctgtcaacccccttctccagctttactcctattatgcatagcctatactgtggtcttaattgtgggcctttttggaaacctctctctcatcatcatcatctttaagaagcagagaaaagctcagaatttcaccagcatactgattgccaatctctccctctctgataccttggtgtgtgtcatgtgcatccattttactatcatctacactctgatggaccactggatatttggggataccatgtgcagactcacatcctatgtgcagagtgtctcaatctctgtgtccatattctcacttgtattcactgctgtcgaaagatatcagctaattgtgaacccccgtggctggaagcccagtgtgactcatgcctactggggcatcacactgatttggctgttttcccttctgctgtctattcccttcttcctgtcctaccacctcactgatgagcccttccgcaacctctctctccccactgacctctacacccaccaggtggcctgtgtggagaactggccctccaaaaaggaccggctgctcttcaccacctccctttttctgctgcagtattttgttcctctaggcttcatcctcatctgctacttgaagattgttatctgcctccgcaggagaaatgcaaaggtagataagaagaaggaaaatgagggccggctcaatgagaacaagaggatcaacacaatgttgatttccatcgtggtgacctttggagcctgctggctgccccgaatatcttcaatgtcatctttgactggtatcatgaggtgctgatgagctgccaccacgacctggtatttgtagtttgccacttggttgctatggtttccacatgtataaaccctctcttttatggctttctcaacaaaaatttccaaaaggacctggtagtgcttattcaccactgctggtgcttcacacctcaggaaagatgtgaaaatattgccatctccactatgcacacagactccaagaggtctttaagattggctcgtataacaacaggtatatgaaaattgataatgctgaagctcttcttgaatgggagctggacaggtaatggtgggaatagggcaagatgcagaaagaagaaaccagaaccaaaaatagcaactttatacccacttttcctttaggctaagactgcctgtctcatatgtctatccaacacaccctccaacatacacgaacacacataccaccccttttctcttaagaaaataactctaataattcaaacaacctgcccgccatcatttgtggcaaagaatgagaatgagaaagcagagagagaggcaaacagcagtgatggctggggaacaatgttcacagatacttttattcaatggaatatctacaaaagttatgactaatgatatgcctagtaaaaacactgctatacctccttagcactgaagcaagtctattctcagatatgaaaactgtaactttcaatcatataactattcaattaattagccaagtcagaaaatccccccttaaaattcattaattaattaacaaactaagtttggactaaagttgaagggctggttttaacttaacatttaacgaagtgttgtaattacaattaattcccatgcttgaatcatatctccagtttatgataacagtacattttattcactaacaatgctattagaactggccacaaattctttagcatagcaattatgctagaaattgctctaacaaacttattaatggccaatgtagatacagctttcctcacaaagtggcttttaatccctaattctttatgtatattaaaaagaggtcattatgactctattactggatctcagagactttgtcagtagcatttttataattagcgccagatttttaaaaccttctcatatatcttgtggcttaaacatttttaaaagagccctcatccccacagagttgcttacacaggggaatcaactagactgttctcaaaagacactaagctactgttcaaattgctattaactgaagtcacttttattaaattgtgaccagctttaccacttcttagaacaaacctcccctatatctatcaaagttgaactgcagcttatttgtatgttaaaaatgtaactgtaggctggactcagcaacttacacctgtaatcccagccctttgggaggccaaggtggaggatcacttttgcccaggagttgaagaccagcctgagcaacacagtgagactccatctctactaaaaatacaaaaaattagccaggtgtggtcatgcatacctgcagtcccagctacttagatgagaggaaggatcacctgagcctgggagatcaagtgagtcatgatcacaccactgcactccaacctggatgaaagagtgagaccctgtctcaaaaaaaaattttaaaagtaactatattttcttttgaataaaaagtaatgtttctggaaac

SEQ ID NO: 372779 - DNA, 2979 bp, Homo sapiens
ttgatagggatagaaacacatttggctgcttctatagttaacaagatgctgttacattccttgcctcactagctctgaagactatactagcgggacaaagaaagcacctgagatgagctgagaggagggtaaaggtacacagagatcccctggatatttgttctatgtcctctcaggggctttgctaccactagagaattatccatattaagaacttgcattgatattctgggttctgtttcattttttagggtctcaagagcacgctcaagtcattcacatgtttccatcaaatacagacacagatcagggaagattaaaccctactaatttctcgtcggatgcctcacaacaaggtgccttccaagaactaatggccaaaatatccacccacaacacaaataagcttagaaaatctcttcttacaatcctgacacaatggaagtttccctaaaccacccagcatctaatacaaccagcacaaagaacaacaactcggcatttttttactttgagtcctgtcaacccccttctccagctttactcctattatgcatagcctatactgtggtcttaattgtgggcctttttggaaacctctctctcatcatcatcatctttaagaagcagagaaaagctcagaatttcaccagcatactgattgccaatctctccctctctgataccttggtgtgtgtcatgtgcatccattttactatcatctacactctgatggaccactggatatttggggataccatgtgcagactcacatcctatgtgcagagtgtctcaatctctgtgtccatattctcacttgtattcactgctgtcgaaagatatcagctaattgtgaacccccgtggctggaagcccagtgtgactcatgcctactggggcatcacactgatttggctgttttcccttctgctgtctattcccttcttcctgtcctaccacctcactgatgagcccttccgcaacctctctctccccactgacctctacacccaccaggtggcctgtgtggagaactggccctccaaaaaggaccggctgctcttcaccacctccctttttctgctgcagtattttgttcctctaggcttcatcctcatctgctacttgaagattgttatctgcctccgcaggagaaatgcaaaggtagataagaagaaggaaaatgagggccggctcaatgagaacaagaggatcaacacaatgttgatttccatcgtggtgacctttggagcctgctggctgccccgaatatcttcaatgtcatctttgactggtatcatgaggtgctgatgagctgccaccacgacctggtatttgtagtttgccacttggttgctatggtttccacatgtataaaccctctcttttatggctttctcaacaaaaatttccaaaaggacctggtagtgcttattcaccactgctggtgcttcacacctcaggaaagatgtgaaaatattgccatctccactatgcacacagactccaagaggtctttaagattggctcgtataacaacaggtatatgaaaattgataatgctgaagctcttcttgaatgggagctggacaggtaatggtgggaatagggcaagatgcagaaagaagaaaccagaaccaaaaatagcaactttatacccacttttcctttaggctaagactgcctgtctcatatgtctatccaacacaccctccaacatacacgaacacacataccaccccttttctcttaagaaaataactctaataattcaaacaacctgcccgccatcatttgtggcaaagaatgagaatgagaaagcagagagagaggcaaacagcagtgatggctggggaacaatgttcacagatacttttattcaatggaatatctacaaaagttatgactaatgatatgcctagtaaaaacactgctatacctccttagcactgaagcaagtctattctcagatatgaaaactgtaactttcaatcatataactattcaattaattagccaagtcagaaaatccccccttaaaattcattaattaattaacaaactaagtttggactaaagttgaagggctggttttaacttaacatttaacgaagtgttgtaattacaattaattcccatgcttgaatcatatctccagtttatgataacagtacattttattcactaacaatgctattagaactggccacaaattctttagcatagcaattatgctagaaattgctctaacaaacttattaatggccaatgtagatacagctttcctcacaaagtggcttttaatccctaattctttatgtatattaaaaagaggtcattatgactctattactggatctcagagactttgtcagtagcatttttataattagcgccagatttttaaaaccttctcatatatcttgtggcttaaacatttttaaaagagccctcatccccacagagttgcttacacaggggaatcaactagactgttctcaaaagacactaagctactgttcaaattgctattaactgaagtcacttttattaaattgtgaccagctttaccacttcttagaacaaacctcccctatatctatcaaagttgaactgcagcttatttgtatgttaaaaatgtaactgtaggctggactcagcaacttacacctgtaatcccagccctttgggaggccaaggtggaggatcacttttgcccaggagttgaagaccagcctgagcaacacagtgagactccatctctactaaaaatacaaaaaattagccaggtgtggtcatgcatacctgcagtcccagctacttagatgagaggaaggatcacctgagcctgggagatcaagtgagtcatgatcacaccactgcactccaacctggatgaaagagtgagaccctgtctcaaaaaaaaattttaaaagtaactatattttcttttgaataaaaagtaatgtttctggaaac

SEQ ID NO: 372780 - DNA, 2629 bp, Homo sapiens
ggcgggccttgggaaccgtctcctggttggggggtgggggggaaagatggcggagctgatgctgctcagcgagattgctgacccgacgcgtttcttcaccgacaacctgcttagcccggaggactggggtctgcagaacagcaccttgtattctggcctagatgaagtggccgaggagcagacgcagctcttccgttgcccggagcaggatgtcccgtttgacggcagctccctggacgtggggatggatgtcagcccctctgagcccccatgggaactcctgccgatcttcccagatcttcaggtgaagtctgagccatcttccccctgctcttcctcctccctcagctccgagtcatcgcgtctctccacagagccatccagcgaggctcttggggtaggggaggtgctccatgtgaagacagagtccttggcacccccactgtgtctcctgggagatgacccaacatcctcatttgaaaccgtccagatcaacgttatccccacctctgatgattcctcagatgtccagaccaagatagaacctgtctctccatgttcttccgtcaactctgaggcctccctgctctcagccgactcctccagccaggcttttataggagaggaggtcctggaagtgaagacagagtccctgtccccttcaggatgcctcctgtgggatgtcccagccccctcacttggagctgtccagatcagcatgggcccatcccttgatggctcctcaggcaaagccctgcccacccggaagccgccactgcagcccaaacctgtagtgctaaccactgtcccaatgccatccagagctgtgcctcccagcaccacagtccttctgcagtccctcgtccagccacccccagtgtccccagttgtcctcatccagggtgctattcgagtccagcctgaagggccggctccctctctaccacggcctgagaggaagagcatcgttcccgctcctatgcctggaaactcctgcccgcctgaagtggatgcaaagctgctgaagcggcagcagcgaatgatcaagaaccgggagtcagcctgccagtcccggagaaagaagaaagagtatctgcagggactggaggctcggctgcaagcagtactggctgacaaccagcagctccgccgagagaatgctgccctccggcggcggctggaggccctgctggctgaaaacagcgagctcaagttagggtctggaaacaggaaggtggtctgcatcatggtcttccttctcttcattgccttcaactttggacctgtcagcatcagtgagcctccttcagctcccatctctcctcggatgaacaagggggagcctcaaccccggagacacttgctggggttctcagagcaagagccagttcagggagttgaacctctccaggggtcctcccagggccctaaggagccccagcccagccccacagaccagcccagtttcagcaacctgacagccttccctgggggcgccaaggagctactactaagagacctagaccagctcttcctctcctctgattgccggcacttcaaccgcactgagtccctgaggcttgctgacgagttgagtggctgggtccagcgccaccagagaggccggaggaagatccctcagagggcccaggagagacagaagtctcagccacggaagaagtcacctccagttaaggcagtccccatccaaccccctggacccccagaaagggattctgtgggccagctgcaactatatcgccacccagaccgttcgcagccagcattcttggatgcaattgaccgacgggaagacacattttatgttgtctctttccgaagggaccacctgctgctcccagccatcagccacaacaagacctcccggcccaagatgtccctggtgatgcctgccatggcccccaatgagaccctgtcaggccgtggggccccgggggactatgaggagatgatgcagatcgagtgtgaggtcatggacaccagggtgattcacatcaagacctccacagtgcccccctcgctccgaaaacagccatccccaaccccaggcaatgccacaggtggccccttgccagtctctgcagccagccaggcccaccaggcctcccaccagcccctctacctcaatcatccctgacctctgccattcacactgacttagaacggggggagggggtaccaggtggccaggtgggactgtttcaaatttccctgatccccaggcttggggcaattggtaaaggaaagagcaggtgtgggggttaagcacttatttgaggtgggggtgttcacctctcttctcatcccttttcagaatatagggctcctctcattcctgtgaacccccagtcctggcttctttgtttgaggggattgtgtgaggttcagttgtggggtgggtggtgagctgctgcatattttttattttgtttctctagtgttatggcagtggaggtgggaatttagtccccaggtgggacaagggaagttttttcattttggagctagttactgggagtaagggagggtggggtgggggggagttcaggtttatgtgtgtgcatttcttttttattattattaaataaacaacttggagggagttgaa

SEQ ID NO: 372781 - DNA, 1180 bp, Homo sapiens
ggcgggccttgggaaccgtctcctggttggggggtgggggggaaagatggcggagctgatgctgctcagcgagattgctgacccgacgcgtttcttcaccgacaacctgcttagcccggaggactggggtctgcagaacagcaccttgtattctggcctagatgaagtggccgaggagcagacgcagctcttccgttgcccggagcaggatgtcccgtttgacggcagctccctggacgtggggatggatgtcagcccctctgagcccccatgggaactcctgccgatcttcccagatcttcaggtgaagtctgagccatcttccccctgctcttcctcctccctcagctccgagtcatcgcgtctctccacagagccatccagcgaggctcttggggtaggggaggtgctccatgtgaagacagagtccttggcacccccactgtgtctcctgggagatgacccaacatcctcatttgaaaccgtccagatcaacgttatccccacctctgatgattcctcagatgtccagaccaagatagaacctgtctctccatgttcttccgtcaactctgaggcctccctgctctcagccgactcctccagccaggcttttataggagaggaggtcctggaagtgaagacagagtccctgtccccttcaggatgcctcctgtgggatgtcccagccccctcacttggagctgtccagatcagcatgggcccatcccttgatggctcctcaggcaaagccctgcccacccggaagccgccactgcagcccaaacctgtagtgctaaccactgtcccaatgccatccagagctgtgcctcccagcaccacagtccttctgcagtccctcgtccagccacccccaggtactgaagaaggagaaaagggccgggcatggtggctcacgccggtaatcccagcactttgggaggctgaggcgggcgaatcacctgaggtcagaagtttaagaccagcctggccaacgtggtgaaaccttgtctctactaaaaatacaaaaattagcgtggagtggtggcaggcgcctgtaatcccagctcctcgggaggctgaggcaggagaatcacttgaacccaggaggcggaggttgcagtgagccgagatcatgccactgcactccagcctgggcgacaaagcgagactttgtctc

SEQ ID NO: 372782 - DNA, 530 bp, Homo sapiens
tctaactccctttcctccagatcttcaggtgaagtctgagccatcttccccctgctcttcctcctccctcagctccgagtcatcgcgtctctccacagagccatccagcgagactagtagccaaccgtggactagtagccaaccgtggactagtactagtcacggttggctagtgggtgttgagcttgaacgctttcattaatgggtggctgcttttaggcctactatgggtgttaaatttgttgtactctctctacaaggttgattcctagtgtccaaagagggtaataatgacttgttggttgatggtagatattgggctgttaattgtcagttcagtgtttaaatctgacgcaggcttatgcggaggagaatgttttcatgttacttatactaacattagttcttctatagggtgatagattggtccaattgggtgtgaggaggaatataatgagtgactctgcgctccatggctgaatgcggccgaccgtggactagtactagtccacgggtggctcacgcccata

SEQ ID NO: 372783 - DNA, 379 bp, Homo sapiens
ctcgggaggctgaggcaggagaatggggtgaacccgggaggcggagcttgcagtgagccgagatcgcccactgctattagcagcaaaaggattgtaaggattgttggtggctttgcattgcatagtgttattagaagtagatgatggtgataatgctggtagaaatagtgactattaagtgcttactgagttctaggctctaggtgatgcactgtcttttttgtatgtagggaccatccttattcccatcttacagaggcagactcaggcttgtataacagattgcaactcaagcagtccatctgcagagtctttattcttacctagatacttgatacagctgaaattcttcattgtgctcagtccttctttatccaca

SEQ ID NO: 372784 - DNA, 2718 bp, Homo sapiens
ggcgggccttgggaaccgtctcctggttggggggtgggggggaaagatggcggagctgatgctgctcagcgagattgctgacccgacgcgtttcttcaccgacaacctgcttagcccggaggactggggtctgcagaacagcaccttgtattctggcctagatgaagtggccgaggagcagacgcagctcttccgttgcccggagcaggatgtcccgtttgacggcagctccctggacgtggggatggatgtcagcccctctgagcccccatgggaactcctgccgatcttcccagatcttcaggtgaagtctgagccatcttccccctgctcttcctcctccctcagctccgagtcatcgcgtctctccacagagccatccagcgaggctcttggggtaggggaggtgctccatgtgaagacagagtccttggcacccccactgtgtctcctgggagatgacccaacatcctcatttgaaaccgtccagatcaacgttatccccacctctgatgattcctcagatgtccagaccaagatagaacctgtctctccatgttcttccgtcaactctgaggcctccctgctctcagccgactcctccagccaggcttttataggagaggaggtcctggaagtgaagacagagtccctgtccccttcaggatgcctcctgtgggatgtcccagccccctcacttggagctgtccagatcagcatgggcccatcccttgatggctcctcaggcaaagccctgcccacccggaagccgccactgcagcccaaacctgtagtgctaaccactgtcccaatgccatccagagctgtgcctcccagcaccacagtccttctgcagtccctcgtccagccacccccagtgtccccagttgtcctcatccagggtgctattcgagtccagcctgaagggccggctccctctctaccacggcctgagaggaagagcatcgttcccgctcctatgcctggaaactcctgcccgcctgaagtggatgcaaagctgctgaagcggcagcagcgaatgatcaagaaccgggagtcagcctgccagtcccggagaaagaagaaagagtatctgcagggactggaggctcggctgcaagcagtactggctgacaaccagcagctccgccgagagaatgctgccctccggcggcggctggaggccctgctggctgaagtaagaccagtctgtccctgggagaccaacaggaatacagcctccttggaatgattcccctttttcttgtctccttctttgtaccttagaacagcgagctcaagttagggtctggaaacaggaaggtggtctgcatcatggtcttccttctcttcattgccttcaactttggacctgtcagcatcagtgagcctccttcagctcccatctctcctcggatgaacaagggggagcctcaaccccggagacacttgctggggttctcagagcaagagccagttcagggagttgaacctctccaggggtcctcccagggccctaaggagccccagcccagccccacagaccagcccagtttcagcaacctgacagccttccctgggggcgccaaggagctactactaagagacctagaccagctcttcctctcctctgattgccggcacttcaaccgcactgagtccctgaggcttgctgacgagttgagtggctgggtccagcgccaccagagaggccggaggaagatccctcagagggcccaggagagacagaagtctcagccacggaagaagtcacctccagttaaggcagtccccatccaaccccctggacccccagaaagggattctgtgggccagctgcaactatatcgccacccagaccgttcgcagccagcattcttggatgcaattgaccgacgggaagacacattttatgttgtctctttccgaagggaccacctgctgctcccagccatcagccacaacaagacctcccggcccaagatgtccctggtgatgcctgccatggcccccaatgagaccctgtcaggccgtggggccccgggggactatgaggagatgatgcagatcgagtgtgaggtcatggacaccagggtgattcacatcaagacctccacagtgcccccctcgctccgaaaacagccatccccaaccccaggcaatgccacaggtggccccttgccagtctctgcagccagccaggcccaccaggcctcccaccagcccctctacctcaatcatccctgacctctgccattcacactgacttagaacggggggagggggtaccaggtggccaggtgggactgtttcaaatttccctgatccccaggcttggggcaattggtaaaggaaagagcaggtgtgggggttaagcacttatttgaggtgggggtgttcacctctcttctcatcccttttcagaatatagggctcctctcattcctgtgaacccccagtcctggcttctttgtttgaggggattgtgtgaggttcagttgtggggtgggtggtgagctgctgcatattttttattttgtttctctagtgttatggcagtggaggtgggaatttagtccccaggtgggacaagggaagttttttcattttggagctagttactgggagtaagggagggtggggtgggggggagttcaggtttatgtgtgtgcatttcttttttattattattaaataaacaacttggagggagttgaa

SEQ ID NO: 372785 - DNA, 2711 bp, Homo sapiens
tctctcacagaccatccaacgagctcttcgggtaggtgaggtgctccatccgtagacagagtccttggcaccccccctgtgtctcctgggagatgaccccacacccctccgtcctcagcccaagaaagatggcggagctgatgctgctcagcgagattgctgacccgacgcgtttcttcaccgacaacctgcttagcccggaggactggggtctgcagaacagcaccttgtattctggcctagatgaagtggccgaggagcagacgcagctcttccgttgcccggagcaggatgtcccgtttgacggcagctccctggacgtggggatggatgtcagcccctctgagcccccatgggaactcctgccgatcttcccagatcttcaggtgaagtctgagccatcttccccctgctcttcctcctccctcagctccgagtcatcgcgtctctccacagagccatccagcgaggctcttggggtaggggaggtgctccatgtgaagacagagtccttggcacccccactgtgtctcctgggagatgacccaacatcctcatttgaaaccgtccagatcaacgttatccccacctctgatgattcctcagatgtccagaccaagatagaacctgtctctccatgttcttccgtcaactctgaggcctccctgctctcagccgactcctccagccaggcttttataggagaggaggtcctggaagtgaagacagagtccctgtccccttcaggatgcctcctgtgggatgtcccagccccctcacttggagctgtccagatcagcatgggcccatcccttgatggctcctcaggcaaagccctgcccacccggaagccgccactgcagcccaaacctgtagtgctaaccactgtcccaatgccatccagagctgtgcctcccagcaccacagtccttctgcagtccctcgtccagccacccccagtgtccccagttgtcctcatccagggtgctattcgagtccagcctgaagggccggctccctctctaccacggcctgagaggaagagcatcgttcccgctcctatgcctggaaactcctgcccgcctgaagtggatgcaaagctgctgaagcggcagcagcgaatgatcaagaaccgggagtcagcctgccagtcccggagaaagaagaaagagtatctgcagggactggaggctcggctgcaagcagtactggctgacaaccagcagctccgccgagagaatgctgccctccggcggcggctggaggccctgctggctgaaaacagcgagctcaagttagggtctggaaacaggaaggtggtctgcatcatggtcttccttctcttcattgccttcaactttggacctgtcagcatcagtgagcctccttcagctcccatctctcctcggatgaacaagggggagcctcaaccccggagacacttgctggggttctcagagcaagagccagttcagggagttgaacctctccaggggtcctcccagggccctaaggagccccagcccagccccacagaccagcccagtttcagcaacctgacagccttccctgggggcgccaaggagctactactaagagacctagaccagctcttcctctcctctgattgccggcacttcaaccgcactgagtccctgaggcttgctgacgagttgagtggctgggtccagcgccaccagagaggccggaggaagatccctcagagggcccaggagagacagaagtctcagccacggaagaagtcacctccagttaaggcagtccccatccaaccccctggacccccagaaagggattctgtgggccagctgcaactatatcgccacccagaccgttcgcagccagcattcttggatgcaattgaccgacgggaagacacattttatgttgtctctttccgaagggaccacctgctgctcccagccatcagccacaacaagacctcccggcccaagatgtccctggtgatgcctgccatggcccccaatgagaccctgtcaggccgtggggccccgggggactatgaggagatgatgcagatcgagtgtgaggtcatggacaccagggtgattcacatcaagacctccacagtgcccccctcgctccgaaaacagccatccccaaccccaggcaatgccacaggtggccccttgccagtctctgcagccagccaggcccaccaggcctcccaccagcccctctacctcaatcatccctgacctctgccattcacactgacttagaacggggggagggggtaccaggtggccaggtgggactgtttcaaatttccctgatccccaggcttggggcaattggtaaaggaaagagcaggtgtgggggttaagcacttatttgaggtgggggtgttcacctctcttctcatcccttttcagaatatagggctcctctcattcctgtgaacccccagtcctggcttctttgtttgaggggattgtgtgaggttcagttgtggggtgggtggtgagctgctgcatattttttattttgtttctctagtgttatggcagtggaggtgggaatttagtccccaggtgggacaagggaagttttttcattttggagctagttactgggagtaagggagggtggggtgggggggagttcaggtttatgtgtgtgcatttcttttttattattattaaataaacaacttggagggagttgaa

SEQ ID NO: 372786 - DNA, 1920 bp, Homo sapiens
ggcgggccttgggaaccgtctcctggttggggggtgggggggaaagatggcggagctgatgctgctcagcgagattgctgacccgacgcgtttcttcaccgacaacctgcttagcccggaggactggggtctgcagaacagcaccttgtattctggcctagatgaagtggccgaggagcagacgcagctcttccgttgcccggagcaggatgtcccgtttgacggcagctccctggacgtggggatggatgtcagcccctctgagcccccatgggaactcctgccgatcttcccagatcttcaggtgaagtctgagccatcttccccctgctcttcctcctccctcagctccgagtcatcgcgtctctccacagagccatccagcgaggctcttggggtaggggaggtgctccatgtgaagacagagtccttggcacccccactgtgtctcctgggagatgacccaacatcctcatttgaaaccgtccagatcaacgttatccccacctctgatgattcctcagatgtccagaccaagatagaacctgtctctccatgttcttccgtcaactctgaggcctccctgctctcagccgactcctccagccaggcttttataggagaggaggtcctggaagtgaagacagagtccctgtccccttcaggatgcctcctgtgggatgtcccagccccctcacttggagctgtccagatcagcatgggcccatcccttgatggctcctcaggcaaagccctgcccacccggaagccgccactgcagcccaaacctgtagtgctaaccactgtcccaatgccatccagagctgtgcctcccagcaccacagtccttctgcagtccctcgtccagccacccccagtgtccccagttgtcctcatccagggtgctattcgagtccagcctgaagggccggctccctctctaccacggcctgagaggaagagcatcgttcccgctcctatgcctggaaactcctgcccgcctgaagtggatgcaaagctgctgaagcggcagcagcgaatgatcaagaaccgggagtcagcctgccagtcccggagaaagaagaaagagtatctgcagggactggaggctcggctgcaagcagtactggctgacaaccagcagctccgccgagagaatgctgccctccggcggcggctggaggccctgctggctgaaaacagcgagctcaagttagggtctggaaacaggaaggtggtctgcatcatggtcttccttctcttcattgccttcaactttggacctgtcagcatcagtgagcctccttcagctcccatctctcctcggatgaacaagggggagcctcaaccccggagacacttgctggggttctcagagcaagagccagttcagggagttgaacctctccaggggtcctcccagggccctaaggagccccagcccagccccacagaccagcccagtttcagcaacctgacagccttccctgggggcgccaaggagctactactaagagacctagaccagctcttcctctcctctgattgccggcacttcaaccgcactgagtccctgaggcttgctgacgagttgagtggctgggtccagcgccaccagagaggccggaggaagatccctcagagggcccaggagagacagaagtctcagccacggaagaagtcacctccagttaaggcagtccccatccaaccccctggacccccagaaagggattctgtgggccagctgcaactatatcgccacccagaccgttcgcagccagcattcttggatgcaattgaccgacgggaagacacattttatgttgtctctttccgaaggcctcctgaatgatgccagcccagtatgctctaacctccagcctggttctcctggtgctgctgagcacagccagagca

SEQ ID NO: 372787 - DNA, 1858 bp, Homo sapiens
tggagtccaggtgttgggctggcggattctttcaaagtcatgatttccagctcttgttcatttcccacccagcgcacagccctctgacctctgctcacttgccccagtgtccccagttgtcctcatccagggtgctattcgagtccagcctgaagggccggctccctctctaccacggcctgagaggaagagcatcgttcccgctcctatgcctggaaactcctgcccgcctgaagtggatgcaaagctgctgaagcggcagcagcgaatgatcaagaaccgggagtcagcctgccagtcccggagaaagaagaaagagtatctgcagggactggaggctcggctgcaagcagtactggctgacaaccagcagctccgccgagagaatgctgccctccggcggcggctggaggccctgctggctgaaaacagcgagctcaagttagggtctggaaacaggaaggtggtctgcatcatggtcttccttctcttcattgccttcaactttggacctgtcagcatcagtgagcctccttcagctcccatctctcctcggatgaacaagggggagcctcaaccccggagacacttgctggggttctcagagcaagagccagttcagggagttgaacctctccaggggtcctcccagggccctaaggagccccagcccagccccacagaccagcccagtttcagcaacctgacagccttccctgggggcgccaaggagctactactaagagacctagaccagctcttcctctcctctgattgccggcacttcaaccgcactgagtccctgaggcttgctgacgagttgagtggctgggtccagcgccaccagagaggccggaggaagatccctcagagggcccaggagagacagaagtctcagccacggaagaagtcacctccagttaaggcagtccccatccaaccccctggacccccagaaagggattctgtgggccagctgcaactatatcgccacccagaccgttcgcagccagcattcttggatgcaattgaccgacgggaagacacattttatgttgtctctttccgaagggaccacctgctgctcccagccatcagccacaacaagacctcccggcccaagatgtccctggtgatgcctgccatggcccccaatgagaccctgtcaggccgtggggccccgggggactatgaggagatgatgcagatcgagtgtgaggtcatggacaccagggtgattcacatcaagacctccacagtgcccccctcgctccgaaaacagccatccccaaccccaggcaatgccacaggtggccccttgccagtctctgcagccagccaggcccaccaggcctcccaccagcccctctacctcaatcatccctgacctctgccattcacactgacttagaacggggggagggggtaccaggtggccaggtgggactgtttcaaatttccctgatccccaggcttggggcaattggtaaaggaaagagcaggtgtgggggttaagcacttatttgaggtgggggtgttcacctctcttctcatcccttttcagaatatagggctcctctcattcctgtgaacccccagtcctggcttctttgtttgaggggattgtgtgaggttcagttgtggggtgggtggtgagctgctgcatattttttattttgtttctctagtgttatggcagtggaggtgggaatttagtccccaggtgggacaagggaagttttttcattttggagctagttactgggagtaagggagggtggggtgggggggagttcaggtttatgtgtgtgcatttcttttttattattattaaataaacaacttggagggagttgaa

SEQ ID NO: 372788 - DNA, 1845 bp, Homo sapiens
tcagagttgagcgcgttacctccgctgggcaatggcatcagagctgttctccagacacagtccttctgcagtcccgtcgtcgagccacccccagtgtccccagttgtcctcatccagggtgctattcgagtccagcctgaagggccggctccctctctaccacggcctgagaggaagagcatcgttcccgctcctatgcctggaaactcctgcccgcctgaagtggatgcaaagctgctgaagcggcagcagcgaatgatcaagaaccgggagtcagcctgccagtcccggagaaagaagaaagagtatctgcagggactggaggctcggctgcaagcagtactggctgacaaccagcagctccgccgagagaatgctgccctccggcggcggctggaggccctgctggctgaaaacagcgagctcaagttagggtctggaaacaggaaggtggtctgcatcatggtcttccttctcttcattgccttcaactttggacctgtcagcatcagtgagcctccttcagctcccatctctcctcggatgaacaagggggagcctcaaccccggagacacttgctggggttctcagagcaagagccagttcagggagttgaacctctccaggggtcctcccagggccctaaggagccccagcccagccccacagaccagcccagtttcagcaacctgacagccttccctgggggcgccaaggagctactactaagagacctagaccagctcttcctctcctctgattgccggcacttcaaccgcactgagtccctgaggcttgctgacgagttgagtggctgggtccagcgccaccagagaggccggaggaagatccctcagagggcccaggagagacagaagtctcagccacggaagaagtcacctccagttaaggcagtccccatccaaccccctggacccccagaaagggattctgtgggccagctgcaactatatcgccacccagaccgttcgcagccagcattcttggatgcaattgaccgacgggaagacacattttatgttgtctctttccgaagggaccacctgctgctcccagccatcagccacaacaagacctcccggcccaagatgtccctggtgatgcctgccatggcccccaatgagaccctgtcaggccgtggggccccgggggactatgaggagatgatgcagatcgagtgtgaggtcatggacaccagggtgattcacatcaagacctccacagtgcccccctcgctccgaaaacagccatccccaaccccaggcaatgccacaggtggccccttgccagtctctgcagccagccaggcccaccaggcctcccaccagcccctctacctcaatcatccctgacctctgccattcacactgacttagaacggggggagggggtaccaggtggccaggtgggactgtttcaaatttccctgatccccaggcttggggcaattggtaaaggaaagagcaggtgtgggggttaagcacttatttgaggtgggggtgttcacctctcttctcatcccttttcagaatatagggctcctctcattcctgtgaacccccagtcctggcttctttgtttgaggggattgtgtgaggttcagttgtggggtgggtggtgagctgctgcatattttttattttgtttctctagtgttatggcagtggaggtgggaatttagtccccaggtgggacaagggaagttttttcattttggagctagttactgggagtaagggagggtggggtgggggggagttcaggtttatgtgtgtgcatttcttttttattattattaaataaacaacttggagggagttgaa

SEQ ID NO: 372789 - DNA, 1947 bp, Homo sapiens
tggagtccaggtgttgggctggcggattctttcaaagtcatgatttccagctcttgttcatttcccacccagcgcacagccctctgacctctgctcacttgccccagtgtccccagttgtcctcatccagggtgctattcgagtccagcctgaagggccggctccctctctaccacggcctgagaggaagagcatcgttcccgctcctatgcctggaaactcctgcccgcctgaagtggatgcaaagctgctgaagcggcagcagcgaatgatcaagaaccgggagtcagcctgccagtcccggagaaagaagaaagagtatctgcagggactggaggctcggctgcaagcagtactggctgacaaccagcagctccgccgagagaatgctgccctccggcggcggctggaggccctgctggctgaagtaagaccagtctgtccctgggagaccaacaggaatacagcctccttggaatgattcccctttttcttgtctccttctttgtaccttagaacagcgagctcaagttagggtctggaaacaggaaggtggtctgcatcatggtcttccttctcttcattgccttcaactttggacctgtcagcatcagtgagcctccttcagctcccatctctcctcggatgaacaagggggagcctcaaccccggagacacttgctggggttctcagagcaagagccagttcagggagttgaacctctccaggggtcctcccagggccctaaggagccccagcccagccccacagaccagcccagtttcagcaacctgacagccttccctgggggcgccaaggagctactactaagagacctagaccagctcttcctctcctctgattgccggcacttcaaccgcactgagtccctgaggcttgctgacgagttgagtggctgggtccagcgccaccagagaggccggaggaagatccctcagagggcccaggagagacagaagtctcagccacggaagaagtcacctccagttaaggcagtccccatccaaccccctggacccccagaaagggattctgtgggccagctgcaactatatcgccacccagaccgttcgcagccagcattcttggatgcaattgaccgacgggaagacacattttatgttgtctctttccgaagggaccacctgctgctcccagccatcagccacaacaagacctcccggcccaagatgtccctggtgatgcctgccatggcccccaatgagaccctgtcaggccgtggggccccgggggactatgaggagatgatgcagatcgagtgtgaggtcatggacaccagggtgattcacatcaagacctccacagtgcccccctcgctccgaaaacagccatccccaaccccaggcaatgccacaggtggccccttgccagtctctgcagccagccaggcccaccaggcctcccaccagcccctctacctcaatcatccctgacctctgccattcacactgacttagaacggggggagggggtaccaggtggccaggtgggactgtttcaaatttccctgatccccaggcttggggcaattggtaaaggaaagagcaggtgtgggggttaagcacttatttgaggtgggggtgttcacctctcttctcatcccttttcagaatatagggctcctctcattcctgtgaacccccagtcctggcttctttgtttgaggggattgtgtgaggttcagttgtggggtgggtggtgagctgctgcatattttttattttgtttctctagtgttatggcagtggaggtgggaatttagtccccaggtgggacaagggaagttttttcattttggagctagttactgggagtaagggagggtggggtgggggggagttcaggtttatgtgtgtgcatttcttttttattattattaaataaacaacttggagggagttgaa

SEQ ID NO: 372790 - DNA, 694 bp, Homo sapiens
ggcgggccttgggaaccgtctcctggttggggggtgggggggaaagatggcggagctgatgctgctcagcgagattgctgacccgacgcgtttcttcaccgacaacctgcttagcccggaggactggggtctgcagaacagcaccttgtattctggcctagatgaagtggccgaggagcagacgcagctcttccgttgcccggagcaggatgtcccgtttgacggcagctccctggacgtggggatggatgtcagcccctctgagcccccatgggaactcctgccgatcttcccagatcttcaggtgaagtctgagccatcttccccctgctcttcctcctccctcagctccgagtcatcgcgtctctccacagagccatccagcgaggctcttggggtaggggaggtgctccatgtgaagacagagtccttggcacccccactgtgtctcctgggagatgacccaacatcctcatttgaaaccgtccagatcaacgttatccccacctctgatgattcctcagatgtccagaccaagatagaacctgtctctccatgttcttccgtcaactctgaggcctccctgctctcagccgactcctccagccaggtgagcaccaccttccttccttcctccaggttttccagtgagttcctcctgacctagaggtatgagagctttcccttcttcagc

SEQ ID NO: 372791 - DNA, 807 bp, Homo sapiens
ggcgggccttgggaaccgtctcctggttggggggtgggggggaaagatggcggagctgatgctgctcagcgagattgctgacccgacgcgtttcttcaccgacaacctgcttagcccggaggactggggtctgcagaacagcaccttgtattctggcctagatgaagtggccgaggagcagacgcagctcttccgttgcccggagcaggatgtcccgtttgacggcagctccctggacgtggggatggatgtcagcccctctgagcccccatcaacctgacagccttccctgggggcgccaaggagctactactaagagacctagaccagctcttcctctcctctgattgccggcacttcaaccgcactgagtccctgaggcttgctgacgagttgagtggctgggtccagcgccaccagagaggccggaggaagatccctcagagggcccaggagagacagaagtctcagccacggaagaagtcacctccagttaaggcagtccccatccaaccccctggacccccagaaagggattctgtgggccagctgcaactatatcgccacccagaccgttcgcagccagcattcttggatgcaattgaccgacgggaagacacattttatgttgtctctttccgaagggaccacctgctgctcccagccatcagccacaacaagacctcccggcccaagatgtccctggtgatgcctgccatggcccccaatgcctcctgaatgatgccagcccagtatgctctaacctccagcctggttctcctggtgctgctgagcacagccagagca

SEQ ID NO: 372792 - DNA, 1009 bp, Homo sapiens
  misc_feature (818)..(818): n is a, c, g, or t
ggcgggccttgggaaccgtctcctggttggggggtgggggggaaagatggcggagctgatgctgctcagcgagattgctgacccgacgcgtttcttcaccgacaacctgcttagcccggaggactggggtctgcagaacagcaccttgtattctggcctagatgaagtggccgaggagcagacgcagctcttccgttgcccggagcaggatgtcccgtttgacggcagctccctggacgtggggatggatgtcagcccctctgagcccccatgggaactcctgccgatcttcccagatcttcaggtgaagtctgagccatcttccccctgctcttcctcctccctctcttctcatcccttttcagaatatagggctcctctcattcctgtgaacccccagtcctggcttctttgtttgaggggattgtgtgaggttcagttgtggggtgggtggtgagctgctgcatattttttattttgtttctctagtgttatggcagtggaggtgggaatttagtccccaggtgggacaagggaagttttttcattttggagctagttactgggagtaagggagggtggggtgggggggagttcaggtttatgtgtgtgcatttcttttttattattattaaataaacaacttggagggagttgaaaaaaaagtggctgccttcctggctcgtgatggggagtttgggggaaagtggcttttccagagccagcatcaaagaatcaagcactgaagacatagctggctctgaggtggggtgggtgcgggatcacagaccgcatgtcatccccttgcccccaccccngcaactctggggtatatctgtgtctagcaacgatgtctcatggcgtgacagactagaggatacgcatccctggaatgtgagtcaacaggaaagatggggccccacgccttcaggcctcctgaatgatgccagcccagtatgctctaacctccagcctggttctcctggtgctgctgagcacagccagagca

SEQ ID NO: 372793 - DNA, 414 bp, Homo sapiens
tcgaactcctgagctcaggcagtctgcccacctcagcctcccaaagtgctaggattacaggcttgagccacctcgcctggcctcctgctccattatttttccagtggagagtagatgatggtgataatgctggtagaaatagtgactattaagtgcttactgagttctaggctctaggtgatgcactgtcttttttgtatgtagggaccatccttattcccatcttacagaggcagactcaggcttgtataacagattgcaactcaagcagtccatctgcagagtctttattcttacctagatacttgatacagctgaaattcttcattgtgctcagtccttctttatccacagcatcagtgagcctccttcagctcccatctctcctcggatgaacaagggggagcctcaacc

SEQ ID NO: 372794 - DNA, 466 bp, Homo sapiens
atgtagggaccatccttattcccatcttacagaggcagactcaggcttgtataacagattgcaactcaagcagtccatctgcagagtctttattcttacctagatacttgatacagctgaaattcttcattgtgctcagtccttctttatccacagcatcagtgagcctccttcagctcccatctctcctcggatgaacaagggggagcctcaaccccggagacacttgctggggttctcagagcaagagccagttcagggagttgaacctctccaggggtcctcccagggccctaaggagccccagcccagccccacagaccagcccagtttcaggtgaggagagagagagagggccccctctcgtttgaggatatgagttggtcttctccccgctttcagtgagggggacccaaagctttctcttgccgtcatcgccttctttgttgtgggagtgctgggcagt

SEQ ID NO: 372795 - DNA, 2011 bp, Homo sapiens
  misc_feature (1735)..(1735): n is a, c, g, or t
  misc_feature (1738)..(1739): n is a, c, g, or t
  misc_feature (1750)..(1750): n is a, c, g, or t
  misc_feature (1754)..(1754): n is a, c, g, or t
  misc_feature (1759)..(1759): n is a, c, g, or t
  misc_feature (1778)..(1778): n is a, c, g, or t
  misc_feature (1783)..(1783): n is a, c, g, or t
  misc_feature (1788)..(1789): n is a, c, g, or t
  misc_feature (1800)..(1800): n is a, c, g, or t
  misc_feature (1802)..(1802): n is a, c, g, or t
  misc_feature (1805)..(1805): n is a, c, g, or t
  misc_feature (1808)..(1808): n is a, c, g, or t
  misc_feature (1810)..(1810): n is a, c, g, or t
  misc_feature (1824)..(1824): n is a, c, g, or t
  misc_feature (1828)..(1829): n is a, c, g, or t
  misc_feature (1841)..(1841): n is a, c, g, or t
  misc_feature (1868)..(1869): n is a, c, g, or t
  misc_feature (1872)..(1872): n is a, c, g, or t
  misc_feature (1878)..(1878): n is a, c, g, or t
  misc_feature (1881)..(1881): n is a, c, g, or t
  misc_feature (1884)..(1884): n is a, c, g, or t
  misc_feature (1892)..(1892): n is a, c, g, or t
  misc_feature (1901)..(1901): n is a, c, g, or t
  misc_feature (1944)..(1944): n is a, c, g, or t
  misc_feature (1954)..(1954): n is a, c, g, or t
  misc_feature (1961)..(1961): n is a, c, g, or t
  misc_feature (1967)..(1967): n is a, c, g, or t
  misc_feature (1995)..(1995): n is a, c, g, or t
  misc_feature (1998)..(1998): n is a, c, g, or t
  misc_feature (2005)..(2007): n is a, c, g, or t
taattaattaattaaaaaaaaaggccaggcacagtggctcacgcctgtaatcccagcactttggcaggccaaggcaggcggatcacaaggtcaggagatcgagaccatcctgactaacacagtgaaaccccgtctctactaaaaatacaaaaaaattagccaggcgtggtggcgtgcgtctgtagttccagctgctggggaggctgaggcaggagaatggcgtgaacccgggaggcggagcttgcagtgagccgagatcgcaccactgcactccagcctggtcgacagagcaagactgcatctcaaaaaagaaaaaaaggagaaaaggaggcgggctgcattgaccctgtcagagagcttgcagccattgaggctgcccaatccttgggtgctcttgtgtgggtgtggacacaaggaccccacccagcgcacagccctctgacctctgctcacttgccccagtgtccccagttgtcctcatccagggtgctattcgagtccagcctgaagggccggctccctctctaccacggcctgagaggaagagcatcgttcccgctcctatgcctggaaactcctgcccgcctgaagtggatgcaaagctgctgaagcggcagcagcgaatgatcaagaaccgggagtcagcctgccagtcccggagaaagaagaaagagtatctgcagggactggaggctcggctgcaagcagtactggctgacaaccagcagctccgccgagagaatgctgccctccggcggcggctggaggccctgctggctgaaaacagcgagctcaagttagggtctggaaacaggaaggtggtctgcatcatggtcttccttctcttcattgccttcaactttggacctgtcagcatcagtgagcctccttcagctcccatctctcctcggatgaacaagggggagcctcaaccccggagacacttgctggggttctcagagcaagagccagttcagggagttgaacctctccaggggtcctcccagggccctaaggagccccagcccagccccacagaccagcccagtttcagcaacctgacagccttccctgggggcgccaaggagctactactaagagacctagaccagctcttcctctcctctgattgccggcacttcaaccgcactgagtccctgaggcttgctgacgagttgagtggctgggtccagcgccaccagagaggccggaggaagatccctcagagggcccaggagagacagaagtctcagccacggaagaagtcacccccactgtgtctcctgggagatgacccaacatcctcatttgaaaccgtccagatcaacgttatccccacctctgatgactcctcagatgtccagaccaagatagaacctgtctctccatgttcttccgtcaactctgaggcctccctgctctcagccgactcctccagccaggcttttataggagaggaggtcctggaagtgaagacagagtccctgtcgccttcaggatgcctcctgtgggatgtcccagccccctcacttggagctgtccagatcagcatgggcccatcccttgatggctcctcaggcaaagccctgcccacccggaagccgccactgcagcccaaacctgtagtgctaaccactgtcccaatgccatccagagctgtgcctcccagcaccacagtccttctgcagtccctcgtccagccacccccaggtactgaagaaggagaaaagggccnggnntggtggctcangccngtaancccagcactttgggaggcngaggngggcnnatcacctgagntnagnagntnaagaccagcctggncaanntggtgaaacctngtctctactaaaaataaaaaattagcnnggngtggtngcnggngcctgtantcccagctnctcgggaggctgaggcaggagaatcacttgaacccaggaggcngaggttgcantgagccnagatcntgccactgcactccagcctgggcgacanagngagactnnntctc

SEQ ID NO: 372796 - DNA, 2979 bp, Homo sapiens
  misc_feature (2788)..(2788): n is a, c, g, or t
ggcgggccttgggaaccgtctcctggttggggggtgggggggaaagatggcggagctgatgctgctcagcgagattgctgacccgacgcgtttcttcaccgacaacctgcttagcccggaggactggggtctgcagaacagcaccttgtattctggcctagatgaagtggccgaggagcagacgcagctcttccgttgcccggagcaggatgtcccgtttgacggcagctccctggacgtggggatggatgtcagcccctctgagcccccatgggaactcctgccgatcttcccagatcttcaggtgaagtctgagccatcttccccctgctcttcctcctccctcagctccgagtcatcgcgtctctccacagagccatccagcgaggctcttggggtaggggaggtgctccatgtgaagacagagtccttggcacccccactgtgtctcctgggagatgacccaacatcctcatttgaaaccgtccagatcaacgttatccccacctctgatgattcctcagatgtccagaccaagatagaacctgtctctccatgttcttccgtcaactctgaggcctccctgctctcagccgactcctccagccaggcttttataggagaggaggtcctggaagtgaagacagagtccctgtccccttcaggatgcctcctgtgggatgtcccagccccctcacttggagctgtccagatcagcatgggcccatcccttgatggctcctcaggcaaagccctgcccacccggaagccgccactgcagcccaaacctgtagtgctaaccactgtcccaatgccatccagagctgtgcctcccagcaccacagtccttctgcagtccctcgtccagccacccccagtgtccccagttgtcctcatccagggtgctattcgagtccagcctgaagggccggctccctctctaccacggcctgagaggaagagcatcgttcccgctcctatgcctggaaactcctgcccgcctgaagtggatgcaaagctgctgaagcggcagcagcgaatgatcaagaaccgggagtcagcctgccagtcccggagaaagaagaaagagtatctgcagggactggaggctcggctgcaagcagtactggctgacaaccagcagctccgccgagagaatgctgccctccggcggcggctggaggccctgctggctgaaaacagcgagctcaagttagggtctggaaacaggaaggtggtctgcatcatggtcttccttctcttcattgccttcaactttggacctgtcagcatcagtgagcctccttcagctcccatctctcctcggatgaacaagggggagcctcaaccccggagacacttgctggggttctcagagcaagagccagttcagggagttgaacctctccaggggtcctcccagggccctaaggagccccagcccagccccacagaccagcccagtttcagcaacctgacagccttccctgggggcgccaaggagctactactaagagacctagaccagctcttcctctcctctgattgccggcacttcaaccgcactgagtccctgaggcttgctgacgagttgagtggctgggtccagcgccaccagagaggccggaggaagatccctcagagggcccaggagagacagaagtctcagccacggaagaagtcacctccagttaaggcagtccccatccaaccccctggacccccagaaagggattctgtgggccagctgcaactatatcgccacccagaccgttcgcagccagcattcttggatgcaattgaccgacgggaagacacattttatgttgtctctttccgaagggaccacctgctgctcccagccatcagccacaacaagacctcccggcccaagatgtccctggtgatgcctgccatggcccccaatgagaccctgtcaggccgtggggccccgggggactatgaggagatgatgcagatcgagtgtgaggtcatggacaccagggtgattcacatcaagacctccacagtgcccccctcgctccgaaaacagccatccccaaccccaggcaatgccacaggtggccccttgccagtctctgcagccagccaggcccaccaggcctcccaccagcccctctacctcaatcatccctgacctctgccattcacactgacttagaacggggggagggggtaccaggtggccaggtgggactgtttcaaatttccctgatccccaggcttggggcaattggtaaaggaaagagcaggtgtgggggttaagcacttatttgaggtgggggtgttcacctctcttctcatcccttttcagaatatagggctcctctcattcctgtgaacccccagtcctggcttctttgtttgaggggattgtgtgaggttcagttgtggggtgggtggtgagctgctgcatattttttattttgtttctctagtgttatggcagtggaggtgggaatttagtccccaggtgggacaagggaagttttttcattttggagctagttactgggagtaagggagggtggggtgggggggagttcaggtttatgtgtgtgcatttcttttttattattattaaataaacaacttggagggagttgaaaaaaaagtggctgccttcctggctcgtgatggggagtttgggggaaagtggcttttccagagccagcatcaaagaatcaagcactgaagacatagctggctctgaggtggggtgggtgcgggatcacagaccgcatgtcatccccttgcccccaccccngcaactctggggtatatctgtgtctagcaacgatgtctcatggcgtgacagactagaggatacgcatccctggaatgtgagtcaacaggaaagatggggccccacgccttcaggcctcctgaatgatgccagcccagtatgctctaacctccagcctggttctcctggtgctgctgagcacagccagagca

SEQ ID NO: 372797 - DNA, 2652 bp, Homo sapiens
ggcgggccttgggaaccgtctcctggttggggggtgggggggaaagatggcggagctgatgctgctcagcgagattgctgacccgacgcgtttcttcaccgacaacctgcttagcccggaggactggggtctgcagaacagcaccttgtattctggcctagatgaagtggccgaggagcagacgcagctcttccgttgcccggagcaggatgtcccgtttgacggcagctccctggacgtggggatggatgtcagcccctctgagcccccatgggaactcctgccgatcttcccagatcttcaggtgaagtctgagccatcttccccctgctcttcctcctccctcagctccgagtcatcgcgtctctccacagagccatccagcgaggctcttggggtaggggaggtgctccatgtgaagacagagtccttggcacccccactgtgtctcctgggagatgacccaacatcctcatttgaaaccgtccagatcaacgttatccccacctctgatgattcctcagatgtccagaccaagatagaacctgtctctccatgttcttccgtcaactctgaggcctccctgctctcagccgactcctccagccaggcttttataggagaggaggtcctggaagtgaagacagagtccctgtccccttcaggatgcctcctgtgggatgtcccagccccctcacttggagctgtccagatcagcatgggcccatcccttgatggctcctcaggcaaagccctgcccacccggaagccgccactgcagcccaaacctgtagtgctaaccactgtcccaatgccatccagagctgtgcctcccagcaccacagtccttctgcagtccctcgtccagccacccccagtgtccccagttgtcctcatccagggtgctattcgagtccagcctgaagggccggctccctctctaccacggcctgagaggaagagcatcgttcccgctcctatgcctggaaactcctgcccgcctgaagtggatgcaaagctgctgaagcggcagcagcgaatgatcaagaaccgggagtcagcctgccagtcccggagaaagaagaaagagtatctgcagggactggaggctcggctgcaagcagtactggctgacaaccagcagctccgccgagagaatgctgccctccggcggcggctggaggccctgctggctgaaaacagcgagctcaagttagggtctggaaacaggaaggtggtctgcatcatggtcttccttctcttcattgccttcaactttggacctgtcagcatcagtgagcctccttcagctcccatctctcctcggatgaacaagggggagcctcaaccccggagacacttgctggggttctcagagcaagagccagttcagggagttgaacctctccaggggtcctcccagggccctaaggagccccagcccagccccacagaccagcccagtttcagcaacctgacagccttccctgggggcgccaaggagctactactaagagacctagaccagctcttcctctcctctgattgccggcacttcaaccgcactgagtccctgaggcttgctgacgagttgagtggctgggtccagcgccaccagagaggccggaggaagatccctcagagggcccaggagagacagtccttagatacttctccttccagaagtctcagccacggaagaagtcacctccagttaaggcagtccccatccaaccccctggacccccagaaagggattctgtgggccagctgcaactatatcgccacccagaccgttcgcagccagcattcttggatgcaattgaccgacgggaagacacattttatgttgtctctttccgaagggaccacctgctgctcccagccatcagccacaacaagacctcccggcccaagatgtccctggtgatgcctgccatggcccccaatgagaccctgtcaggccgtggggccccgggggactatgaggagatgatgcagatcgagtgtgaggtcatggacaccagggtgattcacatcaagacctccacagtgcccccctcgctccgaaaacagccatccccaaccccaggcaatgccacaggtggccccttgccagtctctgcagccagccaggcccaccaggcctcccaccagcccctctacctcaatcatccctgacctctgccattcacactgacttagaacggggggagggggtaccaggtggccaggtgggactgtttcaaatttccctgatccccaggcttggggcaattggtaaaggaaagagcaggtgtgggggttaagcacttatttgaggtgggggtgttcacctctcttctcatcccttttcagaatatagggctcctctcattcctgtgaacccccagtcctggcttctttgtttgaggggattgtgtgaggttcagttgtggggtgggtggtgagctgctgcatattttttattttgtttctctagtgttatggcagtggaggtgggaatttagtccccaggtgggacaagggaagttttttcattttggagctagttactgggagtaagggagggtggggtgggggggagttcaggtttatgtgtgtgcatttcttttttattattattaaataaacaacttggagggagttgaa

SEQ ID NO: 372798 - DNA, 1968 bp, Homo sapiens
ggcgggccttgggaaccgtctcctggttggggggtgggggggaaagatggcggagctgatgctgctcagcgagattgctgacccgacgcgtttcttcaccgacaacctgcttagcccggaggactggggtctgcagaacagcaccttgtattctggcctagatgaagtggccgaggagcagacgcagctcttccgttgcccggagcaggatgtcccgtttgacggcagctccctggacgtggggatggatgtcagcccctctgagcccccatgggaactcctgccgatcttcccagatcttcaggtgaagtctgagccatcttccccctgctcttcctcctccctcagctccgagtcatcgcgtctctccacagagccatccagcgaggctcttggggtaggggaggtgctccatgtgaagacagagtccttggcacccccactgtgtctcctgggagatgacccaacatcctcatttgaaaccgtccagatcaacgttatccccacctctgatgattcctcagatgtccagaccaagatagaacctgtctctccatgttcttccgtcaactctgaggcctccctgctctcagccgactcctccagccaggcttttataggagaggaggtcctggaagtgaagacagagtccctgtccccttcaggatgcctcctgtgggatgtcccagccccctcacttggagctgtccagatcagcatgggcccatcccttgatggctcctcaggcaaagccctgcccacccggaagccgccactgcagcccaaacctgtagtgctaaccactgtcccaatgccatccagagctgtgcctcccagcaccacagtccttctgcagtccctcgtccagccacccccagtgtccccagttgtcctcatccagggtgctattcgagtccagcctgaagggccggctccctctctaccacggcctgagaggaagagcatcgttcccgctcctatgcctggaaactcctgcccgcctgaagtggatgcaaagctgctgaagcggcagcagcgaatgatcaagaaccgggagtcagcctgccagtcccggagaaagaagaaagagtatctgcagggactggaggctcggctgcaagcagtactggctgacaaccagcagctccgccgagagaatgctgccctccggcggcggctggaggccctgctggctgaaaacagcgagctcaagttagggtctggaaacaggaaggtggtctgcatcatggtcttccttctcttcattgccttcaactttggacctgtcagcatcagtgagcctccttcagctcccatctctcctcggatgaacaagggggagcctcaaccccggagacacttgctggggttctcagagcaagagccagttcagggagttgaacctctccaggggtcctcccagggccctaaggagccccagcccagccccacagaccagcccagtttcagcaacctgacagccttccctgggggcgccaaggagctactactaagagacctagaccagctcttcctctcctctgattgccggcacttcaaccgcactgagtccctgaggcttgctgacgagttgagtggctgggtccagcgccaccagagaggccggaggaagatccctcagagggcccaggagagacagaagtctcagccacggaagaagtcacctccagttaaggcagtccccatccaaccccctggacccccagaaagggattctgtgggccagctgcaactatatcgccacccagaccgttcgcagccagcattcttggatgcaattgaccgacgggaagacacattttatgttgtctctttccgaaggaccacctgccgcagcgatccaccagtcacgaacaagacctcacggccgcaaatgtccatgtaagccgcatggccccaatgagacctgtcaggccgggcctcgggacaccgaggagagagcgagga

SEQ ID NO: 372799 - DNA, 886 bp, Homo sapiens
ggcgggccttgggaaccgtctcctggttggggggtgggggggaaagatggcggagctgatgctgctcagcgagattgctgacccgacgcgtttcttcaccgacaacctgcttagcccggaggactggggtctgcagaacagcaccttgtattctggcctagatgaagtggccgaggagcagacgcagctcttccgttgcccggagcaggatgtcccgtttgacggcagctccctggacgtggggatggatgtcagcccctctgagcccccatgggaactcctgccgatcttcccagatcttcaggtgaagtctgagccatcttccccctgctcttcctcctccctcagctccgagtcatcgcgtctctccacagagccatccagcgaggctcttggggtaggggaggtgctccatgtgaagacagagtccttggcacccccactgtgtctcctgggagatgacccaacatcctcatttgaaaccgtccagatcaacgttatccccacctctgatgattcctcagatgtccagaccaagatagaacctgtctctccatgttcttccgtcaactctgaggcctccctgctctcagccgactcctccagccaggcttttataggagaggaggtcctggaagtgaagacagagtccctgtccccttcaggatgcctcctgtgggatgtcccagccccctcacttggagctgtccagatcagcatgggcccatcccttgatggctcctcaggcaaagccctgcccacccggaagccgccactgcagcccaaacctgtagtgctaaccactgtcccaatgccatccagagctgcgtctgctgaggacgtaattcctgcgagagctgcgtctgctgaggataagaccctgtaa

SEQ ID NO: 372800 - DNA, 2213 bp, Homo sapiens
taattaattaattaaaaaaaaaggccaggcacagtggctcacgcctgtaatcccagcactttggcaggccaaggcaggcggatcacaaggtcaggagatcgagaccatcctgactaacacagtgaaaccccgtctctactaaaaatacaaaaaaattagccaggcgtggtggcgtgcgtctgtagttccagctgctggggaggctgaggcaggagaatggcgtgaacccgggaggcggagcttgcagtgagccgagatcgcaccactgcactccagcctggtcgacagagcaagactgcatctcaaaaaagaaaaaaaggagaaaaggaggcgggctgcattgaccctgtcagagagcttgcagccattgaggctgcccaatccttgggtgctcttgtgtgggtgtggacacaaggaccccacccagcgcacagccctctgacctctgctcacttgccccagtgtccccagttgtcctcatccagggtgctattcgagtccagcctgaagggccggctccctctctaccacggcctgagaggaagagcatcgttcccgctcctatgcctggaaactcctgcccgcctgaagtggatgcaaagctgctgaagcggcagcagcgaatgatcaagaaccgggagtcagcctgccagtcccggagaaagaagaaagagtatctgcagggactggaggctcggctgcaagcagtactggctgacaaccagcagctccgccgagagaatgctgccctccggcggcggctggaggccctgctggctgaaaacagcgagctcaagttagggtctggaaacaggaaggtggtctgcatcatggtcttccttctcttcattgccttcaactttggacctgtcagcatcagtgagcctccttcagctcccatctctcctcggatgaacaagggggagcctcaaccccggagacacttgctggggttctcagagcaagagccagttcagggagttgaacctctccaggggtcctcccagggccctaaggagccccagcccagccccacagaccagcccagtttcagcaacctgacagccttccctgggggcgccaaggagctactactaagagacctagaccagctcttcctctcctctgattgccggcacttcaaccgcactgagtccctgaggcttgctgacgagttgagtggctgggtccagcgccaccagagaggccggaggaagatccctcagagggcccaggagagacagaagtctcagccacggaagaagtcacctccagttaaggcagtccccatccaaccccctggacccccagaaagggattctgtgggccagctgcaactatatcgccacccagaccgttcgcagccagcattcttggatgcaattgaccgacgggaagacacattttatgttgtctctttccgaagggaccacctgctgctcccagccatcagccacaacaagacctcccggcccaagatgtccctggtgatgcctgccatggcccccaatgagaccctgtcaggccgtggggccccgggggactatgaggagatgatgcagatcgagtgtgaggtcatggacaccagggtgattcacatcaagacctccacagtgcccccctcgctccgaaaacagccatccccaaccccaggcaatgccacaggtggccccttgccagtctctgcagccagccaggcccaccaggcctcccaccagcccctctacctcaatcatccctgacctctgccattcacactgacttagaacggggggagggggtaccaggtggccaggtgggactgtttcaaatttccctgatccccaggcttggggcaattggtaaaggaaagagcaggtgtgggggttaagcacttatttgaggtgggggtgttcacctctcttctcatcccttttcagaatatagggctcctctcattcctgtgaacccccagtcctggcttctttgtttgaggggattgtgtgaggttcagttgtggggtgggtggtgagctgctgcatattttttattttgtttctctagtgttatggcagtggaggtgggaatttagtccccaggtgggacaagggaagttttttcattttggagctagttactgggagtaagggagggtggggtgggggggagttcaggtttatgtgtgtgcatttcttttttattattattaaataaacaacttggagggagttgaa

SEQ ID NO: 372801 - DNA, 1170 bp, Homo sapiens
agatgattgtgattcttccctgcttgtgccttggtgtcgtactaacgttgtagactgtaaaacacgatcgttgctctcgtctgattggcggcagatggatccggggtgagattgcttaggcttgctgacgagttgagtggctgggtccagcgccaccagagaggccggaggaagatccctcagagggcccaggagagacagaagtctcagccacggaagaagtcacctccagttaaggcagtccccatccaaccccctggacccccagaaagggattctgtgggccagctgcaactatatcgccacccagaccgttcgcagccagcattcttggatgcaattgaccgacgggaagacacattttatgttgtctctttccgaagggaccacctgctgctcccagccatcagccacaacaagacctcccggcccaagatgtccctggtgatgcctgccatggcccccaatgagaccctgtcaggccgtggggccccgggggactatgaggagatgatgcagatcgagtgtgaggtcatggacaccagggtgattcacatcaagacctccacagtgcccccctcgctccgaaaacagccatccccaaccccaggcaatgccacaggtggccccttgccagtctctgcagccagccaggcccaccaggcctcccaccagcccctctacctcaatcatccctgacctctgccattcacactgacttagaacggggggagggggtaccaggtggccaggtgggactgtttcaaatttccctgatccccaggcttggggcaattggtaaaggaaagagcaggtgtgggggttaagcacttatttgaggtgggggtgttcacctctcttctcatcccttttcagaatatagggctcctctcattcctgtgaacccccagtcctggcttctttgtttgaggggattgtgtgaggttcagttgtggggtgggtggtgagctgctgcatattttttattttgtttctctagtgttatggcagtggaggtgggaatttagtccccaggtgggacaagggaagttttttcattttggagctagttactgggagtaagggagggtggggtgggggggagttcaggtttatgtgtgtgcatttcttttttattattattaaataaacaacttggagggagttgaa

SEQ ID NO: 372802 - DNA, 473 bp, Homo sapiens
tataaaccattcctcaaagacacaaaagtagaatgcaaaaaataaaaagacattgtttgttttaggttaagatgtctcaataccatcaagatgtcaattctctagcagggcatggtggcacacacctgtactatcatctacttgggtggctgaggcaggaggatcacttgagcccaggagttcaaggctgcagtgagctatgatggcaccactgcactccagcctgggcaacagagggagaccctttctccaaaaaaaagatgtcagttcttcataagttagtataagttcaatgtgatcccaataaaaacagcaatgaggccgggcaccatggctcacgcctgtaatcccagtgctttggaaggccgaggcaggtggatcacttgaggccaggagtttgagaccagcctggccaatatggcgaaaccctgtctctactaaaaataaaaaaataagctgggcatggtggcaca

SEQ ID NO: 372803 - DNA, 843 bp, Homo sapiens
  misc_feature (4)..(4): n is a, c, g, or t
ggcncagagtcgcggccgccagctaggggcgcgggaaggcggggctcggatgcaatcgggacctcctcctggactgggccgggggcggactccgggacccagggcgccgggagccggcgggctacctgcgagtcgagttagcgttgtcgccgaaccgaagcctcgctcgccatgggggaggtggagatctcggccctggcctacgtgaagatgtgcctgcatgctgcccggtacccacacgccgcagtcaacgggctgtttttggcgccagcgccgcggtctggagaatgcctgtgcctcaccgactgtgtgcccctcttccacagccacctggccctgtccgtcatgttggaggtcgccctcaaccaggtggatgtgtggggagcacaggccggtctggtggtggctggttactaccatgccaatgcagctgtgaacgatcagagccctgggcccctggccttgaaaattgctgggcgaattgcagaattcttccctgatgcagtacttattatgttggataatcagaaactggtgcctcagcctcgtgtgcccccggtcatcgtcctggagaaccaaggtctccgctgggtccctaaggataagaacttagtgatgtggagggactgggaagagtcacggcagatggtgggagctctactggaagatcgggcccaccagcaccttgtggactttgactgccaccttgatgacatccggcaggactggaccaaccagcggctcaacactcaaatcacccagtgggttggtcccactaatggaaatggaaatgcctgagccagggccagcggggcccggttccaataaagagacttgggctga

SEQ ID NO: 372804 - DNA, 1050 bp, Homo sapiens
  misc_feature (4)..(4): n is a, c, g, or t
ggcncagagtcgcggccgccagctaggggcgcgggaaggcggggctcggatgcaatcgggacctcctcctggactgggccgggggcggactccgggacccagggcgccgggagccggcgggctacctgcgagtcgagttagcgttgtcgccgaaccgaagcctcgctcgccatgggggaggtggagatctcggccctggcctacgtgaagatgtgcctgcatgctgcccggtacccacacgccgcagtcaacgggctgtttttggcgccagcgccgcggtctggagaatgcctgtgcctcaccgactgtgtgcccctcttccacagccacctggccctgtccgtcatgttggaggtcgccctcaaccaggtggatgtgtggggagcacaggccggtctggtggtggctggttactaccatgccaatgcagctgtgaacgatcagagccctgggcccctggccttgaaaattgctgggcgaattgcagaattcttccctgatgcagtacttattatgttggataatcagaaactggtgcctcagcctcgtgtgcccccggtcatcgtcctggagaaccaaggtctccgctgggtccctaaggataagaacttagtgatgtggagggactgggaagagtcacggcagatggtgggagctctactggaagatcgggcccaccagcaccttgtggactttgactgccaccttgatgacatccggcaggactggaccaaccagcggctcaacactcaaatcacccagtgggttggtcccactaatggaaatggaaatgcctgagccagggccagcggggcccggttccaataaagagacttgggctgaaaaaaaaaaaaaaaaaaaaaaaaaaaaaaaaaaaaaaaaaaaaaaaaaaaaaaaaaaaccaaaaaacaagcggcgcgcgcccctccactaaaaaataccccaccgcggggcgcccccacacgtcacgcccacccccgagctcttacacgacaagagggcggcccccaaaaaggagacctctaataaaacacacagcacaccggcccg

SEQ ID NO: 372805 - DNA, 964 bp, Homo sapiens
  misc_feature (4)..(4): n is a, c, g, or t
ggcncagagtcgcggccgccagctaggggcgcgggaaggcggggctcggatgcaatcgggacctcctcctggactgggccgggggcggactccgggacccagggcgccgggagccggcgggctacctgcgagtcgagttagcgttgtcgccgaaccgaagtgagagggcacggggaagggtcaaagagcgtgccgaagcgctggagggagcttcacggacgcgagctaggcaccggctcgcctaatccggtactaatccggcttgctgcttcccgtccaggcctcgctcgccatgggggaggtggagatctcggccctggcctacgtgaagatgtgcctgcatgctgcccggtacccacacgccgcagtcaacgggctgtttttggcgccagcgccgcggtctggagaatgcctgtgcctcaccgactgtgtgcccctcttccacagccacctggccctgtccgtcatgttggaggtcgccctcaaccaggtggatgtgtggggagcacaggccggtctggtggtggctggttactaccatgccaatgcagctgtgaacgatcagagccctgggcccctggccttgaaaattgctgggcgaattgcagaattcttccctgatgcagtacttattatgttggataatcagaaactggtgcctcagcctcgtgtgcccccggtcatcgtcctggagaaccaaggtctccgctgggtccctaaggataagaacttagtgatgtggagggactgggaagagtcacggcagatggtgggagctctactggaagatcgggcccaccagcaccttgtggactttgactgccaccttgatgacatccggcaggactggaccaaccagcggctcaacactcaaatcacccagtgggttggtcccactaatggaaatggaaatgcctgagccagggccagcggggcccggttccaataaagagacttgggctga

SEQ ID NO: 372806 - DNA, 1139 bp, Homo sapiens
  misc_feature (4)..(4): n is a, c, g, or t
ggcncagagtcgcggccgccagctaggggcgcgggaaggcggggctcggatgcaatcgggacctcctcctggactgggccgggggcggactccgggacccagggcgccgggagccggcgggctacctgcgagtcgagttagcgttgtcgccgaaccgaagtgagagggcacggggaagggtcaaagagcgtgccgaagcgctggagggagcttcacggacgcgagctaggcaccggctcgcctaatccggtactaatccggcttgctgcttcccgtccaggcctcgctcgccatgggggaggtggagatctcggccctggcctacgtgaagatgtgcctgcatgctgcccggtacccacacgccgcagtcaacgggctgtttttggcgccagcgccgcggtctggagaatgcctgtgcctcaccgactgtgtgcccctcttccacagccacctggccctgtccgtcatgttggaggtcgccctcaaccaggtggatgtgtggggagcacaggccggtctggtggtggctggttactaccatgccaatgcagctgtgaacgatcagagcactcaagcatcaagcagtcgtgcatcaagcatccagcaggcccgatccccgcaggccacctacagggaaaggccacagctgcgcccacacctatgagacctgggaggcccagctcaaatggatgggttttgcccacagttggctcctcactcctctgatcttccctctacacagccctgggcccctggccttgaaaattgctgggcgaattgcagaattcttccctgatgcagtacttattatgttggataatcagaaactggtgcctcagcctcgtgtgcccccggtcatcgtcctggagaaccaaggtctccgctgggtccctaaggataagaacttagtgatgtggagggactgggaagagtcacggcagatggtgggagctctactggaagatcgggcccaccagcaccttgtggactttgactgccaccttgatgacatccggcaggactggaccaaccagcggctcaacactcaaatcacccagtgggttggtcccactaatggaaatggaaatgcctgagccagggccagcggggcccggttccaataaagagacttgggctga

SEQ ID NO: 372807 - DNA, 1018 bp, Homo sapiens
  misc_feature (4)..(4): n is a, c, g, or t
ggcncagagtcgcggccgccagctaggggcgcgggaaggcggggctcggatgcaatcgggacctcctcctggactgggccgggggcggactccgggacccagggcgccgggagccggcgggctacctgcgagtcgagttagcgttgtcgccgaaccgaagcctcgctcgccatgggggaggtggagatctcggccctggcctacgtgaagatgtgcctgcatgctgcccggtacccacacgccgcagtcaacgggctgtttttggcgccagcgccgcggtctggagaatgcctgtgcctcaccgactgtgtgcccctcttccacagccacctggccctgtccgtcatgttggaggtcgccctcaaccaggtggatgtgtggggagcacaggccggtctggtggtggctggttactaccatgccaatgcagctgtgaacgatcagagcactcaagcatcaagcagtcgtgcatcaagcatccagcaggcccgatccccgcaggccacctacagggaaaggccacagctgcgcccacacctatgagacctgggaggcccagctcaaatggatgggttttgcccacagttggctcctcactcctctgatcttccctctacacagccctgggcccctggccttgaaaattgctgggcgaattgcagaattcttccctgatgcagtacttattatgttggataatcagaaactggtgcctcagcctcgtgtgcccccggtcatcgtcctggagaaccaaggtctccgctgggtccctaaggataagaacttagtgatgtggagggactgggaagagtcacggcagatggtgggagctctactggaagatcgggcccaccagcaccttgtggactttgactgccaccttgatgacatccggcaggactggaccaaccagcggctcaacactcaaatcacccagtgggttggtcccactaatggaaatggaaatgcctgagccagggccagcggggcccggttccaataaagagacttgggctga

SEQ ID NO: 372808 - DNA, 1302 bp, Homo sapiens
  misc_feature (4)..(4): n is a, c, g, or t
ggcncagagtcgcggccgccagctaggggcgcgggaaggcggggctcggatgcaatcgggacctcctcctggactgggccgggggcggactccgggacccagggcgccgggagccggcgggctacctgcgagtcgagttagcgttgtcgccgaaccgaagtgagagggcacggggaagggtcaaagagcgtgccgaagcgctggagggagcttcacggacgcgagctaggcaccggctcgcctaatccggtactaatccggcttgctgcttcccgtccaggcctcgctcgccatgggggaggtggagatctcggccctggcctacgtgaagatgtgcctgcatgctgcccggtacccacacgccgcagtcaacgggctgtttttggcgccagcgccgcggtctggagaatgcctgtgcctcaccgactgtgtgcccctcttccacagccacctggccctgtccgtcatgttggaggtcgccctcaaccaggtggatgtgtggggagcacaggccggtctggtggtggctggttactaccatgccaatgcagctgtgaacgatcagagcactcaagcatcaagcagtcgtgcatcaagcatccagcaggcccgatccccgcaggccacctacagggaaaggccacagctgcgcccacacctatgagacctgggaggcccagctcaaatggatgggttttgcccacagttggctcctcactcctctgatcttccctctacacagccctgggcccctggccttgaaaattgctgggcgaattgcagaattcttccctgatgcagtacttattatgttggataatcagaaactggtgcctcagcctcgtgtgcccccggtcatcgtcctggagaaccaaggtctccgctgggtccctaaggataagaacttgtgagtaccccactccctctacctcttcttagaagcccaaggctcctgggtctcctctgtccttggccctgccccaagggtctttctctagacccaatctctgttaagtctgtgtctggacccactacttgctgtttgacctccatgggggttactatttcagagtgatgtggagggactgggaagagtcacggcagatggtgggagctctactggaagatcgggcccaccagcaccttgtggactttgactgccaccttgatgacatccggcaggactggaccaaccagcggctcaacactcaaatcacccagtgggttggtcccactaatggaaatggaaatgcctgagccagggccagcggggcccggttccaataaagagacttgggctga

SEQ ID NO: 372809 - DNA, 818 bp, Homo sapiens
  misc_feature (4)..(4): n is a, c, g, or t
ggcncagagtcgcggccgccagctaggggcgcgggaaggcggggctcggatgcaatcgggacctcctcctggactgggccgggggcggactccgggacccagggcgccgggagccggcgggctacctgcgagtcgagttagcgttgtcgccgaaccgaagtgagagggcacggggaagggtcaaagagcgtgccgaagcgctggagggagcttcacggacgcgagctaggcaccggctcgcctaatccggtggatgtgtggggagcacaggccggtctggtggtggctggttactaccatgccaatgcagctgtgaacgatcagagcactcaagcatcaagcagtcgtgcatcaagcatccagcaggcccgatccccgcaggccacctacagggaaaggccacagctgcgcccacacctatgagacctgggaggcccagctcaaatggatgggttttgcccacagttggctcctcactcctctgatcttccctctacacagccctgggcccctggccttgaaaattgctgggcgaattgcagaattcttccctgatgcagtacttattatgttggataatcagaaactggtgcctcagcctcgtgtgcccccggtcatcgtcctggagaaccaaggtctccgctgggtccctaaggataagaacttagtgatgtggagggactgggaagagtcacggcagatggtgggagctctactggaagatcgggcccaccagcaccttgtggactttgactgcctaaatatctacatgccgatatatatatatatctatgtgtgtatatgatatctatatacac

SEQ ID NO: 372810 - DNA, 1045 bp, Homo sapiens
  misc_feature (4)..(4): n is a, c, g, or t
ggcncagagtcgcggccgccagctaggggcgcgggaaggcggggctcggatgcaatcgggacctcctcctggactgggccgggggcggactccgggacccagggcgccgggagccggcgggctacctgcgagtcgagttagcgttgtcgccgaaccgaagcctcgctcgccatgggggaggtggagatctcggccctggcctacgtgaagatgtgcctgcatgctgcccggtacccacacgccgcagtcaacgggctgtttttggcgccagcgccgcggtctggagaatgcctgtgcctcaccgactgtgtgcccctcttccacagccacctggccctgtccgtcatgttggaggtcgccctcaaccaggtggatgtgtggggagcacaggccggtctggtggtggctggttactaccatgccaatgcagctgtgaacgatcagagcaatatctgagcacctgtctcccacagcactcaagcatcaagcagtcgtgcatcaagcatccagcaggcccgatccccgcaggccacctacagggaaaggccacagctgcgcccacacctatgagacctgggaggcccagctcaaatggatgggttttgcccacagttggctcctcactcctctgatcttccctctacacagccctgggcccctggccttgaaaattgctgggcgaattgcagaattcttccctgatgcagtacttattatgttggataatcagaaactggtgcctcagcctcgtgtgcccccggtcatcgtcctggagaaccaaggtctccgctgggtccctaaggataagaacttagtgatgtggagggactgggaagagtcacggcagatggtgggagctctactggaagatcgggcccaccagcaccttgtggactttgactgccaccttgatgacatccggcaggactggaccaaccagcggctcaacactcaaatcacccagtgggttggtcccactaatggaaatggaaatgcctgagccagggccagcggggcccggttccaataaagagacttgggctga

SEQ ID NO: 372811 - DNA, 628 bp, Homo sapiens
  misc_feature (4)..(4): n is a, c, g, or t
ggcncagagtcgcggccgccagctaggggcgcgggaaggcggggctcggatgcaatcgggacctcctcctggactgggccgggggcggactccgggacccagggcgccgggagccggcgggctacctgcgagtcgagttagcgttgtcgccgaaccgaagcctcgctcgccatgggggaggtggagatctcggccctggcctacgtgaagatgtgcctgcatgctgcccggtacccacacgccgcagtcaacgggctgtttttggcgccagcgccgcggtctggagaatgcctgtgcctcaccgactgtgtgcccctcttccacagccacctggccctgtccgtcatgttggaggtcgccctcaaccaggtggatgtgtggggagcacaggccggtctggtggtggctggttactaccatgccaatgcagctgtgaacgatcagagccctgggcccctggccttgaaaattgctgggcgaattgcagaattcttccctgatgcagtacttattatgcaaccagcggctcaacactcaaatcacccagtgggttggtcccactaatggaaatggaaatgcctgagccagggccagcggggcccggttccaataaagagacttgggctga

SEQ ID NO: 372812 - DNA, 2331 bp, Homo sapiens
  misc_feature (186)..(186): n is a, c, g, or t
  misc_feature (542)..(542): n is a, c, g, or t
  misc_feature (544)..(544): n is a, c, g, or t
tcaaggagatgcctgtctgccgccagacagggaacacatgcaaggagctgagagaccctgtgacctcgggactcaacacctcggtggtgttcggcttcctgaacctggtgctctgggtcggcaacctgtggttcgtgtttaaggagacaggctgggccgccccgttcctgcgcgcgcctcccggcnccccgagaaacaaccggcacccggggacgcctacgggatgcaggctacgggcagggccccggcgggtacgggccccaggattcctacgggcctcagggcggctaccagcctgactatggtcaaccagccggcagcggtggcagtggctacgggcctcagggcgactatgggcagcaaggctacggcccgcagtgcacccacctccttctccaatcagatgtagtctggtcagtgaagcccaggaggacctggggggggcaagagctcaggagaaggcctgccccccttcccacccctataccctaggtctccacccctcaagccaggagaccctgtctttgctgtttatatataanancatggacgtggtgaatcagctggtggctgggggtcagttccgggtggtcaaggagcccctcggctttgtgaaggtgctgcaatgggtcttcgccatcttcgcctttgccacatgcggcagctacagtggggagctccagctgagcgtggattgtgccaacaagaccgagagtgacctcagcatcgaggtcgagttcgagtaccccttcaggctgcaccaagtgtactttgatgcacccacctgccgagggggcaccaccaaggtcttcttagttggggactactcctcgtcagccgaattctttgtcaccgtggccgtgtttgccttcctctactccatgggggctctggccacctacatcttcctgcagaacaagtaccgagagaataacaaagggcccatgctggactttctggccacggctgtgttcgccttcatgtggctagttagctcatcggcatgggccaaggggctgtcagatgtgaagatggccacagacccagagaacattatcaaggagatgcctgtctgccgccagacagggaacacatgcaaggagctgagagaccctgtgacctcgggactcaacacctcggtggtgttcggcttcctgaacctggtgctctgggtcggcaacctgtggttcgtgtttaaggagacaggctgggccgccccgttcctgcgcgcgcctcccggcgcccccgagaaacaaccggcacccggggacgcctacggcgatgcaggctacgggcagggccccggcgggtacgggccccaggattcctacgggcctcagggcggctaccagcctgactatggtcaaccagccggcagcggtggcagtggctacgggcctcagggcgactatgggcagcaaggctacggcccgcagggtgcacccacctccttctccaatcagatgtagtctggtgagtgaccggcgagcggtgcggccaaggagggtacaaggaaggagacgagcgggtcagtgaaccaataagagtcaggggtagagagtacgtaaggcgtttactggggcaagtaaggactgaagtttgaaggagccaatcaagaggcagaactacctgctaagagctgaaaaactagctaatgaatggagaaaagaagaatggtgcttcaagatggacagaatgaagagccaatgggagggaggtagaagggcaactcggcggaaaggcagggggagagaagcagagcaaccaataaagggagggaatatcgggggacttgcgcagtggcgaatcagcggagcgcaagagccacggaagcgacgaggaggtgggtcttagaagtgactgataagccaataggtgataaggccaatagatggtgagggtaaatgggcgtggatcttgaaggtcagacgagctcaccaatccgggaggaggggatagatctgccgcctctccccaacgctggaggggagggaagtagtgtggaatttcaaaggaggaagagggatagggtggggttctggaaaggtttgccggccttcttgctgggccttaaaagagaagtgagggtcggggcttggtggctcatgcctgtaatctcagcactttgggagaccgaggcgggcgggccgcttgagcccaagagttcgagaccagcctgggcaacatgatgaaatcccacctctacaaaaaatacaaaaattagccgggcgtggtggcatgcatctgtggacccatctactcaggaggctgaagtgggaggatcacttaagcccaggaggttgaggctgccgtgagctatgatcctgccac

SEQ ID NO: 372813 - DNA, 2253 bp, Homo sapiens
acatccactgggatcactgagcacctgccttgtacctggcactgctctggactctaggactatgtggctgcaccaagtgtactttgatgcacccacctgccgagggggcaccaccaaggtcttcttagttggggactactcctcgtcagccgaattctttgtcaccgtggccgtgtttgccttcctctactccatgggggctctggccacctacatcttcctgcagaacaagtaccgagagaataacaaagggcccatgctggactttctggccacggctgtgttcgccttcatgtggctagttagctcatcggcatgggccaaggggctgtcagatgtgaagatggccacagacccagagaacattatcaaggagatgcctgtctgccgccagacagggaacacatgcaaggagctgagagaccctgtgacctcgggactcaacacctcggtggtgttcggcttcctgaacctggtgctctgggtcggcaacctgtggttcgtgtttaaggagacaggctgggccgccccgttcctgcgcgcgcctcccggcgcccccgagaaacaaccggcacccggggacgcctacggcgatgcaggctacgggcagggccccggcgggtacgggccccaggattcctacgggcctcagggcggctaccagcctgactatggtcaaccagccggcagcggtggcagtggctacgggcctcagggcgactatgggcagcaaggctacggcccgcagggtgcacccacctccttctccaatcagatgtagtctggtcagtgaagcccaggaggacctggggggggcaagagctcaggagaaggcctgccccccttcccacccctataccctaggtctccacccctcaagccaggagaccctgtctttgctgtttatatatatatatattatatataaatatctatttatctgtctgagccctgccctcactccactcccctcatccactaggtgcccagtcttgagtgggccccctctcttaccccgtccctttccctgcatcccttggcccctctctgtttaccctccctgtcccctgaggttaaggggatctaaaaggaggacagggagggaacagacctcggctgtgtggggagggtgggcgtgacttcagactctctcctctctctccctccactcctcccaactctggccttggttcctccagcaatgcctgcctgaacaaaggccgttagggaaatccaactccagggttaaagaaaggcagagattgggggggcttggggtagagaggacagtttaggacccaaggtggtcttggagaggaggtgtggagtggaggggtcagcaggggggttgggttccagacagagtggatctggagtctgaaggagaggagtgcgctagagcattctggggtggggcttggaagggcgctgagggcagggttctagaaggggcgaggctttaagcgaggcagaatggtgggctccagagtaggtgggtcttggattggtaccagagcctatggaaagggtgtggcttggaacatttgggagactgagcttgattctaaaggggacagatcttgagcaaggcaagaagtgggattcaggaatgggccaagccagggttccagacagggtggggcttagaatggggcttccatggtggtttcagaaagggcagcccctccccatggtgcagtgaagaaaatgttttacaatggctgggtttgggcagtggagaggggacttggataggagcttccagatgggttttgttaggggtgggggagaatggctctggctacgacttgggacggaagtggcctgagaagagtcgagtgatatggcttgtagggtgaggcgtgggatccagagagaagcaccccaccacacacacccttccccactcccgtgatgaaacagctaggttaataggaggacagaaccaacgggtctgtgggactggcccacccctcttcccccttcccctgcgccctccctccctccacacctccacccgtcctggggtggttggaggcctggtctggagcccctatcctgcaccctctgctatgtctgtgatgtcagtagtgcctgtgatcgtgtgttgccattttgtctggctgtggcccctccttctcccctccagacccctaccctttcccaaacccttcggtattgttcaaagaacccccctccccaaggaagaacaaatatgattctcctctcccaaataaactccttaaccaccta

SEQ ID NO: 372814 - DNA, 2080 bp, Homo sapiens
cggacatggacgtggtgaatcagctggtggctgggggtcagttccgggtggtcaaggagcccctcggctttgtgaaggtgctgcaatgggactttctggccacggctgtgttcgccttcatgtggctagttagctcatcggcatgggccaaggggctgtcagatgtgaagatggccacagacccagagaacattatcaaggagatgcctgtctgccgccagacagggaacacatgcaaggagctgagagaccctgtgacctcgggactcaacacctcggtggtgttcggcttcctgaacctggtgctctgggtcggcaacctgtggttcgtgtttaaggagacaggctgggccgccccgttcctgcgcgcgcctcccggcgcccccgagaaacaaccggcacccggggacgcctacggcgatgcaggctacgggcagggccccggcgggtacgggccccaggattcctacgggcctcagggcggctaccagcctgactatggtcaaccagccggcagcggtggcagtggctacgggcctcagggcgactatgggcagcaaggctacggcccgcagggtgcacccacctccttctccaatcagatgtagtctggtcagtgaagcccaggaggacctggggggggcaagagctcaggagaaggcctgccccccttcccacccctataccctaggtctccacccctcaagccaggagaccctgtctttgctgtttatatatatatatattatatataaatatctatttatctgtctgagccctgccctcactccactcccctcatccactaggtgcccagtcttgagtgggccccctctcttaccccgtccctttccctgcatcccttggcccctctctgtttaccctccctgtcccctgaggttaaggggatctaaaaggaggacagggagggaacagacctcggctgtgtggggagggtgggcgtgacttcagactctctcctctctctccctccactcctcccaactctggccttggttcctccagcaatgcctgcctgaacaaaggccgttagggaaatccaactccagggttaaagaaaggcagagattgggggggcttggggtagagaggacagtttaggacccaaggtggtcttggagaggaggtgtggagtggaggggtcagcaggggggttgggttccagacagagtggatctggagtctgaaggagaggagtgcgctagagcattctggggtggggcttggaagggcgctgagggcagggttctagaaggggcgaggctttaagcgaggcagaatggtgggctccagagtaggtgggtcttggattggtaccagagcctatggaaagggtgtggcttggaacatttgggagactgagcttgattctaaaggggacagatcttgagcaaggcaagaagtgggattcaggaatgggccaagccagggttccagacagggtggggcttagaatggggcttccatggtggtttcagaaagggcagcccctccccatggtgcagtgaagaaaatgttttacaatggctgggtttgggcagtggagaggggacttggataggagcttccagatgggttttgttaggggtgggggagaatggctctggctacgacttgggacggaagtggcctgagaagagtcgagtgatatggcttgtagggtgaggcgtgggatccagagagaagcaccccaccacacacacccttccccactcccgtgatgaaacagctaggttaataggaggacagaaccaacgggtctgtgggactggcccacccctcttcccccttcccctgcgccctccctccctccacacctccacccgtcctggggtggttggaggcctggtctggagcccctatcctgcaccctctgctatgtctgtgatgtcagtagtgcctgtgatcgtgtgttgccattttgtctggctgtggcccctccttctcccctccagacccctaccctttcccaaacccttcggtattgttcaaagaacccccctccccaaggaagaacaaatatgattctcctctcccaaataaactccttaaccaccta

SEQ ID NO: 372815 - DNA, 2693 bp, Homo sapiens
  misc_feature (186)..(186): n is a, c, g, or t
  misc_feature (542)..(542): n is a, c, g, or t
  misc_feature (544)..(544): n is a, c, g, or t
tcaaggagatgcctgtctgccgccagacagggaacacatgcaaggagctgagagaccctgtgacctcgggactcaacacctcggtggtgttcggcttcctgaacctggtgctctgggtcggcaacctgtggttcgtgtttaaggagacaggctgggccgccccgttcctgcgcgcgcctcccggcnccccgagaaacaaccggcacccggggacgcctacgggatgcaggctacgggcagggccccggcgggtacgggccccaggattcctacgggcctcagggcggctaccagcctgactatggtcaaccagccggcagcggtggcagtggctacgggcctcagggcgactatgggcagcaaggctacggcccgcagtgcacccacctccttctccaatcagatgtagtctggtcagtgaagcccaggaggacctggggggggcaagagctcaggagaaggcctgccccccttcccacccctataccctaggtctccacccctcaagccaggagaccctgtctttgctgtttatatataanancatggacgtggtgaatcagctggtggctgggggtcagttccgggtggtcaaggagcccctcggctttgtgaaggtgctgcaatgggtcttcgccatcttcgcctttgccacatgcggcagctacagtggggagctccagctgagcgtggattgtgccaacaagaccgagagtgacctcagcatcgaggtcgagttcgagtaccccttcaggctgcaccaagtgtactttgatgcacccacctgccgagggggcaccaccaaggtcttcttagttggggactactcctcgtcagccgaattctttgtcaccgtggccgtgtttgccttcctctactccatgggggctctggccacctacatcttcctgcagaacaagtaccgagagaataacaaagggcccatgctggactttctggccacggctgtgttcgccttcatgtggctagttagctcatcggcatgggccaaggggctgtcagatgtgaagatggccacagacccagagaacattatcaaggagatgcctgtctgccgccagacagggaacacatgcaaggagctgagagaccctgtgacctcgggactcaacacctcggtggtgttcggcttcctgaacctggtgctctgggtcggcaacctgtggttcgtgtttaaggagacaggctgggccgccccgttcctgcgcgcgcctcccggcgcccccgagaaacaaccggcacccggggacgcctacggcgatgcaggctacgggcagggccccggcgggtacgggccccaggattcctacgggcctcagggcggctaccagcctgactatggtcaaccagccggcagcggtggcagtggctacgggcctcagggcgactatgggcagcaaggctacggcccgcagggtgcacccacctccttctccaatcagatgtagtctggtcagtgaagcccaggaggacctggggggggcaagagctcaggagaaggcctgccccccttcccacccctataccctaggtctccacccctcaagccaggagaccctgtctttgctgtttatatatatatatattatatataaatatctatttatctgtctgagccctgccctcactccactcccctcatccactaggtgcccagtcttgagtgggccccctctcttaccccgtccctttccctgcatcccttggcccctctctgtttaccctccctgtcccctgaggttaaggggatctaaaaggaggacagggagggaacagacctcggctgtgtggggagggtgggcgtgacttcagactctctcctctctctccctccactcctcccaactctggccttggttcctccagcaatgcctgcctgaacaaaggccgttagggaaatccaactccagggttaaagaaaggcagagattgggggggcttggggtagagaggacagtttaggacccaaggtggtcttggagaggaggtgtggagtggaggggtcagcaggggggttgggttccagacagagtggatctggagtctgaaggagaggagtgcgctagagcattctggggtggggcttggaagggcgctgagggcagggttctagaaggggcgaggctttaagcgaggcagaatggtgggctccagagtaggtgggtcttggattggtaccagagcctatggaaagggtgtggcttggaacatttgggagactgagcttgattctaaaggggacagatcttgagcaaggcaagaagtgggattcaggaatgggccaagccagggttccagacagggtggggcttagaatggggcttccatggtggtttcagaaagggcagcccctccccatggtgcagtgaagaaaatgttttacaatggctgggtttgggcagtggagaggggacttggataggagcacacctccacccgtcctggggtggttggaggcctggtctggagcccctatcctgcaccctctgctatgtctgtgatgtcagtagtgcctgtgatcgtgtgttgccattttgtctggctgtggcccctccttctcccctccagacccctaccctttcccaaacccttcggtattgttcaaagaacccccctccccaaggaagaacaaatatgattctcctctcccaaataaactccttaaccaccta

SEQ ID NO: 372816 - DNA, 441 bp, Homo sapiens
ggagagacaggcctcttctgggggacctgtgatccgaggaggccccagggcctagcgtgaagcagtccactcacagtgctgtcttcctcacccctgcctgccttaggactttctggccacggctgtgttcgccttcatgtggctagttagctcatcggcatgggccaaggggctgtcagatgtgaagatggccacagacccagagaacattatcaaggagatgcctgtctgccgccagacagggaacacatgcaaggagctgagagaccctgtgacctcgggactcaacacctcggtggtaagccctgggtgctggctggaggagggagagtggaaaacagtacagtccggcatggggagtggtggagtgggagaataagaggagagtcaggggagatccaaggggtgtccctgaagaacgcgtgccaacaacaacgttga

SEQ ID NO: 372817 - DNA, 2941 bp, Homo sapiens
  misc_feature (186)..(186): n is a, c, g, or t
  misc_feature (542)..(542): n is a, c, g, or t
  misc_feature (544)..(544): n is a, c, g, or t
tcaaggagatgcctgtctgccgccagacagggaacacatgcaaggagctgagagaccctgtgacctcgggactcaacacctcggtggtgttcggcttcctgaacctggtgctctgggtcggcaacctgtggttcgtgtttaaggagacaggctgggccgccccgttcctgcgcgcgcctcccggcnccccgagaaacaaccggcacccggggacgcctacgggatgcaggctacgggcagggccccggcgggtacgggccccaggattcctacgggcctcagggcggctaccagcctgactatggtcaaccagccggcagcggtggcagtggctacgggcctcagggcgactatgggcagcaaggctacggcccgcagtgcacccacctccttctccaatcagatgtagtctggtcagtgaagcccaggaggacctggggggggcaagagctcaggagaaggcctgccccccttcccacccctataccctaggtctccacccctcaagccaggagaccctgtctttgctgtttatatataanancatggacgtggtgaatcagctggtggctgggggtcagttccgggtggtcaaggagcccctcggctttgtgaaggtgctgcaatgggtcttcgccatcttcgcctttgccacatgcggcagctacagtggggagctccagctgagcgtggattgtgccaacaagaccgagagtgacctcagcatcgaggtcgagttcgagtaccccttcaggctgcaccaagtgtactttgatgcacccacctgccgagggggcaccaccaaggtcttcttagttggggactactcctcgtcagccgaattctttgtcaccgtggccgtgtttgccttcctctactccatgggggctctggccacctacatcttcctgcagaacaagtaccgagagaataacaaagggcccatgctggactttctggccacggctgtgttcgccttcatgtggctagttagctcatcggcatgggccaaggggctgtcagatgtgaagatggccacagacccagagaacattatcaaggagatgcctgtctgccgccagacagggaacacatgcaaggagctgagagaccctgtgacctcgggactcaacacctcggtggtgttcggcttcctgaacctggtgctctgggtcggcaacctgtggttcgtgtttaaggagacaggctgggccgccccgttcctgcgcgcgcctcccggcgcccccgagaaacaaccggcacccggggacgcctacggcgatgcaggctacgggcagggccccggcgggtacgggccccaggattcctacgggcctcagggcggctaccagcctgactatggtcaaccagccggcagcggtggcagtggctacgggcctcagggcgactatgggcagcaaggctacggcccgcagggtgcacccacctccttctccaatcagatgtagtctggtcagtgaagcccaggaggacctggggggggcaagagctcaggagaaggcctgccccccttcccacccctataccctaggtctccacccctcaagccaggagaccctgtctttgctgtttatatatatatatattatatataaatatctatttatctgtctgagccctgccctcactccactcccctcatccactaggtgcccagtcttgagtgggccccctctcttaccccgtccctttccctgcatcccttggcccctctctgtttaccctccctgtcccctgaggttaaggggatctaaaaggaggacagggagggaacagacctcggctgtgtggggagggtgggcgtgacttcagactctctcctctctctccctccactcctcccaactctggccttggttcctccagcaatgcctgcctgaacaaaggccgttagggaaatccaactccagggttaaagaaaggcagagattgggggggcttggggtagagaggacagtttaggacccaaggtggtcttggagaggaggtgtggagtggaggggtcagcaggggggttgggttccagacagagtggatctggagtctgaaggagaggagtgcgctagagcattctggggtggggcttggaagggcgctgagggcagggttctagaaggggcgaggctttaagcgaggcagaatggtgggctccagagtaggtgggtcttggattggtaccagagcctatggaaagggtgtggcttggaacatttgggagactgagcttgattctaaaggggacagatcttgagcaaggcaagaagtgggattcaggaatgggccaagccagggttccagacagggtggggcttagaatggggcttccatggtggtttcagaaagggcagcccctccccatggtgcagtgaagaaaatgttttacaatggctgggtttgggcagtggagaggggacttggataggagcttccagatgggttttgttaggggtgggggagaatggctctggctacgacttgggacggaagtggcctgagaagagtcgagtgatatggcttgtagggtgaggcgtgggatccagagagaagcaccccaccacacacacccttccccactcccgtgatgaaacagctaggttaataggaggacagaaccaacgggtctgtgggactggcccacccctcttcccccttcccctgcgccctccctccctccacacctccacccgtcctggggtggttggaggcctggtctggagcccctatcctgcaccctctgctatgtctgtgatgtcagtagtgcctgtgatcgtgtgttgccattttgtctggctgtggcccctccttctcccctccagacccctaccctttcccaaacccttcggtattgttcaaagaacccccctccccaaggaagaacaaatatgattctcctctcccaaataaactccttaaccaccta

SEQ ID NO: 372818 - DNA, 2242 bp, Homo sapiens
gagggttgagggtgttctgaggggctgggccacacctgcccacctctgtttgcaggctgcaccaagtgtactttgatgcacccacctgccgagggggcaccaccaaggtcttcttagttggggactactcctcgtcagccgaattctttgtcaccgtggccgtgtttgccttcctctactccatgggggctctggccacctacatcttcctgcagaacaagtaccgagagaataacaaagggcccatgctggactttctggccacggctgtgttcgccttcatgtggctagttagctcatcggcatgggccaaggggctgtcagatgtgaagatggccacagacccagagaacattatcaaggagatgcctgtctgccgccagacagggaacacatgcaaggagctgagagaccctgtgacctcgggactcaacacctcggtggtgttcggcttcctgaacctggtgctctgggtcggcaacctgtggttcgtgtttaaggagacaggctgggccgccccgttcctgcgcgcgcctcccggcgcccccgagaaacaaccggcacccggggacgcctacggcgatgcaggctacgggcagggccccggcgggtacgggccccaggattcctacgggcctcagggcggctaccagcctgactatggtcaaccagccggcagcggtggcagtggctacgggcctcagggcgactatgggcagcaaggctacggcccgcagggtgcacccacctccttctccaatcagatgtagtctggtcagtgaagcccaggaggacctggggggggcaagagctcaggagaaggcctgccccccttcccacccctataccctaggtctccacccctcaagccaggagaccctgtctttgctgtttatatatatatatattatatataaatatctatttatctgtctgagccctgccctcactccactcccctcatccactaggtgcccagtcttgagtgggccccctctcttaccccgtccctttccctgcatcccttggcccctctctgtttaccctccctgtcccctgaggttaaggggatctaaaaggaggacagggagggaacagacctcggctgtgtggggagggtgggcgtgacttcagactctctcctctctctccctccactcctcccaactctggccttggttcctccagcaatgcctgcctgaacaaaggccgttagggaaatccaactccagggttaaagaaaggcagagattgggggggcttggggtagagaggacagtttaggacccaaggtggtcttggagaggaggtgtggagtggaggggtcagcaggggggttgggttccagacagagtggatctggagtctgaaggagaggagtgcgctagagcattctggggtggggcttggaagggcgctgagggcagggttctagaaggggcgaggctttaagcgaggcagaatggtgggctccagagtaggtgggtcttggattggtaccagagcctatggaaagggtgtggcttggaacatttgggagactgagcttgattctaaaggggacagatcttgagcaaggcaagaagtgggattcaggaatgggccaagccagggttccagacagggtggggcttagaatggggcttccatggtggtttcagaaagggcagcccctccccatggtgcagtgaagaaaatgttttacaatggctgggtttgggcagtggagaggggacttggataggagcttccagatgggttttgttaggggtgggggagaatggctctggctacgacttgggacggaagtggcctgagaagagtcgagtgatatggcttgtagggtgaggcgtgggatccagagagaagcaccccaccacacacacccttccccactcccgtgatgaaacagctaggttaataggaggacagaaccaacgggtctgtgggactggcccacccctcttcccccttcccctgcgccctccctccctccacacctccacccgtcctggggtggttggaggcctggtctggagcccctatcctgcaccctctgctatgtctgtgatgtcagtagtgcctgtgatcgtgtgttgccattttgtctggctgtggcccctccttctcccctccagacccctaccctttcccaaacccttcggtattgttcaaagaacccccctccccaaggaagaacaaatatgattctcctctcccaaataaactccttaaccaccta

SEQ ID NO: 372819 - DNA, 1940 bp, Homo sapiens
  misc_feature (186)..(186): n is a, c, g, or t
  misc_feature (542)..(542): n is a, c, g, or t
  misc_feature (544)..(544): n is a, c, g, or t
tcaaggagatgcctgtctgccgccagacagggaacacatgcaaggagctgagagaccctgtgacctcgggactcaacacctcggtggtgttcggcttcctgaacctggtgctctgggtcggcaacctgtggttcgtgtttaaggagacaggctgggccgccccgttcctgcgcgcgcctcccggcnccccgagaaacaaccggcacccggggacgcctacgggatgcaggctacgggcagggccccggcgggtacgggccccaggattcctacgggcctcagggcggctaccagcctgactatggtcaaccagccggcagcggtggcagtggctacgggcctcagggcgactatgggcagcaaggctacggcccgcagtgcacccacctccttctccaatcagatgtagtctggtcagtgaagcccaggaggacctggggggggcaagagctcaggagaaggcctgccccccttcccacccctataccctaggtctccacccctcaagccaggagaccctgtctttgctgtttatatataanancatggacgtggtgaatcagctggtggctgggggtcagttccgggtggtcaaggagcccctcggctttgtgaaggtgctgcaatgggtcttcgccatcttcgcctttgccacatgcggcagctacagtggggagctccagctgagcgtggattgtgccaacaagaccgagagtgacctcagcatcgaggtcgagttcgagtaccccttcaggctgcaccaagtgtactttgatgcacccacctgccgagggggcaccaccaaggtcttcttagttggggactactcctcgtcagccgaattctttgtcaccgtggccgtgtttgccttcctctactccatgggggctctggccacctacatcttcctgcagaacaagtaccgagagaataacaaagggcccatgctggactttctggccacggctgtgttcgccttcatgtggctagttagctcatcggcatgggccaaggggctgtcagatgtgaagatggccacagacccagagaacattatcaaggagatgcctgtctgccgccagacagggaacacatgcaaggagctgagagaccctgtgacctcgggactcaacacctcggtggtgttcggcttcctgaacctggtgctctgggtcggcaacctgtggttcgtgtttaaggagacaggctgggccgccccgttcctgcgcgcgcctcccggcgcccccgagaaacaaccggcacccggggacgcctacggcgatgcaggctacgggcagggccccggcgggtacgggccccaggattcctacgggcctcagggcggctaccagcctgactatggtcaaccagccggcagcggtggcagtggctacgggcctcagggcgactatgggcagcaaggctacggcccgcagggtgcacccacctccttctccaatcagatgtagtctggtcagtgaagcccaggaggacctggggggggcaagagctcaggagaaggcctgccccccttcccacccctataccctaggtctccacccctcaagccaggagaccctgtctttgctgtttatatatatatatattatatataaatatctatttatctgtctgagccctgccctcactccactcccctcatccactaggtgcccagtcttgagtgggcccccacacctccacccgtcctggggtggttggaggcctggtctggagcccctatcctgcaccctctgctatgtctgtgatgtcagtagtgcctgtgatcgtgtgttgccattttgtctggctgtggcccctccttctcccctccagacccctaccctttcccaaacccttcggtattgttcaaagaacccccctccccaaggaagaacaaatatgattctcctctcccaaataaactccttaaccaccta

SEQ ID NO: 372820 - DNA, 1081 bp, Homo sapiens
tctttattccctctagcacccgaaaataaagaaaaatgcgcgttatagcgccatatgtgttcgaaaagatttgatatgaaaatactctccccccgcccacccccattggttttaatgctgagaagaagaactagactcttacagaggtgagaatgaagtccacacagcaaaaatgcatctgagaattggagagcagtaaaagactgaagataatgtttgaacagccacatacaccatgcctgaagctaaaaatatatacgggtttttgaattgcagcagccaataaattccatttttgtttggttggttttggctttggcacacctgaattaggttttcttgccttggaacagaattttgacttaaacagtgttgtcattgtagcagttgtttgaagttttcagggataacatacctgatggagaaatgttttgtgtgtatgatatatgggaaagtctttagttatagtcatggcagctcctcaaccccatgattgtgatgagattgggaagcccactgtaacactggagagcccaggttatatcagacaccactagtagatagaagttctaacaacttgagctctgtaacaaaaatctcattgtactacaaaattatgtctgcaccagtgaatccattctcaagaaaagtcttaactaggaaactaaaagctttcactcttaaagctttcattttctgtttattcagttttttatttggaatggatgctactctaggccttaaactgagaaatgccaggctattgtagctattatatcttggtatttgccattttaattcctaggacagcacgcccgctttgcccttgacctggctagggagccaaggaaatgccatggttcttggtcataagacacactgcagagatctctcagtaggaaaacagggctggcccttttctttggtgatgaacacaaactgcaccctttttttctcccacgtgtccttccgctgccagccagtgttggaatctccctacccaattccagacttaattgcttactgcgtctagcacctgggtggcttcaccacctcttccttacttgtcagcagatgaatg

SEQ ID NO: 372821 - DNA, 4478 bp, Homo sapiens
acgcacttccggcctcctaaccgttctcgcgtagcggtgcgcttctggcctgttttgagtccgcgctcaaaggtgccaaagtgcaaggacccacagttgggcggagcttgggttgggagtgagacagcatagcagtccaggctggtcctttgagcgcagctcaaagaaggggacggggagggcgtcactatacaattgtggccgggtgggacctgggctgtttgctcttggaggctgtacagctgcaagctttgccgctcacgaactggagctggagaaagagccccccaaggatgggaggatgacagaagtgtctgcagatggcactgcctgggcaccaggagaggtctctgaggatccccgggtggaaactcctcccgggagtaaaaccacacaaccactgagaagaccgctccggcatcctagagagtacgcgtgtgagcctgggtgcaaggccaaagtagtgacgcacttccgttcacgcaccgctttctgtttttcctgagcctttgcctgctaagagggagaccaggtcatggcagccatgcctctgaaagctcaataccaggagatggtgaccttcgaggatgtggctgtgcacttcaccaagacagaatggactggcctttctcctgcccagagggccctgtacagaagtgtgatgttggagaattttgggaacctgactgctttggggtacccagttcccaaacctgcactgatctcacttttggagagaggggacatggcttggggcctggaagcacaggatgatcccccagcagagaggaccaaaaacgtctgtaaagttattctctagctgaggatgatgatgttgaacaagatagatacagtgtctgttccctgcagccaccagagaagacagacatataaataaactatcaccattaagggtaacagtcaccgtgggccagacccgagctagccgacagggatgcggccacagctggccgggcgtgaccacaccgaggcgcagcgaccttgttcctagagaggcccggccgcctggtgacgcacttccggcagcgccggggagcagtccgctacggaggtgagtgcagggctccgggcgctgtgtgccgtgccctgtcccccaggctctgggtccggttgagacgcactcccaccctgggtgctgcagggtctcccgtggcctacgctgccaggaggcccaggctgggagagggagcagggcggcggcccggggtgctcttccgcgctcctcgactccagctttggtctttgtggctcaatagcttgcgcccattggaaggggaaacgcacgttgctgtcccagccacgaggccctgagcatttagcacttggtcgacgggggaagatgtgtcggtgcagctaaaagatggaatatttgcgggcgtgaagcggcccgaggtgataccacaagtcttttgacatgctgaggtctggcaggaacattaacctatgtgcatcccgagtatggaccgtgtgctcccaggctcctgacatagggtcatgaattagggccgagtgggagcgcagagcccctcccagtcacccggcagcagaagcagcccggcttttggaggacattgtctcctggagcagtgtcagtcccaaaagctccagcccttctctgagacggggaccaggggatggcagccatgcacctgacagcctggccccagggacttcacggatcccctgaagctcatccatggacttccatggactacagggcctgagctatggaattggccctagggcagcaggaacctattgtttcagaagtcggtgacctttgaggacgtggctgtgtacttcacccaggcggaatgggatggcctgtcccctgcacagaggaccctgtacagggatgtgatgctggagaattatgggaatgtggcctccctgggatttccacttctcaaacctgctgtgatctcacaactggagggaggaagtgagctggggggctcatctccactggctgcaggaacaggcctccagggcctccagactgtgatattcagactgacaatgatttgacaaaggaaatgtatgaaggaaaagagaatgtatcatttgaacttcaaagagacttttcccaggaaacagacttttcagaagcctctcttctagagaaacaacaggaagtccactcagcaggaaatataaagaaggagaagagcaacaccattgatggaacagtgaaagatgagacaagccccgtggaggagtgtttttttagtcaaagttcaaactcatatcagtgtcataccatcactggagagcagccctctgggtgtacaggattggggaaatccatcagctttgatacaaaactcgtgaagcatgaaataattaattctgaggaaagacctttcaaatgtgaagaattagtagagccctttaggtgtgactctcaacttattcaacatcaagagaacaacactgaggaaaagccttatcagtgttcggagtgtggcaaagctttcagcattaatgagaaattaatttggcatcagagacttcacagtggggagaaacccttcaaatgtgtggagtgtgggaaaagcttcagctacagttcccattatatcacacatcagacaatccacagtggggagaagccctatcagtgtaagatgtgtgggaaggccttcagtgttaatggaagcctaagtaggcatcagagaatccatacgggagagaagccctatcagtgcaaggaatgtggaaatggcttcagctgtagttctgcatatattacacatcagagagtccacactggagagaaaccttacgagtgtaatgactgtgggaaagcgttcaatgttaatgcaaaattaattcaacatcagagaatccatactggagagaaaccttatgaatgtaatgaatgtggaaaaggcttcaggtgcagctcccagcttaggcagcatcagagcatccacacaggagaaaagccctatcagtgtaaagagtgtggaaaaggcttcaataataatacaaaactcattcagcatcagagaatccacacaggtgagaaaccctatgaatgcactgaatgtggaaaagccttcagtgtcaaagggaagttaatccaacaccagagaattcacacaggcgagaaaccctatgagtgtaatgaatgcgggaaagccttcagatgtaactcccaatttcggcagcatctgagaattcacactggggagaagccctatgagtgtaatgagtgtggaaaggccttcagcgttaatgggaaactaatgcggcatcagagaattcacactggggagaaaccttttgaatgtaatgagtgtgggagatgctttacttctaaaagaaacctacttgatcatcaccgaatccatactggagaaaagccctatcaatgtaaggaatgtgggaaagccttcagtatcaatgccaaactaactaggcatcagaggatacatactggggagaaacctttcaaatgtatggaatgtgagaaagcattcagctgtagttctaactatattgtgcaccagagaatccatacaggagagaaaccctttcagtgtaaggagtgtggaaaagccttccatgttaatgcccatttaattcggcatcagagaagccacactggggagaaacccttcagatgtgtggaatgtggcaaaggcttcagctttagttctgactacattatacatcagacagtccacacttggaagaaaccctatatgtgtagtgtgtgtgggaaagcattcaggtttagcttccagctcagtcagcatcagagtgtccatagtgaaggaaaatcctaataatgagaaagatatagaaaactcttaaggttaatgccaaaatggatcaagtatcatcagattcatccattgaaaaacctccaagagggcatgaatatggcagagtcttcatatggaaacagtttttattctattcagtttaaatcaggaaaggatgaccagttaaagagaaacatccaaaaatagctttgttttgtaccaacaggaattagaaaatataatgaaaagatttcgttcccagcagcatcaagaaaagtagattttctagaaataaacagttatggaggacttgtatggagaaatttaagtcttcactgagggccactttacaaaggaaatttgaataaatggagagagagagaagccttgttgttggataggaaaacccgtactaaagatactctacctacattaatttatttgtttaatttttgacaacaagcatgtattacttttgaaaagatgaaaaataaagatttatttaaaaaaggaaaaaggtatgagtacatttttaattttcatgtaattgagaaaacctttctaagtattagatgaaagctagaaactatccacagggtatgtactgataaattgactactcaaaaactaaatattcctgtatgtttttgttttaaagtttaaaagataaagcgcaaaatgggg

SEQ ID NO: 372822 - DNA, 4138 bp, Homo sapiens
aggatccttaattaaattaatccctttctcccggcacttccgttcacgcaccggtttctgtttttcctgagcctttgcctgctaagagggagaccaggtcatggcagccatgcctctgaaagctcaataccaggactttccctcaagtccctacctgtcccctctgccccacactctggcccggagccagaggattggctctggggcagcaggaacctgttgttttaggagatggtgaccttcgaggatgtggctgtgcacttcaccaagacagaatggactggcctttctcctgcccagagggccctgtacagaagtgtgatgttggagaattttgggaacctgactgctttggggtacccagttcccaaacctgcactgatctcacttttggagagaggggacatggcttggggcctggaagcacaggatgatcccccagcagagaggaccaaaaacgtctgtaaagttattctctagctgaggatgatgatgttgaacaagatagatacagtgtctgttccctgcagccaccagagaagacagacatataaataaactatcaccattaagggtaacagtcaccgtgggccagacccgagctagccgacagggatgcggccacagctggccgggcgtgaccacaccgaggcgcagcgaccttgttcctagagaggcccggccgcctggtgacgcacttccggcagcgccggggagcagtccgctacggaggtgagtgcagggctccgggcgctgtgtgccgtgccctgtcccccaggctctgggtccggttgagacgcactcccaccctgggtgctgcagggtctcccgtggcctacgctgccaggaggcccaggctgggagagggagcagggcggcggcccggggtgctcttccgcgctcctcgactccagctttggtctttgtggctcaatagcttgcgcccattggaaggggaaacgcacgttgctgtcccagccacgaggccctgagcatttagcacttggtcgacgggggaagatgtgtcggtgcagctaaaagatggaatatttgcgggcgtgaagcggcccgaggtgataccacaagtcttttgacatgctgaggtctggcaggaacattaacctatgtgcatcccgagtatggaccgtgtgctcccaggctcctgacatagggtcatgaattagggccgagtgggagcgcagagcccctcccagtcacccggcagcagaagcagcccggcttttggaggacattgtctcctggagcagtgtcagtcccaaaagctccagcccttctctgagacggggaccaggggatggcagccatgcacctgacagcctggccccagggacttcacggatcccctgaagctcatccatggacttccatggactacagggcctgagctatggaattggccctagggcagcaggaacctattgtttcagaagtcggtgacctttgaggacgtggctgtgtacttcacccaggcggaatgggatggcctgtcccctgcacagaggaccctgtacagggatgtgatgctggagaattatgggaatgtggcctccctgggatttccacttctcaaacctgctgtgatctcacaactggagggaggaagtgagctggggggctcatctccactggctgcaggaacaggcctccagggcctccagactgtgatattcagactgacaatgatttgacaaaggaaatgtatgaaggaaaagagaatgtatcatttgaacttcaaagagacttttcccaggaaacagacttttcagaagcctctcttctagagaaacaacaggaagtccactcagcaggaaatataaagaaggagaagagcaacaccattgatggaacagtgaaagatgagacaagccccgtggaggagtgtttttttagtcaaagttcaaactcatatcagtgtcataccatcactggagagcagccctctgggtgtacaggattggggaaatccatcagctttgatacaaaactcgtgaagcatgaaataattaattctgaggaaagacctttcaaatgtgaagaattagtagagccctttaggtgtgactctcaacttattcaacatcaagagaacaacactgaggaaaagccttatcagtgttcggagtgtggcaaagctttcagcattaatgagaaattaatttggcatcagagacttcacagtggggagaaacccttcaaatgtgtggagtgtgggaaaagcttcagctacagttcccattatatcacacatcagacaatccacagtggggagaagccctatcagtgtaagatgtgtgggaaggccttcagtgttaatggaagcctaagtaggcatcagagaatccatacgggagagaagccctatcagtgcaaggaatgtggaaatggcttcagctgtagttctgcatatattacacatcagagagtccacactggagagaaaccttacgagtgtaatgactgtgggaaagcgttcaatgttaatgcaaaattaattcaacatcagagaatccatactggagagaaaccttatgaatgtaatgaatgtggaaaaggcttcaggtgcagctcccagcttaggcagcatcagagcatccacacaggagaaaagccctatcagtgtaaagagtgtggaaaaggcttcaataataatacaaaactcattcagcatcagagaatccacacaggtgagaaaccctatgaatgcactgaatgtggaaaagccttcagtgtcaaagggaagttaatccaacaccagagaattcacacaggcgagaaaccctatgagtgtaatgaatgcgggaaagccttcagatgtaactcccaatttcggcagcatctgagaattcacactggggagaagccctatgagtgtaatgagtgtggaaaggccttcagcgttaatgggaaactaatgcggcatcagagaattcacactggggagaaaccttttgaatgtaatgagtgtgggagatgctttacttctaaaagaaacctacttgatcatcaccgaatccatactggagaaaagccctatcaatgtaaggaatgtgggaaagccttcagtatcaatgccaaactaactaggcatcagaggatacatactggggagaaacctttcaaatgtatggaatgtgagaaagcattcagctgtagttctaactatattgtgcaccagagaatccatacaggagagaaaccctttcagtgtaaggagtgtggaaaagccttccatgttaatgcccatttaattcggcatcagagaagccacactggggagaaacccttcagatgtgtggaatgtggcaaaggcttcagctttagttctgactacattatacatcagacagtccacacttggaagaaaccctatatgtgtagtgtgtgtgggaaagcattcaggtttagcttccagctcagtcagcatcagagtgtccatagtgaaggaaaatcctaataatgagaaagatatagaaaactcttaaggttaatgccaaaatggatcaagtatcatcagattcatccattgaaaaacctccaagagggcatgaatatggcagagtcttcatatggaaacagtttttattctattcagtttaaatcaggaaaggatgaccagttaaagagaaacatccaaaaatagctttgttttgtaccaacaggaattagaaaatataatgaaaagatttcgttcccagcagcatcaagaaaagtagattttctagaaataaacagttatggaggacttgtatggagaaatttaagtcttcactgagggccactttacaaaggaaatttgaataaatggagagagagagaagccttgttgttggataggaaaacccgtactaaagatactctacctacattaatttatttgtttaatttttgacaacaagcatgtattacttttgaaaagatgaaaaataaagatttatttaaaaaaggaaaaaggtatgagtacatttttaattttcatgtaattgagaaaacctttctaagtattagatgaaagctagaaactatccacagggtatgtactgataaattgactactcaaaaactaaatattcctgtatgtttttgttttaaagtttaaaagataaagcgcaaaatgggg

SEQ ID NO: 372823 - DNA, 3999 bp, Homo sapiens
acgcacttccggcctcctaaccgttctcgcgtagcggtgcgcttctggcctgttttgagtccgcgctcaaaggtgccaaagtgcaaggacccacagttgggcggagcttgggttgggagtgagacagcatagcagtccaggctggtcctttgagcgcagctcaaagaaggggacggggagggcgtcactatacaattgtggccgggtgggacctgggctgtttgctcttggaggctgtacagctgcaagctttgccgctcacgaactggagctggagaaagagccccccaaggatgggaggatgacagaagtgtctgcagatggcactgcctgggcaccaggagaggtctctgaggatccccgggtggaaactcctcccgggagtaaaaccacacaaccactgagaagaccgctccggcatcctagagagtacgcgtgtgagcctgggtgcaaggccaaagtagtgacgcacttccgttcacgcaccgctttctgtttttcctgagcctttgcctgctaagagggagaccaggtcatggcagccatgcctctgaaagctcaataccaggagatggtgaccttcgaggatgtggctgtgcacttcaccaagacagaatggactggcctttctcctgcccagagggccctgtacagaagtgtgatgttggagaattttgggaacctgactgctttggggtacccagttcccaaacctgcactgatctcacttttggagagaggggacatggcttggggcctggaagcacaggatgatcccccagcagagaggaccaaaaacgtctgtaaagttattctctagctgaggatgatgatgttgaacaagatagatacagtgtctgttccctgcagccaccagagaagacagacatataaataaactatcaccattaagggtaacagtcaccgtgggccagacccgagctagccgacagggatgcggccacagctggccgggcgtgaccacaccgaggcgcagcgaccttgttcctagagaggcccggccgcctggtgacgcacttccggcagcgccggggagcagtccgctacggagctccagcccttctctgagacggggaccaggggatggcagccatgcacctgacagcctggccccagggacttcacggatcccctgaagctcatccatggacttccatggactacagaagtcggtgacctttgaggacgtggctgtgtacttcacccaggcggaatgggatggcctgtcccctgcacagaggaccctgtacagggatgtgatgctggagaattatgggaatgtggcctccctgggatttccacttctcaaacctgctgtgatctcacaactggagggaggaagtgagctggggggctcatctccactggctgcaggaacaggcctccagggcctccagactgatggagtctcgctctgtcgcccaaactggagtgcagtggcaagaacttggctcaccgcaacttccgtttcccgggttcgagcaattctcctgcctcatcctcccgagtagctggaactacagtgatattcagactgacaatgatttgacaaaggaaatgtatgaaggaaaagagaatgtatcatttgaacttcaaagagacttttcccaggaaacagacttttcagaagcctctcttctagagaaacaacaggaagtccactcagcaggaaatataaagaaggagaagagcaacaccattgatggaacagtgaaagatgagacaagccccgtggaggagtgtttttttagtcaaagttcaaactcatatcagtgtcataccatcactggagagcagccctctgggtgtacaggattggggaaatccatcagctttgatacaaaactcgtgaagcatgaaataattaattctgaggaaagacctttcaaatgtgaagaattagtagagccctttaggtgtgactctcaacttattcaacatcaagagaacaacactgaggaaaagccttatcagtgttcggagtgtggcaaagctttcagcattaatgagaaattaatttggcatcagagacttcacagtggggagaaacccttcaaatgtgtggagtgtgggaaaagcttcagctacagttcccattatatcacacatcagacaatccacagtggggagaagccctatcagtgtaagatgtgtgggaaggccttcagtgttaatggaagcctaagtaggcatcagagaatccatacgggagagaagccctatcagtgcaaggaatgtggaaatggcttcagctgtagttctgcatatattacacatcagagagtccacactggagagaaaccttacgagtgtaatgactgtgggaaagcgttcaatgttaatgcaaaattaattcaacatcagagaatccatactggagagaaaccttatgaatgtaatgaatgtggaaaaggcttcaggtgcagctcccagcttaggcagcatcagagcatccacacaggagaaaagccctatcagtgtaaagagtgtggaaaaggcttcaataataatacaaaactcattcagcatcagagaatccacacaggtgagaaaccctatgaatgcactgaatgtggaaaagccttcagtgtcaaagggaagttaatccaacaccagagaattcacacaggcgagaaaccctatgagtgtaatgaatgcgggaaagccttcagatgtaactcccaatttcggcagcatctgagaattcacactggggagaagccctatgagtgtaatgagtgtggaaaggccttcagcgttaatgggaaactaatgcggcatcagagaattcacactggggagaaaccttttgaatgtaatgagtgtgggagatgctttacttctaaaagaaacctacttgatcatcaccgaatccatactggagaaaagccctatcaatgtaaggaatgtgggaaagccttcagtatcaatgccaaactaactaggcatcagaggatacatactggggagaaacctttcaaatgtatggaatgtgagaaagcattcagctgtagttctaactatattgtgcaccagagaatccatacaggagagaaaccctttcagtgtaaggagtgtggaaaagccttccatgttaatgcccatttaattcggcatcagagaagccacactggggagaaacccttcagatgtgtggaatgtggcaaaggcttcagctttagttctgactacattatacatcagacagtccacacttggaagaaaccctatatgtgtagtgtgtgtgggaaagcattcaggtttagcttccagctcagtcagcatcagagtgtccatagtgaaggaaaatcctaataatgagaaagatatagaaaactcttaaggttaatgccaaaatggatcaagtatcatcagattcatccattgaaaaacctccaagagggcatgaatatggcagagtcttcatatggaaacagtttttattctattcagtttaaatcaggaaaggatgaccagttaaagagaaacatccaaaaatagctttgttttgtaccaacaggaattagaaaatataatgaaaagatttcgttcccagcagcatcaagaaaagtagattttctagaaataaacagttatggaggacttgtatggagaaatttaagtcttcactgagggccactttacaaaggaaatttgaataaatggagagagagagaagccttgttgttggataggaaaacccgtactaaagatactctacctacattaatttatttgtttaatttttgacaacaagcatgtattacttttgaaaagatgaaaaataaagatttatttaaaaaaggaaaaaggtatgagtacatttttaattttcatgtaattgagaaaacctttctaagtattagatgaaagctagaaactatccacagggtatgtactgataaattgactactcaaaaactaaatattcctgtatgtttttgttttaaagtttaaaagataaagcgcaaaatgggg

SEQ ID NO: 372824 - DNA, 2741 bp, Homo sapiens
tccaaggtctctttagtccttcctaagccccacagtactttcccgtagtcctgaggcttgggacctcctggggttcttaccttccctccccattgctgagacagtctgagaagaggcttaggaatttgtctgtgggagtttattcatctgtctctcctatttacctctcccaaaccaggatttccacttctcaaacctgctgtgatctcacaactggagggaggaagtgagctggggggctcatctccactggctgcaggaacaggcctccagggcctccagactgtgatattcagactgacaatgatttgacaaaggaaatgtatgaaggaaaagagaatgtatcatttgaacttcaaagagacttttcccaggaaacagacttttcagaagcctctcttctagagaaacaacaggaagtccactcagcaggaaatataaagaaggagaagagcaacaccattgatggaacagtgaaagatgagacaagccccgtggaggagtgtttttttagtcaaagttcaaactcatatcagtgtcataccatcactggagagcagccctctgggtgtacaggattggggaaatccatcagctttgatacaaaactcgtgaagcatgaaataattaattctgaggaaagacctttcaaatgtgaagaattagtagagccctttaggtgtgactctcaacttattcaacatcaagagaacaacactgaggaaaagccttatcagtgttcggagtgtggcaaagctttcagcattaatgagaaattaatttggcatcagagacttcacagtggggagaaacccttcaaatgtgtggagtgtgggaaaagcttcagctacagttcccattatatcacacatcagacaatccacagtggggagaagccctatcagtgtaagatgtgtgggaaggccttcagtgttaatggaagcctaagtaggcatcagagaatccatacgggagagaagccctatcagtgcaaggaatgtggaaatggcttcagctgtagttctgcatatattacacatcagagagtccacactggagagaaaccttacgagtgtaatgactgtgggaaagcgttcaatgttaatgcaaaattaattcaacatcagagaatccatactggagagaaaccttatgaatgtaatgaatgtggaaaaggcttcaggtgcagctcccagcttaggcagcatcagagcatccacacaggagaaaagccctatcagtgtaaagagtgtggaaaaggcttcaataataatacaaaactcattcagcatcagagaatccacacaggtgagaaaccctatgaatgcactgaatgtggaaaagccttcagtgtcaaagggaagttaatccaacaccagagaattcacacaggcgagaaaccctatgagtgtaatgaatgcgggaaagccttcagatgtaactcccaatttcggcagcatctgagaattcacactggggagaagccctatgagtgtaatgagtgtggaaaggccttcagcgttaatgggaaactaatgcggcatcagagaattcacactggggagaaaccttttgaatgtaatgagtgtgggagatgctttacttctaaaagaaacctacttgatcatcaccgaatccatactggagaaaagccctatcaatgtaaggaatgtgggaaagccttcagtatcaatgccaaactaactaggcatcagaggatacatactggggagaaacctttcaaatgtatggaatgtgagaaagcattcagctgtagttctaactatattgtgcaccagagaatccatacaggagagaaaccctttcagtgtaaggagtgtggaaaagccttccatgttaatgcccatttaattcggcatcagagaagccacactggggagaaacccttcagatgtgtggaatgtggcaaaggcttcagctttagttctgactacattatacatcagacagtccacacttggaagaaaccctatatgtgtagtgtgtgtgggaaagcattcaggtttagcttccagctcagtcagcatcagagtgtccatagtgaaggaaaatcctaataatgagaaagatatagaaaactcttaaggttaatgccaaaatggatcaagtatcatcagattcatccattgaaaaacctccaagagggcatgaatatggcagagtcttcatatggaaacagtttttattctattcagtttaaatcaggaaaggatgaccagttaaagagaaacatccaaaaatagctttgttttgtaccaacaggaattagaaaatataatgaaaagatttcgttcccagcagcatcaagaaaagtagattttctagaaataaacagttatggaggacttgtatggagaaatttaagtcttcactgagggccactttacaaaggaaatttgaataaatggagagagagagaagccttgttgttggataggaaaacccgtactaaagatactctacctacattaatttatttgtttaatttttgacaacaagcatgtattacttttgaaaagatgaaaaataaagatttatttaaaaaaggaaaaaggtatgagtacatttttaattttcatgtaattgagaaaacctttctaagtattagatgaaagctagaaactatccacagggtatgtactgataaattgactactcaaaaactaaatattcctgtatgtttttgttttaaagtttaaaagataaagcgcaaaatgggg

SEQ ID NO: 372825 - DNA, 3095 bp, Homo sapiens
acgcacttccggcctcctaaccgttctcgcgtagcggtgcgcttctggcctgttttgagtccgcgctcaaaggtgccaaagtgcaaggacccacagttgggcggagcttgggttgggagtgagacagcatagcagtccaggctggtcctttgagcgcagctcaaagaaggggacggggagggcgtcactatacaattgtggccgggtgggacctgggctgtttgctcttggaggctgtacagctgcaagctttgccgctcacgaactggagctggagaaagagccccccaaggatgggaggatgacagaagtgtctgcagatggcactgcctgggcaccaggagaggtctctgaggatccccgggtggaaactcctcccgggagtaaaaccacacaaccactgagaagaccgctccggcatcctagagagtacgcgtgtgagcctgggtgcaaggccaaagtagtgacgcacttccgttcacgcaccgctttctgtttttcctgagcctttgcctgctaagagggagaccaggtcatggcagccatgcctctgaaagctcaataccaggagatggtgaccttcgaggatgtggctgtgcacttcaccaagacagaatggactggcctttctcctgcccagagggccctgtacagaagtgtgatgttggagaattttgggaacctgactgctttggggtacccagttcccaaacctgcactgatctcacttttggagagaggggacatggcttggggcctggaagcacaggatgatcccccagcagagaggaccaaaaacgtctgtaaagatgttgagaccaacattgacagtgagtccacattaatccagggaatttctgaagaaagagatgggatgatgtcacatggtcagctgaagagtgtccctcagagaactgacttcccagaaacacgtaatgtggaaaagcaccaggacatccccacagtgaaaaatatccaaggaaaggttccaagaatcccctgtgcaaggaaacctttcatatgtgaggagtgtgggaaatccttcagctacttttcttactatgctagacaccagagaatccacactggggagaaaccttttgagtgtagtgagtgtggaaaagcctttaatggtaattcttcgttaattcggcaccagaggattcacactggagagagaccctatcagtgtgaggagtgtgggcgagcctttaatgataatgcaaatctgatcaggcatcagagaatccacagtgggggacagaccctattactgtacagagtgtgggaatagtttcaccagtagttccgagtttgttatacatcagagaatccacactggggagaaaccgtatgagtgtaatgagtgtggcaaagcttttgttggtaattcacccctacttcggcatcagaaaatccacactggagagaaaccctatgagtgtaatgagtgtggcaaaagctttggaaggacttcccatctaagccaacatcagcgtattcacacaggggaaaagccttattcttgtaaagtatgtggacaagccttcaattttcatacaaaactaactcggcaccagagaattcacagtgaggagaaaccctttgactgtgtagattgtggaaaagccttcagtgctcaggaacaattaaaaaggcatctgagaattcatactcaggagtcttcctatgtatgtgatgagtgtggaaaagccttgactagcaaaagaaatcttcatcagcatcaaagaatccatactggagagaaaccctatgagtgtagcaagtatgagaaggcctttgggacttcttcccagctaggtcaccttgagcatgtctactctggagagaagcctgtgctggacatttgtcgttttggcctcccagaattttttacccccttttactggtaatagtacactccagtgaaatgtactgagtggattccgtcttctactcaggaatggaatgtgtgacacaggcctgactcagcctctgatccatccctcaagccacagttaatgattcagatgtcagtagatgaccaaagatggttcaattagagtcccaggattgcaagagctaataggaacaaatactctccccccgcccacccccattggttttaatgctgagaagaagaactagactcttacagaggtgagaatgaagtccacacagcaaaaatgcatctgagaattggagagcagtaaaagactgaagataatgtttgaacagccacatacaccatgcctgaagctaaaaatatatacgggtttttgaattgcagcagccaataaattccatttttgtttggttggttttggctttggcacacctgaattaggttttcttgccttggaacagaattttgacttaaacagtgttgtcattgtagcagttgtttgaagttttcagggataacatacctgatggagaaatgttttgtgtgtatgatatatgggaaagtctttagttatagtcatggcagctcctcaaccccatgattgtgatgagattgggaagcccactgtaacactggagagcccaggttatatcagacaccactagtagatagaagttctaacaacttgagctctgtaacaaaaatctcattgtactacaaaattatgtctgcaccagtgaatccattctcaagaaaagtcttaactaggaaactaaaagctttcactcttaaagctttcattttctgtttattcagttttttatttggaatggatgctactctaggccttaaactgagaaatgccaggctattgtagctattatatcttggtatttgccattttaattcctaggacagcacgcccgctttgcccttgacctggctagggagccaaggaaatgccatggttcttggtcataagacacactgcagagatctctcagtaggaaaacagggctggcccttttctttggtgatgaacacaaactgcaccctttttttctcccacgtgtccttccgctgccagccagtgttggaatctccctacccaattccagacttaattgcttactgcgtctagcacctgggtggcttcaccacctcttccttacttgtcagcagatgaatg

SEQ ID NO: 372826 - DNA, 2821 bp, Homo sapiens
acgcacttccggcctcctaaccgttctcgcgtagcggtgcgcttctggcctgttttgagtccgcgctcaaaggtctctgaggatccccgggtggaaactcctcccgggagtaaaaccacacaaccactgagaagaccgctccggcatcctagagagtacgcgtgtgagcctgggtgcaaggccaaagtagtgacgcacttccgttcacgcaccgctttctgtttttcctgagcctttgcctgctaagagggagaccaggtcatggcagccatgcctctgaaagctcaataccaggagatggtgaccttcgaggatgtggctgtgcacttcaccaagacagaatggactggcctttctcctgcccagagggccctgtacagaagtgtgatgttggagaattttgggaacctgactgctttggggtacccagttcccaaacctgcactgatctcacttttggagagaggggacatggcttggggcctggaagcacaggatgatcccccagcagagaggaccaaaaacgtctgtaaagatgttgagaccaacattgacagtgagtccacattaatccagggaatttctgaagaaagagatgggatgatgtcacatggtcagctgaagagtgtccctcagagaactgacttcccagaaacacgtaatgtggaaaagcaccaggacatccccacagtgaaaaatatccaaggaaaggttccaagaatcccctgtgcaaggaaacctttcatatgtgaggagtgtgggaaatccttcagctacttttcttactatgctagacaccagagaatccacactggggagaaaccttttgagtgtagtgagtgtggaaaagcctttaatggtaattcttcgttaattcggcaccagaggattcacactggagagagaccctatcagtgtgaggagtgtgggcgagcctttaatgataatgcaaatctgatcaggcatcagagaatccacagtgggggacagaccctattactgtacagagtgtgggaatagtttcaccagtagttccgagtttgttatacatcagagaatccacactggggagaaaccgtatgagtgtaatgagtgtggcaaagcttttgttggtaattcacccctacttcggcatcagaaaatccacactggagagaaaccctatgagtgtaatgagtgtggcaaaagctttggaaggacttcccatctaagccaacatcagcgtattcacacaggggaaaagccttattcttgtaaagtatgtggacaagccttcaattttcatacaaaactaactcggcaccagagaattcacagtgaggagaaaccctttgactgtgtagattgtggaaaagccttcagtgctcaggaacaattaaaaaggcatctgagaattcatactcaggagtcttcctatgtatgtgatgagtgtggaaaagccttgactagcaaaagaaatcttcatcagcatcaaagaatccatactggagagaaaccctatgagtgtagcaagtatgagaaggcctttgggacttcttcccagctaggtcaccttgagcatgtctactctggagagaagcctgtgctggacatttgtcgttttggcctcccagaattttttacccccttttactggtaatagtacactccagtgaaatgtactgagtggattccgtcttctactcaggaatggaatgtgtgacacaggcctgactcagcctctgatccatccctcaagccacagttaatgattcagatgtcagtagatgaccaaagatggttcaattagagtcccaggattgcaagagctaataggaacaaatactctccccccgcccacccccattggttttaatgctgagaagaagaactagactcttacagaggtgagaatgaagtccacacagcaaaaatgcatctgagaattggagagcagtaaaagactgaagataatgtttgaacagccacatacaccatgcctgaagctaaaaatatatacgggtttttgaattgcagcagccaataaattccatttttgtttggttggttttggctttggcacacctgaattaggttttcttgccttggaacagaattttgacttaaacagtgttgtcattgtagcagttgtttgaagttttcagggataacatacctgatggagaaatgttttgtgtgtatgatatatgggaaagtctttagttatagtcatggcagctcctcaaccccatgattgtgatgagattgggaagcccactgtaacactggagagcccaggttatatcagacaccactagtagatagaagttctaacaacttgagctctgtaacaaaaatctcattgtactacaaaattatgtctgcaccagtgaatccattctcaagaaaagtcttaactaggaaactaaaagctttcactcttaaagctttcattttctgtttattcagttttttatttggaatggatgctactctaggccttaaactgagaaatgccaggctattgtagctattatatcttggtatttgccattttaattcctaggacagcacgcccgctttgcccttgacctggctagggagccaaggaaatgccatggttcttggtcataagacacactgcagagatctctcagtaggaaaacagggctggcccttttctttggtgatgaacacaaactgcaccctttttttctcccacgtgtccttccgctgccagccagtgttggaatctccctacccaattccagacttaattgcttactgcgtctagcacctgggtggcttcaccacctcttccttacttgtcagcagatgaatg

SEQ ID NO: 372827 - DNA, 718 bp, Homo sapiens
agatggtgaccttcgaggatgtggctgtgcacttcaccaagacagaatggactggcctttctcctgcccagagggccctgtacagaagtgtgatgttggagaattttgggaacctgactgctttgggtaaggccattttcctcctaggactcagatctgtacttttccagtttccttccttcttttacagcctggggggaggagtgtggagtggagaggagaggttgtctcttgtgtcctccactgagtgactgcagagctgaggctcagtgaccaacttcaaagattgctgggtagggagaggtcttgggtcactttggtctcccaatgaagggaattactgtcccctggtaagagtatgttccatcttccaagaggctctgcacagtaaggaataagtagtagttgttgtctggggaagggcatgtccccttccctgtgtttgctcatgccttgtggatctcactgacttacttatccttgagtgttttttttaggaagaagtcacaaatgctcagtttcctgttgatcggaatctctttggccttctccagtcgagaaccctcttctgtgggtcttattcttactgagactcctggggttttccttcttttgacacagcagatacagggctgaaaagtaccattttcttcctgttttcagggtacccagttcccaaacctgcactgatctcacttttggagagaggggacatggc

SEQ ID NO: 372828 - DNA, 677 bp, Homo sapiens
gtgcagggctccgggcgctgtgtgccgtgccctgtcccccaggctctgggtccggttgagacgcactcccaccctgggtgctgcagggtctcccgtggcctacgctgccaggaggcccaggctgggagagggagcagggcggcggcccggggtgctcttccgcgctcctcgactccagctttggtctttgtggctcaatagcttgcgcccattggaaggggaaacgcacgttgctgtcccagccacgaggccctgagcatttagcacttggtcgacgggggaagatgtgtcggtgcagctaaaagatggaatatttgcgggcgtgaagcggcccgaggtgataccacaagtcttttgacatgctgaggtctggcaggaacattaacctatgtgcatcccgagtatggaccgtgtgctcccaggctcctgacatagggtcatgaattagggccgagtgggagcgcagagcccctcccagtcacccggcagcagaagcagcccggcttttggaggacattgtctcctggagcagtgtcagtcccaaaaggtaactcagccctgcttctctcggctcagggttgacagtgacctgggaatgacttctacaacgtaattacgaattcactcagttttagaatatatttagtagtctcagaatcgctaattcatacccccat

SEQ ID NO: 372829 - DNA, 3609 bp, Homo sapiens
aggatccttaattaaattaatccctttctcccggcacttccgttcacgcaccggtttctgtttttcctgagcctttgcctgctaagagggagaccaggtcatggcagccatgcctctgaaagctcaataccaggactttccctcaagtccctacctgtcccctctgccccacactctggcccggagccagaggattggctctggggcagcaggaacctgttgttttaggagatggtgaccttcgaggatgtggctgtgcacttcaccaagacagaatggactggcctttctcctgcccagagggccctgtacagaagtgtgatgttggagaattttgggaacctgactgctttggggtacccagttcccaaacctgcactgatctcacttttggagagaggggacatggcttggggcctggaagcacaggatgatcccccagcagagaggaccaaaaacgtctgtaaagttattctctagctgaggatgatgatgttgaacaagatagatacagtgtctgttccctgcagccaccagagaagacagacatataaataaactatcaccattaagggtaacagtcaccgtgggccagacccgagctagccgacagggatgcggccacagctggccgggcgtgaccacaccgaggcgcagcgaccttgttcctagagaggcccggccgcctggtgacgcacttccggcagcgccggggagcagtccgctacggagctccagcccttctctgagacggggaccaggggatggcagccatgcacctgacagcctggccccagaagtcggtgacctttgaggacgtggctgtgtacttcacccaggcggaatgggatggcctgtcccctgcacagaggaccctgtacagggatgtgatgctggagaattatgggaatgtggcctccctgggatttccacttctcaaacctgctgtgatctcacaactggagggaggaagtgagctggggggctcatctccactggctgcaggaacaggcctccagggcctccagactgatggagtctcgctctgtcgcccaaactggagtgcagtggcaagaacttggctcaccgcaacttccgtttcccgggttcgagcaattctcctgcctcatcctcccgagtagctggaactacagtgatattcagactgacaatgatttgacaaaggaaatgtatgaaggaaaagagaatgtatcatttgaacttcaaagagacttttcccaggaaacagacttttcagaagcctctcttctagagaaacaacaggaagtccactcagcaggaaatataaagaaggagaagagcaacaccattgatggaacagtgaaagatgagacaagccccgtggaggagtgtttttttagtcaaagttcaaactcatatcagtgtcataccatcactggagagcagccctctgggtgtacaggattggggaaatccatcagctttgatacaaaactcgtgaagcatgaaataattaattctgaggaaagacctttcaaatgtgaagaattagtagagccctttaggtgtgactctcaacttattcaacatcaagagaacaacactgaggaaaagccttatcagtgttcggagtgtggcaaagctttcagcattaatgagaaattaatttggcatcagagacttcacagtggggagaaacccttcaaatgtgtggagtgtgggaaaagcttcagctacagttcccattatatcacacatcagacaatccacagtggggagaagccctatcagtgtaagatgtgtgggaaggccttcagtgttaatggaagcctaagtaggcatcagagaatccatacgggagagaagccctatcagtgcaaggaatgtggaaatggcttcagctgtagttctgcatatattacacatcagagagtccacactggagagaaaccttacgagtgtaatgactgtgggaaagcgttcaatgttaatgcaaaattaattcaacatcagagaatccatactggagagaaaccttatgaatgtaatgaatgtggaaaaggcttcaggtgcagctcccagcttaggcagcatcagagcatccacacaggagaaaagccctatcagtgtaaagagtgtggaaaaggcttcaataataatacaaaactcattcagcatcagagaatccacacaggtgagaaaccctatgaatgcactgaatgtggaaaagccttcagtgtcaaagggaagttaatccaacaccagagaattcacacaggcgagaaaccctatgagtgtaatgaatgcgggaaagccttcagatgtaactcccaatttcggcagcatctgagaattcacactggggagaagccctatgagtgtaatgagtgtggaaaggccttcagcgttaatgggaaactaatgcggcatcagagaattcacactggggagaaaccttttgaatgtaatgagtgtgggagatgctttacttctaaaagaaacctacttgatcatcaccgaatccatactggagaaaagccctatcaatgtaaggaatgtgggaaagccttcagtatcaatgccaaactaactaggcatcagaggatacatactggggagaaacctttcaaatgtatggaatgtgagaaagcattcagctgtagttctaactatattgtgcaccagagaatccatacaggagagaaaccctttcagtgtaaggagtgtggaaaagccttccatgttaatgcccatttaattcggcatcagagaagccacactggggagaaacccttcagatgtgtggaatgtggcaaaggcttcagctttagttctgactacattatacatcagacagtccacacttggaagaaaccctatatgtgtagtgtgtgtgggaaagcattcaggtttagcttccagctcagtcagcatcagagtgtccatagtgaaggaaaatcctaataatgagaaagatatagaaaactcttaaggttaatgccaaaatggatcaagtatcatcagattcatccattgaaaaacctccaagagggcatgaatatggcagagtcttcatatggaaacagtttttattctattcagtttaaatcaggaaaggatgaccagttaaagagaaacatccaaaaatagctttgttttgtaccaacaggaattagaaaatataatgaaaagatttcgttcccagcagcatcaagaaaagtagattttctagaaataaacagttatggaggacttgtatggagaaatttaagtcttcactgagggccactttacaaaggaaatttgaataaatggagagagagagaagccttgttgttggataggaaaacccgtactaaagatactctacctacattaatttatttgtttaatttttgacaacaagcatgtattacttttgaaaagatgaaaaataaagatttatttaaaaaaggaaaaaggtatgagtacatttttaattttcatgtaattgagaaaacctttctaagtattagatgaaagctagaaactatccacagggtatgtactgataaattgactactcaaaaactaaatattcctgtatgtttttgttttaaagtttaaaagataaagcgcaaaatgggg

SEQ ID NO: 372830 - DNA, 3525 bp, Homo sapiens
aggatccttaattaaattaatccctttctcccggcacttccgttcacgcaccggtttctgtttttcctgagcctttgcctgctaagagggagaccaggtcatggcagccatgcctctgaaagctcaataccaggactttccctcaagtccctacctgtcccctctgccccacactctggcccggagccagaggattggctctggggcagcaggaacctgttgttttaggagatggtgaccttcgaggatgtggctgtgcacttcaccaagacagaatggactggcctttctcctgcccagagggccctgtacagaagtgtgatgttggagaattttgggaacctgactgctttggggtacccagttcccaaacctgcactgatctcacttttggagagaggggacatggcttggggcctggaagcacaggatgatcccccagcagagaggaccaaaaacgtctgtaaagttattctctagctgaggatgatgatgttgaacaagatagatacagtgtctgttccctgcagccaccagagaagacagacatataaataaactatcaccattaagggtaacagtcaccgtgggccagacccgagctagccgacagggatgcggccacagctggccgggcgtgaccacaccgaggcgcagcgaccttgttcctagagaggcccggccgcctggtgacgcacttccggcagcgccggggagcagtccgctacggagctccagcccttctctgagacggggaccaggggatggcagccatgcacctgacagcctggccccagaagtcggtgacctttgaggacgtggctgtgtacttcacccaggcggaatgggatggcctgtcccctgcacagaggaccctgtacagggatgtgatgctggagaattatgggaatgtggcctccctgggatttccacttctcaaacctgctgtgatctcacaactggagggaggaagtgagctggggggctcatctccactggctgcaggaacaggcctccagggcctccagactgatggagtctcgctctgtcgcccaaactggagtgcagtggcaagaacttggctcaccgcaacttccgtttcccgggttcgagcaattctcctgcctcatcctcccgagtagctggaactacagtgatattcagactgacaatgatttgacaaaggaaatgtatgaaggaaaagagaatgtatcatttgaacttcaaagagacttttcccaggaaacagacttttcagaagcctctcttctagagaaacaacaggaagtccactcagcaggaaatataaagaaggagaagagcaacaccattgatggaacagtgaaagatgagacaagccccgtggaggagtgtttttttagtcaaagttcaaactcatatcagtgtcataccatcactggagagcagccctctgggtgtacaggattggggaaatccatcagctttgatacaaaactcgtgaagcatgaaataattaattctgaggaaagacctttcaaatgtgaagaattagtagagccctttaggtgtgactctcaacttattcaacatcaagagaacaacactgaggaaaagccttatcagtgttcggagtgtggcaaagctttcagcattaatgagaaattaatttggcatcagagacttcacagtggggagaaacccttcaaatgtgtggagtgtgggaaaagcttcagctacagttcccattatatcacacatcagacaatccacagtggggagaagccctatcagtgtaagatgtgtgggaaggccttcagtgttaatggaagcctaagtaggcatcagagaatccatacgggagagaagccctatcagtgcaaggaatgtggaaatggcttcagctgtagttctgcatatattacacatcagagagtccacactggagagaaaccttacgagtgtaatgactgtgggaaagcgttcaatgttaatgcaaaattaattcaacatcagagaatccatactggagagaaaccttatgaatgtaatgaatgtggaaaaggcttcaggtgcagctcccagcttaggcagcatcagagcatccacacaggagaaaagccctatcagtgtaaagagtgtggaaaaggcttcaataataatacaaaactcattcagcatcagagaatccacacaggcgagaaaccctatgagtgtaatgaatgcgggaaagccttcagatgtaactcccaatttcggcagcatctgagaattcacactggggagaagccctatgagtgtaatgagtgtggaaaggccttcagcgttaatgggaaactaatgcggcatcagagaattcacactggggagaaaccttttgaatgtaatgagtgtgggagatgctttacttctaaaagaaacctacttgatcatcaccgaatccatactggagaaaagccctatcaatgtaaggaatgtgggaaagccttcagtatcaatgccaaactaactaggcatcagaggatacatactggggagaaacctttcaaatgtatggaatgtgagaaagcattcagctgtagttctaactatattgtgcaccagagaatccatacaggagagaaaccctttcagtgtaaggagtgtggaaaagccttccatgttaatgcccatttaattcggcatcagagaagccacactggggagaaacccttcagatgtgtggaatgtggcaaaggcttcagctttagttctgactacattatacatcagacagtccacacttggaagaaaccctatatgtgtagtgtgtgtgggaaagcattcaggtttagcttccagctcagtcagcatcagagtgtccatagtgaaggaaaatcctaataatgagaaagatatagaaaactcttaaggttaatgccaaaatggatcaagtatcatcagattcatccattgaaaaacctccaagagggcatgaatatggcagagtcttcatatggaaacagtttttattctattcagtttaaatcaggaaaggatgaccagttaaagagaaacatccaaaaatagctttgttttgtaccaacaggaattagaaaatataatgaaaagatttcgttcccagcagcatcaagaaaagtagattttctagaaataaacagttatggaggacttgtatggagaaatttaagtcttcactgagggccactttacaaaggaaatttgaataaatggagagagagagaagccttgttgttggataggaaaacccgtactaaagatactctacctacattaatttatttgtttaatttttgacaacaagcatgtattacttttgaaaagatgaaaaataaagatttatttaaaaaaggaaaaaggtatgagtacatttttaattttcatgtaattgagaaaacctttctaagtattagatgaaagctagaaactatccacagggtatgtactgataaattgactactcaaaaactaaatattcctgtatgtttttgttttaaagtttaaaagataaagcgcaaaatgggg

SEQ ID NO: 372831 - DNA, 3190 bp, Homo sapiens
acgcacttccggcctcctaaccgttctcgcgtagcggtgcgcttctggcctgttttgagtccgcgctcaaaggtgccaaagtgcaaggacccacagttgggcggagcttgggttgggagtgagacagcatagcagtccaggctggtcctttgagcgcagctcaaagaaggggacggggagggcgtcactatacaattgtggccgggtgggacctgggctgtttgctcttggaggctgtacagctgcaagctttgccgctcacgaactggagctggagaaagagccccccaaggatgggaggatgacagaagtgtctgcagatggcactgcctgggcaccaggagaggtctctgaggatccccgggtggaaactcctcccgggagtaaaaccacacaaccactgagaagaccgctccggcatcctagagagtacgcgtgtgagcctgggtgcaaggccaaagtagtgacgcacttccgttcacgcaccgctttctgtttttcctgagcctttgcctgctaagagggagaccaggtcatggcagccatgcctctgaaagctcaataccaggactttccctcaagtccctacctgtcccctctgccccacactctggcccggagccagaggattggctctggggcagcaggaacctgttgttttaggagatggtgaccttcgaggatgtggctgtgcacttcaccaagacagaatggactggcctttctcctgcccagagggccctgtacagaagtgtgatgttggagaattttgggaacctgactgctttggggtacccagttcccaaacctgcactgatctcacttttggagagaggggacatggcttggggcctggaagcacaggatgatcccccagcagagaggaccaaaaacgtctgtaaagatgttgagaccaacattgacagtgagtccacattaatccagggaatttctgaagaaagagatgggatgatgtcacatggtcagctgaagagtgtccctcagagaactgacttcccagaaacacgtaatgtggaaaagcaccaggacatccccacagtgaaaaatatccaaggaaaggttccaagaatcccctgtgcaaggaaacctttcatatgtgaggagtgtgggaaatccttcagctacttttcttactatgctagacaccagagaatccacactggggagaaaccttttgagtgtagtgagtgtggaaaagcctttaatggtaattcttcgttaattcggcaccagaggattcacactggagagagaccctatcagtgtgaggagtgtgggcgagcctttaatgataatgcaaatctgatcaggcatcagagaatccacagtgggggacagaccctattactgtacagagtgtgggaatagtttcaccagtagttccgagtttgttatacatcagagaatccacactggggagaaaccgtatgagtgtaatgagtgtggcaaagcttttgttggtaattcacccctacttcggcatcagaaaatccacactggagagaaaccctatgagtgtaatgagtgtggcaaaagctttggaaggacttcccatctaagccaacatcagcgtattcacacaggggaaaagccttattcttgtaaagtatgtggacaagccttcaattttcatacaaaactaactcggcaccagagaattcacagtgaggagaaaccctttgactgtgtagattgtggaaaagccttcagtgctcaggaacaattaaaaaggcatctgagaattcatactcaggagtcttcctatgtatgtgatgagtgtggaaaagccttgactagcaaaagaaatcttcatcagcatcaaagaatccatactggagagaaaccctatgagtgtagcaagtatgagaaggcctttgggacttcttcccagctaggtcaccttgagcatgtctactctggagagaagcctgtgctggacatttgtcgttttggcctcccagaattttttacccccttttactggtaatagtacactccagtgaaatgtactgagtggattccgtcttctactcaggaatggaatgtgtgacacaggcctgactcagcctctgatccatccctcaagccacagttaatgattcagatgtcagtagatgaccaaagatggttcaattagagtcccaggattgcaagagctaataggaacaaatactctccccccgcccacccccattggttttaatgctgagaagaagaactagactcttacagaggtgagaatgaagtccacacagcaaaaatgcatctgagaattggagagcagtaaaagactgaagataatgtttgaacagccacatacaccatgcctgaagctaaaaatatatacgggtttttgaattgcagcagccaataaattccatttttgtttggttggttttggctttggcacacctgaattaggttttcttgccttggaacagaattttgacttaaacagtgttgtcattgtagcagttgtttgaagttttcagggataacatacctgatggagaaatgttttgtgtgtatgatatatgggaaagtctttagttatagtcatggcagctcctcaaccccatgattgtgatgagattgggaagcccactgtaacactggagagcccaggttatatcagacaccactagtagatagaagttctaacaacttgagctctgtaacaaaaatctcattgtactacaaaattatgtctgcaccagtgaatccattctcaagaaaagtcttaactaggaaactaaaagctttcactcttaaagctttcattttctgtttattcagttttttatttggaatggatgctactctaggccttaaactgagaaatgccaggctattgtagctattatatcttggtatttgccattttaattcctaggacagcacgcccgctttgcccttgacctggctagggagccaaggaaatgccatggttcttggtcataagacacactgcagagatctctcagtaggaaaacagggctggcccttttctttggtgatgaacacaaactgcaccctttttttctcccacgtgtccttccgctgccagccagtgttggaatctccctacccaattccagacttaattgcttactgcgtctagcacctgggtggcttcaccacctcttccttacttgtcagcagatgaatg

SEQ ID NO: 372832 - DNA, 3435 bp, Homo sapiens
aggatccttaattaaattaatccctttctcccggcacttccgttcacgcaccggtttctgtttttcctgagcctttgcctgctaagagggagaccaggtcatggcagccatgcctctgaaagctcaataccaggactttccctcaagtccctacctgtcccctctgccccacactctggcccggagccagaggattggctctggggcagcaggaacctgttgttttaggagatggtgaccttcgaggatgtggctgtgcacttcaccaagacagaatggactggcctttctcctgcccagagggccctgtacagaagtgtgatgttggagaattttgggaacctgactgctttggggtacccagttcccaaacctgcactgatctcacttttggagagaggggacatggcttggggcctggaagcacaggatgatcccccagcagagaggaccaaaaacgtctgtaaagttattctctagctgaggatgatgatgttgaacaagatagatacagtgtctgttccctgcagccaccagagaagacagacatataaataaactatcaccattaagggtaacagtcaccgtgggccagacccgagctagccgacagggatgcggccacagctggccgggcgtgaccacaccgaggcgcagcgaccttgttcctagagaggcccggccgcctggtgacgcacttccggcagcgccggggagcagtccgctacggagctccagcccttctctgagacggggaccaggggatggcagccatgcacctgacagcctggccccagaagtcggtgacctttgaggacgtggctgtgtacttcacccaggcggaatgggatggcctgtcccctgcacagaggaccctgtacagggatgtgatgctggagaattatgggaatgtggcctccctgggatttccacttctcaaacctgctgtgatctcacaactggagggaggaagtgagctggggggctcatctccactggctgcaggaacaggcctccagggcctccagactgatggagtctcgctctgtcgcccaaactggagtgcagtggcaagaacttggctcaccgcaacttccgtttcccgggttcgagcaattctcctgcctcatcctcccgagtagctggaactacagtgatattcagactgacaatgatttgacaaaggaaatgtatgaaggaaaagagaatgtatcatttgaacttcaaagagacttttcccaggaaacagacttttcagaagcctctcttctagagaaacaacaggaagtccactcagcaggaaatataaagaaggagaagagcaacaccattgatggaacagtgaaagatgagacaagccccgtggaggagtgtttttttagtcaaagttcaaactcatatcagtgtcataccatcactggagagcagccctctgggtgtacaggattggggaaatccatcagctttgatacaaaactcgtgaagcatgaaataattaattctgaggaaagacctttcaaatgtgaagaattagtagagccctttaggtgtgactctcaacttattcaacatcaagagaacaacactgaggaaaagccttatcagtgttcggagtgtggcaaagctttcagcattaatgagaaattaatttggcatcagagacttcacagtggggagaaacccttcaaatgtgtggagtgtgggaaaagcttcagctacagttcccattatatcacacatcagacaatccacagtggggagaagccctatcagtgtaagatgtgtgggaaggccttcagtgttaatggaagcctaagtaggcatcagagaatccatacgggagagaagccctatcagtgcaaggaatgtggaaatggcttcagctgtagttctgcatatattacacatcagagagtccacactggagagaaaccttacgagtgtaatgactgtgggaaagcgttcaatgttaatgcaaaattaattcaacatcagagaatccatactggagagaaaccttatgaatgtaatgaatgtggaaaaggcttcaggtgcagctcccagcttaggcagcatcagagcatccacacaggagaaaagccctatcagtgtaaagagtgtggaaaaggcttcaataataatacaaaactcattcagcatcagagaatccacacaggtgagaaaccctatgaatgcactgaatgtggaaaagccttcagtgtcaaagggaagttaatccaacaccagagaattcacacaggcgagaaaccctatgagtgtaatgaatgcgggaaagccttcagatgtaactcccaatttcggcagcatctgagaattcacactggggagaagccctatgagtgtaatgagtgtggaaaggccttcagcgttaatgggaaactaatgcggcatcagagaattcacactggggagaaaccttttgaatgtaatgagtgtgggagatgctttacttctaaaagaaacctacttgatcatcaccgaatccatactggagaaaagccctatcaatgtaaggaatgtgggaaagccttcagtatcaatgccaaactaactaggcatcagaggatacatactggggagaaacctttcaaatgtatggaatgtgagaaagcattcagctgtagttctaactatattgtgcaccagagaatccatacaggagagaaaccctttcagtgtaaggagtgtggaaaagccttccatgttaatgcccatttaattcggcatcagagaagccacactggggagaaacccttcagatgtgtggaatgtggcaaaggcttcagctttagttctgactacattatacatcagacagtccacacttggaagaaaccctatatgtgtagtgtgtgtgggaaagcattcaggtttagcttccagctcagtcagcatcagagtgtccatagtgaaggaaaatcctaataatgagaaagatatagaaaactcttaaggttaatgccaaaatggatcaagtatcatcagattcatccattgaaaaacctccaagagggcatgaatatggcagagtcttcatatggaaacagtttttattctattcagtttaaatcaggaaaggatgaccagttaaagagaaacatccaaaaatagctttgttttgtaccaacaggaattagaaaatataatgaaaagatttcgttcccagcagcatcaagaaaagtagattttctagaaataaacagttatggagttcccgaggcagaacatttggttcttctgtcaggtccagttcaccaacaagattatgaatggatggagacagcgtccagcgttggtctaggaagcccaaaccgcagggcaaggtcgtcagcaggccttagttggtgtgttgattttttgacagcgtgcatggagtacttttggagcagtgcaggagcccccctttatttcgcg

SEQ ID NO: 372833 - DNA, 3638 bp, Homo sapiens
ctctcaaatttccgcccgtagtaggcatggcggcggcacctcaccactgattcgttgaattccttcccggtaatcttgggcactagcgggcggagttgaagggcgcttggaccccagcggcgatctgtgtttgggttcgcgctctgggagaattttggctttgctcgccttcctctttcagaagactcgaaatcggccagcaggtctgcgagatttgaaacgcgactgttactccttgttttccggttctggccgcgggagcctctcgagaagcgtggaaagaggagaagggcgtataccttgtgaccgcctctggttgtcttgggctcgcgcctggcgccgctacgtggagtcgctctctcgtcgtcacttttggctgccgacttgttgagtagaagtgcagactgatgctttaagactcagggagaggtctttcccttatctccaccccagcaagcaccccagagaccttggagatttgtcttgtttctagacacgtgtactccaatgttgtgcggaggaggccttaaatattcgagaagagagtgggaactcctggaattttaagggatttctgtgtatttccaaaactgacttttaactaccggcagcgtgggatttcgtgattgtttttcgccatcgtgtggctccaacatgtacttcccttcttggttaagtcagctgtacaggggtttatccagacccatcagaaggaccacccaaccgatctggggttctctctacagaagtctgttgcagagttcacagaggagaattccagaattcagtagctttgttgtccggaccaacacatgtggagagttgcgttcgtctcacttaggccaagaagtcaccttgtgtggatggattcagtaccgaaggcaaaacacattcttggtcctaagagatttcgatgggcttgttcaagttatcattccccaggatgagtcggcagcctctgtgaagaagattttatgtgaagcccctgtggaatctgtggtgcaagtgtctggtacagtcatttcccgtcctgcaggacaagagaatccaaaaatgccaacaggtgagattgaaatcaaagttaaaacagctgagcttctgaatgcctgcaagaagctgccctttgaaattaagaacttcgtgaagaaaacagaggctcttcggttgcagtatcgctacttagacttgcgtagtttccaaatgcagtataacctgcgactgaggtcccagatggtcatgaaaatgcgggaatatctctgtaatctgcatgggtttgtggatatagaaacccccacattgtttaagaggaccccagggggtgccaaagagtttttagtaccatccagggaacctggaaagttttattctctccctcagagtcctcaacagtttaagcaacttctgatggttggcggtttagacagatattttcaggttgcccgatgttatcgagatgaaggttcaagaccagacagacagcctgagtttactcagattgacatagagatgtcatttgtagaccagactgggatccagagtttaattgagggtttgctccagtattcctggcccaatgacaaagatcctgtggttgttccttttcctactatgacttttgctgaggtgctggccacctatggaactgataaacctgacactcgctttggaatgaagattatagatatcagtgatgtgtttagaaacacagagattggatttcttcaagatgcacttagtaagccccatggaactgtgaaagccatatgtatccctgaaggagcaaaatacttaaaaaggaaagacattgaatccattagaaactttgcagctgaccattttaatcaggaaatcttacctgtattccttaacgccaatagaaactggaattctccagttgctaatttcataatggagtcacaaagactggaattaatcagactaatggagacccaagaggaagatgtggtcctactaactgctggagagcacaataaagcatgctctttgttaggaaaattacgactggaatgtgctgaccttctagaaacaagaggagtggtgctccgtgaccccactctgttctctttcctttgggtggtagatttcccactcttcctgcccaaggaggaaaatcccagagagctggaatcggcccaccacccatttactgctccccaccccagtgacatacatctcctgtacactgagcccaaaaaggaggatgtgaaaatgctctcccatctgctccaggctttagattatggggcaccccctcatggaggaattgccttagggttagacagactgatatgccttgtcactggatctccaagcatcagagatgtcatagccttcccaaagtccttccggggacatgacctcatgagcaataccccagattctgtccctcctgaggaactgaagccctatcatatccgagtctccaagccaacagactccaaagcagaaagagctcattgaatcatgcataccatgcagaaagttgagcttttaggttttgtcctctttgcttccccaaggctaaagtcagatctagagttctgccacaggtctaacaatcaagtctttagatggaaggaatccaggcaacattcttcaccacaacgaagaaacagataaaagatacccaattttgacttgatttcatgcatcatttggattttttttggttaggactttttttgaagttcctttttacttaggtgtgaaagatggttctttgttgaaataatatagtggtttagtgttttcaaatcatgtttctcatacccagatagtagattattcacttaggacagaggtaatcaaattatgtgtgaaatgtaggaaaatgcttgcccctgtaaactagtgagttgatggagcatttgcttcatcatcctcatcaagagaatcatataaattaagctttataatgacatttcaaccatcaacataatatagtgaggagtagcataatattttttaataatgcagaaaacatcactgaaatgagagtcacaaatttttcttcagtgtttcagcctgagtaagttacataaacctcgcttagcctcccttcctgctaatgtgtaaaatacatacttgccctggctacctcaccgggctgttattgctggaatcagaggagataacatatatggaagataaagtgaataaaagtactttgaaaaactataaagcattccacaaatatgagatgatggtattatccatccataaataggtagatatatctctattttatagtttcagattaaacaaaactgatatcaatagtaaaagtcattttacttatcaattttctgtttttttttttagttttaaagatattattggccgggagtggtggctcacacctgtaatcccagcactttgggagattgaggtgggtggatcacttgaggtcaggagttcaacaccagcctggccaacatagtgaaaccgtctctactaaaaacacaaaaattagccaggcatggtggcgcatgcctgtgatcgcagccactcgggaggctgaggcatgaggtttgcttgaacctgggagatggaggttgcagtgagccaagatggtgccattacactccagcctgggtgacagagcaagactccatctc

SEQ ID NO: 372834 - DNA, 2607 bp, Homo sapiens
ctctcaaatttccgcccgtagtaggcatggcggcggcacctcaccactgattcgttgaattccttcccggtaatcttgggcactagcgggcggagttgaagggcgcttggaccccagcggcgatctgtgtttgggttcgcgctctgggagaattttggctttgctcgccttcctctttcagaagactcgaaatcggccagcaggtctgcgagatttgaaacgcgactgttactccttgttttccggttctggccgcgggagcctctcgagaagcgtggaaagaggagaagggcgtataccttgtgaccgcctctggttgtcttgggctcgcgcctggcgccgctacgtggagtcgctctctcgtcgtcacttttggctgccgacttgttgagtagaagtgcagactgatgctttaagactcagggagaggtctttcccttatctccaccccagcaagcaccccagagaccttggagatttgtcttgtttctagacacgtgtactccaatgttgtgcggaggaggccttaaatattcgagaagagagtgggaactcctggaattttaagggatttctgtgtatttccaaaactgacttttaactaccggcagcgtgggatttcgtgattgtttttcgccatcgtgtggctccaacatgtacttcccttcttggttaagtcagctgtacaggggtttatccagacccatcagaaggaccacccaaccgatctggggttctctctacagaagtctttgctaatttcataatggagtcacaaagactggaattaatcagactaatggagacccaagaggaagatgtggtcctactaactgctggagagcacaataaagcatgctctttgttaggaaaattacgactggaatgtgctgaccttctagaaacaagaggagtggtgctccgtgaccccactctgttctctttcctttgggtggtagatttcccactcttcctgcccaaggaggaaaatcccagagagctggaatcggcccaccacccatttactgctccccaccccagtgacatacatctcctgtacactgagcccaaaaaggcccgtagccaacactatgacttggttttaaatggcaatgaaataggaggtggttcaattcgaattcacaatgcagagctgcagcgttatatcctggcaaccttactaaaggaggatgtgaaaatgctctcccatctgctccaggctttagattatggggcaccccctcatggaggaattgccttagggttagacagactgatatgccttgtcactggatctccaagcatcagagatgtcatagccttcccaaagtccttccggggacatgacctcatgagcaataccccagattctgtccctcctgaggaactgaagccctatcatatccgagtctccaagccaacagactccaaagcagaaagagctcattgaatcatgcataccatgcagaaagttgagcttttaggttttgtcctctttgcttccccaaggctaaagtcagatctagagttctgccacaggtctaacaatcaagtctttagatggaaggaatccaggcaacattcttcaccacaacgaagaaacagataaaagatacccaattttgacttgatttcatgcatcatttggattttttttggttaggactttttttgaagttcctttttacttaggtgtgaaagatggttctttgttgaaataatatagtggtttagtgttttcaaatcatgtttctcatacccagatagtagattattcacttaggacagaggtaatcaaattatgtgtgaaatgtaggaaaatgcttgcccctgtaaactagtgagttgatggagcatttgcttcatcatcctcatcaagagaatcatataaattaagctttataatgacatttcaaccatcaacataatatagtgaggagtagcataatattttttaataatgcagaaaacatcactgaaatgagagtcacaaatttttcttcagtgtttcagcctgagtaagttacataaacctcgcttagcctcccttcctgctaatgtgtaaaatacatacttgccctggctacctcaccgggctgttattgctggaatcagaggagataacatatatggaagataaagtgaataaaagtactttgaaaaactataaagcattccacaaatatgagatgatggtattatccatccataaataggtagatatatctctattttatagtttcagattaaacaaaactgatatcaatagtaaaagtcattttacttatcaattttctgtttttttttttagttttaaagatattattggccgggagtggtggctcacacctgtaatcccagcactttgggagattgaggtgggtggatcacttgaggtcaggagttcaacaccagcctggccaacatagtgaaaccgtctctactaaaaacacaaaaattagccaggcatggtggcgcatgcctgtgatcgcagccactcgggaggctgaggcatgaggtttgcttgaacctgggagatggaggttgcagtgagccaagatggtgccattacactccagcctgggtgacagagcaagactccatctc

SEQ ID NO: 372835 - DNA, 411 bp, Homo sapiens
tgttttaaaactcaactttgtttcccctttatcatctaagcctagatggtggcacttagtggaccttcaaaatatatttaaactgaattatcttttgaatttcaggaggatgtgaaaatgctctcccatctgctccaggctttagattatggggcaccccctcatggaggaattgccttaggtaaacaacttttccttttataagataaactgaattccattgcactgtctcaaattcaggttctcagtttgtgttggtagaggtggaaggatgagtccaagagttccatgagaatgtaagtttctgttgaaatttcagtaatatattttttaaatatatcttaacagttataaagatataacttaactgataatttgcatttgaaagatcattaatagcttaaaactgca

SEQ ID NO: 372836 - DNA, 3749 bp, Homo sapiens
ctctcaaatttccgcccgtagtaggcatggcggcggcacctcaccactgattcgttgaattccttcccggtaatcttgggcactagcgggcggagttgaagggcgcttggaccccagcggcgatctgtgtttgggttcgcgctctgggagaattttggctttgctcgccttcctctttcagaagactcgaaatcggccagcaggtctgcgagatttgaaacgcgactgttactccttgttttccggttctggccgcgggagcctctcgagaagcgtggaaagaggagaagggcgtataccttgtgaccgcctctggttgtcttgggctcgcgcctggcgccgctacgtggagtcgctctctcgtcgtcacttttggctgccgacttgttgagtagaagtgcagactgatgctttaagactcagggagaggtctttcccttatctccaccccagcaagcaccccagagaccttggagatttgtcttgtttctagacacgtgtactccaatgttgtgcggaggaggccttaaatattcgagaagagagtgggaactcctggaattttaagggatttctgtgtatttccaaaactgacttttaactaccggcagcgtgggatttcgtgattgtttttcgccatcgtgtggctccaacatgtacttcccttcttggttaagtcagctgtacaggggtttatccagacccatcagaaggaccacccaaccgatctggggttctctctacagaagtctgttgcagagttcacagaggagaattccagaattcagtagctttgttgtccggaccaacacatgtggagagttgcgttcgtctcacttaggccaagaagtcaccttgtgtggatggattcagtaccgaaggcaaaacacattcttggtcctaagagatttcgatgggcttgttcaagttatcattccccaggatgagtcggcagcctctgtgaagaagattttatgtgaagcccctgtggaatctgtggtgcaagtgtctggtacagtcatttcccgtcctgcaggacaagagaatccaaaaatgccaacaggtgagattgaaatcaaagttaaaacagctgagcttctgaatgcctgcaagaagctgccctttgaaattaagaacttcgtgaagaaaacagaggctcttcggttgcagtatcgctacttagacttgcgtagtttccaaatgcagtataacctgcgactgaggtcccagatggtcatgaaaatgcgggaatatctctgtaatctgcatgggtttgtggatatagaaacccccacattgtttaagaggaccccagggggtgccaaagagtttttagtaccatccagggaacctggaaagttttattctctccctcagagtcctcaacagtttaagcaacttctgatggttggcggtttagacagatattttcaggttgcccgatgttatcgagatgaaggttcaagaccagacagacagcctgagtttactcagattgacatagagatgtcatttgtagaccagactgggatccagagtttaattgagggtttgctccagtattcctggcccaatgacaaagatcctgtggttgttccttttcctactatgacttttgctgaggtgctggccacctatggaactgataaacctgacactcgctttggaatgaagattatagatatcagtgatgtgtttagaaacacagagattggatttcttcaagatgcacttagtaagccccatggaactgtgaaagccatatgtatccctgaaggagcaaaatacttaaaaaggaaagacattgaatccattagaaactttgcagctgaccattttaatcaggaaatcttacctgtattccttaacgccaatagaaactggaattctccagttgctaatttcataatggagtcacaaagactggaattaatcagactaatggagacccaagaggaagatgtggtcctactaactgctggagagcacaataaagcatgctctttgttaggaaaattacgactggaatgtgctgaccttctagaaacaagaggagtggtgctccgtgaccccactctgttctctttcctttgggtggtagatttcccactcttcctgcccaaggaggaaaatcccagagagctggaatcggcccaccacccatttactgctccccaccccagtgacatacatctcctgtacactgagcccaaaaaggcccgtagccaacactatgacttggttttaaatggcaatgaaataggaggtggttcaattcgaattcacaatgcagagctgcagcgttatatcctggcaaccttactaaaggaggatgtgaaaatgctctcccatctgctccaggctttagattatggggcaccccctcatggaggaattgccttagggttagacagactgatatgccttgtcactggatctccaagcatcagagatgtcatagccttcccaaagtccttccggggacatgacctcatgagcaataccccagattctgtccctcctgaggaactgaagccctatcatatccgagtctccaagccaacagactccaaagcagaaagagctcattgaatcatgcataccatgcagaaagttgagcttttaggttttgtcctctttgcttccccaaggctaaagtcagatctagagttctgccacaggtctaacaatcaagtctttagatggaaggaatccaggcaacattcttcaccacaacgaagaaacagataaaagatacccaattttgacttgatttcatgcatcatttggattttttttggttaggactttttttgaagttcctttttacttaggtgtgaaagatggttctttgttgaaataatatagtggtttagtgttttcaaatcatgtttctcatacccagatagtagattattcacttaggacagaggtaatcaaattatgtgtgaaatgtaggaaaatgcttgcccctgtaaactagtgagttgatggagcatttgcttcatcatcctcatcaagagaatcatataaattaagctttataatgacatttcaaccatcaacataatatagtgaggagtagcataatattttttaataatgcagaaaacatcactgaaatgagagtcacaaatttttcttcagtgtttcagcctgagtaagttacataaacctcgcttagcctcccttcctgctaatgtgtaaaatacatacttgccctggctacctcaccgggctgttattgctggaatcagaggagataacatatatggaagataaagtgaataaaagtactttgaaaaactataaagcattccacaaatatgagatgatggtattatccatccataaataggtagatatatctctattttatagtttcagattaaacaaaactgatatcaatagtaaaagtcattttacttatcaattttctgtttttttttttagttttaaagatattattggccgggagtggtggctcacacctgtaatcccagcactttgggagattgaggtgggtggatcacttgaggtcaggagttcaacaccagcctggccaacatagtgaaaccgtctctactaaaaacacaaaaattagccaggcatggtggcgcatgcctgtgatcgcagccactcgggaggctgaggcatgaggtttgcttgaacctgggagatggaggttgcagtgagccaagatggtgccattacactccagcctgggtgacagagcaagactccatctc

SEQ ID NO: 372837 - DNA, 3901 bp, Homo sapiens
ctctcaaatttccgcccgtagtaggcatggcggcggcacctcaccactgattcgttgaattccttcccggtaatcttgggcactagcgggcggagttgaagggcgcttggaccccagcggcgatctgtgtttgggttcgcgctctgggagaattttggctttgctcgccttcctctttcagaagactcgaaatcggccagcaggtctgcgagatttgaaacgcgactgttactccttgttttccggttctggccgcgggagcctctcgagaagcgtggaaagaggagaagggcgtataccttgtgaccgcctctggttgtcttgggctcgcgcctggcgccgctacgtggagtcgctctctcgtcgtcacttttggctgccgacttgttgagtagaagtgcagactgatgctttaagactcagggagaggtctttcccttatctccaccccagcaagcaccccagagaccttggagatttgtcttgtttctagacacgtgtactccaatgttgtgcggaggaggccttaaatattcgagaagagagtgggaactcctggaattttaagggatttctgtgtatttccaaaactgacttttaactaccggcagcgtgggatttcgtgattgtttttcgccatcgtgtggctccaacatgtacttcccttcttggttaagtcagctgtacaggggtttatccagacccatcagaaggaccacccaaccgatctggggttctctctacagaagtctgttgcagagttcacagaggagaattccagaattcagtagctttgttgtccggaccaacacatgtggagagttgcgttcgtctcacttaggccaagaagtcaccttgtgtggatggattcagtaccgaaggcaaaacacattcttggtcctaagagatttcgatgggcttgttcaagttatcattccccaggatgagtcggcagcctctgtgaagaagattttatgtgaagcccctgtggaatctgtggtgcaagtgtctggtacagtcatttcccgtcctgcaggacaagagaatccaaaaatgccaacaggtgagattgaaatcaaagttaaaacagctgagcttctgaatgcctgcaagaagctgccctttgaaattaagaacttcgtgaagaaaacagaggctcttcggttgcagtatcgctacttagacttgcgtagtttccaaatgcagtataacctgcgactgaggtcccagatggtcatgaaaatgcgggaatatctctgtaatctgcatgggtttgtggatatagaaacccccacattgtttaagaggaccccagggggtgccaaagagtttttagtaccatccagggaacctggaaagttttattctctccctcagagtcctcaacagtttaagcaacttctgatggttggcggtttagacagatattttcaggttgcccgatgttatcgagatgaaggttcaagaccagacagacagcctgagtttactcagattgacatagagatgtcatttgtagaccagactgggatccagagtttaattgagggtttgctccagtattcctggcccaatgacaaagatcctgtggttgttccttttcctactatgacttttgctgaggtgctggccacctatggaactgataaacctgacactcgctttggaatgaagattatagatatcagtgatgtgtttagaaacacagagattggatttcttcaagatgcacttagtaagccccatggaactgtgaaagccatatgtatccctgaaggagcaaaatacttaaaaaggaaagacattgaatccattagaaactttgcagctgaccattttaatcaggaaatcttacctgtattccttaacgccaatagaaactggaattctccagttgctaatttcataatggagtcacaaagactggaattaatcagactaatggagacccaagaggaagatgtggtcctactaactgctggagagcacaataaagcatgctctttgttaggaaaattacgactggaatgtgctgaccttctagaaacaagaggagtggtgctccgtgaccccactctgttctctttcctttgggtggtagatttcccactcttcctgcccaaggaggaaaatcccagagagctggaatcggcccaccacccatttactgctccccaccccagtgacatacatctcctgtacactgagcccaaaaaggcccgtagccaacactatgacttggttttaaatggcaatgaaataggaggtggttcaattcgaattcacaatgcagagctgcagcgttatatcctggcaaccttactaaaggaggatgtgaaaatgctctcccatctgctccaggctttagattatggggcaccccctcatggaggaattgccttagggttagacagactgatatgccttgtcactggatctccaagcatcagagatgtcatagccttcccaaagtccttccggggacatgacctcatgagcaataccccagattctgtccctcctgaggaactgaagccctatcatatccgagtctccaagccaacagactccaaagcagaaagagctcattgaatcatgcataccatgcagaaagttgagcttttaggttttgtcctctttgcttccccaaggctaaagtcagatctagagttctgccacaggtctaacaatcaagtctttagatggaaggaatccaggcaacattcttcaccacaacgaagaaacagataaaagatacccaattttgacttgatttcatgcatcatttggattttttttggttaggactttttttgaagttcctttttacttaggtgtgaaagatggttctttgttgaaataatatagtggtttagtgttttcaaatcatgtttctcatacccagatagtagattattcacttaggacagaggtaatcaaattatgtgtgaaatgtaggaaaatgcttgcccctgtaaactagtgagttgatggagcatttgcttcatcatcctcatcaagagaatcatataaattaagctttataatgacatttcaaccatcaacataatatagtgaggagtagcataatattttttaataatgcagaaaacatcactgaaatgagagtcacaaatttttcttcagtgtttcagcctgagtaagttacataaacctcgcttagcctcccttcctgctaatgtgtaaaatacatacttgccctggctacctcaccgggctgttattgctggaatcagaggagataacatatatggaagataaagtgaataaaagtactttgaaaaactataaagcattccacaaatatgagatgatggtattatccatccataaataggtagatatatctctattttatagtttcagattaaacaaaactgatatcaatagtaaaagtcattttacttatcaattttctgtttttttttttagttttaaagatattattggccgggagtggtggctcacacctgtaatcccagcactttgggagattgaggtgggtgggattacaggcatgaaccaccacgcccagccttcttttttcctttgagacagtctcaccctggcacccaggctggagtgcagtggcaggatcacgggtctctgcaacctcagcctcccaggttcagttcccctgcctcagcctcccgaatagctgggactacaatagcccaccactacacccggctagatttttgtatttttagtagagatggggtttcaccatgttggccaggttggtcttgaaatcctgacctcaggtaatctgcccacctcagcacccagccaggtggtggtagttgttttacagcctgtgtgagacattcgggtgagccccaggaaatgaaagaatgtgcttatttgggggagggggagg

SEQ ID NO: 372838 - DNA, 3920 bp, Homo sapiens
ctctcaaatttccgcccgtagtaggcatggcggcggcacctcaccactgattcgttgaattccttcccggtaatcttgggcactagcgggcggagttgaagggcgcttggaccccagcggcgatctgtgtttgggttcgcgctctgggagaattttggctttgctcgccttcctctttcagaagactcgaaatcggccagcaggtctgcgagatttgaaacgcgactgttactccttgttttccggttctggccgcgggagcctctcgagaagcgtggaaagaggagaagggcgtataccttgtgaccgcctctggttgtcttgggctcgcgcctggcgccgctacgtggagtcgctctctcgtcgtcacttttggctgccgacttgttgagtagaagtgcagactgatgctttaagactcagggagaggtctttcccttatctccaccccagcaagcaccccagagaccttggagatttgtcttgtttctagacacgtgtactccaatgttgtgcggaggaggccttaaatattcgagaagagagtgggaactcctggaattttaagggatttctgtgtatttccaaaactgacttttaactaccggcagcgtgggatttcgtgattgtttttcgccatcgtgtggctccaacatgtacttcccttcttggttaagtcagctgtacaggggtttatccagacccatcagaaggaccacccaaccgatctggggttctctctacagaagtctgttgcagagttcacagaggagaattccagaattcagtagctttgttgtccggaccaacacatgtggagagttgcgttcgtctcacttaggccaagaagtcaccttgtgtggatggattcagtaccgaaggcaaaacacattcttggtcctaagagatttcgatgggcttgttcaagttatcattccccaggatgagtcggcagcctctgtgaagaagattttatgtgaagcccctgtggaatctgtggtgcaagtgtctggtacagtcatttcccgtcctgcaggacaagagaatccaaaaatgccaacaggtgagattgaaatcaaagttaaaacagctgagcttctgaatgcctgcaagaagctgccctttgaaattaagaacttcgtgaagaaaacagaggctcttcggttgcagtatcgctacttagacttgcgtagtttccaaatgcagtataacctgcgactgaggtcccagatggtcatgaaaatgcgggaatatctctgtaatctgcatgggtttgtggatatagaaacccccacattgtttaagaggaccccagggggtgccaaagagtttttagtaccatccagggaacctggaaagttttattctctccctcagagtcctcaacagtttaagcaacttctgatggttggcggtttagacagatattttcaggttgcccgatgttatcgagatgaaggttcaagaccagacagacagcctgagtttactcagattgacatagagatgtcatttgtagaccagactgggatccagagtttaattgagggtttgctccagtattcctggcccaatgacaaagatcctgtggttgttccttttcctactatgacttttgctgaggtgctggccacctatggaactgataaacctgacactcgctttggaatgaagattatagatatcagtgatgtgtttagaaacacagagattggatttcttcaagatgcacttagtaagccccatggaactgtgaaagccatatgtatccctgaaggagcaaaatacttaaaaaggaaagacattgaatccattagaaactttgcagctgaccattttaatcaggaaatcttacctgtattccttaacgccaatagaaactggaattctccagttgctaatttcataatggagtcacaaagactggaattaatcagactaatggagacccaagaggaagatgtggtcctactaactgctggagagcacaataaagcatgctctttgttaggaaaattacgactggaatgtgctgaccttctagaaacaagaggagtggtgctccgtgaccccactctgttctctttcctttgggtggtagatttcccactcttcctgcccaaggaggaaaatcccagagagctggaatcggcccaccacccatttactgctccccaccccagtgacatacatctcctgtacactgagcccaaaaaggaggatgtgaaaatgctctcccatctgctccaggctttagattatggggcaccccctcatggaggaattgccttagggttagacagactgatatgccttgtcactggatctccaagcatcagagatgtcatagccttcccaaagtccttccggggacatgacctcatgagcaataccccagattctgtccctcctgaggaactgaagccctatcatatccgagtctccaagccaacagactccaaagcagaaagagctcattgaatcatgcataccatgcagaaagttgagcttttaggttttgtcctctttgcttccccaaggctaaagtcagatctagagttctgccacaggtctaacaatcaagtctttagatggaaggaatccaggcaacattcttcaccacaacgaagaaacagataaaagatacccaattttgacttgatttcattcccttcctcgtgctcggcgttgagctcctgcagccgccgccgctgcagtggtcgtccctgccctccccggccccggggtgcaccccgcaaggctcccgctggtgtccctggagcatgggaggctgctgagcgtgagtggcggtgtctggcaggagctgcgtggcagggagggcgtccatggctgcagccaacaagggcaacaagcccagagtccggagtatccgctttgcggcaggccacgatgcagaaggatcccacggccacgtccactttgatgagaagctgcatgactcggtggtcatggtcacccaggagagtgacagcagctttctggtcaaggttggcttcctgaagatcctgcacaggtatgagattaccttcactctgcccccagtgcacaggctgagcaaggatgtccgcgaggcacctgtccccagcctgcacctcaagcccctcagcgtggtgcccgtccctgaaggttatagtgtcaagtgtgagtactcggcgcacaaagagggcgtcctcaaagaggagatactgctagcctgcgaaggtggcactggcacctgtgtgcgcgtgacggtgcaggcccgcgtcatggaccggcaccacggcacgcccatgctgctggatggtgtcaagtgtgtgggcgccgagctggaatacgactcagagcacagcgactggcacggctttgactgaggcccgaggccccgcctgccccgggcccctcagccttaaaccccgccttgtccccccgacatgctgcgtgatggtgtggcttcctcgcccctttctggggtgggtgtgggggtggagtggccttgcccacgcctctcacctctgccttcatttgtgctgccaccctgcccctccctcgtcctcctctcccacttcctcctctctgtgtgcctcagtctcctgccggaagaaatgggttgagcccgaaaggaggctgtctgaggaagggagagggagggcctggggtgggtcccccactccccaccccaagccacagggactcccaccagggtctgggagaggacggagctggctctgtggcgtcgtggccccattactgctgccttgcttcagccacctctcctgcccctccctagtccccactgctgtccaccatgagtaggagggaggtgcagtccccagccccctcccctcaggtctgtgttacttggtttttaagcgactggttgggatagaaccctaaagaaataaacttccagtggataccgg

SEQ ID NO: 372839 - DNA, 2644 bp, Homo sapiens
ctctcaaatttccgcccgtagtaggcatggcggcggcacctcaccactgattcgttgaattccttcccggtaatcttgggcactagcgggcggagttgaagggcgcttggaccccagcggcgatctgtgtttgggttcgcgctctgggagaattttggctttgctcgccttcctctttcagaagactcgaaatcggccagcaggtctgcgagatttgaaacgcgactgttactccttgttttccggttctggccgcgggagcctctcgagaagcgtggaaagaggagaagggcgtataccttgtgaccgcctctggttgtcttgggctcgcgcctggcgccgctacgtggagtcgctctctcgtcgtcacttttggctgccgacttgttgagtagaagtgcagactgatgctttaagactcagggagaggtctttcccttatctccaccccagcaagcaccccagagaccttggagatttgtcttgtttctagacacgtgtactccaatgttgtgcggaggaggccttaaatattcgagaagagagtgggaactcctggaattttaagggatttctgtgtatttccaaaactgacttttaactaccggcagcgtgggatttcgtgattgtttttcgccatcgtgtggctccaacatgtacttcccttcttggttaagtcagctgtacaggggtttatccagacccatcagaaggaccacccaaccgatctggggttctctctacagaagtctgttgcagagttcacagaggagaattccagaattcagtagctttgttgtccggaccaacacatgtggagagttgcgttcgtctcacttaggccaagaagtcaccttgtgtggatggattcagtaccgaaggcaaaacacattcttggtcctaagagatttcgatgggcttgttcaagttatcattccccaggatgagtcggcagcctctgtgaagaagattttatgtgaagcccctgtggaatctgtggtgcaagtgtctggtacagtcatttcccgtcctgcaggacaagagaatccaaaaatgccaacaggtgagattgaaatcaaagttaaaacagctgagcttctgaatgcctgcaagaagctgccctttgaaattaagaacttcgtgaagaaaacagaggctcttcggttgcagtatcgctacttagacttgcgtagtttccaaatgcagtataacctgcgactgaggtcccagatggtcatgaaaatgcgggaatatctctgtaatctgcatgggtttgtggatatagaaacccccacattgtttaagaggaccccagggggtgccaaagagtttttagtaccatccagggaacctggaaagttttattctctccctcagagtcctcaacagtttaagcaacttctgatggttggcggtttagacagatattttcaggttgcccgatgttatcgagatgaaggttcaagaccagacagacagcctgagtttactcagattgacatagagatgtcatttgtagaccagactgggatccagagtttaattgagggtttgctccagtattcctggcccaatgacaaagatcctgtggttgttccttttcctactatgacttttgctgaggtgctggccacctatggaactgataaacctgacactcgctttggaatgaagattatagatatcagtgatgtgtttagaaacacagagattggatttcttcaagatgcacttagtaagccccatggaactgtgaaagccatatgtatccctgaaggagcaaaatacttaaaaaggaaagacattgaatccattagaaactttgcagctgaccattttaatcaggaaatcttacctgtattccttaacgccaatagaaactggaattctccagttgctaatttcataatggagtcacaaagactggaattaatcagactaatggagacccaagaggaagatgtggtcctactaactgctggagagcacaataaagcaaaaaagtttcagagttcagcttcaaagctaaatgtaatcccccgtctccccttcccctacaatagtaaaatgaagaaagctatttatttccaaattttattatgaatgcatttcttaaaaaagaacatgggattttgttcctaactaatttggctattaaaccttctcttggtatgaactaaacatgctggtgtttcattctcaggaagttataggtctgattcctacaaggccttccttgaaagagagctagaaaccagactttcgaggaataacattaacattctgaaaatgtcacaatgaaggtccgttatgtagacgtaaatgtaagatagaatgggctgcaaaataataccctatcatgtctctaggcatatgtcactgttctaaccagctgtcctttctcagggaagtcctgcataccataggtagcacttattaagcacttagtatttgccaagcccgttctaagcactttgtatacattaactcatttaatcctcatgccaaccctatgaaagaagttctgatactgttgctattttaaaaataagaaaagtgagtcacagagcttaaaattttgctcacagtcacacagctaggaagtggaggagccggatttctaacccatgaagttgggttccaa

SEQ ID NO: 372840 - DNA, 464 bp, Homo sapiens
agctgtgacttgagagcctaagctcttagcctttttgagacggagtcttgctctgtcgcccaggctggagtgcagtagcatgatatccgctcactgcaagctccacctccagggttcacgccgttcccctcctcagcctctcgctacaggcccccgccaccacgcctggctaatttttttttttttgtatttttagtagagacggggtttcaccctgtcagccaggatggtcttgatctcctgacctcgtgatctgcccgcctcagtctcccaaagtgctgggatcacaggcatgaggcaccgcgcccggcctcttagccattttttaatactgtccaacagaaactataaactccagaaagtccaagggttacctttgaatagtataattatgatttttattttacttttgttctcccaagttttcttaaatgaatacagtccttgtgttattcaaaaaaaaa

SEQ ID NO: 372841 - DNA, 410 bp, Homo sapiens
agaattactaacctatacccatgtgagaattgtatttgcacttcttgtttgaaggaaatacatacaacacaggtagcgtctctacacttcagtatacagagatctgaacagtgttctctctgagtgaatcatattgcaggacagaaattacttttaaaaattctgtaatgggtcaggcctataatcctagcactttgggaggctgaggtgggcagatcacctgaggtcaggagttcgagaccagcctggccaaaatggtaaaaccccatctctacaaaaaatacaaaaattagccaggcgtagtggtgtgtgcctgtaatcccagctactcaggaggctgaggcacgagaatcacttgaacctgggaggcagagcttgcagtgagctgagattgagccactgcactccag

SEQ ID NO: 372842 - DNA, 432 bp, Homo sapiens
gacgtcgaggttggacaatcatttgaatccgggaagcggaggttgcagtaagccgagatcgcgccacttcactccagcttgggcaacagtgagaccctgtctcgaaaaaataaattaggcagacagctaggtttggtggcacactcttgtaatgccagctactccagaggctgaagctggagggtcgcttgaatcccaggagttctgggctgcagtgcggtatgcccatccagtatccacagtaggttcatcatcaatatggcgacctccgggagtggagtggagggttgcctaaggtggggtgaactgtcccagaaacagagcaggttaaaactcatgctcttgtgctgatcagcagcgggatcgcacctatgaatagccaccacatcttcagcctaggctacatagcaggaccctagtctcaataaaaaa

SEQ ID NO: 372843 - DNA, 172 bp, Homo sapiens
gcggccgcctactactactactactctgctcgaattcaagcttctaacgagtacggggacatgcacaggcaaaatgtattcactagatttctacgtagtgatctgcttttactttgtaatttgtagttctcaaaagacttttttttaaaaaaataaagtccatacttacact

SEQ ID NO: 372844 - DNA, 480 bp, Homo sapiens
tttccccccaatgactacatacatagatgggaaaatgtggctacattttccccccaatgactacatcattggggggaaaatgtagccacattttttatgggaagactttgtgttaaaagtgaacattttgaaggtttttaactggtgaaactagcctggaataatgccaccagagactgagtggaaatcgccccttttgaaggtgccattcttatgagccaaaagtttgtcatttaaaagttcattttgagggaataacatgtaatataatttgaaataaaggtatagtaaccttaaaaagaacattataactgattgttgtgaatggggtgaatttgttaaaatgagtaactttgataaagtttttcatgcacaggcaaaatgtattcactagatttctacgtagtgatctgcttttactttgtaatttgtagttctcaaaagacttttttttaaaaaaataaagtccatacttacact

SEQ ID NO: 372845 - DNA, 307 bp, Homo sapiens
gctccctgaaatattttacttctagttatgagtcacctctgattaaattgggtgctttttagtgcactgatacttgtttaaaacatctaaaccctattcacaagttgaagtatgaaatctaaagccatcattatgcgtcctcaaacttgcctcctatactcttaaccaggtatacattcccaaagttcagctaggtgtggtggctcatacttgtgaccccaacactttgggagcctgaggctggaggatcgcttgagcccaagagttcaagaccggcctggactgcataaggagacctcatctctac

SEQ ID NO: 372846 - DNA, 3106 bp, Homo sapiens
cttccggtgcgggaggagggggccggcggcgagggactccaggaggacgcgtccaacttcgagaccggcgggggccggctccgctcttccaacccctccatgtgtgaagagggcggacgacgcagcgggggaagaaaaataagctagtctaggacaagtgtccaggcgacgtggaacccaggtgtcttttatgaataatcaaaagcagcaaaagccaacgctatcaggccagcgttttaaaactagaaaaagagatgaaaaagagaggtttgaccctactcagtttcaagactgtattattcaaggcttaactgaaaccggtactgatttggaagcagtagctaagtttcttgatgcttctggagcaaaacttgattaccgtcgatatgcagaaacactctttgacattctggtggctggtggaatgctggccccaggtggtacactggcagatgacatgatgcgtacagatgtctgcgtgtttgcagcccaagaagatctagagaccatgcaagcatttgctcaggtttttaacaagttaatcaggcgctacaaatacctggagaaaggttttgaagatgaagtaaaaaagctgctgctgttcttgaagggtttttcagagtcggagaggaacaagctagctatgttgactggtgttcttctggctaatggaacacttaatgcatccattcttaatagcctttataatgaaaatttggttaaagaaggagtttcagcagcttttgctgtgaagctctttaaatcatggataaatgaaaaagatatcaatgcagtagctgcaagtcttcggaaagtcagcatggataacagactgatggaactctttcctgccaataagcaaagtgttgaacacttcacaaaatattttactgaggcaggcttgaaagagctttcagaatatgttcggaatcagcaaaccatcggagctcgtaaggagctccagaaagaacttcaagaacagatgtcccgtggtgatccatttaaggatataattttatatgtcaaggaggagatgaaaaaaaacaacatcccagagccagttgtcatcggaatagtctggtcaagtgtaatgagcactgtggaatggaacaaaaaagaggagcttgtagcagagcaagccatcaagcacttgaagcaatacagccctctacttgctgcctttactactcaaggtcagtctgagctgactctgttactgaagattcaggagtattgctatgacaacattcatttcatgaaagccttccagaaaatagtggtgcttttttataaagctgaagtcctgagcgaggagcccattttgaagtggtataaagatgcacatgttgcaaaggggaagagtgttttccttgagcaaatgaaaaagtttgtagaatggctcaaaaatgctgaagaagaatctgaatctgaagctgaagaaggtgactgaattttgaaactacaccctcagtaaagcaaacaggagttgtagataaaatgtcatgtctcatgtgtcctggttcttacatcttcctacctccctgtatcaagcatgatataagggctttcatggcaaattttattttaactgtttctatggttgctggaaatgttgggtttagtttctaaaaccatgttttaagtagctacaggagctatagatttgaatctaatgttgcattagtcttttcagttatcttctacctcctgtattttctactgtaataatgtaatttaaggccttccacaatgaacagttcactttattccctgggttttctataaacagttttaaggatatgatttggttaaaaaataatttgttataaaaattctgtttgcaaattaaactggaaaagtatccagagtctcaaaaggcaatgatttgtgagataatatggcatgcccggagccctgctcatcaatgaaaaacccatatgtaataatcgaattcatttaacatgaatcttgagtacgtggaccattgcttgcatgttaactttttgtttgttttgttttgttttgttttgcatttttaactccagatatcctaaagctcaattgtttggtctctggttttcatccttagagaagccatggagaacagacttgaaaagtttaggaaatcataatgtggcagaggtggtgggaagaagaaagttgagctttttccccttgagaaacttctgcatttagtttctatctttccaggcaaaacaaatgggtattcttttcatacaaccattttcaaatgaaccttagaaaagtcttaacatttaaggtattttatgcacagaatacacttagattgataggaaagaactcgtaatggagtttgagtaaagaaaatgactgatgtactaaacccagtaaaaattgttgaaaatgttaaaggtcagcatgttctaattgggaatctagatatagcttagatttcctattggcttagagtatttgctataacaaatgaagtgcaatgacaattatatattcctactcggtcatactggactggcttcgttctcttaatatactcagtaatgactcaagcctctggctattaacataccctagttgccgttttttaattgccatgagccaaatacttcttggtatacaattgatccatttattttaatggctgccttttcattttcatcttttcttgctgctacccatctatgtatgtagtcattggggggaaaatgtagccacattttttatgggaagactttgtgttaaaagtgaacattttgaaggtttttaactggtgaaactagcctggaataatgccaccagagactgagtggaaatcgccccttttgaaggtgccattcttatgagccaaaagtttgtcatttaaaagttcattttgagggaataacatgtaatataatttgaaataaaggtatagtaaccttaaaaagaacattataactgattgttgtgaatggggtgaatttgttaaaatgagtaactttgataaagtttttcatgcacaggcaaaatgtattcactagatttctacgtagtgatctgcttttactttgtaatttgtagttctcaaaagacttttttttaaaaaaataaagtccatacttacact

SEQ ID NO: 372847 - DNA, 3309 bp, Homo sapiens
cttccggtgcgggaggagggggccggcggcgagggactccaggaggacgcgtccaacttcgagaccggcgggggccggctccgctcttccaacccctccatgtgtgaagagggcggacgacgcagcgggggaagaaaaataagctagtctaggacaagtgtccaggcgacgtggaacccagtaagggaataaagaagactggaaacgtctctcccctcccctatcccagtccctcaccctaatccgcgcgcaatagaaaaggcggaagcgcctgtccacgatcagggcggggcaaggggaagaaatctcgcgataggagagcggtccgggcgggggtggcacctctccctcctcctggcgttagttccggtcgcagaggagacaccgccgcagttgccggtacatcggggatttctggctctttcctcttcgccttaaattcgggtgtcttttatgaataatcaaaagcagcaaaagccaacgctatcaggccagcgttttaaaactagaaaaagagatgaaaaagagaggtttgaccctactcagtttcaagactgtattattcaaggcttaactgaaaccggtactgatttggaagcagtagctaagtttcttgatgcttctggagcaaaacttgattaccgtcgatatgcagaaacactctttgacattctggtggctggtggaatgctggccccaggtggtacactggcagatgacatgatgcgtacagatgtctgcgtgtttgcagcccaagaagatctagagaccatgcaagcatttgctcaggtttttaacaagttaatcaggcgctacaaatacctggagaaaggttttgaagatgaagtaaaaaagctgctgctgttcttgaagggtttttcagagtcggagaggaacaagctagctatgttgactggtgttcttctggctaatggaacacttaatgcatccattcttaatagcctttataatgaaaatttggttaaagaaggagtttcagcagcttttgctgtgaagctctttaaatcatggataaatgaaaaagatatcaatgcagtagctgcaagtcttcggaaagtcagcatggataacagactgatggaactctttcctgccaataagcaaagtgttgaacacttcacaaaatattttactgaggcaggcttgaaagagctttcagaatatgttcggaatcagcaaaccatcggagctcgtaaggagctccagaaagaacttcaagaacagatgtcccgtggtgatccatttaaggatataattttatatgtcaaggaggagatgaaaaaaaacaacatcccagagccagttgtcatcggaatagtctggtcaagtgtaatgagcactgtggaatggaacaaaaaagaggagcttgtagcagagcaagccatcaagcacttgaagcaatacagccctctacttgctgcctttactactcaaggtcagtctgagctgactctgttactgaagattcaggagtattgctatgacaacattcatttcatgaaagccttccagaaaatagtggtgcttttttataaagctgaagtcctgagcgaggagcccattttgaagtggtataaagatgcacatgttgcaaaggggaagagtgttttccttgagcaaatgaaaaagtttgtagaatggctcaaaaatgctgaagaagaatctgaatctgaagctgaagaaggtgactgaattttgaaactacaccctcagtaaagcaaacaggagttgtagataaaatgtcatgtctcatgtgtcctggttcttacatcttcctacctccctgtatcaagcatgatataagggctttcatggcaaattttattttaactgtttctatggttgctggaaatgttgggtttagtttctaaaaccatgttttaagtagctacaggagctatagatttgaatctaatgttgcattagtcttttcagttatcttctacctcctgtattttctactgtaataatgtaatttaaggccttccacaatgaacagttcactttattccctgggttttctataaacagttttaaggatatgatttggttaaaaaataatttgttataaaaattctgtttgcaaattaaactggaaaagtatccagagtctcaaaaggcaatgatttgtgagataatatggcatgcccggagccctgctcatcaatgaaaaacccatatgtaataatcgaattcatttaacatgaatcttgagtacgtggaccattgcttgcatgttaactttttgtttgttttgttttgttttgttttgcatttttaactccagatatcctaaagctcaattgtttggtctctggttttcatccttagagaagccatggagaacagacttgaaaagtttaggaaatcataatgtggcagaggtggtgggaagaagaaagttgagctttttccccttgagaaacttctgcatttagtttctatctttccaggcaaaacaaatgggtattcttttcatacaaccattttcaaatgaaccttagaaaagtcttaacatttaaggtattttatgcacagaatacacttagattgataggaaagaactcgtaatggagtttgagtaaagaaaatgactgatgtactaaacccagtaatttcctattggcttagagtatttgctataacaaatgaagtgcaatgacaattatatattcctactcggtcatactggactggcttcgttctcttaatatactcagtaatgactcaagcctctggctattaacataccctagttgccgttttttaattgccatgagccaaatacttcttggtatacaattgatccatttattttaatggctgccttttcattttcatcttttcttgctgctacccatctatgtatgtagtcattggggggaaaatgtagccacattttttatgggaagactttgtgttaaaagtgaacattttgaaggtttttaactggtgaaactagcctggaataatgccaccagagactgagtggaaatcgccccttttgaaggtgccattcttatgagccaaaagtttgtcatttaaaagttcattttgagggaataacatgtaatataatttgaaataaaggtatagtaaccttaaaaagaacattataactgattgttgtgaatggggtgaatttgttaaaatgagtaactttgataaagtttttcatgcacaggcaaaatgtattcactagatttctacgtagtgatctgcttttactttgtaatttgtagttctcaaaagacttttttttaaaaaaataaagtccatacttacact

SEQ ID NO: 372848 - DNA, 2696 bp, Homo sapiens
agtggtagactagggagattggagaagtgataaactgtggcccaggaaagttcagggttaagtttgtgaggaaagtcagtaatcccatgtgattgaactatgaagggaaggatatagggggacacagtgattgaaaccagggaaggtacttctgttaattaagctattttcttttacaggagtttcagcagcttttgctgtgaagctctttaaatcatggataaatgaaaaagatatcaatgcagtagctgcaagtcttcggaaagtcagcatggataacagactgatggttggtaactttttttcattcttcccattcttgccaaggatgtaaatgagagaaatttctcatttttaagactgtgaaaagaaagtgtttttcttaatctgatttaaagaaagtttaaccagataaattcttcttttaggaactctttcctgccaataagcaaagtgttgaacacttcacaaaatattttactgaggcaggcttgaaagagctttcagaatatgttcggaatcagcaaaccatcggagctcgtaaggagctccagaaagaacttcaagaacagatgtcccgtggtgatccatttaaggatataattttatatgtcaaggaggagatgaaaaaaaacaacatcccagagccagttgtcatcggaatagtctggtcaagtgtaatgagcactgtggaatggaacaaaaaagaggagcttgtagcagagcaagccatcaagcacttgaagcaatacagccctctacttgctgcctttactactcaaggtcagtctgagctgactctgttactgaagattcaggagtattgctatgacaacattcatttcatgaaagccttccagaaaatagtggtgcttttttataaagctgaagtcctgagcgaggagcccattttgaagtggtataaagatgcacatgttgcaaaggggaagagtgttttccttgagcaaatgaaaaagtttgtagaatggctcaaaaatgctgaagaagaatctgaatctgaagctgaagaaggtgactgaattttgaaactacaccctcagtaaagcaaacaggagttgtagataaaatgtcatgtctcatgtgtcctggttcttacatcttcctacctccctgtatcaagcatgatataagggctttcatggcaaattttattttaactgtttctatggttgctggaaatgttgggtttagtttctaaaaccatgttttaagtagctacaggagctatagatttgaatctaatgttgcattagtcttttcagttatcttctacctcctgtattttctactgtaataatgtaatttaaggccttccacaatgaacagttcactttattccctgggttttctataaacagttttaaggatatgatttggttaaaaaataatttgttataaaaattctgtttgcaaattaaactggaaaagtatccagagtctcaaaaggcaatgatttgtgagataatatggcatgcccggagccctgctcatcaatgaaaaacccatatgtaataatcgaattcatttaacatgaatcttgagtacgtggaccattgcttgcatgttaactttttgtttgttttgttttgttttgttttgcatttttaactccagatatcctaaagctcaattgtttggtctctggttttcatccttagagaagccatggagaacagacttgaaaagtttaggaaatcataatgtggcagaggtggtgggaagaagaaagttgagctttttccccttgagaaacttctgcatttagtttctatctttccaggcaaaacaaatgggtattcttttcatacaaccattttcaaatgaaccttagaaaagtcttaacatttaaggtattttatgcacagaatacacttagattgataggaaagaactcgtaatggagtttgagtaaagaaaatgactgatgtactaaacccagtaaaaattgttgaaaatgttaaaggtcagcatgttctaattgggaatctagatatagcttagatttcctattggcttagagtatttgctataacaaatgaagtgcaatgacaattatatattcctactcggtcatactggactggcttcgttctcttaatatactcagtaatgactcaagcctctggctattaacataccctagttgccgttttttaattgccatgagccaaatacttcttggtatacaattgatccatttattttaatggctgccttttcattttcatcttttcttgctgctacccatctatgtatgtagtcattggggggaaaatgtagccacattttttatgggaagactttgtgttaaaagtgaacattttgaaggtttttaactggtgaaactagcctggaataatgccaccagagactgagtggaaatcgccccttttgaaggtgccattcttatgagccaaaagtttgtcatttaaaagttcattttgagggaataacatgtaatataatttgaaataaaggtatagtaaccttaaaaagaacattataactgattgttgtgaatggggtgaatttgttaaaatgagtaactttgataaagtttttcatgcacaggcaaaatgtattcactagatttctacgtagtgatctgcttttactttgtaatttgtagttctcaaaagacttttttttaaaaaaataaagtccatacttacact

SEQ ID NO: 372849 - DNA, 2535 bp, Homo sapiens
cttccggtgcgggaggagggggccggcggcgagggactccaggaggacgcgtccaacttcgagaccggcgggggccggctccgctcttccaacccctccatgtgtgaagagggcggacgacgcagcgggggaagaaaaataagctagtctaggacaagtgtccaggcgacgtggaacccagtaagggaataaagaagactggaaacgtctctcccctcccctatcccagtccctcaccctaatccgcgcgcaatagaaaaggcggaagcgcctgtccacgatcagggcggggcaaggggaagaaatctcgcgataggagagcggtccgggcgggggtggcacctctccctcctcctggcgttagttccggtcgcagaggagacaccgccgcagttgccggtacatcggggatttctggctctttcctcttcgccttaaattcgggtgtcttttatgaataatcaaaagcagcaaaagccaacgctatcaggccagcgttttaaaactagaaaaagagatgaaaaagagaggtttgaccctactcagtttcaagactgtattattcaaggcttaactgaaaccggtactgatttggaagcagtagctaagtttcttgatgcttctggagcaaaacttgattaccgtcgatatgcagaaacactctttgacattctggtggctggtggaatgctggccccaggtggtacactggcagatgacatgatgcgtacagatgtctgcgtgtttgcagcccaagaagatctagagaccatgcaagcatttgctcaggtttttaacaagttaatcaggcgctacaaatacctggagaaaggttttgaagatgaagtaaaaaagctgctgctgttcttgaagggtttttcagagtcggagaggaacaagctagctatgttgactggtgttcttctggctaatggaacacttaatgcatccattcttaatagcctttataatgaaaatttggttaaagaaggagtttcagcagcttttgctgtgaagctctttaaatcatggataaatgaaaaagatatcaatgcagtagctgcaagtcttcggaaagtcagcatggataacagactgatggaactctttcctgccaataagcaaagtgttgaacacttcacaaaatattttactgaggcaggcttgaaagagctttcagaatatgttcggaatcagcaaaccatcggagctcgtaaggagctccagaaagaacttcaagaacagatgtcccgtggtgatccatttaaggatataattttatatgtcaaggaggagatgaaaaaaaacaacatcccagagccagttgtcatcggaatagtctggtcaagtgtaatgagcactgtggaatggaacaaaaaagaggagcttgtagcagagcaagccatcaagcacttgaagcaatacagccctctacttgctgcctttactactcaaggtcagtctgagctgactctgttactgaagattcaggagtattgctatgacaacattcatttcatgaaagccttccagaaaatagtggtgcttttttataaagctgaagtcctgagcgaggagcccattttgaagtggtataaagatgcacatgttgcaaaggggaagagtgttttccttgagcaaatgaaaaagtttgtagaatggctcaaaaatgctgaagaagaatctgaatctgaagctgaagaaggtgactgaattttgaaactacaccctcagtaaagcaaacaggagttgtagataaaatgtcatgtctcatgtgtcctggttcttacatcttcctacctccctgtatcaagcatgatataagggctttcatggcaaattttattttaactgtttctatggttgctggaaatgttgggtttagtttctaaaaccatgttttaagtagctacaggagctatagatttgaatctaatgttgcattagtcttttcagttatcttctacctcctgtattttctactgtaataatgtaatttaaggccttccacaatgaacagttcactttattccctgggttttctataaacagttttaaggatatgatttggttaaaaaataatttgttataaaaattctgtttgcaaattaaactggaaaaaaaaaaaaaaaaaaaaaaaaaaaaagaaaaaaaaaaaaaaaaaaaaaaagaaaaaaaaaaaaaaaaaaaaagaaaaaaaaaagggggggggggcggaaaaaaaatagggggggggagtggcacaaagcaacgtcgttggaaacaggggagcccaccaaagaagagagggaaactatagaagagggcagcggagccgcggaaaaacaccacggagaggaagaaaaagcgcacagcgagcttatcctgaaggagacacacaacccacactggggggaggagaaacaggaggaacaaaaacacgatagcagagaaataggcggcggcggacgacaaaacaaaagatcggcgtggtgaggggaaccacaccacgctaatgccgtgcgagaactgcgagacggaagtaataaaaatcac

SEQ ID NO: 372850 - DNA, 2175 bp, Homo sapiens
cttccggtgcgggaggagggggccggcggcgagggactccaggaggacgcgtccaacttcgagaccggcgggggccggctccgctcttccaacccctccatgtgtgaagagggcggacgacgcagcgggggaagaaaaataagctagtctaggacaagtgtccaggcgacgtggaacccagtaagggaataaagaagactggaaacgtctctcccctcccctatcccagtccctcaccctaatccgcgcgcaatagaaaaggcggaagcgcctgtccacgatcagggcggggcaaggggaagaaatctcgcgataggagagcggtccgggcgggggtggcacctctccctcctcctggcgttagttccggtcgcagaggagacaccgccgcagttgccggtacatcggggatttctggctctttcctcttcgccttaaattcgggtgtcttttatgaataatcaaaagcagcaaaagccaacgctatcaggccagcgttttaaaactagaaaaagagatgaaaaagagaggtttgaccctactcagtttcaagactgtattattcaaggcttaactgaaaccggtactgatttggaagcagtagctaagtttcttgatgcttctggagcaaaacttgattaccgtcgatatgcagaaacactctttgacattctggtggctggtggaatgctggccccaggtggtacactggcagatgacatgatgcgtacagatgtctgcgtgtttgcagcccaagaagatctagagaccatgcaagcatttgctcaggtttttaacaagttaatcaggcgctacaaatacctggagaaaggttttgaagatgaagtaaaaaagctgctgctgttcttgaagggtttttcagagtcggagaggaacaagctagctatgttgactggtgttcttctggctaatggaacacttaatgcatccattcttaatagcctttataatgaaaatttggttaaagaaggagtttcagcagcttttgctgtgaagctctttaaatcatggataaatgaaaaagatatcaatgcagtagctgcaagtcttcggaaagtcagcatggataacagactgatggaactctttcctgccaataagcaaagtgttgaacacttcacaaaatattttactgaggcaggcttgaaagagctttcagaatatgttcggaatcagcaaaccatcggagctcgtaaggagctccagaaagaacttcaagaacagatgtcccgtggtgatccatttaaggatataattttatatgtcaaggaggagatgaaaaaaaacaacatcccagagccagttgtcatcggaatagtctggtcaagtgtaatgagcactgtggaatggaacaaaaaagaggagcttgtagcagagcaagccatcaagcacttgaagcaatacagccctctacttgctgcctttactactcaaggtcagtctgagctgactctgttactgaagattcaggagtattgctatgacaacattcatttcatgaaagccttccagaaaatagtggtgcttttttataaagctgaagtcctgagcgaggagcccattttgaagtggtataaagatgcacatgttgcaaaggggaagagtgttttccttgagcaaatgaaaaagtttgtagaatggctcaaaaatgctgaagaagaatctgaatctgaagctgaagaaggtgactgaattttgaaactacaccctcagtaaagcaaacaggagttgtagataaaatgtcatgtctcatgtgtcctggttcttacatcttcctacctccctgtatcaagcatgatataagggctttcatggcaaattttattttaactgtttctatggttgctggaaatgttgggtttagtttctaaaaccatgttttaagtagctacaggagctatagatttgaatctaatgttgcattagtcttttcagttatcttctacctcctgtattttctactgtaataatgtaatttaaggccttccacaatgaacagttcactttattccctgggttttctataaacagttttaaggatatgatttggttaaaaaataatttgttataaaaattctgtttgcaaattaaactggaacatgcaagcaatggtccacgtacatcaagattcatgttaaatgaattcggtcgagc

SEQ ID NO: 372851 - DNA, 1623 bp, Homo sapiens
cttccggtgcgggaggagggggccggcggcgagggactccaggaggacgcgtccaacttcgagaccggcgggggccggctccgctcttccaacccctccatgtgtgaagagggcggacgacgcagcgggggaagaaaaataagctagtctaggacaagtgtccaggcgacgtggaacccagtaagggaataaagaagactggaaacgtctctcccctcccctatcccagtccctcaccctaatccgcgcgcaatagaaaaggcggaagcgcctgtccacgatcagggcggggcaaggggaagaaatctcgcgataggagagcggtccgggcgggggtggcacctctccctcctcctggcgttagttccggtcgcagaggagacaccgccgcagttgccggtacatcggggatttctggctctttcctcttcgccttaaattcgggtgtcttttatgaataatcaaaagcagcaaaagccaacgctatcaggccagcgttttaaaactagaaaaagagatgaaaaagagaggtttgaccctactcagtttcaagactgtattattcaaggcttaactgaaaccggtactgatttggaagcagtagctaagtttcttgatgcttctggagcaaaacttgattaccgtcgatatgcagaaacactctttgacattctggtggctggtggaatgctggccccaggtggtacactggcagatgacatgatgcgtacagatgtctgcgtgtttgcagcccaagaagatctagagaccatgcaagcatttgctcaggtttttaacaagttaatcaggcgctacaaatacctggagaaaggttttgaagatgaagtaaaaaagctgctgctgttcttgaagggtttttcagagtcggagaggaacaagctagctatgttgactggtgttcttctggctaatggaacacttaatgcatccattcttaatagcctttataatgaaaatttggttaaagaaggagtttcagcagcttttgctgtgaagctctttaaatcatggataaatgaaaaagatatcaatgcagtagctgcaagtcttcggaaagtcagcatggataacagactgatggaactctttcctgccaataagcaaagtgttgaacacttcacaaaatattttactgaggcaggcttgaaagagctttcagaatatgttcggaatcagcaaaccatcggagctcgtaaggagctccagaaagaacttcaagaacagatgtcccgtggtgatccatttaaggatataattttatatgtcaaggaggagatgaaaaaaaacaacatcccagagccagttgtcatcggaatagtctggtcaagtgtaatgagcactgtggaatggaacaaaaaagaggagcttgtagcagaggagctggatgaaatgtgtctgtagaggaggagctggatgaaatgtgtctgtagaggaggagctggatggaatgtgtctagagggaggagctggatgaaaggtgtcggtagaggaggagctggatggaatgtcctgtagaggaggagctggatgaaatgtgtctgtgggaggaggagctggatgaaatgaaatgtgtctgtcgaggaggagctggatgaaatgtgt

SEQ ID NO: 372852 - DNA, 1048 bp, Homo sapiens
  misc_feature (129)..(129): n is a, c, g, or t
  misc_feature (132)..(132): n is a, c, g, or t
  misc_feature (139)..(141): n is a, c, g, or t
tcccccttcacctcattaatcgagacccctatggttgtgtggttcttacccattcaagcatgtggggtttactagaacccgagcaactgaagttagattaaattgcaggggtggaaagaaatgcctttnccngaaattnnncatactttccaggcaaaacaaatgggtattcttttcatacaaccattttcaaatgaaccttagaaaagtcttaacatttaaggtattttatgcacagaatacacttagattgataggaaagaactcgtaatggagtttgagtaaagaaaatgactgatgtactaaacccagtaaaaattgttgaaaatgttaaaggtcagcatgttctaattgggaatctagatatagcttagatttcctattggcttagagtatttgctataacaaatgaagtgcaatgacaattatatattcctactcggtcatactggactggcttcgttctcttaatatactcagtaatgactcaagcctctggctattaacataccctagttgccgttttttaattgccatgagccaaatacttcttggtatacaattgatccatttattttaatggctgccttttcattttcatcttttcttgctgctacccatctatgtatgtagtcattggggggaaaatgtagccacattttttatgggaagactttgtgttaaaagtgaacattttgaaggtttttaactggtgaaactagcctggaataatgccaccagagactgagtggaaatcgccccttttgaaggtgccattcttatgagccaaaagtttgtcatttaaaagttcattttgagggaataacatgtaatataatttgaaataaaggtatagtaaccttaaaaagaacattataactgattgttgtgaatggggtgaatttgttaaaatgagtaactttgataaagtttttcatgcacaggcaaaatgtattcactagatttctacgtagtgatctgcttttactttgtaatttgtagttctcaaaagacttttttttaaaaaaataaagtccatacttacact

SEQ ID NO: 372853 - DNA, 905 bp, Homo sapiens
cggacgcgtgggctgatgtactaaacccagtcattttctttactcaaactccattacgagttctttcctatcaatttaaggtattttatgcacagaatacacttagattgataggaaagaactcgtaatggagtttgagtaaagaaaatgactgatgtactaaacccagtaaaaattgttgaaaatgttaaaggtcagcatgttctaattgggaatctagatatagcttagatttcctattggcttagagtatttgctataacaaatgaagtgcaatgacaattatatattcctactcggtcatactggactggcttcgttctcttaatatactcagtaatgactcaagcctctggctattaacataccctagttgccgttttttaattgccatgagccaaatacttcttggtatacaattgatccatttattttaatggctgccttttcattttcatcttttcttgctgctacccatctatgtatgtagtcattggggggaaaatgtagccacattttttatgggaagactttgtgttaaaagtgaacattttgaaggtttttaactggtgaaactagcctggaataatgccaccagagactgagtggaaatcgccccttttgaaggtgccattcttatgagccaaaagtttgtcatttaaaagttcattttgagggaataacatgtaatataatttgaaataaaggtatagtaaccttaaaaagaacattataactgattgttgtgaatggggtgaatttgttaaaatgagtaactttgataaagtttttcatgcacaggcaaaatgtattcactagatttctacgtagtgatctgcttttactttgtaatttgtagttctcaaaagacttttttttaaaaaaataaagtccatacttacact

SEQ ID NO: 372854 - DNA, 1063 bp, Homo sapiens
cttccggtgcgggaggagggggccggcggcgagggactccaggaggacgcgtccaacttcgagaccggcgggggccggctccgctcttccaacccctccatgtgtgaagagggcggacgacgcagcgggggaagaaaaataagctagtctaggacaagtgtccaggcgacgtggaacccagtaagggaataaagaagactggaaacgtctctcccctcccctatcccagtccctcaccctaatccgcgcgcaatagaaaaggcggaagcgcctgtccacgatcagggcggggcaaggggaagaaatctcgcgataggagagcggtccgggcgggggtggcacctctccctcctcctggcgttagttccggtcgcagaggagacaccgccgcagttgccggtacatcggggatttctggctctttcctcttcgccttaaattcgggtgtcttttatgaataatcaaaagcagcaaaagccaacgctatcaggccagcgttttaaaactagaaaaagagatgaaaaagagaggtttgaccctactcagtttcaagactgtattattcaaggcttaactgaaaccggtactgatttggaagcagtagctaagtttcttgatgcttctggagcaaaacttgattaccgtcgatatgcagaaacactctttgacattctggtggctggtggaatgctggccccaggtggtacactggcagatgacatgatgcgtacagatgtctgcgtgtttgcagcccaagaagatctagagaccatgcaagcatttgctcaggtttttaacaagttaatcaggcgctacaaatacctggagaaaggttttgaagatgaagtaaaaaagctgctgctgttcttgaagggtttttcagagtcggagaggaacaagctagctatgttgactggtgttcttctggctaatggaacacttaatgcatccattcttaatagcctttataatgaaaatttggttaaagaaggggttccgagagattgggggggaagcctttaatcggggtagggaagaatttagcggaaggcagatcttaata

SEQ ID NO: 372855 - DNA, 742 bp, Homo sapiens
cttccggtgcgggaggagggggccggcggcgagggactccaggaggacgcgtccaacttcgagaccggcgggggccggctccgctcttccaacccctccatgtgtgaagagggcggacgacgcagcgggggaagaaaaataagctagtctaggacaagtgtccaggcgacgtggaacccagtaagggaataaagaagactggaaacgtctctcccctcccctatcccagtccctcaccctaatccgcgcgcaatagaaaaggcggaagcgcctgtccacgatcagggcggggcaaggggaagaaatctcgcgataggagagcggtccgggcgggggtggcacctctccctcctcctggcgttagttccggtcgcagaggagacaccgccgcagttgccggtacatcggggatttctggctctttcctcttcgccttaaattcgggtgtcttttatgaataatcaaaagcagcaaaagccaacgctatcaggccagcgttttaaaactagaaaaagagatgaaaaagagaggtttgaccctactcagtttcaagactgtattattcaaggcttaactgaaaccggtactgatttggaagcagtagctaagtttcttgatgcttctggagccccgaatgccgtccccagctcccacactgttatatgatacgaccccgaccgacgcctgctcgccccagcccacgccccacaagtccacctgcacgccctcgctccagccccac

SEQ ID NO: 372856 - DNA, 553 bp, Homo sapiens
ttttctctgttcctttaaaagcaatacagccctctacttgctgcctttactactcaaggtcagtctgagctgactctgttactgaagattcaggagtattgctatgacaacattcatttcatgaaagccttccagaaaatagtggtgcttttttataaaggtaatttagattttgaattttgtaaataacacttaataaaaacccttataaacacaaaattatccaaatgatgagttatctggacatcagctccctgaaatattttacttctagttatgagtcacctctgattaaattgggtgctttttagtgcactgatacttgtttaaaacatctaaaccctattcacaagttgaagtatgaaatctaaagccatcattatgcgtcctcaaacttgcctcctatactcttaaccaggtatacattcccaaagttcagctaggtgtggtggctcatacttgtgaccccaacactttgggagcctgaggctggaggatcgcttgagcccaagagttcaagaccggcctggactgcataaggagacctcatctc

SEQ ID NO: 372857 - DNA, 405 bp, Homo sapiens
gtttttttccccttttctagaatctgaatctgaagctgaagaaggtgactgaattttgaaactacaccctcagtaaagcaaacaggagttgtagataaaatgtcatgtctcatgtgtcctggttcttacatcttcctacctccctgtatcaagcatgatataagggctttcatggcaaattttattttaactgtttctatggttgctggaaatgttgggtttagtttctaaaaccatgttttaagtagctacaggagctatagatttgaatctaatgttgcattagtcttttcagttatcttctacctcctgtattttctactgtaataatgtaatttaaggccttccacaatgaacagttcactttattccctgggttttctataaacagttttaaggatatga

SEQ ID NO: 372858 - DNA, 3369 bp, Homo sapiens
cttccggtgcgggaggagggggccggcggcgagggactccaggaggacgcgtccaacttcgagaccggcgggggccggctccgctcttccaacccctccatgtgtgaagagggcggacgacgcagcgggggaagaaaaataagctagtctaggacaagtgtccaggcgacgtggaacccagtaagggaataaagaagactggaaacgtctctcccctcccctatcccagtccctcaccctaatccgcgcgcaatagaaaaggcggaagcgcctgtccacgatcagggcggggcaaggggaagaaatctcgcgataggagagcggtccgggcgggggtggcacctctccctcctcctggcgttagttccggtcgcagaggagacaccgccgcagttgccggtacatcggggatttctggctctttcctcttcgccttaaattcgggtgtcttttatgaataatcaaaagcagcaaaagccaacgctatcaggccagcgttttaaaactagaaaaagagatgaaaaagagaggtttgaccctactcagtttcaagactgtattattcaaggcttaactgaaaccggtactgatttggaagcagtagctaagtttcttgatgcttctggagcaaaacttgattaccgtcgatatgcagaaacactctttgacattctggtggctggtggaatgctggccccaggtggtacactggcagatgacatgatgcgtacagatgtctgcgtgtttgcagcccaagaagatctagagaccatgcaagcatttgctcaggtttttaacaagttaatcaggcgctacaaatacctggagaaaggttttgaagatgaagtaaaaaagctgctgctgttcttgaagggtttttcagagtcggagaggaacaagctagctatgttgactggtgttcttctggctaatggaacacttaatgcatccattcttaatagcctttataatgaaaatttggttaaagaaggagtttcagcagcttttgctgtgaagctctttaaatcatggataaatgaaaaagatatcaatgcagtagctgcaagtcttcggaaagtcagcatggataacagactgatggaactctttcctgccaataagcaaagtgttgaacacttcacaaaatattttactgaggcaggcttgaaagagctttcagaatatgttcggaatcagcaaaccatcggagctcgtaaggagctccagaaagaacttcaagaacagatgtcccgtggtgatccatttaaggatataattttatatgtcaaggaggagatgaaaaaaaacaacatcccagagccagttgtcatcggaatagtctggtcaagtgtaatgagcactgtggaatggaacaaaaaagaggagcttgtagcagagcaagccatcaagcacttgaagcaatacagccctctacttgctgcctttactactcaaggtcagtctgagctgactctgttactgaagattcaggagtattgctatgacaacattcatttcatgaaagccttccagaaaatagtggtgcttttttataaagctgaagtcctgagcgaggagcccattttgaagtggtataaagatgcacatgttgcaaaggggaagagtgttttccttgagcaaatgaaaaagtttgtagaatggctcaaaaatgctgaagaagaatctgaatctgaagctgaagaaggtgactgaattttgaaactacaccctcagtaaagcaaacaggagttgtagataaaatgtcatgtctcatgtgtcctggttcttacatcttcctacctccctgtatcaagcatgatataagggctttcatggcaaattttattttaactgtttctatggttgctggaaatgttgggtttagtttctaaaaccatgttttaagtagctacaggagctatagatttgaatctaatgttgcattagtcttttcagttatcttctacctcctgtattttctactgtaataatgtaatttaaggccttccacaatgaacagttcactttattccctgggttttctataaacagttttaaggatatgatttggttaaaaaataatttgttataaaaattctgtttgcaaattaaactggaaaagtatccagagtctcaaaaggcaatgatttgtgagataatatggcatgcccggagccctgctcatcaatgaaaaacccatatgtaataatcgaattcatttaacatgaatcttgagtacgtggaccattgcttgcatgttaactttttgtttgttttgttttgttttgttttgcatttttaactccagatatcctaaagctcaattgtttggtctctggttttcatccttagagaagccatggagaacagacttgaaaagtttaggaaatcataatgtggcagaggtggtgggaagaagaaagttgagctttttccccttgagaaacttctgcatttagtttctatctttccaggcaaaacaaatgggtattcttttcatacaaccattttcaaatgaaccttagaaaagtcttaacatttaaggtattttatgcacagaatacacttagattgataggaaagaactcgtaatggagtttgagtaaagaaaatgactgatgtactaaacccagtaaaaattgttgaaaatgttaaaggtcagcatgttctaattgggaatctagatatagcttagatttcctattggcttagagtatttgctataacaaatgaagtgcaatgacaattatatattcctactcggtcatactggactggcttcgttctcttaatatactcagtaatgactcaagcctctggctattaacataccctagttgccgttttttaattgccatgagccaaatacttcttggtatacaattgatccatttattttaatggctgccttttcattttcatcttttcttgctgctacccatctatgtatgtagtcattggggggaaaatgtagccacattttttatgggaagactttgtgttaaaagtgaacattttgaaggtttttaactggtgaaactagcctggaataatgccaccagagactgagtggaaatcgccccttttgaaggtgccattcttatgagccaaaagtttgtcatttaaaagttcattttgagggaataacatgtaatataatttgaaataaaggtatagtaaccttaaaaagaacattataactgattgttgtgaatggggtgaatttgttaaaatgagtaactttgataaagtttttcatgcacaggcaaaatgtattcactagatttctacgtagtgatctgcttttactttgtaatttgtagttctcaaaagacttttttttaaaaaaataaagtccatacttacact

SEQ ID NO: 372859 - DNA, 3171 bp, Homo sapiens
cttccggtgcgggaggagggggccggcggcgagggactccaggaggacgcgtccaacttcgagaccggcgggggccggctccgctcttccaacccctccatgtgtgaagagggcggacgacgcagcgggggaagaaaaataagctagtctaggacaagtgtccaggcgacgtggaacccagtaagggaataaagaagactggaaacgtctctcccctcccctatcccagtccctcaccctaatccgcgcgcaatagaaaaggcggaagcgcctgtccacgatcagggcggggcaaggggaagaaatctcgcgataggagagcggtccgggcgggggtggcacctctccctcctcctggcgttagttccggtcgcagaggagacaccgccgcagttgccggtacatcggggatttctggctctttcctcttcgccttaaattcgggtgtcttttatgaataatcaaaagcagcaaaagccaacgctatcaggccagcgttttaaaactagaaaaagagatgaaaaagagaggtttgaccctactcagtttcaagactgtattattcaaggcttaactgaaaccggtactgatttggaagcagtagctaagtttcttgatgcttctggagcaaaacttgattaccgtcgatatgcagaaacactctttgacattctggtggctggtggaatgctggccccaggtggtacactggcagatgacatgatgcgtacagatgtctgcgtgtttgcagcccaagaagatctagagaccatgcaagcatttgctcaggtttttaacaagttaatcaggcgctacaaatacctggagaaaggttttgaagatgaagtaaaaaagctgctgctgttcttgaagggtttttcagagtcggagaggaacaagctagctatgttgactggtgttcttctggctaatggaacacttaatgcatccattcttaatagcctttataatgaaaatttggttaaagaaggagtttcagcagcttttgctgtgaagctctttaaatcatggataaatgaaaaagatatcaatgcagtagctgcaagtcttcggaaagtcagcatggataacagactgatggaactctttcctgccaataagcaaagtgttgaacacttcacaaaatattttactgaggcaggcttgaaagagctttcagaatatgttcggaatcagcaaaccatcggagctcgtaaggagctccagaaagaacttcaagaacagatgtcccgtggtgatccatttaaggatataattttatatgtcaaggaggagatgaaaaaaaacaacattcatttcatgaaagccttccagaaaatagtggtgcttttttataaagctgaagtcctgagcgaggagcccattttgaagtggtataaagatgcacatgttgcaaaggggaagagtgttttccttgagcaaatgaaaaagtttgtagaatggctcaaaaatgctgaagaagaatctgaatctgaagctgaagaaggtgactgaattttgaaactacaccctcagtaaagcaaacaggagttgtagataaaatgtcatgtctcatgtgtcctggttcttacatcttcctacctccctgtatcaagcatgatataagggctttcatggcaaattttattttaactgtttctatggttgctggaaatgttgggtttagtttctaaaaccatgttttaagtagctacaggagctatagatttgaatctaatgttgcattagtcttttcagttatcttctacctcctgtattttctactgtaataatgtaatttaaggccttccacaatgaacagttcactttattccctgggttttctataaacagttttaaggatatgatttggttaaaaaataatttgttataaaaattctgtttgcaaattaaactggaaaagtatccagagtctcaaaaggcaatgatttgtgagataatatggcatgcccggagccctgctcatcaatgaaaaacccatatgtaataatcgaattcatttaacatgaatcttgagtacgtggaccattgcttgcatgttaactttttgtttgttttgttttgttttgttttgcatttttaactccagatatcctaaagctcaattgtttggtctctggttttcatccttagagaagccatggagaacagacttgaaaagtttaggaaatcataatgtggcagaggtggtgggaagaagaaagttgagctttttccccttgagaaacttctgcatttagtttctatctttccaggcaaaacaaatgggtattcttttcatacaaccattttcaaatgaaccttagaaaagtcttaacatttaaggtattttatgcacagaatacacttagattgataggaaagaactcgtaatggagtttgagtaaagaaaatgactgatgtactaaacccagtaaaaattgttgaaaatgttaaaggtcagcatgttctaattgggaatctagatatagcttagatttcctattggcttagagtatttgctataacaaatgaagtgcaatgacaattatatattcctactcggtcatactggactggcttcgttctcttaatatactcagtaatgactcaagcctctggctattaacataccctagttgccgttttttaattgccatgagccaaatacttcttggtatacaattgatccatttattttaatggctgccttttcattttcatcttttcttgctgctacccatctatgtatgtagtcattggggggaaaatgtagccacattttttatgggaagactttgtgttaaaagtgaacattttgaaggtttttaactggtgaaactagcctggaataatgccaccagagactgagtggaaatcgccccttttgaaggtgccattcttatgagccaaaagtttgtcatttaaaagttcattttgagggaataacatgtaatataatttgaaataaaggtatagtaaccttaaaaagaacattataactgattgttgtgaatggggtgaatttgttaaaatgagtaactttgataaagtttttcatgcacaggcaaaatgtattcactagatttctacgtagtgatctgcttttactttgtaatttgtagttctcaaaagacttttttttaaaaaaataaagtccatacttacact

SEQ ID NO: 372860 - DNA, 3561 bp, Homo sapiens
cttccggtgcgggaggagggggccggcggcgagggactccaggaggacgcgtccaacttcgagaccggcgggggccggctccgctcttccaacccctccatgtgtgaagagggcggacgacgcagcgggggaagaaaaataagctagtctaggacaagtgtccaggcgacgtggaacccagtaagggaataaagaagactggaaacgtctctcccctcccctatcccagtccctcaccctaatccgcgcgcaatagaaaaggcggaagcgcctgtccacgatcagggcggggcaaggggaagaaatctcgcgataggagagcggtccgggcgggggtggcacctctccctcctcctggcgttagttccggtcgcagaggagacaccgccgcagttgccggtacatcggggatttctggctctttcctcttcgccttaaattcgggtgtcttttatgaataatcaaaagcagcaaaagccaacgctatcaggccagcgttttaaaactagaaaaagagatgaaaaagagaggtttgaccctactcagtttcaagactgtattattcaaggcttaactgaaaccggtactgatttggaagcagtagctaagtttcttgatgcttctggagcaaaacttgattaccgtcgatatgcagaaacactctttgacattctggtggctggtggaatgctggccccaggtggtacactggcagatgacatgatgcgtacagatgtctgcgtgtttgcagcccaagaagatctagagaccatgcaagcatttgctcaggtttttaacaagttaatcaggcgctacaaatacctggagaaaggttttgaagatgaagtaaaaaagctgctgctgttcttgaagggtttttcagagtcggagaggaacaagctagctatgttgactggtgttcttctggctaatggaacacttaatgcatccattcttaatagcctttataatgaaaatttggttaaagaaggagtttcagcagcttttgctgtgaagctctttaaatcatggataaatgaaaaagatatcaatgcagtagctgcaagtcttcggaaagtcagcatggataacagactgatggaactctttcctgccaataagcaaagtgttgaacacttcacaaaatattttactgaggcaggcttgaaagagctttcagaatatgttcggaatcagcaaaccatcggagctcgtaaggagctccagaaagaacttcaagaacagatgtcccgtggtgatccatttaaggatataattttatatgtcaaggaggagatgaaaaaaaacaacatcccagagccagttgtcatcggaatagtctggtcaagtgtaatgagcactgtggaatggaacaaaaaagaggagcttgtagcagagcaagccatcaagcacttgaagcaatacagccctctacttgctgcctttactactcaaggtcagtctgagctgactctgttactgaagattcaggagtattgctatgacaacattcatttcatgaaagccttccagaaaatagtggtgcttttttataaagctgaagtcctgagcgaggagcccattttgaagtggtataaagatgcacatgttgcaaaggggaagagtgttttccttgagcaaatgaaaaagtttgtagaatggctcaaaaatgctgaagaagaatctgaatctgaagctgaagaaggtgactgaattttgaaactacaccctcagtaaagcaaacaggagttgtagataaaatgtcatgtctcatgtgtcctggttcttacatcttcctacctccctgtatcaagcatgatataagggctttcatggcaaattttattttaactgtttctatggttgctggaaatgttgggtttagtttctaaaaccatgttttaagtagctacaggagctatagatttgaatctaatgttgcattagtcttttcagttatcttctacctcctgtattttctactgtaataatgtaatttaaggccttccacaatgaacagttcactttattccctgggttttctataaacagttttaaggatatgatttggttaaaaaataatttgttataaaaattctgtttgcaaattaaactggaaaagtatccagagtctcaaaaggcaatgatttgtgagataatatggcatgcccggagccctgctcatcaatgaaaaacccatatgtaataatcgaattcatttaacatgaatcttgagtacgtggaccattgcttgcatgttaactttttgtttgttttgttttgttttgttttgcatttttaactccagatatcctaaagctcaattgtttggtctctggttttcatccttagagaagccatggagaacagacttgaaaagtttaggaaatcataatgtggcagaggtggtgggaagaagaaagttgagctttttccccttgagaaacttctgcatttagtttctatctttccaggcaaaacaaatgggtattcttttcatacaaccattttcaaatgaaccttagaaaagtcttaacatttaaggtattttatgcacagaatacacttagattgataggaaagaactcgtaatggagtttgagtaaagaaaatgactgatgtactaaacccagtaaaaattgttgaaaatgttaaaggtcagcatgttctaattgggaatctagatatagcttagatttcctattggcttagagtatttgctataacaaatgaagtgcaatgacaattatatattcctactcggtcatactggactggcttcgttctcttaatatactcagtaatgactcaagcctctggctattaacataccctagttgccgttttttaattgccatgagccaaatacttcttggtatacaattgatccatttattttaatggctgccttttcattttcatcttttcttgctgctacccatctatgtatgtagtcattggggggaaaatgtagccacattttttatgggaagactttgtgttaaaagtgaacattttgaaggtttttaactggtgaaactagcctggaataatgccaccagagactgagtggaaatcgccccttttgaaggtgccattcttatgagccaaaagtttgtcatttaaaagttcattttgagggaataacatgtaatataatttgaaataaaggtatagtaaccttaaaaagaacattataactgattgttgtgaatggggtgaatttgttaaaatgagtaactttgataaagtttttcatgcacaggcaaaatgtattcactagatttctacgtagtgatctgcttttactttgtaatttgtagttctcaaaagacttttttttaaaaaaataaagtccatacttacactcttaggctttataaaaaagtctttttttttttaaattccatgttaatacctagtggtattgtatgttgtgtgttcagatgtctttactgtatctgtataccattaagtaataattagactcccaaactgtaaaccacctacacagaattctggtgtagctaaaactacattaatatttctacaaccaattca

SEQ ID NO: 372861 - DNA, 3325 bp, Homo sapiens
cttccggtgcgggaggagggggccggcggcgagggactccaggaggacgcgtccaacttcgagaccggcgggggccggctccgctcttccaacccctccatgtgtgaagagggcggacgacgcagcgggggaagaaaaataagctagtctaggacaagtgtccaggcgacgtggaacccagtaagggaataaagaagactggaaacgtctctcccctcccctatcccagtccctcaccctaatccgcgcgcaatagaaaaggcggaagcgcctgtccacgatcagggcggggcaaggggaagaaatctcgcgataggagagcggtccgggcgggggtggcacctctccctcctcctggcgttagttccggtcgcagaggagacaccgccgcagttgccgggtgtcttttatgaataatcaaaagcagcaaaagccaacgctatcaggccagcgttttaaaactagaaaaagagatgaaaaagagaggtttgaccctactcagtttcaagactgtattattcaaggcttaactgaaaccggtactgatttggaagcagtagctaagtttcttgatgcttctggagcaaaacttgattaccgtcgatatgcagaaacactctttgacattctggtggctggtggaatgctggccccaggtggtacactggcagatgacatgatgcgtacagatgtctgcgtgtttgcagcccaagaagatctagagaccatgcaagcatttgctcaggtttttaacaagttaatcaggcgctacaaatacctggagaaaggttttgaagatgaagtaaaaaagctgctgctgttcttgaagggtttttcagagtcggagaggaacaagctagctatgttgactggtgttcttctggctaatggaacacttaatgcatccattcttaatagcctttataatgaaaatttggttaaagaaggagtttcagcagcttttgctgtgaagctctttaaatcatggataaatgaaaaagatatcaatgcagtagctgcaagtcttcggaaagtcagcatggataacagactgatggaactctttcctgccaataagcaaagtgttgaacacttcacaaaatattttactgaggcaggcttgaaagagctttcagaatatgttcggaatcagcaaaccatcggagctcgtaaggagctccagaaagaacttcaagaacagatgtcccgtggtgatccatttaaggatataattttatatgtcaaggaggagatgaaaaaaaacaacatcccagagccagttgtcatcggaatagtctggtcaagtgtaatgagcactgtggaatggaacaaaaaagaggagcttgtagcagagcaagccatcaagcacttgaagcaatacagccctctacttgctgcctttactactcaaggtcagtctgagctgactctgttactgaagattcaggagtattgctatgacaacattcatttcatgaaagccttccagaaaatagtggtgcttttttataaagctgaagtcctgagcgaggagcccattttgaagtggtataaagatgcacatgttgcaaaggggaagagtgttttccttgagcaaatgaaaaagtttgtagaatggctcaaaaatgctgaagaagaatctgaatctgaagctgaagaaggtgactgaattttgaaactacaccctcagtaaagcaaacaggagttgtagataaaatgtcatgtctcatgtgtcctggttcttacatcttcctacctccctgtatcaagcatgatataagggctttcatggcaaattttattttaactgtttctatggttgctggaaatgttgggtttagtttctaaaaccatgttttaagtagctacaggagctatagatttgaatctaatgttgcattagtcttttcagttatcttctacctcctgtattttctactgtaataatgtaatttaaggccttccacaatgaacagttcactttattccctgggttttctataaacagttttaaggatatgatttggttaaaaaataatttgttataaaaattctgtttgcaaattaaactggaaaagtatccagagtctcaaaaggcaatgatttgtgagataatatggcatgcccggagccctgctcatcaatgaaaaacccatatgtaataatcgaattcatttaacatgaatcttgagtacgtggaccattgcttgcatgttaactttttgtttgttttgttttgttttgttttgcatttttaactccagatatcctaaagctcaattgtttggtctctggttttcatccttagagaagccatggagaacagacttgaaaagtttaggaaatcataatgtggcagaggtggtgggaagaagaaagttgagctttttccccttgagaaacttctgcatttagtttctatctttccaggcaaaacaaatgggtattcttttcatacaaccattttcaaatgaaccttagaaaagtcttaacatttaaggtattttatgcacagaatacacttagattgataggaaagaactcgtaatggagtttgagtaaagaaaatgactgatgtactaaacccagtaaaaattgttgaaaatgttaaaggtcagcatgttctaattgggaatctagatatagcttagatttcctattggcttagagtatttgctataacaaatgaagtgcaatgacaattatatattcctactcggtcatactggactggcttcgttctcttaatatactcagtaatgactcaagcctctggctattaacataccctagttgccgttttttaattgccatgagccaaatacttcttggtatacaattgatccatttattttaatggctgccttttcattttcatcttttcttgctgctacccatctatgtatgtagtcattggggggaaaatgtagccacattttttatgggaagactttgtgttaaaagtgaacattttgaaggtttttaactggtgaaactagcctggaataatgccaccagagactgagtggaaatcgccccttttgaaggtgccattcttatgagccaaaagtttgtcatttaaaagttcattttgagggaataacatgtaatataatttgaaataaaggtatagtaaccttaaaaagaacattataactgattgttgtgaatggggtgaatttgttaaaatgagtaactttgataaagtttttcatgcacaggcaaaatgtattcactagatttctacgtagtgatctgcttttactttgtaatttgtagttctcaaaagacttttttttaaaaaaataaagtccatacttacact

SEQ ID NO: 372862 - DNA, 3086 bp, Homo sapiens
cggggcggaggggctgccacccaccaccgctgcggccgccgcctccgccgctgctttcgctggagggcgggcggatgtacggggcgcctggggccccggcgcaaagcgcctcagtgactgtggtccgctcgttgcggcggccgccaccgcaggcgacaggggtgtcttttatgaataatcaaaagcagcaaaagccaacgctatcaggccagcgttttaaaactagaaaaagagatgaaaaagagaggtttgaccctactcagtttcaagactgtattattcaaggcttaactgaaaccggtactgatttggaagcagtagctaagtttcttgatgcttctggagcaaaacttgattaccgtcgatatgcagaaacactctttgacattctggtggctggtggaatgctggccccaggtggtacactggcagatgacatgatgcgtacagatgtctgcgtgtttgcagcccaagaagatctagagaccatgcaagcatttgctcaggtttttaacaagttaatcaggcgctacaaatacctggagaaaggttttgaagatgaagtaaaaaagctgctgctgttcttgaagggtttttcagagtcggagaggaacaagctagctatgttgactggtgttcttctggctaatggaacacttaatgcatccattcttaatagcctttataatgaaaatttggttaaagaaggagtttcagcagcttttgctgtgaagctctttaaatcatggataaatgaaaaagatatcaatgcagtagctgcaagtcttcggaaagtcagcatggataacagactgatggaactctttcctgccaataagcaaagtgttgaacacttcacaaaatattttactgaggcaggcttgaaagagctttcagaatatgttcggaatcagcaaaccatcggagctcgtaaggagctccagaaagaacttcaagaacagatgtcccgtggtgatccatttaaggatataattttatatgtcaaggaggagatgaaaaaaaacaacatcccagagccagttgtcatcggaatagtctggtcaagtgtaatgagcactgtggaatggaacaaaaaagaggagcttgtagcagagcaagccatcaagcacttgaagcaatacagccctctacttgctgcctttactactcaaggtcagtctgagctgactctgttactgaagattcaggagtattgctatgacaacattcatttcatgaaagccttccagaaaatagtggtgcttttttataaagctgaagtcctgagcgaggagcccattttgaagtggtataaagatgcacatgttgcaaaggggaagagtgttttccttgagcaaatgaaaaagtttgtagaatggctcaaaaatgctgaagaagaatctgaatctgaagctgaagaaggtgactgaattttgaaactacaccctcagtaaagcaaacaggagttgtagataaaatgtcatgtctcatgtgtcctggttcttacatcttcctacctccctgtatcaagcatgatataagggctttcatggcaaattttattttaactgtttctatggttgctggaaatgttgggtttagtttctaaaaccatgttttaagtagctacaggagctatagatttgaatctaatgttgcattagtcttttcagttatcttctacctcctgtattttctactgtaataatgtaatttaaggccttccacaatgaacagttcactttattccctgggttttctataaacagttttaaggatatgatttggttaaaaaataatttgttataaaaattctgtttgcaaattaaactggaaaagtatccagagtctcaaaaggcaatgatttgtgagataatatggcatgcccggagccctgctcatcaatgaaaaacccatatgtaataatcgaattcatttaacatgaatcttgagtacgtggaccattgcttgcatgttaactttttgtttgttttgttttgttttgttttgcatttttaactccagatatcctaaagctcaattgtttggtctctggttttcatccttagagaagccatggagaacagacttgaaaagtttaggaaatcataatgtggcagaggtggtgggaagaagaaagttgagctttttccccttgagaaacttctgcatttagtttctatctttccaggcaaaacaaatgggtattcttttcatacaaccattttcaaatgaaccttagaaaagtcttaacatttaaggtattttatgcacagaatacacttagattgataggaaagaactcgtaatggagtttgagtaaagaaaatgactgatgtactaaacccagtaaaaattgttgaaaatgttaaaggtcagcatgttctaattgggaatctagatatagcttagatttcctattggcttagagtatttgctataacaaatgaagtgcaatgacaattatatattcctactcggtcatactggactggcttcgttctcttaatatactcagtaatgactcaagcctctggctattaacataccctagttgccgttttttaattgccatgagccaaatacttcttggtatacaattgatccatttattttaatggctgccttttcattttcatcttttcttgctgctacccatctatgtatgtagtcattggggggaaaatgtagccacattttttatgggaagactttgtgttaaaagtgaacattttgaaggtttttaactggtgaaactagcctggaataatgccaccagagactgagtggaaatcgccccttttgaaggtgccattcttatgagccaaaagtttgtcatttaaaagttcattttgagggaataacatgtaatataatttgaaataaaggtatagtaaccttaaaaagaacattataactgattgttgtgaatggggtgaatttgttaaaatgagtaactttgataaagtttttcatgcacaggcaaaatgtattcactagatttctacgtagtgatctgcttttactttgtaatttgtagttctcaaaagacttttttttaaaaaaataaagtccatacttacact

SEQ ID NO: 372863 - DNA, 3062 bp, Homo sapiens
  misc_feature (30)..(30): n is a, c, g, or t
  misc_feature (35)..(35): n is a, c, g, or t
  misc_feature (46)..(47): n is a, c, g, or t
  misc_feature (61)..(61): n is a, c, g, or t
ccaagggtactatgaggctggaacactaanttagnaaacacccttnnggtgagtttataanacaagcagcgtacgtcgaatctggatcgcgagtgcggtacatgggattctggctcttactcttcgccttacatcgggtgtcttttatgaataatcaaaagcagcaaaagccaacgctatcaggccagcgttttaaaactagaaaaagagatgaaaaagagaggtttgaccctactcagtttcaagactgtattattcaaggcttaactgaaaccggtactgatttggaagcagtagctaagtttcttgatgcttctggagcaaaacttgattaccgtcgatatgcagaaacactctttgacattctggtggctggtggaatgctggccccaggtggtacactggcagatgacatgatgcgtacagatgtctgcgtgtttgcagcccaagaagatctagagaccatgcaagcatttgctcaggtttttaacaagttaatcaggcgctacaaatacctggagaaaggttttgaagatgaagtaaaaaagctgctgctgttcttgaagggtttttcagagtcggagaggaacaagctagctatgttgactggtgttcttctggctaatggaacacttaatgcatccattcttaatagcctttataatgaaaatttggttaaagaaggagtttcagcagcttttgctgtgaagctctttaaatcatggataaatgaaaaagatatcaatgcagtagctgcaagtcttcggaaagtcagcatggataacagactgatggaactctttcctgccaataagcaaagtgttgaacacttcacaaaatattttactgaggcaggcttgaaagagctttcagaatatgttcggaatcagcaaaccatcggagctcgtaaggagctccagaaagaacttcaagaacagatgtcccgtggtgatccatttaaggatataattttatatgtcaaggaggagatgaaaaaaaacaacatcccagagccagttgtcatcggaatagtctggtcaagtgtaatgagcactgtggaatggaacaaaaaagaggagcttgtagcagagcaagccatcaagcacttgaagcaatacagccctctacttgctgcctttactactcaaggtcagtctgagctgactctgttactgaagattcaggagtattgctatgacaacattcatttcatgaaagccttccagaaaatagtggtgcttttttataaagctgaagtcctgagcgaggagcccattttgaagtggtataaagatgcacatgttgcaaaggggaagagtgttttccttgagcaaatgaaaaagtttgtagaatggctcaaaaatgctgaagaagaatctgaatctgaagctgaagaaggtgactgaattttgaaactacaccctcagtaaagcaaacaggagttgtagataaaatgtcatgtctcatgtgtcctggttcttacatcttcctacctccctgtatcaagcatgatataagggctttcatggcaaattttattttaactgtttctatggttgctggaaatgttgggtttagtttctaaaaccatgttttaagtagctacaggagctatagatttgaatctaatgttgcattagtcttttcagttatcttctacctcctgtattttctactgtaataatgtaatttaaggccttccacaatgaacagttcactttattccctgggttttctataaacagttttaaggatatgatttggttaaaaaataatttgttataaaaattctgtttgcaaattaaactggaaaagtatccagagtctcaaaaggcaatgatttgtgagataatatggcatgcccggagccctgctcatcaatgaaaaacccatatgtaataatcgaattcatttaacatgaatcttgagtacgtggaccattgcttgcatgttaactttttgtttgttttgttttgttttgttttgcatttttaactccagatatcctaaagctcaattgtttggtctctggttttcatccttagagaagccatggagaacagacttgaaaagtttaggaaatcataatgtggcagaggtggtgggaagaagaaagttgagctttttccccttgagaaacttctgcatttagtttctatctttccaggcaaaacaaatgggtattcttttcatacaaccattttcaaatgaaccttagaaaagtcttaacatttaaggtattttatgcacagaatacacttagattgataggaaagaactcgtaatggagtttgagtaaagaaaatgactgatgtactaaacccagtaaaaattgttgaaaatgttaaaggtcagcatgttctaattgggaatctagatatagcttagatttcctattggcttagagtatttgctataacaaatgaagtgcaatgacaattatatattcctactcggtcatactggactggcttcgttctcttaatatactcagtaatgactcaagcctctggctattaacataccctagttgccgttttttaattgccatgagccaaatacttcttggtatacaattgatccatttattttaatggctgccttttcattttcatcttttcttgctgctacccatctatgtatgtagtcattggggggaaaatgtagccacattttttatgggaagactttgtgttaaaagtgaacattttgaaggtttttaactggtgaaactagcctggaataatgccaccagagactgagtggaaatcgccccttttgaaggtgccattcttatgagccaaaagtttgtcatttaaaagttcattttgagggaataacatgtaatataatttgaaataaaggtatagtaaccttaaaaagaacattataactgattgttgtgaatggggtgaatttgttaaaatgagtaactttgataaagtttttcatgcacaggcaaaatgtattcactagatttctacgtagtgatctgcttttactttgtaatttgtagttctcaaaagacttttttttaaaaaaataaagtccatacttacact

SEQ ID NO: 372864 - DNA, 3302 bp, Homo sapiens
cttccggtgcgggaggagggggccggcggcgagggactccaggaggacgcgtccaacttcgagaccggcgggggccggctccgctcttccaacccctccatgtgtgaagagggcggacgacgcagcgggggaagaaaaataagctagtctaggacaagtgtccaggcgacgtggaacccagtaagggaataaagaagactggaaacgtctctcccctcccctatcccagtccctcaccctaatccgcgcgcaatagaaaaggcggaagcgcctgtccacgatcagggcggggcaaggggaagaaatctcgcgataggagagcggtccgggcgggggtggcacctctccctcctcctggcgttagttccggtcgcagaggagacaccgccgcagttgccggtacatcggggatttctggctctttcctcttcgccttaaattcgggtgtcttttatgaataatcaaaagcagcaaaagccaacgctatcaggccagcgttttaaaactagaaaaagagatgaaaaagagaggtttgaccctactcagtttcaagactgtattattcaaggcttaactgaaaccggtactgatttggaagcagtagctaagtttcttgatgcttctggagcaaaacttgattaccgtcgatatgcagaaacactctttgacattctggtggctggtggaatgctggccccaggtggtacactggcagatgacatgatgcgtacagatgtctgcgtgtttgcagcccaagaagatctagagaccatgcaagcatttgctcaggtttttaacaagttaatcaggcgctacaaatacctggagaaaggttttgaagatgaagtaaaaaagctgctgctgttcttgaagggtttttcagagtcggagaggaacaagctagctatgttgactggtgttcttctggctaatggaacacttaatgcatccattcttaatagcctttataatgaaaatttggttaaagaaggagtttcagcagcttttgctgtgaagctctttaaatcatggataaatgaaaaagatatcaatgcagtagctgcaagtcttcggaaagtcagcatggataacagactgatggaactctttcctgccaataagcaaagtgttgaacacttcacaaaatattttactgaggcaggcttgaaagagctttcagaatatgttcggaatcagcaaaccatcggagctcgtaaggagctccagaaagaacttcaagaacagatgtcccgtggtgatccatttaaggatataattttatatgtcaaggaggagatgaaaaaaaacaacatcccagagccagttgtcatcggaatagtctggtcaagtgtaatgagcactgtggaatggaacaaaaaagaggagcttgtagcagagcaagccatcaagcacttgaagcaatacagccctctacttgctgcctttactactcaaggtcagtctgagctgactctgttactgaagattcaggagtattgctatgacaacattcatttcatgaaagccttccagaaaatagtggtgcttttttataaagctgaagtcctgagcgaggagcccattttgaagtggtataaagatgcacatgttgcaaaggggaagagtgttttccttgagcaaatgaaaaagtttgtagaatggctcaaaaatgctgaagaagaatctgaatctgaagctgaagaaggtgactgaattttgaaactacaccctcagtaaagcaaacaggagttgtagataaaatgtcatgtctcatgtgtcctggttcttacatcttcctacctccctgtatcaagcatgatataagggctttcatggcaaattttattttaactgtttctatggttgctggaaatgttgggtttagtttctaaaaccatgttttaagtagctacaggagctatagatttgaatctaatgttgcattagtcttttcagttatcttctacctcctgtattttctactgtaataatgtaatttaaggccttccacaatgaacagttcactttattccctgggttttctataaacagttttaaggatatgatttggttaaaaaataatttgttataaaaattctgtttgcaaattaaactggaaaagtatccagagtctcaaaaggcaatgatttgtgagataatatggcatgcccggagccctgctcatcaatgaaaaacccatatgtaataatcgaattcatttaacatgaatcttgagtacgtggaccattgcttgcatgttaactttttgtttgttttgttttgttttgttttgcatttttaactccagatatcctaaagctcaattgtttggtctctggttttcatccttagagaagccatggagaacagacttgaaaagtttaggaaatcataatgtgctttccaggcaaaacaaatgggtattcttttcatacaaccattttcaaatgaaccttagaaaagtcttaacatttaaggtattttatgcacagaatacacttagattgataggaaagaactcgtaatggagtttgagtaaagaaaatgactgatgtactaaacccagtaaaaattgttgaaaatgttaaaggtcagcatgttctaattgggaatctagatatagcttagatttcctattggcttagagtatttgctataacaaatgaagtgcaatgacaattatatattcctactcggtcatactggactggcttcgttctcttaatatactcagtaatgactcaagcctctggctattaacataccctagttgccgttttttaattgccatgagccaaatacttcttggtatacaattgatccatttattttaatggctgccttttcattttcatcttttcttgctgctacccatctatgtatgtagtcattggggggaaaatgtagccacattttttatgggaagactttgtgttaaaagtgaacattttgaaggtttttaactggtgaaactagcctggaataatgccaccagagactgagtggaaatcgccccttttgaaggtgccattcttatgagccaaaagtttgtcatttaaaagttcattttgagggaataacatgtaatataatttgaaataaaggtatagtaaccttaaaaagaacattataactgattgttgtgaatggggtgaatttgttaaaatgagtaactttgataaagtttttcatgcacaggcaaaatgtattcactagatttctacgtagtgatctgcttttactttgtaatttgtagttctcaaaagacttttttttaaaaaaataaagtccatacttacact

SEQ ID NO: 372865 - DNA, 3273 bp, Homo sapiens
cttccggtgcgggaggagggggccggcggcgagggactccaggaggacgcgtccaacttcgagaccggcgggggccggctccgctcttccaacccctccatgtgtgaagagggcggacgacgcagcgggggaagaaaaataagctagtctaggacaagtgtccaggcgacgtggaacccagtaagggaataaagaagactggaaacgtctctcccctcccctatcccagtccctcaccctaatccgcgcgcaatagaaaaggcggaagcgcctgtccacgatcagggcggggcaaggggaagaaatctcgcgataggagagcggtccgggcgggggtggcacctctccctcctcctggcgttagttccggtcgcagaggagacaccgccgcagttgccggtacatcggggatttctggctctttcctcttcgccttaaattcgggtgtcttttatgaataatcaaaagcagcaaaagccaacgctatcaggccagcgttttaaaactagaaaaagagatgaaaaagagaggtttgaccctactcagtttcaagactgtattattcaaggcttaactgaaaccggtactgatttggaagcagtagctaagtttcttgatgcttctggagcaaaacttgattaccgtcgatatgcagaaacactctttgacattctggtggctggtggaatgctggccccaggtggtacactggcagatgacatgatgcgtacagatgtctgcgtgtttgcagcccaagaagatctagagaccatgcaagcatttgctcaggtttttaacaagttaatcaggcgctacaaatacctggagaaaggttttgaagatgaagtaaaaaagctgctgctgttcttgaagggtttttcagagtcggagaggaacaagctagctatgttgactggtgttcttctggctaatggaacacttaatgcatccattcttaatagcctttataatgaaaatttggttaaagaaggagtttcagcagcttttgctgtgaagctctttaaatcatggataaatgaaaaagatatcaatgcagtagctgcaagtcttcggaaagtcagcatggataacagactgatggaactctttcctgccaataagcaaagtgttgaacacttcacaaaatattttactgaggcaggcttgaaagagctttcagaatatgttcggaatcagcaaaccatcggagctcgtaaggagctccagaaagaacttcaagaacagatgtcccgtggtgatccatttaaggatataattttatatgtcaaggaggagatgaaaaaaaacaacatcccagagccagttgtcatcggaatagtctggtcaagtgtaatgagcactgtggaatggaacaaaaaagaggagcttgtagcagagcaagccatcaagcacttgaagcaatacagccctctacttgctgcctttactactcaaggtcagtctgagctgactctgttactgaagattcaggagtattgctatgacaacattcatttcatgaaagccttccagaaaatagtggtgcttttttataaagctgaagtcctgagcgaggagcccattttgaagtggtataaagatgcacatgttgcaaaggggaagagtgttttccttgagcaaatgaaaaagtttgtagaatggctcaaaaatgctgaagaagaatctgaatctgaagctgaagaaggtgactgaattttgaaactacaccctcagtaaagcaaacaggagttgtagataaaatgtcatgtctcatgtgtcctggttcttacatcttcctacctccctgtatcaagcatgatataagggctttcatggcaaattttattttaactgtttctatggttgctggaaatgttgggtttagtttctaaaaccatgttttaagtagctacaggagctatagatttgaatctaatgttgcattagtcttttcagttatcttctacctcctgtattttctactgtaataatgtaatttaaggccttccacaatgaacagttcactttattccctgggttttctataaacagttttaaggatatgatttggttaaaaaataatttgttataaaaattctgtttgcaaattaaactggaaaagtatccagagtctcaaaaggcaatgatttgtgagataatatggcatgcccggagccctgctcatcaatgaaaaacccatatgtaataatcgaattcatttaacatgaatcttgagtacgtggaccattgcttgcatgttaactttttgtttgttttgttttgttttgttttgcatttttaactccagatatcctaaagctcaattgtttggtctctggttttcatccttagagaagccatggagaacagacttgaaaagtttaggaaatcataatgtggcagaggtggtgggaagaagaaagttgagctttttccccttgagaaacttctgcatttagtttctatctttccaggcaaaacaaatgggtattcttttcatacaaccattttcaaatgaaccttagaaaagtcttaacatttaaggtattttatgcacagaatacacttagattgataggaaagaactcgtaatggagtttgagtaaagaaaatgactgatgtactaaacccagtaaaaattgttgaaaatgttaaaggtcagcatgttctaattgggaatctagatatagcttagatttcctattggcttagagtatttgctataacaaatgaagtgcaatgacaattatatattcctactcggtcatactggactggcttcgttctcttaatatactcagtaatgactcaagcctctggctattaacataccctagttgccgttttttaattgccatgagccaaatacttcttggtatacaattgatccatttattttaatggctgccttttcattttcatcttttcttgctgctacccatctatgtatgtagtcattggggggaaaatgtagccacattttttatgggaagactttgtgttaaaagtgaacattttgaaggtttttaactggtgaaactagcctggaataatgccaccagagactgagtggaaatcgccccttttgaaggtgccattcttatgagccaaagttgtcttaaagtcattggggatactgttatatttgaataaagggttgtacttaaaaaatttactgtgtggagggggatgtaagagacttgtaagtttgccggaagttttaatggggggtgtggggcaaatttaaagtaaaaaaaaaaggggggggtaatg

SEQ ID NO: 372866 - DNA, 2162 bp, Homo sapiens
gaagtcgacgcacctcgactctaggctcagaagactcaagacagagtcccggggatccataagatataattttatatgtcaaggaggagatgaaaaaaaacaacatcccagagccagttgtcatcggaatagtctggtcaagtgtaatgagcactgtggaatggaacaaaaaagaggagcttgtagcagagcaagccatcaagcacttgaagcaatacagccctctacttgctgcctttactactcaaggtcagtctgagctgactctgttactgaagattcaggagtattgctatgacaacattcatttcatgaaagccttccagaaaatagtggtgcttttttataaagctgaagtcctgagcgaggagcccattttgaagtggtataaagatgcacatgttgcaaaggggaagagtgttttccttgagcaaatgaaaaagtttgtagaatggctcaaaaatgctgaagaagaatctgaatctgaagctgaagaaggtgactgaattttgaaactacaccctcagtaaagcaaacaggagttgtagataaaatgtcatgtctcatgtgtcctggttcttacatcttcctacctccctgtatcaagcatgatataagggctttcatggcaaattttattttaactgtttctatggttgctggaaatgttgggtttagtttctaaaaccatgttttaagtagctacaggagctatagatttgaatctaatgttgcattagtcttttcagttatcttctacctcctgtattttctactgtaataatgtaatttaaggccttccacaatgaacagttcactttattccctgggttttctataaacagttttaaggatatgatttggttaaaaaataatttgttataaaaattctgtttgcaaattaaactggaaaagtatccagagtctcaaaaggcaatgatttgtgagataatatggcatgcccggagccctgctcatcaatgaaaaacccatatgtaataatcgaattcatttaacatgaatcttgagtacgtggaccattgcttgcatgttaactttttgtttgttttgttttgttttgttttgcatttttaactccagatatcctaaagctcaattgtttggtctctggttttcatccttagagaagccatggagaacagacttgaaaagtttaggaaatcataatgtggcagaggtggtgggaagaagaaagttgagctttttccccttgagaaacttctgcatttagtttctatctttccaggcaaaacaaatgggtattcttttcatacaaccattttcaaatgaaccttagaaaagtcttaacatttaaggtattttatgcacagaatacacttagattgataggaaagaactcgtaatggagtttgagtaaagaaaatgactgatgtactaaacccagtaaaaattgttgaaaatgttaaaggtcagcatgttctaattgggaatctagatatagcttagatttcctattggcttagagtatttgctataacaaatgaagtgcaatgacaattatatattcctactcggtcatactggactggcttcgttctcttaatatactcagtaatgactcaagcctctggctattaacataccctagttgccgttttttaattgccatgagccaaatacttcttggtatacaattgatccatttattttaatggctgccttttcattttcatcttttcttgctgctacccatctatgtatgtagtcattggggggaaaatgtagccacattttttatgggaagactttgtgttaaaagtgaacattttgaaggtttttaactggtgaaactagcctggaataatgccaccagagactgagtggaaatcgccccttttgaaggtgccattcttatgagccaaaagtttgtcatttaaaagttcattttgagggaataacatgtaatataatttgaaataaaggtatagtaaccttaaaaagaacattataactgattgttgtgaatggggtgaatttgttaaaatgagtaactttgataaagtttttcatgcacaggcaaaatgtattcactagatttctacgtagtgatctgcttttactttgtaatttgtagttctcaaaagacttttttttaaaaaaataaagtccatacttacact

SEQ ID NO: 372867 - DNA, 1968 bp, Homo sapiens
  misc_feature (1968)..(1968): n is a, c, g, or t
cttccggtgcgggaggagggggccggcggcgagggactccaggaggacgcgtccaacttcgagaccggcgggggccggctccgctcttccaacccctccatgtgtgaagagggcggacgacgcagcgggggaagaaaaataagctagtctaggacaagtgtccaggcgacgtggaacccagtaagggaataaagaagactggaaacgtctctcccctcccctatcccagtccctcaccctaatccgcgcgcaatagaaaaggcggaagcgcctgtccacgatcagggcggggcaaggggaagaaatctcgcgataggagagcggtccgggcgggggtggcacctctccctcctcctggcgttagttccggtcgcagaggagacaccgccgcagttgccggtacatcggggatttctggctctttcctcttcgccttaaattcgggtgtcttttatgaataatcaaaagcagcaaaagccaacgctatcaggccagcgttttaaaactagaaaaagagatgaaaaagagaggtttgaccctactcagtttcaagactgtattattcaaggcttaactgaaaccggtactgatttggaagcagtagctaagtttcttgatgcttctggagcaaaacttgattaccgtcgatatgcagaaacactctttgacattctggtggctggtggaatgctggccccaggtggtacactggcagatgacatgatgcgtacagatgtctgcgtgtttgcagcccaagaagatctagagaccatgcaagcatttgctcaggtttttaacaagttaatcaggcgctacaaatacctggagaaaggttttgaagatgaagtaaaaaagctgctgctgttcttgaagggtttttcagagtcggagaggaacaagctagctatgttgactggtgttcttctggctaatggaacacttaatgcatccattcttaatagcctttataatgaaaatttggttaaagaaggagtttcagcagcttttgctgtgaagctctttaaatcatggataaatgaaaaagatatcaatgcagtagctgcaagtcttcggaaagtcagcatggataacagactgatggaactctttcctgccaataagcaaagtgttgaacacttcacaaaatattttactgaggcaggcttgaaagagctttcagaatatgttcggaatcagcaaaccatcggagctcgtaaggagctccagaaagaacttcaagaacagatgtcccgtggtgatccatttaaggatataattttatatgtcaaggaggagatgaaaaaaaacaacatcccagagccagttgtcatcggaatagtctggtcaagtgtaatgagcactgtggaatggaacaaaaaagaggagcttgtagcagagcaagccatcaagcacttgaagcaatacagccctctacttgctgcctttactactcaaggtcagtctgagctgactctgttactgaagattcaggagtattgctatgacaacattcatttcatgaaagccttccagaaaatagtggtgcttttttataaagctgaagtcctgagcgaggagcccattttgaagtggtataaagatgcacatgttgcaaaggggaagagtgttttccttgagcaaatgaaaaagtttgtagaatggctcaaaaatgctgaagaagaatctgatctgagctgagaaggtggctggattgtgaatacacctctgtaaagcaaccggagtgtgatacactgtctgtttcatgtgtctgtcttaatttcttactccggttcagctgtatagggttagggaattattaactgtcatggtggggatggggtagttcaaaccgttagggacgggtagatgacagggatattaatttacggtttaggatgtgtggtcaagatacggtaagggggggaagaatagagaatcaagaagggcaaaaatgattatgatatatan

SEQ ID NO: 372868 - DNA, 1282 bp, Homo sapiens
cttccggtgcgggaggagggggccggcggcgagggactccaggaggacgcgtccaacttcgagaccggcgggggccggctccgctcttccaacccctccatgtgtgaagagggcggacgacgcagcgggggaagaaaaataagctagtctaggacaagtgtccaggcgacgtggaacccagtaagggaataaagaagactggaaacgtctctcccctcccctatcccagtccctcaccctaatccgcgcgcaatagaaaaggcggaagcgcctgtccacgatcagggcggggcaaggggaagaaatctcgcgataggagagcggtccgggcgggggtggcacctctccctcctcctggcgttagttccggtcgcagaggagacaccgccgcagttgccggtacatcggggatttctggctctttcctcttcgccttaaattcgggtgtcttttatgaataatcaaaagcagcaaaagccaacgctatcaggccagcgttttaaaactagaaaaagagatgaaaaagagaggtttgaccctactcagtttcaagactgtattattcaaggcttaactgaaaccggtactgatttggaagcagtagctaagtttcttgatgcttctggagcaaaacttgattaccgtcgatatgcagaaacactctttgacattctggtggctggtggaatgctggccccaggtggtacactggcagatgacatgatgcgtacagatgtctgcgtgtttgcagcccaagaagatctagagaccatgcaagcatttgctcaggtttttaacaagttaatcaggcgctacaaatacctggagaaaggttttgaagatgaagtaaaaaagctgctgctgttcttgaagggtttttcagagtcggagaggaacaagctagctatgttgactggtgttcttctggctaatggaacacttaatgcatccattcttaatagcctttataatgaaaatttggttaaagaaggagtttcagcagcttttgctgtgaagctctttaaatcatggataaatgaaaaagatatcaatgcagtagctgcaagtcttcggaaagtcagcatggataacagactgatggaactctttcctgccaataagcaaagtgttgaacacttcacaaaatattttactgaggcaggcttgaaagagctttcagaatatgttcggaatcagcaaaccatcggagctcgtaaggagctccagaaagaacttcagacccgtaatagtagggggtcctctagagtcacctcagcagcag

SEQ ID NO: 372869 - DNA, 1029 bp, Homo sapiens
cttccggtgcgggaggagggggccggcggcgagggactccaggaggacgcgtccaacttcgagaccggcgggggccggctccgctcttccaacccctccatgtgtgaagagggcggacgacgcagcgggggaagaaaaataagctagtctaggacaagtgtccaggcgacgtggaacccagtaagggaataaagaagactggaaacgtctctcccctcccctatcccagtccctcaccctaatccgcgcgcaatagaaaaggcggaagcgcctgtccacgatcagggcggggcaaggggaagaaatctcgcgataggagagcggtccgggcgggggtggcacctctccctcctcctggcgttagttccggtcgcagaggagacaccgccgcagttgccgggtgtcttttatgaataatcaaaagcagcaaaagccaacgctatcaggccagcgttttaaaactagaaaaagagatgaaaaagagaggtttgaccctactcagtttcaagactgtattattcaaggcttaactgaaaccggtactgatttggaagcagtagctaagtttcttgatgcttctggagcaaaacttgattaccgtcgatatgcagaaacactctttgacattctggtggctggtggaatgctgggtaagtgtctgtggtttgtgggcttaataatttagaaaggtataatatatggagattatggagagtctagaatatgaactatttggcaaacttgttaaaatggagtgatttttttggttttgttgtattttggttttatccaactttagccccaggtggtacactggcagatgacatgatgcgtacagatgtctgcgtgtttgcagcccaagaagatctagagaccatgcaagcatttgctcaggtaaatgaaactttacataattgttttcagttggctactatccatgtggtatatttgaggaatattctacttttaagagttgtggttagaaagttgaaggaatttgattttaaattttagggatactgttcttgg

SEQ ID NO: 372870 - DNA, 2844 bp, Homo sapiens
gcggtcctacccggaagcgcgcccgggctcctgcaggcggggcgctgtgcgcgccgcgatccggtacgtgggcctccgggctgtcccctctgggggcggcgatcctccctccggagccccccttcaaccctcccggaagtgagcatttgcaggaccagggatgctgtgctgctctcccatgagccagtcaccgagtcggtctgctgcagccctttctgaacctctggccgtctggatgctccactgtgcttgccaagatgaagtgcgtcttggtggccactgagggcgcagaggtcctcttctactggacagatcaggagtttgaagagagtctccggctgaagttcgggcagtcagagaatgaggaagaagagctccctgccctggaggaccagctcagcaccctcctagccccggtcatcatctcctccatgacgatgctggagaagctctcggacacctacacctgcttctccacggaaaatggcaacttcctgtatgtccttcacctgtttggagaatgcctgttcattgccatcaatggtgaccacaccgagagcgagggggacctgcggcggaagctgtatgtgctcaagtacctgtttgaagtgcactttgggctggtgactgtggacggtcatcttatccgaaaggagctgcggcccccagacctggcgcagcgtgtccagctgtgggagcacttccagagcctgctgtggacctacagccgcctgcgggagcaggagcagtgcttcgccgtggaggtgactactgggcgcgggagtcctcaggacttgaagctgtcaggccctggagcgactgattcacccccagctctgtgagctgtgcatagaggcgctggagcggcacgtcatccaggctgtcaacaccagccccgagcggggaggcgaggaggccctgcatgccttcctgctcgtgcactccaagctgctggcattctactctagccacagtgccagctccctgcgcccggccgacctgcttgccctcatcctcctggttcaggacctctaccccagcgagagcacagcagaggacgacattcaggagacagacagcttctccctccctgaggagtacttcacaccagctccttcccctggcgatcagagctcaggtagcaccatctggctggaggggggcaccccccccatggatgcccttcagatagcagaggacaccctccaaacactggttccccactgccctgtgccttccggccccagaaggatcttcctggatgccaacgtgaaggaaagctactgccccctagtgccccacaccatgtactgcctgcccctgtggcagggcatcaacctggtgctcctgaccaggagccccagcgcgcccctggccctggttctgtcccagctgatggatggcttctccatgctggagaagaagctgaaggaagggccggagcccggggcctccctgcgctcccagcccctcgtgggagacctgcgccagaggatggacaagtttgtcaagaatcgaggggcacaggagattcagagcacctggctggagtttaaggccaaggctttctccaaaagtgagcccggatcctcctgggagctgctccaggcatgtgggaagctgaagcggcagctctgcgccatctaccggctgaactttctgaccacagcccccagcaggggaggcccacacctgccccagcacctgcaggaccaagtgcagaggctcatgcgggagaagctgacggactggaaggacttcttgctggtgaagagcaggaggaacatcaccatggtgtcctacctagaagacttcccaggcttggtgcacttcatctatgtggaccgcaccactgggcagatggtggcgccttccctcaactgcagtcaaaagacctcgtcggagttgggcaaggggccgctggctgcctttgtcaaaactaaggtctggtctctgatccagctggcgcgcagatacctgcagaagggctacaccacgctgctgttccaggagggggatttctactgctcctacttcctgtggttcgagaatgacatggggtacaaactccagatgatcgaggtgcccgtcctctccgacgactcagtgcctatcggcatgctgggaggagactactacaggaagctcctgcgctactacagcaagaaccgcccaaccgaggctgtcaggtgctacgagctgctggccctgcacctgtctgtcatccccactgacctgctggtgcagcaggccggccagctggcccggcgcctctgggaggcctcccgtatccccctgctctaggccaaggtggccgcagtctgcctttgcatcctgtcctccagccacccttgcttgccactgttccccatgacgagagcctcctgtctgcagtggccatcctgaggatagggcagagtgcccagggtggccccagggcttctaaaaccccacctagaccaccctccatgtcaggtactgagcaaggccccagatccttctctctggaggaagagggaagcccaggggtcctgtttgtaaaacaacggtggcaacagctcctcttccagagctgcctctgcctttatcctgggagatggggaggaagccccatctctgctgttccctgcgtggaggaagcccacccagcaagctctctcctaccccaggtaaaaggtgctcctttgcctgggtttgaattccagcgctgccacttcctctctgcacctcctggcaagtttcttctattccccacgtttaaagcgatggcacctccgtcccagggtggtgtgaggattacccagtgtggtaggtgctcaataaatgttggtcattgttatcact

SEQ ID NO: 372871 - DNA, 593 bp, Homo sapiens
gcagaaatggctgcaagtggccgaggtctctgcaaggctgtggccgcctctcccttcccggcgtggagacgagataacacggaagccaggggaggtctgaagcctgagtatgatgcggtggtgataggagcaggcaggcacctgggattccggtgctggctctgctgtgtggcctggggcaaatgcttgccttctctgggcttggatcttcccatggagaatgacaggaagactagagggccccaaatgcatgattgccaactgggtctatacagagataatgacgggaccgaaagcagacggcactcaacatgcagctttgagggcatgccttcattttcatatgtactagagcagttgcgagctggtagatactcaacactcacctctccagggaaaaatgtgtgatgtatgtgtgtgtgtacatgtatatatatgtatatatacacacatatatgtgtatatatatgtatatgtgttacgtacatatatatacacatatacacatgcttattttaaatattgaaataaaagatacactgcacacaattttacaaataaagatacaatactctcaatttaaaaaaaaaaaa

SEQ ID NO: 372872 - DNA, 316 bp, Homo sapiens
cagagcttggtggggagggggagggggagccaagccccactgctctctcctctggcataacccagccagaagtttatacgctagcaggggctgcaatggaaagcccttccatctggcaggcaggcacctgggattccggtgctggctctgctgtctctgggcttggatcttcccatggagaatgacaggaagactaggtgagctcaggggtttccctatatctcttgcaaagtgacctagtttccaccacattctcagcctatggtttgtaagggttggaaagagccctgggccaacagacaagtgaaatccagca

SEQ ID NO: 372873 - DNA, 5139 bp, Homo sapiens
gcggtcctacccggaagcgcgcccgggctcctgcaggcggggcgctgtgcgcgccgcgatccggtacgtgggcctccgggctgtcccctctgggggcggcgatcctccctccggagccccccttcaaccctcccggaagtgagcatttgcaggaccagggatgctgtgctgctctcccatgagccagtcaccgagtcggtctgctgcagccctttctgaacctctggccgtctggatgctccactgtgcttgccaagatgaagtgcgtcttggtggccactgagggcgcagaggtcctcttctactggacagatcaggagtttgaagagagtctccggctgaagttcgggcagtcagagaatgaggaagaagagctccctgccctggaggaccagctcagcaccctcctagccccggtcatcatctcctccatgacgatgctggagaagctctcggacacctacacctgcttctccacggaaaatggcaacttcctgtatgtccttcacctgtttggagaatgcctgttcattgccatcaatggtgaccacaccgagagcgagggggacctgcggcggaagctgtatgtgctcaagtacctgtttgaagtgcactttgggctggtgactgtggacggtcatcttatccgaaaggagctgcggcccccagacctggcgcagcgtgtccagctgtgggagcacttccagagcctgctgtggacctacagccgcctgcgggagcaggagcagtgcttcgccgtggaggccctggagcgactgattcacccccagctctgtgagctgtgcatagaggcgctggagcggcacgtcatccaggctgtcaacaccagccccgagcggggaggcgaggaggccctgcatgccttcctgctcgtgcactccaagctgctggcattctactctagccacagtgccagctccctgcgcccggccgacctgcttgccctcatcctcctggttcaggacctctaccccagcgagagcacagcagaggacgacattcagccttccccgcggagggcccggagcagccagaacatccccgtgcagcaggcctggagccctcactccacgggcccaactggggggagctctgcagagacggagacagacagcttctccctccctgaggagtacttcacaccagctccttcccctggcgatcagagctcaggtagcaccatctggctggaggggggcaccccccccatggatgcccttcagatagcagaggacaccctccaaacactggttccccactgccctgtgccttccggccccagaaggatcttcctggatgccaacgtgaaggaaagctactgccccctagtgccccacaccatgtactgcctgcccctgtggcagggcatcaacctggtgctcctgaccaggagccccagcgcgcccctggccctggttctgtcccagctgatggatggcttctccatgctggagaagaagctgaaggaagggccggagcccggggcctccctgcgctcccagcccctcgtgggagacctgcgccagaggatggacaagtttgtcaagaatcgaggggcacaggagattcagagcacctggctggagtttaaggccaaggctttctccaaaagtgagcccggatcctcctgggagctgctccaggcatgtgggaagctgaagcggcagctctgcgccatctaccggctgaactttctgaccacagcccccagcaggggaggcccacacctgccccagcacctgcaggaccaagtgcagaggctcatgcgggagaagctgacggactggaaggacttcttgctggtgaagagcaggaggaacatcaccatggtgtcctacctagaagacttcccaggcttggtgcacttcatctatgtggaccgcaccactgggcagatggtggcgccttccctcaactgcagtcaaaagacctcgtcggagttgggcaaggggccgctggctgcctttgtcaaaactaaggtctggtctctgatccagctggcgcgcagatacctgcagaagggctacaccacgctgctgttccaggagggggatttctactgctcctacttcctgtggttcgagaatgacatggggtacaaactccagatgatcgaggtgcccgtcctctccgacgactcagtgcctatcggcatgctgggaggagactactacaggaagctcctgcgctactacagcaagaaccgcccaaccgaggctgtcaggtgctacgagctgctggccctgcacctgtctgtcatccccactgacctgctggtgcagcaggccggccagctggcccggcgcctctgggaggcctcccgtatccccctgctctaggccaaggtggccgcagtctgcctttgcatcctgtcctccagccacccttgcttgccactgttccccatgacgagagcctcctgtctgcagtggccatcctgaggatagggcagagtgcccagggtggccccagggcttctaaaaccccacctagaccaccctccatgtcaggtactgagcaaggccccagatccttctctctggaggaagagggaagcccaggggtcctgtttgtaaaacaacggtggcaacagctcctcttccagagctgcctctgcctttatcctgggagatggggaggaagccccatctctgctgttccctgcgtggaggaagcccacccagcaagctctctcctaccccaggtaaaaggtgctcctttgcctgggtttgaattccagcgctgccacttcctctctgcacctcctggcaagtttcttctattccccacgtttaaagcgatggcacctccgtcccagggtggtgtgaggattacccagtgtggtaggtgctcaataaatgttggtcattgttatcactgaagcccaacatgctagtgcttctagacccttctgtcagtgctgataagcccttgctaagtcccagccccttcatgcttggctggcgtctgccctagggctggggttctcaagcccctggccctggcccagagatttggattcccttggcggccgtggagcccaggctttgatgtctttcaaagcttctgtggtgcgccctggattgagaaccaccacccgaggggtacagcccctctcttccaaccgagaagttcctgtccagaatggacccagggacaagagaccctgagagccctgggactgggagtgtctgctcctctgaggccaggaggccggtgctgggccagagaggacggcgtggcgaaagtcagcgtccactgcagcacaggatcagatggccgtgtgctgtgcatgcaggagcctcgccttctgtgtctttagtcttgagccaaaatttgctcaaagactgatctcttccttgcagggaacagctttggggctgggggaactagaacccacatgttggtctaaaccctgagaaggtggcagtgaggaagtatcccctcaggtgactggatctgtgttcctccttaacatcatctgatggaatggcaatgaaaagcgtggattgtggaaaatacagaaaaacataaaggaaaaaactccaatcccctgagcccaccactgttcaggacccctgcttttgtcacctactatttccctttagtttttagcagcggctggatgtgatatgtctagtttaaccagtccccttgatctttctatataataaataacacaggagtgaacatcctgaatcagatcttagcagagatgctcacatgcggggtaactgtccatggtgtgtggaggggtcctcggaaccccctcttaggatcatctccacatactctcccagttctgagattcgttaccaatagcaggtttccgtcacactgcgatatcagagcagtgcaggaactctccgctccaaggggttttttcctcctaggggaacactctgctaagtaatgggcagagaacaaaggggctcctaattcaaggcaggcctaagggagggtcagaaagaactttagctggaggtatttacagatgtgacctcgaatccttggggattcttggaaaatgggcaaggtgccaaaagaggagaactggccaggccttcaaaactaaaacaccagagaattacagacagcgaacttgcccctaagccctcgttgtgggtttgtgtttgagcatttaggagaggactccagtgctcctcagcgacagacacagctgcctctgcggtgtctgaaggccctggtcgtggtgacgctagatggccgccctgggcgcctcctgtgggcgtagaggcatcaccactctgcactggcagactcagcatggagttggagcagagtctgacacgagcacttgccatcccaggcgtttcagttctgactgagaaggtagatgcacaggggaggagagggccctttcgagctccgctctgcctccaccactcattccctaaccccgcagcctcagcgccctcacctgtaaaatggggagttttgcctacagggttcagcacaatgccagcctgacataggaacccctcgtcacaagaaactgcagtcatttcataaaggccagttaggataaaacagaactgagtcccagagttcctactgcgtgtctgcagagggagatggaccccattgccttgcagctctgggacatttggggatctgcagtgatctgccacactttgccaacccctgggctcagagtatcacagtctactgggtgctaggggaagaggcaggcccaggaccaggtggtctttccttagtgccttcctttcacacttgcagagggccccaaatgcatgattgccaactgggtctatacagagataatgacgggaccgaaagcagacggcactcaacatgcagctttgagggcatgccttcattttcatatgtactagagcagttgcgagctggtagatactcaacactcacctctccagggaaaaatgtgtgatgtatgtgtgtgtgtacatgtatatatatgtatatatacacacatatatgtgtatatatatgtatatgtgttacgtacatatatatacacatatacacatgcttattttaaatattgaaataaaagatacactgcacacaattttacaaataaagatacaatactctcaatttaaaaaaaaaaaa

SEQ ID NO: 372874 - DNA, 4767 bp, Homo sapiens
gcggtcctacccggaagcgcgcccgggctcctgcaggcggggcgctgtgcgcgccgcgatccggtacgtgggcctccgggctgtcccctctgggggcggcgatcctccctccggagccccccttcaaccctcccggaagtgagcatttgcaggaccagggatgctgtgctgctctcccatgagccagtcaccgagtcggtctgctgcagccctttctgaacctctggccgtctggatgctccactgtgcttgccaagatgaagtgcgtcttggtggccactgagggcgcagaggtcctcttctactggacagatcaggagtttgaagagagtctccggctgaagttcgggcagtcagagaatgaggaagaagagctccctgccctggaggaccagctcagcaccctcctagccccggtcatcatctcctccatgacgatgctggagaagctctcggacacctacacctgcttctccacggaaaatggcaacttcctgtatgtccttcacctgtttggagaatgcctgttcattgccatcaatggtgaccacaccgagagcgagggggacctgcggcggaagctgtatgtgctcaagtacctgtttgaagtgcactttgggctggtgactgtggacggtcatcttatccgaaaggagctgcggcccccagacctggcgcagcgtgtccagctgtgggagcacttccagagcctgctgtggacctacagccgcctgcgggagcaggagcagtgcttcgccgtggaggccctggagcgactgattcacccccagctctgtgagctgtgcatagaggcgctggagcggcacgtcatccaggctgtcaacaccagccccgagcggggaggcgaggaggccctgcatgccttcctgctcgtgcactccaagctgctggcattctactctagccacagtgccagctccctgcgcccggccgacctgcttgccctcatcctcctggttcaggacctctaccccagcgagagcacagcagaggacgacattcagccttccccgcggagggcccggagcagccagaacatccccgtgcagcaggcctggagccctcactccacgggcccaactggggggagctctgcagagacggagacagacagcttctccctccctgaggagtacttcacaccagctccttcccctggcgatcagagctcaggtagcaccatctggctggaggggggcaccccccccatggatgcccttcagatagcagaggacaccctccaaacactggttccccactgccctgtgccttccggccccagaaggatcttcctggatgccaacgtgaaggaaagctactgccccctagtgccccacaccatgtactgcctgcccctgtggcagggcatcaacctggtgctcctgaccaggagccccagcgcgcccctggccctggttctgtcccagctgatggatggcttctccatgctggagaagaagctgaaggaagggccggagcccggggcctccctgcgctcccagcccctcgtgggagacctgcgccagaggatggacaagtttgtcaagaatcgaggggcacaggagattcagagcacctggctggagtttaaggccaaggctttctccaaaagtgagcccggatcctcctgggagctgctccaggcatgtgggaagctgaagcggcagctctgcgccatctaccggctgaactttctgaccacagcccccagcaggggaggcccacacctgccccagcacctgcaggaccaagtgcagaggctcatgcgggagaagctgacggactggaaggacttcttgctggtgaagagcaggaggaacatcaccatggtgtcctacctagaagacttcccaggcttggtgcacttcatctatgtggaccgcaccactgggcagatggtggcgccttccctcaactgcagtcaaaagacctcgtcggagttgggcaaggggccgctggctgcctttgtcaaaactaaggtctggtctctgatccagctggcgcgcagatacctgcagaagggctacaccacgctgctgttccaggagggggatttctactgctcctacttcctgtggttcgagaatgacatggggtacaaactccagatgatcgaggtgcccgtcctctccgacgactcagtgcctatcggcatgctgggaggagactactacaggaagctcctgcgctactacagcaagaaccgcccaaccgaggctgtcaggtgctacgagctgctggccctgcacctgtctgtcatccccactgacctgctggtgcagcaggccggccagctggcccggcgcctctgggaggcctcccgtatccccctgctctaggccaaggtggccgcagtctgcctttgcatcctgtcctccagccacccttgcttgccactgttccccatgacgagagcctcctgtctgcagtggccatcctgaggatagggcagagtgcccagggtggccccagggcttctaaaaccccacctagaccaccctccatgtcaggtactgagcaaggccccagatccttctctctggaggaagagggaagcccaggggtcctgtttgtaaaacaacggtggcaacagctcctcttccagagctgcctctgcctttatcctgggagatggggaggaagccccatctctgctgttccctgcgtggaggaagcccacccagcaagctctctcctaccccaggtaaaaggtgctcctttgcctgggtttgaattccagcgctgccacttcctctctgcacctcctggcaagtttcttctattccccacgtttaaagcgatggcacctccgtcccagggtggtgtgaggattacccagtgtggtaggtgctcaataaatgttggtcattgttatcactgaagcccaacatgctagtgcttctagacccttctgtcagtgctgataagcccttgctaagtcccagccccttcatgcttggctggcgtctgccctagggctggggttctcaagcccctggccctggcccagagatttggattcccttggcggccgtggagcccaggctttgatgtctttcaaagcttctgtggtgcgccctggattgagaaccaccacccgaggggtacagcccctctcttccaaccgagaagttcctgtccagaatggacccagggacaagagaccctgagagccctgggactgggagtgtctgctcctctgaggccaggaggccggtgctgggccagagaggacggcgtggcgaaagtcagcgtccactgcagcacaggatcagatggccgtgtgctgtgcatgcaggagcctcgccttctgtgtctttagtcttgagccaaaatttgctcaaagactgatctcttccttgcagggaacagctttggggctgggggaactagaacccacatgttggtctaaaccctgagaaggtggcagtgaggaagtatcccctcaggtgactggatctgtgttcctccttaacatcatctgatggaatggcaatgaaaagcgtggattgtggaaaatacagaaaaacataaaggaaaaaactccaatcccctgagcccaccactgttcaggacccctgcttttgtcacctactatttccctttagtttttagcagcggctggatgtgatatgtctagtttaaccagtccccttgatctttctatataataaataacacaggagtgaacatcctgaatcagatcttagcagagatgctcacatgcggggtaactgtccatggtgtgtggaggggtcctcggaaccccctcttaggatcatctccacatactctcccagttctgagattcgttaccaatagcaggtttccgtcacactgcgatatcagagcagtgcaggaactctccgctccaaggggttttttcctcctaggggaacactctgctaagtaatgggcagagaacaaaggggctcctaattcaaggcaggcctaagggagggtcagaaagaactttagctggaggtatttacagatgtgacctcgaatccttggggattcttggaaaatgggcaaggtgccaaaagaggagaactggccaggccttcaaaactaaaacaccagagaattacagacagcgaacttgcccctaagccctcgttgtgggtttgtgtttgagcatttaggagaggactccagtgctcctcagcgacagacacagctgcctctgcggtgtctgaaggccctggtcgtggtgacgctagatggccgccctgggcgcctcctgtgggcgtagaggcatcaccactctgcactggcagactcagcatggagttggagcagagtctgacacgagcacttgccatcccaggcgtttcagttctgactgagaaggtagatgcacaggggaggagagggccctttcgagctccgctctgcctccaccactcattccctaaccccgcagcctcagcgccctcacctgtaaaatggggagttttgcctacagggttcagcacaatgccagcctgacataggaaccccagtggattgtcagttttgccattatcccctgcatcctggaggtgacaccgcctggttaataggcaacactcccgacggcccagcacagccccagggcagcaggaggctggcctgtggccaagaatgcatggtggagggggcctggagggggactgcagctcctcctcttcctgcttcctccctgctccaccccgtgcctagggcagcacaaaagccaatcgctagcaaactccctgcctagca

SEQ ID NO: 372875 - DNA, 4978 bp, Homo sapiens
gcggtcctacccggaagcgcgcccgggctcctgcaggcggggcgctgtgcgcgccgcgatccggtacgtgggcctccgggctgtcccctctgggggcggcgatcctccctccggagccccccttcaaccctcccggaagtgagcatttgcaggaccagggatgctgtgctgctctcccatgagccagtcaccgagtcggtctgctgcagccctttctgaacctctggccgtctggatgctccactgtgcttgccaagatgaagtgcgtcttggtggccactgagggcgcagaggtcctcttctactggacagatcaggagtttgaagagagtctccggctgaagttcgggcagtcagagaatgaggaagaagagctccctgccctggaggaccagctcagcaccctcctagccccggtcatcatctcctccatgacgatgctggagaagctctcggacacctacacctgcttctccacggaaaatggcaacttcctgtatgtccttcacctgtttggagaatgcctgttcattgccatcaatggtgaccacaccgagagcgagggggacctgcggcggaagctgtatgtgctcaagtacctgtttgaagtgcactttgggctggtgactgtggacggtcatcttatccgaaaggagctgcggcccccagacctggcgcagcgtgtccagctgtgggagcacttccagagcctgctgtggacctacagccgcctgcgggagcaggagcagtgcttcgccgtggagccacagtgccagctccctgcgcccggccgacctgcttgccctcatcctcctggttcaggacctctaccccagcgagagcacagcagaggacgacattcagccttccccgcggagggcccggagcagccagaacatccccgtgcagcaggcctggagccctcactccacgggcccaactggggggagctctgcagagacggagacagacagcttctccctccctgaggagtacttcacaccagctccttcccctggcgatcagagctcaggtagcaccatctggctggaggggggcaccccccccatggatgcccttcagatagcagaggacaccctccaaacactggttccccactgccctgtgccttccggccccagaaggatcttcctggatgccaacgtgaaggaaagctactgccccctagtgccccacaccatgtactgcctgcccctgtggcagggcatcaacctggtgctcctgaccaggagccccagcgcgcccctggccctggttctgtcccagctgatggatggcttctccatgctggagaagaagctgaaggaagggccggagcccggggcctccctgcgctcccagcccctcgtgggagacctgcgccagaggatggacaagtttgtcaagaatcgaggggcacaggagattcagagcacctggctggagtttaaggccaaggctttctccaaaagtgagcccggatcctcctgggagctgctccaggcatgtgggaagctgaagcggcagctctgcgccatctaccggctgaactttctgaccacagcccccagcaggggaggcccacacctgccccagcacctgcaggaccaagtgcagaggctcatgcgggagaagctgacggactggaaggacttcttgctggtgaagagcaggaggaacatcaccatggtgtcctacctagaagacttcccaggcttggtgcacttcatctatgtggaccgcaccactgggcagatggtggcgccttccctcaactgcagtcaaaagacctcgtcggagttgggcaaggggccgctggctgcctttgtcaaaactaaggtctggtctctgatccagctggcgcgcagatacctgcagaagggctacaccacgctgctgttccaggagggggatttctactgctcctacttcctgtggttcgagaatgacatggggtacaaactccagatgatcgaggtgcccgtcctctccgacgactcagtgcctatcggcatgctgggaggagactactacaggaagctcctgcgctactacagcaagaaccgcccaaccgaggctgtcaggtgctacgagctgctggccctgcacctgtctgtcatccccactgacctgctggtgcagcaggccggccagctggcccggcgcctctgggaggcctcccgtatccccctgctctaggccaaggtggccgcagtctgcctttgcatcctgtcctccagccacccttgcttgccactgttccccatgacgagagcctcctgtctgcagtggccatcctgaggatagggcagagtgcccagggtggccccagggcttctaaaaccccacctagaccaccctccatgtcaggtactgagcaaggccccagatccttctctctggaggaagagggaagcccaggggtcctgtttgtaaaacaacggtggcaacagctcctcttccagagctgcctctgcctttatcctgggagatggggaggaagccccatctctgctgttccctgcgtggaggaagcccacccagcaagctctctcctaccccaggtaaaaggtgctcctttgcctgggtttgaattccagcgctgccacttcctctctgcacctcctggcaagtttcttctattccccacgtttaaagcgatggcacctccgtcccagggtggtgtgaggattacccagtgtggtaggtgctcaataaatgttggtcattgttatcactgaagcccaacatgctagtgcttctagacccttctgtcagtgctgataagcccttgctaagtcccagccccttcatgcttggctggcgtctgccctagggctggggttctcaagcccctggccctggcccagagatttggattcccttggcggccgtggagcccaggctttgatgtctttcaaagcttctgtggtgcgccctggattgagaaccaccacccgaggggtacagcccctctcttccaaccgagaagttcctgtccagaatggacccagggacaagagaccctgagagccctgggactgggagtgtctgctcctctgaggccaggaggccggtgctgggccagagaggacggcgtggcgaaagtcagcgtccactgcagcacaggatcagatggccgtgtgctgtgcatgcaggagcctcgccttctgtgtctttagtcttgagccaaaatttgctcaaagactgatctcttccttgcagggaacagctttggggctgggggaactagaacccacatgttggtctaaaccctgagaaggtggcagtgaggaagtatcccctcaggtgactggatctgtgttcctccttaacatcatctgatggaatggcaatgaaaagcgtggattgtggaaaatacagaaaaacataaaggaaaaaactccaatcccctgagcccaccactgttcaggacccctgcttttgtcacctactatttccctttagtttttagcagcggctggatgtgatatgtctagtttaaccagtccccttgatctttctatataataaataacacaggagtgaacatcctgaatcagatcttagcagagatgctcacatgcggggtaactgtccatggtgtgtggaggggtcctcggaaccccctcttaggatcatctccacatactctcccagttctgagattcgttaccaatagcaggtttccgtcacactgcgatatcagagcagtgcaggaactctccgctccaaggggttttttcctcctaggggaacactctgctaagtaatgggcagagaacaaaggggctcctaattcaaggcaggcctaagggagggtcagaaagaactttagctggaggtatttacagatgtgacctcgaatccttggggattcttggaaaatgggcaaggtgccaaaagaggagaactggccaggccttcaaaactaaaacaccagagaattacagacagcgaacttgcccctaagccctcgttgtgggtttgtgtttgagcatttaggagaggactccagtgctcctcagcgacagacacagctgcctctgcggtgtctgaaggccctggtcgtggtgacgctagatggccgccctgggcgcctcctgtgggcgtagaggcatcaccactctgcactggcagactcagcatggagttggagcagagtctgacacgagcacttgccatcccaggcgtttcagttctgactgagaaggtagatgcacaggggaggagagggccctttcgagctccgctctgcctccaccactcattccctaaccccgcagcctcagcgccctcacctgtaaaatggggagttttgcctacagggttcagcacaatgccagcctgacataggaacccctcgtcacaagaaactgcagtcatttcataaaggccagttaggataaaacagaactgagtcccagagttcctactgcgtgtctgcagagggagatggaccccattgccttgcagctctgggacatttggggatctgcagtgatctgccacactttgccaacccctgggctcagagtatcacagtctactgggtgctaggggaagaggcaggcccaggaccaggtggtctttccttagtgccttcctttcacacttgcagagggccccaaatgcatgattgccaactgggtctatacagagataatgacgggaccgaaagcagacggcactcaacatgcagctttgagggcatgccttcattttcatatgtactagagcagttgcgagctggtagatactcaacactcacctctccagggaaaaatgtgtgatgtatgtgtgtgtgtacatgtatatatatgtatatatacacacatatatgtgtatatatatgtatatgtgttacgtacatatatatacacatatacacatgcttattttaaatattgaaataaaagatacactgcacacaattttacaaataaagatacaatactctcaatttaaaaaaaaaaaa

SEQ ID NO: 372876 - DNA, 5059 bp, Homo sapiens
gcggtcctacccggaagcgcgcccgggctcctgcaggcggggcgctgtgcgcgccgcgatccgcatttgcaggaccagggatgctgtgctgctctcccatgagccagtcaccgagtcggtctgctgcagccctttctgaacctctggccgtctggatgctccactgtgcttgccaagatgaagtgcgtcttggtggccactgagggcgcagaggtcctcttctactggacagatcaggagtttgaagagagtctccggctgaagttcgggcagtcagagaatgaggaagaagagctccctgccctggaggaccagctcagcaccctcctagccccggtcatcatctcctccatgacgatgctggagaagctctcggacacctacacctgcttctccacggaaaatggcaacttcctgtatgtccttcacctgtttggagaatgcctgttcattgccatcaatggtgaccacaccgagagcgagggggacctgcggcggaagctgtatgtgctcaagtacctgtttgaagtgcactttgggctggtgactgtggacggtcatcttatccgaaaggagctgcggcccccagacctggcgcagcgtgtccagctgtgggagcacttccagagcctgctgtggacctacagccgcctgcgggagcaggagcagtgcttcgccgtggaggccctggagcgactgattcacccccagctctgtgagctgtgcatagaggcgctggagcggcacgtcatccaggctgtcaacaccagccccgagcggggaggcgaggaggccctgcatgccttcctgctcgtgcactccaagctgctggcattctactctagccacagtgccagctccctgcgcccggccgacctgcttgccctcatcctcctggttcaggacctctaccccagcgagagcacagcagaggacgacattcagccttccccgcggagggcccggagcagccagaacatccccgtgcagcaggcctggagccctcactccacgggcccaactggggggagctctgcagagacggagacagacagcttctccctccctgaggagtacttcacaccagctccttcccctggcgatcagagctcaggtagcaccatctggctggaggggggcaccccccccatggatgcccttcagatagcagaggacaccctccaaacactggttccccactgccctgtgccttccggccccagaaggatcttcctggatgccaacgtgaaggaaagctactgccccctagtgccccacaccatgtactgcctgcccctgtggcagggcatcaacctggtgctcctgaccaggagccccagcgcgcccctggccctggttctgtcccagctgatggatggcttctccatgctggagaagaagctgaaggaagggccggagcccggggcctccctgcgctcccagcccctcgtgggagacctgcgccagaggatggacaagtttgtcaagaatcgaggggcacaggagattcagagcacctggctggagtttaaggccaaggctttctccaaaagtgagcccggatcctcctgggagctgctccaggcatgtgggaagctgaagcggcagctctgcgccatctaccggctgaactttctgaccacagcccccagcaggggaggcccacacctgccccagcacctgcaggaccaagtgcagaggctcatgcgggagaagctgacggactggaaggacttcttgctggtgaagagcaggaggaacatcaccatggtgtcctacctagaagacttcccaggcttggtgcacttcatctatgtggaccgcaccactgggcagatggtggcgccttccctcaactgcagtcaaaagacctcgtcggagttgggcaaggggccgctggctgcctttgtcaaaactaaggtctggtctctgatccagctggcgcgcagatacctgcagaagggctacaccacgctgctgttccaggagggggatttctactgctcctacttcctgtggttcgagaatgacatggggtacaaactccagatgatcgaggtgcccgtcctctccgacgactcagtgcctatcggcatgctgggaggagactactacaggaagctcctgcgctactacagcaagaaccgcccaaccgaggctgtcaggtgctacgagctgctggccctgcacctgtctgtcatccccactgacctgctggtgcagcaggccggccagctggcccggcgcctctgggaggcctcccgtatccccctgctctaggccaaggtggccgcagtctgcctttgcatcctgtcctccagccacccttgcttgccactgttccccatgacgagagcctcctgtctgcagtggccatcctgaggatagggcagagtgcccagggtggccccagggcttctaaaaccccacctagaccaccctccatgtcaggtactgagcaaggccccagatccttctctctggaggaagagggaagcccaggggtcctgtttgtaaaacaacggtggcaacagctcctcttccagagctgcctctgcctttatcctgggagatggggaggaagccccatctctgctgttccctgcgtggaggaagcccacccagcaagctctctcctaccccaggtaaaaggtgctcctttgcctgggtttgaattccagcgctgccacttcctctctgcacctcctggcaagtttcttctattccccacgtttaaagcgatggcacctccgtcccagggtggtgtgaggattacccagtgtggtaggtgctcaataaatgttggtcattgttatcactgaagcccaacatgctagtgcttctagacccttctgtcagtgctgataagcccttgctaagtcccagccccttcatgcttggctggcgtctgccctagggctggggttctcaagcccctggccctggcccagagatttggattcccttggcggccgtggagcccaggctttgatgtctttcaaagcttctgtggtgcgccctggattgagaaccaccacccgaggggtacagcccctctcttccaaccgagaagttcctgtccagaatggacccagggacaagagaccctgagagccctgggactgggagtgtctgctcctctgaggccaggaggccggtgctgggccagagaggacggcgtggcgaaagtcagcgtccactgcagcacaggatcagatggccgtgtgctgtgcatgcaggagcctcgccttctgtgtctttagtcttgagccaaaatttgctcaaagactgatctcttccttgcagggaacagctttggggctgggggaactagaacccacatgttggtctaaaccctgagaaggtggcagtgaggaagtatcccctcaggtgactggatctgtgttcctccttaacatcatctgatggaatggcaatgaaaagcgtggattgtggaaaatacagaaaaacataaaggaaaaaactccaatcccctgagcccaccactgttcaggacccctgcttttgtcacctactatttccctttagtttttagcagcggctggatgtgatatgtctagtttaaccagtccccttgatctttctatataataaataacacaggagtgaacatcctgaatcagatcttagcagagatgctcacatgcggggtaactgtccatggtgtgtggaggggtcctcggaaccccctcttaggatcatctccacatactctcccagttctgagattcgttaccaatagcaggtttccgtcacactgcgatatcagagcagtgcaggaactctccgctccaaggggttttttcctcctaggggaacactctgctaagtaatgggcagagaacaaaggggctcctaattcaaggcaggcctaagggagggtcagaaagaactttagctggaggtatttacagatgtgacctcgaatccttggggattcttggaaaatgggcaaggtgccaaaagaggagaactggccaggccttcaaaactaaaacaccagagaattacagacagcgaacttgcccctaagccctcgttgtgggtttgtgtttgagcatttaggagaggactccagtgctcctcagcgacagacacagctgcctctgcggtgtctgaaggccctggtcgtggtgacgctagatggccgccctgggcgcctcctgtgggcgtagaggcatcaccactctgcactggcagactcagcatggagttggagcagagtctgacacgagcacttgccatcccaggcgtttcagttctgactgagaaggtagatgcacaggggaggagagggccctttcgagctccgctctgcctccaccactcattccctaaccccgcagcctcagcgccctcacctgtaaaatggggagttttgcctacagggttcagcacaatgccagcctgacataggaacccctcgtcacaagaaactgcagtcatttcataaaggccagttaggataaaacagaactgagtcccagagttcctactgcgtgtctgcagagggagatggaccccattgccttgcagctctgggacatttggggatctgcagtgatctgccacactttgccaacccctgggctcagagtatcacagtctactgggtgctaggggaagaggcaggcccaggaccaggtggtctttccttagtgccttcctttcacacttgcagagggccccaaatgcatgattgccaactgggtctatacagagataatgacgggaccgaaagcagacggcactcaacatgcagctttgagggcatgccttcattttcatatgtactagagcagttgcgagctggtagatactcaacactcacctctccagggaaaaatgtgtgatgtatgtgtgtgtgtacatgtatatatatgtatatatacacacatatatgtgtatatatatgtatatgtgttacgtacatatatatacacatatacacatgcttattttaaatattgaaataaaagatacactgcacacaattttacaaataaagatacaatactctcaatttaaaaaaaaaaaa

SEQ ID NO: 372877 - DNA, 4617 bp, Homo sapiens
gcggtcctacccggaagcgcgcccgggctcctgcaggcggggcgctgtgcgcgccgcgatccggtacgtgggcctccgggctgtcccctctgggggcggcgatcctccctccggagccccccttcaaccctcccggaagtgagcatttgcaggaccagggatgctgtgctgctctcccatgagccagtcaccgagtcggtctgctgcagccctttctgaacctctggccgtctggatgctccactgtgcttgccaagatgaagtgcgtcttggtggccactgagggcgcagaggtcctcttctactggacagatcaggagtttgaagagagtctccggctgaagttcgggcagtcagagaatgaggaagaagagctccctgccctggaggaccagctcagcaccctcctagccccggtcatcatctcctccatgacgatgctggagaagctctcggacacctacacctgcttctccacggaaaatggcaacttcctgtatgtccttcacctgtttggagaatgcctgttcattgccatcaatggtgaccacaccgagagcgagggggacctgcggcggaagctgtatgtgctcaagtacctgtttgaagtgcactttgggctggtgactgtggacggtcatcttatccgaaaggagctgcggcccccagacctggcgcagcgtgtccagctgtgggagcacttccagagcctgctgtggacctacagccgcctgcgggagcaggagcagtgcttcgccgtggaggccctggagcgactgattcacccccagctctgtgagctgtgcatagaggcgctggagcggcacgtcatccaggctgtcaacaccagccccgagcggggaggcgaggaggccctgcatgccttcctgctcgtgcactccaagctgctggcattctactctagccacagtgccagctccctgcgcccggccgacctgcttgccctcatcctcctggttcaggacctctaccccagcgagagcacagcagaggacgacattcagccttccccgcggagggcccggagcagccagaacatccccgtgcagcaggcctggagccctcactccacgggcccaactggggggagctctgcagagacggagacagacagcttctccctccctgaggagtacttcacaccagctccttcccctggcgatcagagctcaggtagcaccatctggctggaggggggcaccccccccatggatgcccttcagatagcagaggacaccctccaaacactggttccccactgccctgtgccttccggccccagaaggatcttcctggatgccaacgtgaaggaaagctactgccccctagtgccccacaccatgtactgcctgcccctgtggcagggcatcaacctggtgctcctgaccaggagccccagcgcgcccctggccctggttctgtcccagctgatggatggcttctccatgctggagaagaagctgaaggaagggccggagcccggggcctccctgcgctcccagcccctcgtgggagacctgcgccagaggatggacaagtttgtcaagaatcgaggggcacaggagattcagagcacctggctggagtttaaggccaaggctttctccaaaagtgagcccggatcctcctgggagctgctccaggcatgtgggaagctgaagcggcagctctgcgccatctaccggctgaactttctgaccacagcccccagcaggggaggcccacacctgccccagcacctgcaggaccaagtgcagaggctcatgcgggagaagctgacggactggaaggacttcttgctggtgaagagcaggaggaacatcaccatggtgtcctacctagaagacttcccaggcttggtgcacttcatctatgtggaccgcaccactgggcagatggtggcgccttccctcaactgcagtcaaaagacctcgtcggagttgggcaaggggccgctggctgcctttgtcaaaactaaggtctggtctctgatccagctggcgcgcagatacctgcagaagggctacaccacgctgctgttccaggagggggatttctactgctcctacttcctgtggttcgagaatgacatggggtacaaactccagatgatcgaggtgcccgtcctctccgacgactcagtgcctatcggcatgctgggaggagactactacaggaagctcctgcgctactacagcaagaaccgcccaaccgaggctgtcaggtgctacgagctgctggccctgcacctgtctgtcatccccactgacctgctggtgcagcaggccggccagctggcccggcgcctctgggaggcctcccgtatccccctgctctaggccaaggtggccgcagtctgcctttgcatcctgtcctccagccacccttgcttgccactgttccccatgacgagagcctcctgtctgcagtggccatcctgaggatagggcagagtgcccagggtggccccagggcttctaaaaccccacctagaccaccctccatgtcaggtactgagcaaggccccagatccttctctctggaggaagagggaagcccaggggtcctgtttgtaaaacaacggtggcaacagctcctcttccagagctgcctctgcctttatcctgggagatggggaggaagccccatctctgctgttccctgcgtggaggaagcccacccagcaagctctctcctaccccaggtaaaaggtgctcctttgcctgggtttgaattccagcgctgccacttcctctctgcacctcctggcaagtttcttctattccccacgtttaaagcgatggcacctccgtcccagggtggtgtgaggattacccagtgtgggaacagctttggggctgggggaactagaacccacatgttggtctaaaccctgagaaggtggcagtgaggaagtatcccctcaggtgactggatctgtgttcctccttaacatcatctgatggaatggcaatgaaaagcgtggattgtggaaaatacagaaaaacataaaggaaaaaactccaatcccctgagcccaccactgttcaggacccctgcttttgtcacctactatttccctttagtttttagcagcggctggatgtgatatgtctagtttaaccagtccccttgatctttctatataataaataacacaggagtgaacatcctgaatcagatcttagcagagatgctcacatgcggggtaactgtccatggtgtgtggaggggtcctcggaaccccctcttaggatcatctccacatactctcccagttctgagattcgttaccaatagcaggtttccgtcacactgcgatatcagagcagtgcaggaactctccgctccaaggggttttttcctcctaggggaacactctgctaagtaatgggcagagaacaaaggggctcctaattcaaggcaggcctaagggagggtcagaaagaactttagctggaggtatttacagatgtgacctcgaatccttggggattcttggaaaatgggcaaggtgccaaaagaggagaactggccaggccttcaaaactaaaacaccagagaattacagacagcgaacttgcccctaagccctcgttgtgggtttgtgtttgagcatttaggagaggactccagtgctcctcagcgacagacacagctgcctctgcggtgtctgaaggccctggtcgtggtgacgctagatggccgccctgggcgcctcctgtgggcgtagaggcatcaccactctgcactggcagactcagcatggagttggagcagagtctgacacgagcacttgccatcccaggcgtttcagttctgactgagaaggtagatgcacaggggaggagagggccctttcgagctccgctctgcctccaccactcattccctaaccccgcagcctcagcgccctcacctgtaaaatggggagttttgcctacagggttcagcacaatgccagcctgacataggaacccctcgtcacaagaaactgcagtcatttcataaaggccagttaggataaaacagaactgagtcccagagttcctactgcgtgtctgcagagggagatggaccccattgccttgcagctctgggacatttggggatctgcagtgatctgccacactttgccaacccctgggctcagagtatcacagtctactgggtgctaggggaagaggcaggcccaggaccaggtggtctttccttagtgccttcctttcacacttgcagagggccccaaatgcatgattgccaactgggtctatacagagataatgacgggaccgaaagcagacggcactcaacatgcagctttgagggcatgccttcattttcatatgtactagagcagttgcgagctggtagatactcaacactcacctctccagggaaaaatgtgtgatgtatgtgtgtgtgtacatgtatatatatgtatatatacacacatatatgtgtatatatatgtatatgtgttacgtacatatatatacacatatacacatgcttattttaaatattgaaataaaagatacactgcacacaattttacaaataaagatacaatactctcaatttaaaaaaaaaaaa

SEQ ID NO: 372878 - DNA, 3396 bp, Homo sapiens
  misc_feature (2974)..(2974): n is a, c, g, or t
gcggtcctacccggaagcgcgcccgggctcctgcaggcggggcgctgtgcgcgccgcgatccggtacgtgggcctccgggctgtcccctctgggggcggcgatcctccctccggagccccccttcaaccctcccggaagtgagcatttgcaggaccagggatgctgtgctgctctcccatgagccagtcaccgagtcggtctgctgcagccctttctgaacctctggccgtctggatgctccactgtgcttgccaagatgaagtgcgtcttggtggccactgagggcgcagaggtcctcttctactggacagatcaggagtttgaagagagtctccggctgaagttcgggcagtcagagaatgaggaagaagagctccctgccctggaggaccagctcagcaccctcctagccccggtcatcatctcctccatgacgatgctggagaagctctcggacacctacacctgcttctccacggaaaatggcaacttcctgtatgtccttcacctgtttggagaatgcctgttcattgccatcaatggtgaccacaccgagagcgagggggacctgcggcggaagctgtatgtgctcaagtacctgtttgaagtgcactttgggctggtgactgtggacggtcatcttatccgaaaggagctgcggcccccagacctggcgcagcgtgtccagctgtgggagcacttccagagcctgctgtggacctacagccgcctgcgggagcaggagcagtgcttcgccgtggaggccctggagcgactgattcacccccagctctgtgagctgtgcatagaggcgctggagcggcacgtcatccaggctgtcaacaccagccccgagcggggaggcgaggaggccctgcatgccttcctgctcgtgcactccaagctgctggcattctactctagccacagtgccagctccctgcgcccggccgacctgcttgccctcatcctcctggttcaggacctctaccccagcgagagcacagcagaggacgacattcagccttccccgcggagggcccggagcagccagaacatccccgtgcagcaggcctggagccctcactccacgggcccaactggggggagctctgcagagacggagacagacagcttctccctccctgaggagtacttcacaccagctccttcccctggcgatcagagctcaggtagcaccatctggctggaggggggcaccccccccatggatgcccttcagatagcagaggacaccctccaaacactggttccccactgccctgtgccttccggccccagaaggatcttcctggatgccaacgtgaaggaaagctactgccccctagtgccccacaccatgtactgcctgcccctgtggcagggcatcaacctggtgctcctgaccaggagccccagcgcgcccctggccctggttctgtcccagctgatggatggcttctccatgctggagaagaagctgaaggaagggccggagcccggggcctccctgcgctcccagcccctcgtgggagacctgcgccagaggatggacaagtttgtcaagaatcgaggggcacaggagattcagagcacctggctggagtttaaggccaaggctttctccaaaagtgagcccggatcctcctgggagctgctccaggcatgtgggaagctgaagcggcagctctgcgccatctaccggctgaactttctgaccacagcccccagcaggggaggcccacacctgccccagcacctgcaggaccaagtgcagaggctcatgcgggagaagctgacggactggaaggacttcttgctggtgaagagcaggaggaacatcaccatggtgtcctacctagaagacttcccaggcttggtgcacttcatctatgtggaccgcaccactgggcagatggtggcgccttccctcaactgcagtcaaaagacctcgtcggagttgggcaaggggccgctggctgcctttgtcaaaactaaggtctggtctctgatccagctggcgcgcagatacctgcagaagggctacaccacgctgctgttccaggagggggatttctactgctcctacttcctgtggttcgagaatgacatggggtacaaactccagatgatcgaggtgcccgtcctctccgacgactcagtgcctatcggcatgctgggaggagactactacaggaagctcctgcgctactacagcaagaaccgcccaaccgaggctgtcaggtgctacgagctgctggccctgcacctgtctgtcatccccactgacctgctggtgcagcaggccggccagctggcccggcgcctctgggaggcctcccgtatccccctgctctaggccaaggtggccgcagtctgcctttgcatcctgtcctccagccacccttgcttgccactgttccccatgacgagagcctcctgtctgcagtggccatcctgaggatagggcagagtgcccagggtggccccagggcttctaaaaccccacctagaccaccctccatgtcaggtactgagcaaggccccagatccttctctctggaggaagagggaagcccaggggtcctgtttgtaaaacaacggtggcaacagctcctcttccagagctgcctctgcctttatcctgggagatggggaggaagccccatctctgctgttccctgcgtggaggaagcccacccagcaagctctctcctaccccaggtaaaaggtgctcctttgcctgggtttgaattccagcgctgccacttcctctctgcacctcctggcaagtttcttctattccccacgtttaaagcgatggcacctccgtcccagggtggtgtgaggattacccagtgtggtaggtgctcaataaatgttggtcattgttatcactaaaaaaaaaaaaaaaaaaaaaaaaaaaaaaaaaaaaaaaaaaaaaaaaaaaaaaaaaaaaaaaaaaaaaaaaanaaaaaaaaaaaaaagagaggggcggcggcgaacatagtaatcacacgcagccgagggaggcgccccagaagcagagcagacgccgcacagttttgtggtagagcagagggaggggccaccaatagaggaggaggtcgtctgtcatatatctataacctccacgcacgcgaccggcggcggccgcgcgcgagctacaccaacaccagagcaggacagcgaccgcagaggaaccacaccgacaatcagagccggaggagcactatcgtgggacaaacaagcaacccgacaccaccggcgcggggggggggaagacacaatcaagagaggaacaaaaccacccaccaccgagcggagaaagcaagaagccacaccccgcaggggagacacacccacaaacgaccaaagagacgcaccgtaacaaa

SEQ ID NO: 372879 - DNA, 3643 bp, Homo sapiens
gcggtcctacccggaagcgcgcccgggctcctgcaggcggggcgctgtgcgcgccgcgatccggtacgtgggcctccgggctgtcccctctgggggcggcgatcctccctccggagccccccttcaaccctcccggaagtgagcatttgcaggaccagggatgctgtgctgctctcccatgagccagtcaccgagtcggtctgctgcagccctttctgaacctctggccgtctggatgctccactgtgcttgccaagatgaagtgcgtcttggtggccactgagggcgcagaggtcctcttctactggacagatcaggagtttgaagagagtctccggctgaagttcgggcagtcagagaatgaggaagaagagctccctgccctggaggaccagctcagcaccctcctagccccggtcatcatctcctccatgacgatgctggagaagctctcggacacctacacctgcttctccacggaaaatggcaacttcctgtatgtccttcacctgtttggagaatgcctgttcattgccatcaatggtgaccacaccgagagcgagggggacctgcggcggaagctgtatgtgctcaagtacctgtttgaagtgcactttgggctggtgactgtggacggtcatcttatccgaaaggagctgcggcccccagacctggcgcagcgtgtccagctgtgggagcacttccagagcctgctgtggacctacagccgcctgcgggagcaggagcagtgcttcgccgtggaggccctggagcgactgattcacccccagctctgtgagctgtgcatagaggcgctggagcggcacgtcatccaggctgtcaacaccagccccgagcggggaggcgaggaggccctgcatgccttcctgctcgtgcactccaagctgctggcattctactctagccacagtgccagctccctgcgcccggccgacctgcttgccctcatcctcctggttcaggacctctaccccagcgagagcacagcagaggacgacattcagccttccccgcggagggcccggagcagccagaacatccccgtgcagcaggcctggagccctcactccacgggcccaactggggggagctctgcagagacggagacagacagcttctccctccctgaggagtacttcacaccagctccttcccctggcgatcagagctcaggtagcaccatctggctggaggggggcaccccccccatggatgcccttcagatagcagaggacaccctccaaacactggttccccactgccctgtgccttccggccccagaaggatcttcctggatgccaacgtgaaggaaagctactgccccctagtgccccacaccatgtactgcctgcccctgtggcagggcatcaacctggtgctcctgaccaggagccccagcgcgcccctggccctggttctgtcccagctgatggatggcttctccatgctggagaagaagctgaaggaagggccggagcccggggcctccctgcgctcccagcccctcgtgggagacctgcgccagaggatggacaagtttgtcaagaatcgaggggcacaggagattcagagcacctggctggagtttaaggccaaggctttctccaaaagtgagcccggatcctcctgggagctgctccaggcatgtgggaagctgaagcggcagctctgcgccatctaccggctgaactttctgaccacagcccccagcaggggaggcccacacctgccccagcacctgcaggaccaagtgcagaggctcatgcgggagaagctgacggactggaaggacttcttgctggtgaagagcaggaggaacatcaccatggtgtcctacctagaagacttcccaggcttggtgcacttcatctatgtggaccgcaccactgggcagatggtggcgccttccctcaactgcagtcaaaagacctcgtcggagttgggcaaggggccgctggctgcctttgtcaaaactaaggtctggtctctgatccagctggcgcgcagatacctgcagaagggctacaccacgctgctgttccaggagggggatttctactgctcctacttcctgtggttcgagaatgacatggggtacaaactccagatgatcgaggtgcccgtcctctccgacgactcagtgcctatcggcatgctgggaggagactactacaggaagctcctgcgctactacagcaagaaccgcccaaccgaggctgtcaggtgctacgagctgctggccctgcacctgtctgtcatccccactgacctgctggtgcagcaggccggccagctggcccggcgcctctgggaggcctcccgtatccccctgctctaggccaaggtggccgcagtctgcctttgcatcctgtcctccagccacccttgcttgccactgttccccatgacgagagcctcctgtctgcagtggccatcctgaggatagggcagagtgcccagggtggccccagggcttctaaaaccccacctagaccaccctccatgtcaggtaaaaggtgctcctttgcctgggtttgaattccagcgctgccacttcctctctgcacctcctggcaagtttcttctattccccacgtttaaagcgatggcacctccgtcccagggtggtgtgaggattacccagtgtggagaggactccagtgctcctcagcgacagacacagctgcctctgcggtgtctgaaggccctggtcgtggtgacgctagatggccgccctgggcgcctcctgtgggcgtagaggcatcaccactctgcactggcagactcagcatggagttggagcagagtctgacacgagcacttgccatcccaggcgtttcagttctgactgagaaggtagatgcacaggggaggagagggccctttcgagctccgctctgcctccaccactcattccctaaccccgcagcctcagcgccctcacctgtaaaatggggagttttgcctacagggttcagcacaatgccagcctgacataggaacccctcgtcacaagaaactgcagtcatttcataaaggccagttaggataaaacagaactgagtcccagagttcctactgcgtgtctgcagagggagatggaccccattgccttgcagctctgggacatttggggatctgcagtgatctgccacactttgccaacccctgggctcagagtatcacagtctactgggtgctaggggaagaggcaggcccaggaccaggtggtctttccttagtgccttcctttcacacttgcagagggccccaaatgcatgattgccaactgggtctatacagagataatgacgggaccgaaagcagacggcactcaacatgcagctttgagggcatgccttcattttcatatgtactagagcagttgcgagctggtagatactcaacactcacctctccagggaaaaatgtgtgatgtatgtgtgtgtgtacatgtatatatatgtatatatacacacatatatgtgtatatatatgtatatgtgttacgtacatatatatacacatatacacatgcttattttaaatattgaaataaaagatacactgcacacaattttacaaataaagatacaatactctcaatttaaaaaaaaaaaa

SEQ ID NO: 372880 - DNA, 1843 bp, Homo sapiens
gcggtcctacccggaagcgcgcccgggctcctgcaggcggggcgctgtgcgcgccgcgatccggtacgtgggcctccgggctgtcccctctgggggcggcgatcctccctccggagccccccttcaaccctcccggaagtgagcatttgcaggaccagggatgctgtgctgctctcccatgagccagtcaccgagtcggtctgctgcagccctttctgaacctctggccgtctggatgctccactgtgcttgccaagatgaagtgcgtcttggtggccactgagggcgcagaggtcctcttctactggacagatcaggagtttgaagagagtctccggctgaagttcgggcagtcagagaatgaggaagaagagctccctgccctggaggaccagctcagcaccctcctagccccggtcatcatctcctccatgacgatgctggagaagctctcggacacctacacctgcttctccacggaaaatggcaacttcctgtatgtccttcacctgtttggagaatgcctgttcattgccatcaatggtgaccacaccgagagcgagggggacctgcggcggaagctgtatgtgctcaagtacctgtttgaagtgcactttgggctggtgactgtggacggtcatcttatccgaaaggagctgcggcccccagacctggcgcagcgtgtccagctgtgggagcacttccagagcctgctgtggacctacagccgcctgcgggagcaggagcagtgcttcgccgtggaggtgactactgggcgcgggagtcctcaggacttgaagctgtcagccacagtgccagctccctgcgcccggccgacctgcttgccctcatcctcctggttcaggacctctaccccagcgagagcacagcagaggacgacattcaggagacagacagcttctccctccctgaggagtacttcacaccagctccttcccctggcgatcagagctcaggtgaggaccggaggaaagcaggaggaaacaatagctagctgcgagcgacaggcagcccaggacatctgtcttaggctccagtggacccccgtgcctcctaaggcttgagtgcaggtacccgtgttcctagagcacaggacgctgtctgcggctccccatcttccctgccagctccagcctgaactcaaggactgttaagaccactccactgatccctaaagctgttgatgacaagttgattcatttaaaacttctgtacatgcattctcagactcatcttttttgtaattaaaattaaaaattaagttaaatttagtaataatcatctaatttctatacattctaaaatatattcagcatctgtagtttatactttgtttctccaaagtatgtgggtaaacaataaaaaaaaactataaatattcaaaatggttgaggtgtggtcgtcacgcctgtaatcccagcactttgggaggccgaggcgggtagatcacctgaggtcaggagtttgagactagcctggccaacatggcgaaaccccatgtctactaaaaatacaaaaattagccaggtctggtggcaggcgcctgtaatcccagctactcgggaggctgaggcaggagaatcgcttgaacccgggaggtggaggttgcagtgagccaagatcatgccactgcactccagcctgggcgacagagcaagactctgtctcaaaaaaaaaaaacaaaacaaaactacaaatattcaaaatgttaacaaaaaatggacaaccttgcttagagaagtagataaaccaaaatccagactgttgtggtcactatgaataaacattacatttatttctgaagttcttaggtaaaaaaaaa

SEQ ID NO: 372881 - DNA, 1285 bp, Homo sapiens
gcggtcctacccggaagcgcgcccgggctcctgcaggcggggcgctgtgcgcgccgcgatccggtacgtgggcctccgggctgtcccctctgggggcggcgatcctccctccggagccccccttcaaccctcccggaagtgagcatttgcaggaccagggatgctgtgctgctctcccatgagccagtcaccgagtcggtctgctgcagccctttctgaacctctggccgtctggatgctccactgtgcttgccaagatgaagtgcgtcttggtggccactgagggcgcagaggtcctcttctactggacagatcaggagtttgaagagagtctccggctgaagttcgggcagtcagagaatgaggaagaagagctccctgccctggaggaccagctcagcaccctcctagccccggtcatcatctcctccatgacgatgctggagaagctctcggacacctacacctgcttctccacggaaaatggcaacttcctgtatgtccttcacctgtttggagaatgcctgttcattgccatcaatggtgaccacaccgagagcgagggggacctgcggcggaagctgtatgtgctcaagtacctgtttgaagtgcactttgggctggtgactgtggacggtcatcttatccgaaaggagctgcggcccccagacctggcgcagcgtgtccagctgtgggagcacttccagagcctgctgtggacctacagccgcctgcgggagcaggagcagtgcttcgccgtggaggtgactactgggcgcgggagtcctcaggacttgaagctgtcaggtcagagggggcgtccacctttaagaccatgttttaaccctaatgaatgaaggcacaagcagcccctgaaactcgtgtattcagagagagttgttctttctggccatatggagggttgggtaccctgatgggctttcccatggtaaaacagctcgatcctggataacacatacttttaatgcaatttttgggttcactgtaaattacaggaatctttgaagacagttccttcaaccctcccctccttttcccacaaaattatattgagctggaactggaggggaaagcagtggagaaaaacacagcgctaaaggcaagattccctgagtgcaaatgataccagcactacagccagtaaatagccttaggccagcagcagcataggagagctgagcctgcaactctaggttaagcccagccccaaaaagttaaagtggctactggtccttttataaagccctagtaaataaaaaaaaaa

SEQ ID NO: 372882 - DNA, 1436 bp, Homo sapiens
gcggtcctacccggaagcgcgcccgggctcctgcaggcggggcgctgtgcgcgccgcgatccggtacgtgggcctccgggctgtcccctctgggggcggcgatcctccctccggagccccccttcaaccctcccggaagtgagcatttgcaggaccagggatgctgtgctgctctcccatgagccagtcaccgagtcggtctgctgcagccctttctgaacctctggccgtctggatgctccactgtgcttgccaagatgaagtgcgtcttggtggccactgagggcgcagaggtcctcttctactggacagatcaggagtttgaagagagtctccggctgaagttcgggcagtcagagaatgaggaagaagaggttggcctcttgatgctctgagctcggtgaccccacccccacaccccaccagtcctctctggactaaatgagggcaagaagaagtcgaattttatcacgtaacagaagaacttggagccatcagtttctgtaacctaaaaagtttaacaaggctgggcgcggtggctcacgcctgtaatcacaacactttgggaagccaaggtgggccagttgcttgagctcagggatttgagaccagcctgggcagcatggcgaaaccctgtctctacaaaaaaaatacaaaaattagccaggtgtggtggtgcgtgcctatagtcccagctacttgggaggttgaggtgggaggatcacttgagtccaggtggtagaggctgcagtgagccgagactgtgcccatgcattccaacctgggcgacagagcaaaaaaaaaaaaaaaaagtttaacgtaagctgaacacgttaattttttaatagctgtattaaggtatgattaacataccataaattgcacatatttaaagtgcataatttgataagctttgatatgtatatacctatgattctatcacaatcaataaaaggaatatatctaccacctcaaacatttgtaatcccttctttcccatccccatcgcataggaactgctgatctgctttctgtcatgatagattagtttgtatcatatggccttatataaatggagtcatacagtatgtgcttggatttagtttggttttggtttgactgctttcactcagcataattattttgtgattcatctgtgttgtggcatgtatcaatcgttcattccttgtcattgagtagtaatctattgtatcaggatgccaccatttgttcattcatttacttgttgatggacatctgtgttattttcagtttttgactattacaaataaagcaactatgaacatgcacgtacaagtctatgtatacatggatgctttcatgtccaaggacagatacttaggatagactggctaggtcatgtaggtgtatgtgtaactttttaataaactgccaaacttttccaaagtggttgt

SEQ ID NO: 372883 - DNA, 1596 bp, Homo sapiens
gcggtcctacccggaagcgcgcccgggctcctgcaggcggggcgctgtgcgcgccgcgatccggtacgtgggcctccgggctgtcccctctgggggcggcgatcctccctccggagccccccttcaaccctcccggaagtgaggtagggtccctaggggtcccggagcgggcccactcctagcctcacccactccgggcgtgtggccgtgggccggtcgcttcctcgctcggggccaaagttcctcagccgtgaagaggggtggatgtcacaagtcaagcctccttcccagggtggccgtgagcatttgcaggaccagggatgctgtgctgctctcccatgagccagtcaccgagtcggtctgctgcagccctttctgaacctctggccgtctggatgctccactgtgcttgccaagatgaagtgcgtcttggtggccactgagggcgcagaggtcctcttctactggacagatcaggagtttgaagagagtctccggctgaagttcgggcagtcagagaatgaggaagaagaggttggcctcttgatgctctgagctcggtgaccccacccccacaccccaccagtcctctctggactaaatgagggcaagaagaagtcgaattttatcacgtaacagaagaacttggagccatcagtttctgtaacctaaaaagtttaacaaggctgggcgcggtggctcacgcctgtaatcacaacactttgggaagccaaggtgggccagttgcttgagctcagggatttgagaccagcctgggcagcatggcgaaaccctgtctctacaaaaaaaatacaaaaattagccaggtgtggtggtgcgtgcctatagtcccagctacttgggaggttgaggtgggaggatcacttgagtccaggtggtagaggctgcagtgagccgagactgtgcccatgcattccaacctgggcgacagagcaaaaaaaaaaaaaaaaagtttaacgtaagctgaacacgttaattttttaatagctgtattaaggtatgattaacataccataaattgcacatatttaaagtgcataatttgataagctttgatatgtatatacctatgattctatcacaatcaataaaaggaatatatctaccacctcaaacatttgtaatcccttctttcccatccccatcgcataggaactgctgatctgctttctgtcatgatagattagtttgtatcatatggccttatataaatggagtcatacagtatgtgcttggatttagtttggttttggtttgactgctttcactcagcataattattttgtgattcatctgtgttgtggcatgtatcaatcgttcattccttgtcattgagtagtaatctattgtatcaggatgccaccatttgttcattcatttacttgttgatggacatctgtgttattttcagtttttgactattacaaataaagcaactatgaacatgcacgtacaagtctatgtatacatggatgctttcatgtccaaggacagatacttaggatagactggctaggtcatgtaggtgtatgtgtaactttttaataaactgccaaacttttccaaagtggttgt

SEQ ID NO: 372884 - DNA, 340 bp, Homo sapiens
aagaggggtggatgtcacaagtcaagcctccttcccagggtggccgtgaggttcgggggtggggggaggtggggatttggggtgaaactggacagaaactggcgtgctaggcaaacgggagccccgcggcggcgaactgctgactcgctctctccagagactcaggggcagggccgggctccgaaggtgtgggaccccagaaggagctgctgaagacgggaccaagggccacagggaggtttgctggggtccagatggtgaaagtgggcgctgggggtcgccccaggttggccccccgccatctggagctcctttcgtcagtgagtcccctccgagttcc

SEQ ID NO: 372885 - DNA, 2060 bp, Homo sapiens
gcggtcctacccggaagcgcgcccgggctcctgcaggcggggcgctgtgcgcgccgcgatccggtacgtgggcctccgggctgtcccctctgggggcggcgatcctccctccggagccccccttcaaccctcccggaagtgagcatttgcaggaccagggatgctgtgctgctctcccatgagccagtcaccgagtcggtctgctgcagccctttctgaacctctggccgtctggatgctccactgtgcttgccaagatgaagtgcgtcttggtggccactgagggcgcagaggtcctcttctactggacagatcaggagtttgaagagagtctccggctgaagttcgggcagtcagagaatgaggaagaagagctccctgccctggaggaccagctcagcaccctcctagccccggtcatcatctcctccatgacgatgctggagaagctctcggacacctacacctgcttctccacggaaaatggcaacttcctgtatgtccttcacctgtttggagaatgcctgttcattgccatcaatggtgaccacaccgagagcgagggggacctgcggcggaagctgtatgtgctcaagtacctgtttgaagtgcactttgggctggtgactgtggacggtcatcttatccgaaaggagctgcggcccccagacctggcgcagcgtgtccagctgtgggagcacttccagagcctgctgtggacctacagccgcctgcgggagcaggagcagtgcttcgccgtggaggccctggagcgactgattcacccccagctctgtgagctgtgcatagaggcgctggagcggcacgtcatccaggctgtcaacaccagccccgagcggggaggcgaggaggccctgcatgccttcctgctcgtgcactccaagctgctggcattctactctagccacagtgccagctccctgcgcccggccgacctgcttgccctcatcctcctggttcaggacctctaccccagcgagagcacagcagaggacgacattcagccttccccgcggagggcccggagcagccagaacatccccgtgcagcaggcctggagccctcactccacgggcccaactggggggagctctgcagagacggagacagacagcttctccctccctgaggagtacttcacaccagctccttcccctggcgatcagagctcaggtgaggaccggaggaaagcaggaggaaacaatagctagctgcgagcgacaggcagcccaggacatctgtcttaggctccagtggacccccgtgcctcctaaggcttgagtgcaggtacccgtgttcctagagcacaggacgctgtctgcggctccccatcttccctgccagctccagcctgaactcaaggactgttaagaccactccactgatccctaaagctgttgatgacaagttgattcatttaaaacttctgtacatgcattctcagactcatcttttttgtaattaaaattaaaaattaagttaaatttagtaataatcatctaatttctatacattctaaaatatattcagcatctgtagtttatactttgtttctccaaagtatgtgggtaaacaataaaaaaaaactataaatattcaaaatggttgaggtgtggtcgtcacgcctgtaatcccagcactttgggaggccgaggcgggtagatcacctgaggtcaggagtttgagactagcctggccaacatggcgaaaccccatgtctactaaaaatacaaaaattagccaggtctggtggcaggcgcctgtaatcccagctactcgggaggctgaggcaggagaatcgcttgaacccgggaggtggaggttgcagtgagccaagatcatgccactgcactccagcctgggcgacagagcaagactctgtctcaaaaaaaaaaaacaaaacaaaactacaaatattcaaaatgttaacaaaaaatggacaaccttgcttagagaagtagataaaccaaaatccagactgttgtggtcactatgaataaacattacatttatttctgaagttcttaggtaaaaaaaaa

SEQ ID NO: 372886 - DNA, 766 bp, Homo sapiens
gcggtcctacccggaagcgcgcccgggctcctgcaggcggggcgctgtgcgcgccgcgatccgcatttgcaggaccagggatgctgtgctgctctcccatgagccagtcaccgagtcggtctgctgcagccctttctgaacctctggccgtctggatgctccactgtgcttgccaagatgaagtgcgtcttggtggccactgagggcgcagaggtcctcttctactggacagatcaggagtttgaagagagtctccggctgaagttcgggcagtcagagaatgaggaagaagagctccctgccctggaggaccagctcagcaccctcctagccccggtcatcatctcctccatgacgatgctggagaagctctcggacacctacacctgcttctccacggaaaatggcaacttcctgtatgtccttcacctgtttggagaatgcctgttcattgccatcaatggtgaccacaccgagagcgagggggacctgcggcggaagctgtatgtgctcaagtacctgtttgaagtgcactttgggctggtgactgtggacggtcatcttatccgaaaggagtgagtcttcaaagctggtcccctctgtcctttgccgagcaccctcgctgggccaggcagcgtgtgcccagcccctgtgaagctgccatttttcacatactgcccccagctgggtccctaggtcagagaaacagctcaagtgaaccttggagaccatctggtctgaccctctgactttatatctggtgaaa

SEQ ID NO: 372887 - DNA, 490 bp, Homo sapiens
gcagaaatggctgcaagtggccgaggtctctgcaaggctgtggccgcctctcccttcccggcgtggagacgagataacacggaagccaggggaggtctgaagcctgagtatgatgcggtggtgataggagcagagggccccaaatgcatgattgccaactgggtctatacagagataatgacgggaccgaaagcagacggcactcaacatgcagctttgagggcatgccttcattttcatatgtactagagcagttgcgagctggtagatactcaacactcacctctccagggaaaaatgtgtgatgtatgtgtgtgtgtacatgtatatatatgtatatatacacacatatatgtgtatatatatgtatatgtgttacgtacatatatatacacatatacacatgcttattttaaatattgaaataaaagatacactgcacacaattttacaaataaagatacaatactctcaatttaaaaaaaaaaaa

SEQ ID NO: 372888 - DNA, 3710 bp, Homo sapiens
gcggtcctacccggaagcgcgcccgggctcctgcaggcggggcgctgtgcgcgccgcgatccggtacgtgggcctccgggctgtcccctctgggggcggcgatcctccctccggagccccccttcaaccctcccggaagtgagcatttgcaggaccagggatgctgtgctgctctcccatgagccagtcaccgagtcggtctgctgcagccctttctgaacctctggccgtctggatgctccactgtgcttgccaagatgaagtgcgtcttggtggccactgagggcgcagaggtcctcttctactggacagatcaggagtttgaagagagtctccggctgaagttcgggcagtcagagaatgaggaagaagagctccctgccctggaggaccagctcagcaccctcctagccccggtcatcatctcctccatgacgatgctggagaagctctcggacacctacacctgcttctccacggaaaatggcaacttcctgtatgtccttcacctgtttggagaatgcctgttcattgccatcaatggtgaccacaccgagagcgagggggacctgcggcggaagctgtatgtgctcaagtacctgtttgaagtgcactttgggctggtgactgtggacggtcatcttatccgaaaggagctgcggcccccagacctggcgcagcgtgtccagctgtgggagcacttccagagcctgctgtggacctacagccgcctgcgggagcaggagcagtgcttcgccgtggaggccctggagcgactgattcacccccagctctgtgagctgtgcatagaggcgctggagcggcacgtcatccaggctgtcaacaccagccccgagcggggaggcgaggaggccctgcatgccttcctgctcgtgcactccaagctgctggcattctactctagccacagtgccagctccctgcgcccggccgacctgcttgccctcatcctcctggttcaggacctctaccccagcgagagcacagcagaggacgacattcagccttccccgcggagggcccggagcagccagaacatccccgtgcagcaggcctggagccctcactccacgggcccaactggggggagctctgcagagacggagacagacagcttctccctccctgaggagtacttcacaccagctccttcccctggcgatcagagctcaggtagcaccatctggctggaggggggcaccccccccatggatgcccttcagatagcagaggacaccctccaaacactggttccccactgccctgtgccttccggccccagaaggatcttcctggatgccaacgtgaaggaaagctactgccccctagtgccccacaccatgtactgcctgcccctgtggcagggcatcaacctggtgctcctgaccaggagccccagcgcgcccctggccctggttctgtcccagctgatggatggcttctccatgctggagaagaagctgaaggaagggccggagcccggggcctccctgcgctcccagcccctcgtgggagacctgcgccagaggatggacaagtttgtcaagaatcgaggggcacaggagattcagagcacctggctggagtttaaggccaaggctttctccaaaagtgagcccggatcctcctgggagctgctccaggcatgtgggaagctgaagcggcagctctgcgccatctaccggctgaactttctgaccacagcccccagcaggggaggcccacacctgccccagcacctgcaggaccaagtgcagaggctcatgcgggagaagctgacggactggaaggacttcttgctggtgaagagcaggaggaacatcaccatggtgtcctacctagaagacttcccaggcttggtgcacttcatctatgtggaccgcaccactgggcagatggtggcgccttccctcaactgcagtcaaaagacctcgtcggagttgggcaaggggccgctggctgcctttgtcaaaactaaggtctggtctctgatccagctggcgcgcagatacctgcagaagggctacaccacgctgctgttccaggagggggatttctactgctcctacttcctgtggttcgagaatgacatggggtacaaactccagatgatcgaggtgcccgtcctctccgacgactcagtgcctatcggcatgctgggaggagactactacaggaagctcctgcgctactacagcaagaaccgcccaaccgaggctgtcaggtgctacgagctgctggccctgcacctgtctgtcatccccactgacctgctggtgcagcaggccggccagctggcccggcgcctctgggaggcctcccgtatccccctgctctaggccaaggtggccgcagtctgcctttgcatcctgtcctccagccacccttgcttgccactgttccccatgacgagagcctcctgtctgcagtggccatcctgaggatagggcagagtgcccagggtggccccagggcttctaaaaccccacctagaccaccctccatgtcaggtactgagcaaggccccagatccttctctctggaggaagagggaagcccaggggtcctgtttgtaaaacaacggtggcaacagctcctcttccagagctgcctctgcctttatcctgggagatggggaggaagccccatctctgctgttccctgcgtggaggaagcccacccagcaagctctctcctaccccaggtaaaaggtgctcctttgcctgggtttgaattccagcgctgccacttcctctctgcacctcctggcaagtttcttctattccccacgtttaaagcgatggcacctccgtcccagggtggtgtgaggattacccagtgtggtaggtgctcaataaatgttggtcattgttatcactgaagcccaacatgctagtgcttctagacccttctgtcagtgctgataagcccttgctaagtcccagccccttcatgcttggctggcgtctgccctagggctggggttctcaagcccctggccctggcccagagatttggattcccttggcggccgtggagcccaggctttgatgtctttcaaagcttctgtggtgcgccctggattgagaaccaccacccgaggggtacagcccctctcttccaaccgagaagttcctgtccagaatggacccagggacaagagaccctgagagccctgggactgggagtgtctgctcctctgaggccaggaggccggtgctgggccagagaggacggcgtggcgaaagtcagcgtccactgcagcacaggatcagatggccgtgtgctgtgcatgcaggagcctcgccttctgtgtctttagtcttgagccaaaatttgctcaaagactgatctcttccttgcagggaacagctttggggctgggggaactagaacccacatgttggtctaaaccctgagaaggtggcagtgaggaagtatcccctcaggtgactggatctgtgttcctccttaacatcatctgatggaatggcaatgaaaagcgtggattgtggaaaatacagaaaaacataaaggaaaaaactccaatcccctgagcccaccactgttcaggacccctgcttttgtcacctactatttccctttagtttttagcagcggctggatgtgatatgtctagtttaaccagtccccttgatctttctatataataaataacacaggagtga

SEQ ID NO: 372889 - DNA, 4779 bp, Homo sapiens
gcggtcctacccggaagcgcgcccgggctcctgcaggcggggcgctgtgcgcgccgcgatccggtacgtgggcctccgggctgtcccctctgggggcggcgatcctccctccggagccccccttcaaccctcccggaagtgagcatttgcaggaccagggatgctgtgctgctctcccatgagccagtcaccgagtcggtctgctgcagccctttctgaacctctggccgtctggatgctccactgtgcttgccaagatgaagtgcgtcttggtggccactgagggcgcagaggtcctcttctactggacagatcaggagtttgaagagagtctccggctgaagttcgggcagtcagagaatgaggaagaagagctccctgccctggaggaccagctcagcaccctcctagccccggtcatcatctcctccatgacgatgctggagaagctctcggacacctacacctgcttctccacggaaaatggcaacttcctgtatgtccttcacctggctgcggcccccagacctggcgcagcgtgtccagctgtgggagcacttccagagcctgctgtggacctacagccgcctgcgggagcaggagcagtgcttcgccgtggaggtgactactgggcgcgggagtcctcaggacttgaagctgtcagccacagtgccagctccctgcgcccggccgacctgcttgccctcatcctcctggttcaggacctctaccccagcgagagcacagcagaggacgacattcaggagacagacagcttctccctccctgaggagtacttcacaccagctccttcccctggcgatcagagctcaggtagcaccatctggctggaggggggcaccccccccatggatgcccttcagatagcagaggacaccctccaaacactggttccccactgccctgtgccttccggccccagaaggatcttcctggatgccaacgtgaaggaaagctactgccccctagtgccccacaccatgtactgcctgcccctgtggcagggcatcaacctggtgctcctgaccaggagccccagcgcgcccctggccctggttctgtcccagctgatggatggcttctccatgctggagaagaagctgaaggaagggccggagcccggggcctccctgcgctcccagcccctcgtgggagacctgcgccagaggatggacaagtttgtcaagaatcgaggggcacaggagattcagagcacctggctggagtttaaggccaaggctttctccaaaagtgagcccggatcctcctgggagctgctccaggcatgtgggaagctgaagcggcagctctgcgccatctaccggctgaactttctgaccacagcccccagcaggggaggcccacacctgccccagcacctgcaggaccaagtgcagaggctcatgcgggagaagctgacggactggaaggacttcttgctggtgaagagcaggaggaacatcaccatggtgtcctacctagaagacttcccaggcttggtgcacttcatctatgtggaccgcaccactgggcagatggtggcgccttccctcaactgcagtcaaaagacctcgtcggagttgggcaaggggccgctggctgcctttgtcaaaactaaggtctggtctctgatccagctggcgcgcagatacctgcagaagggctacaccacgctgctgttccaggagggggatttctactgctcctacttcctgtggttcgagaatgacatggggtacaaactccagatgatcgaggtgcccgtcctctccgacgactcagtgcctatcggcatgctgggaggagactactacaggaagctcctgcgctactacagcaagaaccgcccaaccgaggctgtcaggtgctacgagctgctggccctgcacctgtctgtcatccccactgacctgctggtgcagcaggccggccagctggcccggcgcctctgggaggcctcccgtatccccctgctctaggccaaggtggccgcagtctgcctttgcatcctgtcctccagccacccttgcttgccactgttccccatgacgagagcctcctgtctgcagtggccatcctgaggatagggcagagtgcccagggtggccccagggcttctaaaaccccacctagaccaccctccatgtcaggtactgagcaaggccccagatccttctctctggaggaagagggaagcccaggggtcctgtttgtaaaacaacggtggcaacagctcctcttccagagctgcctctgcctttatcctgggagatggggaggaagccccatctctgctgttccctgcgtggaggaagcccacccagcaagctctctcctaccccaggtaaaaggtgctcctttgcctgggtttgaattccagcgctgccacttcctctctgcacctcctggcaagtttcttctattccccacgtttaaagcgatggcacctccgtcccagggtggtgtgaggattacccagtgtggtaggtgctcaataaatgttggtcattgttatcactgaagcccaacatgctagtgcttctagacccttctgtcagtgctgataagcccttgctaagtcccagccccttcatgcttggctggcgtctgccctagggctggggttctcaagcccctggccctggcccagagatttggattcccttggcggccgtggagcccaggctttgatgtctttcaaagcttctgtggtgcgccctggattgagaaccaccacccgaggggtacagcccctctcttccaaccgagaagttcctgtccagaatggacccagggacaagagaccctgagagccctgggactgggagtgtctgctcctctgaggccaggaggccggtgctgggccagagaggacggcgtggcgaaagtcagcgtccactgcagcacaggatcagatggccgtgtgctgtgcatgcaggagcctcgccttctgtgtctttagtcttgagccaaaatttgctcaaagactgatctcttccttgcagggaacagctttggggctgggggaactagaacccacatgttggtctaaaccctgagaaggtggcagtgaggaagtatcccctcaggtgactggatctgtgttcctccttaacatcatctgatggaatggcaatgaaaagcgtggattgtggaaaatacagaaaaacataaaggaaaaaactccaatcccctgagcccaccactgttcaggacccctgcttttgtcacctactatttccctttagtttttagcagcggctggatgtgatatgtctagtttaaccagtccccttgatctttctatataataaataacacaggagtgaacatcctgaatcagatcttagcagagatgctcacatgcggggtaactgtccatggtgtgtggaggggtcctcggaaccccctcttaggatcatctccacatactctcccagttctgagattcgttaccaatagcaggtttccgtcacactgcgatatcagagcagtgcaggaactctccgctccaaggggttttttcctcctaggggaacactctgctaagtaatgggcagagaacaaaggggctcctaattcaaggcaggcctaagggagggtcagaaagaactttagctggaggtatttacagatgtgacctcgaatccttggggattcttggaaaatgggcaaggtgccaaaagaggagaactggccaggccttcaaaactaaaacaccagagaattacagacagcgaacttgcccctaagccctcgttgtgggtttgtgtttgagcatttaggagaggactccagtgctcctcagcgacagacacagctgcctctgcggtgtctgaaggccctggtcgtggtgacgctagatggccgccctgggcgcctcctgtgggcgtagaggcatcaccactctgcactggcagactcagcatggagttggagcagagtctgacacgagcacttgccatcccaggcgtttcagttctgactgagaaggtagatgcacaggggaggagagggccctttcgagctccgctctgcctccaccactcattccctaaccccgcagcctcagcgccctcacctgtaaaatggggagttttgcctacagggttcagcacaatgccagcctgacataggaacccctcgtcacaagaaactgcagtcatttcataaaggccagttaggataaaacagaactgagtcccagagttcctactgcgtgtctgcagagggagatggaccccattgccttgcagctctgggacatttggggatctgcagtgatctgccacactttgccaacccctgggctcagagtatcacagtctactgggtgctaggggaagaggcaggcccaggaccaggtggtctttccttagtgccttcctttcacacttgcagagggccccaaatgcatgattgccaactgggtctatacagagataatgacgggaccgaaagcagacggcactcaacatgcagctttgagggcatgccttcattttcatatgtactagagcagttgcgagctggtagatactcaacactcacctctccagggaaaaatgtgtgatgtatgtgtgtgtgtacatgtatatatatgtatatatacacacatatatgtgtatatatatgtatatgtgttacgtacatatatatacacatatacacatgcttattttaaatattgaaataaaagatacactgcacacaattttacaaataaagatacaatactctcaatttaaaaaaaaaaaa

SEQ ID NO: 372890 - DNA, 4718 bp, Homo sapiens
cccgttccccaccaaagctgtggacacaagaagccctgagagacggtgcacgggtcagccagtcttgcgaattcggtccaacacaaggtcaaggatctccttgccaatggtgtagtgccctcgggcatagttatgggcagcaccctcctagccccggtcatcatctcctccatgacgatgctggagaagctctcggacacctacacctgcttctccacggaaaatggcaacttcctgtatgtccttcacctgtttggagaatgcctgttcattgccatcaatggtgaccacaccgagagcgagggggacctgcggcggaagctgtatgtgctcaagtacctgtttgaagtgcactttgggctggtgactgtggacggtcatcttatccgaaaggagctgcggcccccagacctggcgcagcgtgtccagctgtgggagcacttccagagcctgctgtggacctacagccgcctgcgggagcaggagcagtgcttcgccgtggagccacagtgccagctccctgcgcccggccgacctgcttgccctcatcctcctggttcaggacctctaccccagcgagagcacagcagaggacgacattcagccttccccgcggagggcccggagcagccagaacatccccgtgcagcaggcctggagccctcactccacgggcccaactggggggagctctgcagagacggagacagacagcttctccctccctgaggagtacttcacaccagctccttcccctggcgatcagagctcaggtagcaccatctggctggaggggggcaccccccccatggatgcccttcagatagcagaggacaccctccaaacactggttccccactgccctgtgccttccggccccagaaggatcttcctggatgccaacgtgaaggaaagctactgccccctagtgccccacaccatgtactgcctgcccctgtggcagggcatcaacctggtgctcctgaccaggagccccagcgcgcccctggccctggttctgtcccagctgatggatggcttctccatgctggagaagaagctgaaggaagggccggagcccggggcctccctgcgctcccagcccctcgtgggagacctgcgccagaggatggacaagtttgtcaagaatcgaggggcacaggagattcagagcacctggctggagtttaaggccaaggctttctccaaaagtgagcccggatcctcctgggagctgctccaggcatgtgggaagctgaagcggcagctctgcgccatctaccggctgaactttctgaccacagcccccagcaggggaggcccacacctgccccagcacctgcaggaccaagtgcagaggctcatgcgggagaagctgacggactggaaggacttcttgctggtgaagagcaggaggaacatcaccatggtgtcctacctagaagacttcccaggcttggtgcacttcatctatgtggaccgcaccactgggcagatggtggcgccttccctcaactgcagtcaaaagacctcgtcggagttgggcaaggggccgctggctgcctttgtcaaaactaaggtctggtctctgatccagctggcgcgcagatacctgcagaagggctacaccacgctgctgttccaggagggggatttctactgctcctacttcctgtggttcgagaatgacatggggtacaaactccagatgatcgaggtgcccgtcctctccgacgactcagtgcctatcggcatgctgggaggagactactacaggaagctcctgcgctactacagcaagaaccgcccaaccgaggctgtcaggtgctacgagctgctggccctgcacctgtctgtcatccccactgacctgctggtgcagcaggccggccagctggcccggcgcctctgggaggcctcccgtatccccctgctctaggccaaggtggccgcagtctgcctttgcatcctgtcctccagccacccttgcttgccactgttccccatgacgagagcctcctgtctgcagtggccatcctgaggatagggcagagtgcccagggtggccccagggcttctaaaaccccacctagaccaccctccatgtcaggtactgagcaaggccccagatccttctctctggaggaagagggaagcccaggggtcctgtttgtaaaacaacggtggcaacagctcctcttccagagctgcctctgcctttatcctgggagatggggaggaagccccatctctgctgttccctgcgtggaggaagcccacccagcaagctctctcctaccccaggtaaaaggtgctcctttgcctgggtttgaattccagcgctgccacttcctctctgcacctcctggcaagtttcttctattccccacgtttaaagcgatggcacctccgtcccagggtggtgtgaggattacccagtgtggtaggtgctcaataaatgttggtcattgttatcactgaagcccaacatgctagtgcttctagacccttctgtcagtgctgataagcccttgctaagtcccagccccttcatgcttggctggcgtctgccctagggctggggttctcaagcccctggccctggcccagagatttggattcccttggcggccgtggagcccaggctttgatgtctttcaaagcttctgtggtgcgccctggattgagaaccaccacccgaggggtacagcccctctcttccaaccgagaagttcctgtccagaatggacccagggacaagagaccctgagagccctgggactgggagtgtctgctcctctgaggccaggaggccggtgctgggccagagaggacggcgtggcgaaagtcagcgtccactgcagcacaggatcagatggccgtgtgctgtgcatgcaggagcctcgccttctgtgtctttagtcttgagccaaaatttgctcaaagactgatctcttccttgcagggaacagctttggggctgggggaactagaacccacatgttggtctaaaccctgagaaggtggcagtgaggaagtatcccctcaggtgactggatctgtgttcctccttaacatcatctgatggaatggcaatgaaaagcgtggattgtggaaaatacagaaaaacataaaggaaaaaactccaatcccctgagcccaccactgttcaggacccctgcttttgtcacctactatttccctttagtttttagcagcggctggatgtgatatgtctagtttaaccagtccccttgatctttctatataataaataacacaggagtgaacatcctgaatcagatcttagcagagatgctcacatgcggggtaactgtccatggtgtgtggaggggtcctcggaaccccctcttaggatcatctccacatactctcccagttctgagattcgttaccaatagcaggtttccgtcacactgcgatatcagagcagtgcaggaactctccgctccaaggggttttttcctcctaggggaacactctgctaagtaatgggcagagaacaaaggggctcctaattcaaggcaggcctaagggagggtcagaaagaactttagctggaggtatttacagatgtgacctcgaatccttggggattcttggaaaatgggcaaggtgccaaaagaggagaactggccaggccttcaaaactaaaacaccagagaattacagacagcgaacttgcccctaagccctcgttgtgggtttgtgtttgagcatttaggagaggactccagtgctcctcagcgacagacacagctgcctctgcggtgtctgaaggccctggtcgtggtgacgctagatggccgccctgggcgcctcctgtgggcgtagaggcatcaccactctgcactggcagactcagcatggagttggagcagagtctgacacgagcacttgccatcccaggcgtttcagttctgactgagaaggtagatgcacaggggaggagagggccctttcgagctccgctctgcctccaccactcattccctaaccccgcagcctcagcgccctcacctgtaaaatggggagttttgcctacagggttcagcacaatgccagcctgacataggaacccctcgtcacaagaaactgcagtcatttcataaaggccagttaggataaaacagaactgagtcccagagttcctactgcgtgtctgcagagggagatggaccccattgccttgcagctctgggacatttggggatctgcagtgatctgccacactttgccaacccctgggctcagagtatcacagtctactgggtgctaggggaagaggcaggcccaggaccaggtggtctttccttagtgccttcctttcacacttgcagagggccccaaatgcatgattgccaactgggtctatacagagataatgacgggaccgaaagcagacggcactcaacatgcagctttgagggcatgccttcattttcatatgtactagagcagttgcgagctggtagatactcaacactcacctctccagggaaaaatgtgtgatgtatgtgtgtgtgtacatgtatatatatgtatatatacacacatatatgtgtatatatatgtatatgtgttacgtacatatatatacacatatacacatgcttattttaaatattgaaataaaagatacactgcacacaattttacaaataaagatacaatactctcaatttaaaaaaaaaaaa

SEQ ID NO: 372891 - DNA, 4526 bp, Homo sapiens
atcacatgcatatgttatttatctagcaaatccccaggaaaatcgcgtcatgtgtccagtgtttgctgttaggtatgacactgaagaggaatttttgtggcatctctcatgatttccttaattctataattttttgcactaaaggctttcttgcttagatccctctgtaaggctggagccttgcccatttggtcactttatgcctcagtttccccaatttgagtggctgttgggatgttctgagggtgattgaaatgatacaatgttgaacattagatacctccatctgttgcaaatgtggggaggggacctctccccgtccactccccatccacgagtgtttccctgccttctcggtcctctgtgccaccacccagcccctctgcccctgcccactgccctgcttggcacccgggccagactctgggcagaaaggcccaggagcagctgagggagaggggcaacagcgaaactggagctgcgagggcaggttcagcagagtgcaggaatttaaaaactggagtttcttggagctaaaaatgattatttcttgtggttcacagatagggccgcaatgggtgggtccaacttagggatcccacctctcactgcagctcttcttcctctgtagatagcagaggacaccctccaaacactggttccccactgccctgtgccttccggccccagaaggatcttcctggatgccaacgtgaaggaaagctactgccccctagtgccccacaccatgtactgcctgcccctgtggcagggcatcaacctggtgctcctgaccaggagccccagcgcgcccctggccctggttctgtcccagctgatggatggcttctccatgctggagaagaagctgaaggaagggccggagcccggggcctccctgcgctcccagcccctcgtgggagacctgcgccagaggatggacaagtttgtcaagaatcgaggggcacaggagattcagagcacctggctggagtttaaggccaaggctttctccaaaagtgagcccggatcctcctgggagctgctccaggcatgtgggaagctgaagcggcagctctgcgccatctaccggctgaactttctgaccacagcccccagcaggggaggcccacacctgccccagcacctgcaggaccaagtgcagaggctcatgcgggagaagctgacggactggaaggacttcttgctggtgaagagcaggaggaacatcaccatggtgtcctacctagaagacttcccaggcttggtgcacttcatctatgtggaccgcaccactgggcagatggtggcgccttccctcaactgcagtcaaaagacctcgtcggagttgggcaaggggccgctggctgcctttgtcaaaactaaggtctggtctctgatccagctggcgcgcagatacctgcagaagggctacaccacgctgctgttccaggagggggatttctactgctcctacttcctgtggttcgagaatgacatggggtacaaactccagatgatcgaggtgcccgtcctctccgacgactcagtgcctatcggcatgctgggaggagactactacaggaagctcctgcgctactacagcaagaaccgcccaaccgaggctgtcaggtgctacgagctgctggccctgcacctgtctgtcatccccactgacctgctggtgcagcaggccggccagctggcccggcgcctctgggaggcctcccgtatccccctgctctaggccaaggtggccgcagtctgcctttgcatcctgtcctccagccacccttgcttgccactgttccccatgacgagagcctcctgtctgcagtggccatcctgaggatagggcagagtgcccagggtggccccagggcttctaaaaccccacctagaccaccctccatgtcaggtactgagcaaggccccagatccttctctctggaggaagagggaagcccaggggtcctgtttgtaaaacaacggtggcaacagctcctcttccagagctgcctctgcctttatcctgggagatggggaggaagccccatctctgctgttccctgcgtggaggaagcccacccagcaagctctctcctaccccaggtaaaaggtgctcctttgcctgggtttgaattccagcgctgccacttcctctctgcacctcctggcaagtttcttctattccccacgtttaaagcgatggcacctccgtcccagggtggtgtgaggattacccagtgtggtaggtgctcaataaatgttggtcattgttatcactgaagcccaacatgctagtgcttctagacccttctgtcagtgctgataagcccttgctaagtcccagccccttcatgcttggctggcgtctgccctagggctggggttctcaagcccctggccctggcccagagatttggattcccttggcggccgtggagcccaggctttgatgtctttcaaagcttctgtggtgcgccctggattgagaaccaccacccgaggggtacagcccctctcttccaaccgagaagttcctgtccagaatggacccagggacaagagaccctgagagccctgggactgggagtgtctgctcctctgaggccaggaggccggtgctgggccagagaggacggcgtggcgaaagtcagcgtccactgcagcacaggatcagatggccgtgtgctgtgcatgcaggagcctcgccttctgtgtctttagtcttgagccaaaatttgctcaaagactgatctcttccttgcagggaacagctttggggctgggggaactagaacccacatgttggtctaaaccctgagaaggtggcagtgaggaagtatcccctcaggtgactggatctgtgttcctccttaacatcatctgatggaatggcaatgaaaagcgtggattgtggaaaatacagaaaaacataaaggaaaaaactccaatcccctgagcccaccactgttcaggacccctgcttttgtcacctactatttccctttagtttttagcagcggctggatgtgatatgtctagtttaaccagtccccttgatctttctatataataaataacacaggagtgaacatcctgaatcagatcttagcagagatgctcacatgcggggtaactgtccatggtgtgtggaggggtcctcggaaccccctcttaggatcatctccacatactctcccagttctgagattcgttaccaatagcaggtttccgtcacactgcgatatcagagcagtgcaggaactctccgctccaaggggttttttcctcctaggggaacactctgctaagtaatgggcagagaacaaaggggctcctaattcaaggcaggcctaagggagggtcagaaagaactttagctggaggtatttacagatgtgacctcgaatccttggggattcttggaaaatgggcaaggtgccaaaagaggagaactggccaggccttcaaaactaaaacaccagagaattacagacagcgaacttgcccctaagccctcgttgtgggtttgtgtttgagcatttaggagaggactccagtgctcctcagcgacagacacagctgcctctgcggtgtctgaaggccctggtcgtggtgacgctagatggccgccctgggcgcctcctgtgggcgtagaggcatcaccactctgcactggcagactcagcatggagttggagcagagtctgacacgagcacttgccatcccaggcgtttcagttctgactgagaaggtagatgcacaggggaggagagggccctttcgagctccgctctgcctccaccactcattccctaaccccgcagcctcagcgccctcacctgtaaaatggggagttttgcctacagggttcagcacaatgccagcctgacataggaacccctcgtcacaagaaactgcagtcatttcataaaggccagttaggataaaacagaactgagtcccagagttcctactgcgtgtctgcagagggagatggaccccattgccttgcagctctgggacatttggggatctgcagtgatctgccacactttgccaacccctgggctcagagtatcacagtctactgggtgctaggggaagaggcaggcccaggaccaggtggtctttccttagtgccttcctttcacacttgcagagggccccaaatgcatgattgccaactgggtctatacagagataatgacgggaccgaaagcagacggcactcaacatgcagctttgagggcatgccttcattttcatatgtactagagcagttgcgagctggtagatactcaacactcacctctccagggaaaaatgtgtgatgtatgtgtgtgtgtacatgtatatatatgtatatatacacacatatatgtgtatatatatgtatatgtgttacgtacatatatatacacatatacacatgcttattttaaatattgaaataaaagatacactgcacacaattttacaaataaagatacaatactctcaatttaaaaaaaaaaaa

SEQ ID NO: 372892 - DNA, 3528 bp, Homo sapiens
  misc_feature (2974)..(2974): n is a, c, g, or t
gcggtcctacccggaagcgcgcccgggctcctgcaggcggggcgctgtgcgcgccgcgatccggtacgtgggcctccgggctgtcccctctgggggcggcgatcctccctccggagccccccttcaaccctcccggaagtgagcatttgcaggaccagggatgctgtgctgctctcccatgagccagtcaccgagtcggtctgctgcagccctttctgaacctctggccgtctggatgctccactgtgcttgccaagatgaagtgcgtcttggtggccactgagggcgcagaggtcctcttctactggacagatcaggagtttgaagagagtctccggctgaagttcgggcagtcagagaatgaggaagaagagctccctgccctggaggaccagctcagcaccctcctagccccggtcatcatctcctccatgacgatgctggagaagctctcggacacctacacctgcttctccacggaaaatggcaacttcctgtatgtccttcacctgtttggagaatgcctgttcattgccatcaatggtgaccacaccgagagcgagggggacctgcggcggaagctgtatgtgctcaagtacctgtttgaagtgcactttgggctggtgactgtggacggtcatcttatccgaaaggagctgcggcccccagacctggcgcagcgtgtccagctgtgggagcacttccagagcctgctgtggacctacagccgcctgcgggagcaggagcagtgcttcgccgtggaggccctggagcgactgattcacccccagctctgtgagctgtgcatagaggcgctggagcggcacgtcatccaggctgtcaacaccagccccgagcggggaggcgaggaggccctgcatgccttcctgctcgtgcactccaagctgctggcattctactctagccacagtgccagctccctgcgcccggccgacctgcttgccctcatcctcctggttcaggacctctaccccagcgagagcacagcagaggacgacattcagccttccccgcggagggcccggagcagccagaacatccccgtgcagcaggcctggagccctcactccacgggcccaactggggggagctctgcagagacggagacagacagcttctccctccctgaggagtacttcacaccagctccttcccctggcgatcagagctcaggtagcaccatctggctggaggggggcaccccccccatggatgcccttcagatagcagaggacaccctccaaacactggttccccactgccctgtgccttccggccccagaaggatcttcctggatgccaacgtgaaggaaagctactgccccctagtgccccacaccatgtactgcctgcccctgtggcagggcatcaacctggtgctcctgaccaggagccccagcgcgcccctggccctggttctgtcccagctgatggatggcttctccatgctggagaagaagctgaaggaagggccggagcccggggcctccctgcgctcccagcccctcgtgggagacctgcgccagaggatggacaagtttgtcaagaatcgaggggcacaggagattcagagcacctggctggagtttaaggccaaggctttctccaaaagtgagcccggatcctcctgggagctgctccaggcatgtgggaagctgaagcggcagctctgcgccatctaccggctgaactttctgaccacagcccccagcaggggaggcccacacctgccccagcacctgcaggaccaagtgcagaggctcatgcgggagaagctgacggactggaaggacttcttgctggtgaagagcaggaggaacatcaccatggtgtcctacctagaagacttcccaggcttggtgcacttcatctatgtggaccgcaccactgggcagatggtggcgccttccctcaactgcagtcaaaagacctcgtcggagttgggcaaggggccgctggctgcctttgtcaaaactaaggtctggtctctgatccagctggcgcgcagatacctgcagaagggctacaccacgctgctgttccaggagggggatttctactgctcctacttcctgtggttcgagaatgacatggggtacaaactccagatgatcgaggtgcccgtcctctccgacgactcagtgcctatcggcatgctgggaggagactactacaggaagctcctgcgctactacagcaagaaccgcccaaccgaggctgtcaggtgctacgagctgctggccctgcacctgtctgtcatccccactgacctgctggtgcagcaggccggccagctggcccggcgcctctgggaggcctcccgtatccccctgctctaggccaaggtggccgcagtctgcctttgcatcctgtcctccagccacccttgcttgccactgttccccatgacgagagcctcctgtctgcagtggccatcctgaggatagggcagagtgcccagggtggccccagggcttctaaaaccccacctagaccaccctccatgtcaggtactgagcaaggccccagatccttctctctggaggaagagggaagcccaggggtcctgtttgtaaaacaacggtggcaacagctcctcttccagagctgcctctgcctttatcctgggagatggggaggaagccccatctctgctgttccctgcgtggaggaagcccacccagcaagctctctcctaccccaggtaaaaggtgctcctttgcctgggtttgaattccagcgctgccacttcctctctgcacctcctggcaagtttcttctattccccacgtttaaagcgatggcacctccgtcccagggtggtgtgaggattacccagtgtggtaggtgctcaataaatgttggtcattgttatcactaaaaaaaaaaaaaaaaaaaaaaaaaaaaaaaaaaaaaaaaaaaaaaaaaaaaaaaaaaaaaaaaaaaaaaaaanaaaaaaaaaaaaaagagagggcgcgcgcgcgcgccccatatattccccccccggggcgccccccctcagccagcgcccccccattttatttattaatcaaagaggaggcgctcccgctcctcttgttgagagtgagttcttttactataaacaacgagcgagagcgcgcggcgcggcacggcttgatttaataacacatgagcgtgatggatgagcgaagaacaagagtgacctagcagtatgcaaacttctggtgaaaaaaagaagacccctctcattttgttggggtgcgcgtgggcgagcacataatcagctgttgagggaggcacaactacctcctccgccaacgcgagatagataaatagaccgtcgcgctctcgtaggagaggatataatatataaaacatatttctaagagacgagtgtacatcagcgcgcgtgtgaacacaacacgtactctataaattggccgtgcgctgcggaacacaacagtttgtgtgacgaagggaggtatatatcgtagtagaaaaacttatatttatacacgaggaggg

SEQ ID NO: 372893 - DNA, 4945 bp, Homo sapiens
gcggtcctacccggaagcgcgcccgggctcctgcaggcggggcgctgtgcgcgccgcgatccggtacgtgggcctccgggctgtcccctctgggggcggcgatcctccctccggagccccccttcaaccctcccggaagtgagcatttgcaggaccagggatgctgtgctgctctcccatgagccagtcaccgagtcggtctgctgcagccctttctgaacctctggccgtctggatgctccactgtgcttgccaagatgaagtgcgtcttggtggccactgagggcgcagaggtcctcttctactggacagatcaggagtttgaagagagtctccggctgaagttcgggcagtcagagaatgaggaagaagagctccctgccctggaggaccagctcagcaccctcctagccccggtcatcatctcctccatgacgatgctggagaagctctcggacacctacacctgcttctccacggaaaatggcaacttcctgtatgtccttcacctgtttggagaatgcctgttcattgccatcaatggtgaccacaccgagagcgagggggacctgcggcggaagctgtatgtgctcaagtacctgtttgaagtgcactttgggctggtgactgtggacggtcatcttatccgaaaggagctgcggcccccagacctggcgcagcgtgtccagctgtgggagcacttccagagcctgctgtggacctacagccgcctgcgggagcaggagcagtgcttcgccgtggaggccctggagcgactgattcacccccagctctgtgagctgtgcatagaggcgctggagcggcacgtcatccaggctgtcaacaccagccccgagcggggaggcgaggaggccctgcatgccttcctgctcgtgcactccaagctgctggcattctactctagccacagtgccagctccctgcgcccggccgacctgcttgccctcatcctcctggttcaggacctctaccccagcgagagcacagcagaggacgacattcagccttccccgcggagggcccggagcagccagaacatccccgtgcagcaggcctggagccctcactccacgggcccaactggggggagctctgcagagacggagacagacagcttctccctccctgaggagtacttcacaccagctccttcccctggcgatcagagctcaggtagcaccatctggctggaggggggcaccccccccatggatgcccttcagatagcagaggacaccctccaaacactggttccccactgccctgtgccttccggccccagaaggatcttcctggatgccaacgtgaaggaaagctactgccccctagtgccccacaccatgtactgcctgcccctgtggcagggcatcaacctggtgctcctgaccaggagccccagcgcgcccctggccctggttctgtcccagctgatggatggcttctccatgctggagaagaagctgaaggaagggccggagcccggggcctccctgcgctcccagcccctcgtgggagacctgcgccagaggatggacaagtttgtcaagaatcgaggggcacaggagattcagagcacctggctggagtttaaggccaaggctttctccaaaagtgagcccggatcctcctgggagctgctccaggcatgtgggaagctgaagcggcagctctgcgccatctaccggctgaactttctgaccacagcccccagcaggggaggcccacacctgccccagcacctgcaggaccaagtgcagaggctcatgcgggagaagctgacggactggaaggacttcttgctggtgaagagcaggaggaacatcaccatggtgtcctacctagaagacttcccaggcttggtgcacttcatctatgtggaccgcaccactgggcagatggtggcgccttccctcaactgcagtcaaaagacctcgtcggagttgggcaaggggccgctggctgcctttgtcaaaactaaggtctggtctctgatccagctggcgcgcagatacctgcagaagggctacaccacgctgctgttccaggagggggatttctactgctcctacttcctgtggttcgagaatgacatggggtacaaactccagatgatcgaggtgcccgtcctctccgacgactcagtgcctatcggcatgctgggaggagactactacaggaagctcctgcgctactacagcaagaaccgcccaaccgaggctgtcaggtgctacgagctgctggccctgcacctgtctgtcatccccactgacctgctggtgcagcaggccggccagctggcccggcgcctctgggaggcctcccgtatccccctgctctaggccaaggtggccgcagtctgcctttgcatcctgtcctccagccacccttgcttgccactgttccccatgacgagagcctcctgtctgcagtggccatcctgaggatagggcagagtgcccagggtggccccagggcttctaaaaccccacctagaccaccctccatgtcaggtaaaaggtgctcctttgcctgggtttgaattccagcgctgccacttcctctctgcacctcctggcaagtttcttctattccccacgtttaaagcgatggcacctccgtcccagggtggtgtgaggattacccagtgtggtaggtgctcaataaatgttggtcattgttatcactgaagcccaacatgctagtgcttctagacccttctgtcagtgctgataagcccttgctaagtcccagccccttcatgcttggctggcgtctgccctagggctggggttctcaagcccctggccctggcccagagatttggattcccttggcggccgtggagcccaggctttgatgtctttcaaagcttctgtggtgcgccctggattgagaaccaccacccgaggggtacagcccctctcttccaaccgagaagttcctgtccagaatggacccagggacaagagaccctgagagccctgggactgggagtgtctgctcctctgaggccaggaggccggtgctgggccagagaggacggcgtggcgaaagtcagcgtccactgcagcacaggatcagatggccgtgtgctgtgcatgcaggagcctcgccttctgtgtctttagtcttgagccaaaatttgctcaaagactgatctcttccttgcagggaacagctttggggctgggggaactagaacccacatgttggtctaaaccctgagaaggtggcagtgaggaagtatcccctcaggtgactggatctgtgttcctccttaacatcatctgatggaatggcaatgaaaagcgtggattgtggaaaatacagaaaaacataaaggaaaaaactccaatcccctgagcccaccactgttcaggacccctgcttttgtcacctactatttccctttagtttttagcagcggctggatgtgatatgtctagtttaaccagtccccttgatctttctatataataaataacacaggagtgaacatcctgaatcagatcttagcagagatgctcacatgcggggtaactgtccatggtgtgtggaggggtcctcggaaccccctcttaggatcatctccacatactctcccagttctgagattcgttaccaatagcaggtttccgtcacactgcgatatcagagcagtgcaggaactctccgctccaaggggttttttcctcctaggggaacactctgctaagtaatgggcagagaacaaaggggctcctaattcaaggcaggcctaagggagggtcagaaagaactttagctggaggtatttacagatgtgacctcgaatccttggggattcttggaaaatgggcaaggtgccaaaagaggagaactggccaggccttcaaaactaaaacaccagagaattacagacagcgaacttgcccctaagccctcgttgtgggtttgtgtttgagcatttaggagaggactccagtgctcctcagcgacagacacagctgcctctgcggtgtctgaaggccctggtcgtggtgacgctagatggccgccctgggcgcctcctgtgggcgtagaggcatcaccactctgcactggcagactcagcatggagttggagcagagtctgacacgagcacttgccatcccaggcgtttcagttctgactgagaaggtagatgcacaggggaggagagggccctttcgagctccgctctgcctccaccactcattccctaaccccgcagcctcagcgccctcacctgtaaaatggggagttttgcctacagggttcagcacaatgccagcctgacataggaacccctcgtcacaagaaactgcagtcatttcataaaggccagttaggataaaacagaactgagtcccagagttcctactgcgtgtctgcagagggagatggaccccattgccttgcagctctgggacatttggggatctgcagtgatctgccacactttgccaacccctgggctcagagtatcacagtctactgggtgctaggggaagaggcaggcccaggaccaggtggtctttccttagtgccttcctttcacacttgcagagggccccaaatgcatgattgccaactgggtctatacagagataatgacgggaccgaaagcagacggcactcaacatgcagctttgagggcatgccttcattttcatatgtactagagcagttgcgagctggtagatactcaacactcacctctccagggaaaaatgtgtgatgtatgtgtgtgtgtacatgtatatatatgtatatatacacacatatatgtgtatatatatgtatatgtgttacgtacatatatatacacatatacacatgcttattttaaatattgaaataaaagatacactgcacacaattttacaaataaagatacaatactctcaatttaaaaaaaaaaaa

SEQ ID NO: 372894 - DNA, 2208 bp, Homo sapiens
gcggtcctacccggaagcgcgcccgggctcctgcaggcggggcgctgtgcgcgccgcgatccggtacgtgggcctccgggctgtcccctctgggggcggcgatcctccctccggagccccccttcaaccctcccggaagtgagcatttgcaggaccagggatgctgtgctgctctcccatgagccagtcaccgagtcggtctgctgcagccctttctgaacctctggccgtctggatgctccactgtgcttgccaagatgaagtgcgtcttggtggccactgagggcgcagaggtcctcttctactggacagatcaggagtttgaagagagtctccggctgaagttcgggcagtcagagaatgaggaagaagagctccctgccctggaggaccagctcagcaccctcctagccccggtcatcatctcctccatgacgatgctggagaagctctcggacacctacacctgcttctccacggaaaatggcaacttcctgtatgtccttcacctgtttggagaatgcctgttcattgccatcaatggtgaccacaccgagagcgagggggacctgcggcggaagctgtatgtgctcaagtacctgtttgaagtgcactttgggctggtgactgtggacggtcatcttatccgaaaggagctgcggcccccagacctggcgcagcgtgtccagctgtgggagcacttccagagcctgctgtggacctacagccgcctgcgggagcaggagcagtgcttcgccgtggaggccctggagcgactgattcacccccagctctgtgagctgtgcatagaggcgctggagcggcacgtcatccaggctgtcaacaccagccccgagcggggaggcgaggaggccctgcatgccttcctgctcgtgcactccaagctgctggcattctactctagccacagtgccagctccctgcgcccggccgacctgcttgccctcatcctcctggttcaggacctctaccccagcgagagcacagcagaggacgacattcagccttccccgcggagggcccggagcagccagaacatccccgtgcagcaggcctggagccctcactccacgggcccaactggggggagctctgcagagacggtgtgtgctgtgcacttcgtggagtcaggggcaggaggggatcggcctctgcaggcgaccaggcctttcccatccctcctgggagagcagggacagggttgagccagctgggagagcctctcaacctgagccaccttctccattccaggagacagacagcttctccctccctgaggagtacttcacaccagctccttcccctggcgatcagagctcaggtgaggaccggaggaaagcaggaggaaacaatagctagctgcgagcgacaggcagcccaggacatctgtcttaggctccagtggacccccgtgcctcctaaggcttgagtgcaggtacccgtgttcctagagcacaggacgctgtctgcggctccccatcttccctgccagctccagcctgaactcaaggactgttaagaccactccactgatccctaaagctgttgatgacaagttgattcatttaaaacttctgtacatgcattctcagactcatcttttttgtaattaaaattaaaaattaagttaaatttagtaataatcatctaatttctatacattctaaaatatattcagcatctgtagtttatactttgtttctccaaagtatgtgggtaaacaataaaaaaaaactataaatattcaaaatggttgaggtgtggtcgtcacgcctgtaatcccagcactttgggaggccgaggcgggtagatcacctgaggtcaggagtttgagactagcctggccaacatggcgaaaccccatgtctactaaaaatacaaaaattagccaggtctggtggcaggcgcctgtaatcccagctactcgggaggctgaggcaggagaatcgcttgaacccgggaggtggaggttgcagtgagccaagatcatgccactgcactccagcctgggcgacagagcaagactctgtctcaaaaaaaaaaaacaaaacaaaactacaaatattcaaaatgttaacaaaaaatggacaaccttgcttagagaagtagataaaccaaaatccagactgttgtggtcactatgaataaacattacatttatttctgaagttcttaggtaaaaaaaaa

SEQ ID NO: 372895 - DNA, 1375 bp, Homo sapiens
gcggtcctacccggaagcgcgcccgggctcctgcaggcggggcgctgtgcgcgccgcgatccggtacgtgggcctccgggctgtcccctctgggggcggcgatcctccctccggagccccccttcaaccctcccggaagtgagcatttgcaggaccagggatgctgtgctgctctcccatgagccagtcaccgagtcggtctgctgcagccctttctgaacctctggccgtctggatgctccactgtgcttgccaagatgaagtgcgtcttggtggccactgagggcgcagaggtcctcttctactggacagatcaggagtttgaagagagtctccggctgaagttcgggcagtcagagaatgaggaagaagagctccctgccctggaggaccagctcagcaccctcctagccccggtcatcatctcctccatgacgatgctggagaagctctcggacacctacacctgcttctccacggaaaatggcaacttcctgtatgtccttcacctgtttggagaatgcctgttcattgccatcaatggtgaccacaccgagagcgagggggacctgcggcggaagctgtatgtgctcaagtacctgtttgaagtgcactttgggctggtgactgtggacggtcatcttatccgaaaggagctgcggcccccagacctggcgcagcgtgtccagctgtgggagcacttccagagcctgctgtggacctacagccgcctgcgggagcaggagcagtgcttcgccgtggaggccctggagcgactgattcacccccagctctgtgagctgtgcatagaggcgctggagcggcacgtcatccaggctgtcaacaccagccccgagcggggaggcgaggaggccctgcatgccttcctgctcgtgcactccaagctgctggcattctactctagccacagtgccagctccctgcgcccggccgacctgcttgccctcatcctcctggttcaggacctctaccccagcgagagcacagcagaggacgacattcaggagacagacagcttctccctccctgaggagtacttcacaccagctccttcccctggcgatcagagctcaggtagcaccatctggctggaggggggcaccccccccatggatgcccttcagatagcagaggacaccctccaaacactggttccccactgccctgtgccttccggccccagaaggatcttcctggatgccaacgtgaaggaaagctactgccccctagtgccccacaccatgtactgcctgcccctgtggcagggcatcaacctggtgctcctgaccagggtaggagagcccctcaccctgccctgatgatgcttagggttggcacgtcttgcgggtagccg

SEQ ID NO: 372896 - DNA, 1700 bp, Homo sapiens
gcggtcctacccggaagcgcgcccgggctcctgcaggcggggcgctgtgcgcgccgcgatccggtacgtgggcctccgggctgtcccctctgggggcggcgatcctccctccggagccccccttcaaccctcccggaagtgagcatttgcaggaccagggatgctgtgctgctctcccatgagccagtcaccgagtcggtctgctgcagccctttctgaacctctggccgtctggatgctccactgtgcttgccaagatgaagtgcgtcttggtggccactgagggcgcagaggtcctcttctactggacagatcaggagtttgaagagagtctccggctgaagttcgggcagtcagagaatgaggaagaagagctccctgccctggaggaccagctcagcaccctcctagccccggtcatcatctcctccatgacgatgctggagaagctctcggacacctacacctgcttctccacggaaaatggcaacttcctgtatgtccttcacctggctgcggcccccagacctggcgcagcgtgtccagctgtgggagcacttccagagcctgctgtggacctacagccgcctgcgggagcaggagcagtgcttcgccgtggaggtgactactgggcgcgggagtcctcaggacttgaagctgtcagccacagtgccagctccctgcgcccggccgacctgcttgccctcatcctcctggttcaggacctctaccccagcgagagcacagcagaggacgacattcaggagacagacagcttctccctccctgaggagtacttcacaccagctccttcccctggcgatcagagctcaggtgaggaccggaggaaagcaggaggaaacaatagctagctgcgagcgacaggcagcccaggacatctgtcttaggctccagtggacccccgtgcctcctaaggcttgagtgcaggtacccgtgttcctagagcacaggacgctgtctgcggctccccatcttccctgccagctccagcctgaactcaaggactgttaagaccactccactgatccctaaagctgttgatgacaagttgattcatttaaaacttctgtacatgcattctcagactcatcttttttgtaattaaaattaaaaattaagttaaatttagtaataatcatctaatttctatacattctaaaatatattcagcatctgtagtttatactttgtttctccaaagtatgtgggtaaacaataaaaaaaaactataaatattcaaaatggttgaggtgtggtcgtcacgcctgtaatcccagcactttgggaggccgaggcgggtagatcacctgaggtcaggagtttgagactagcctggccaacatggcgaaaccccatgtctactaaaaatacaaaaattagccaggtctggtggcaggcgcctgtaatcccagctactcgggaggctgaggcaggagaatcgcttgaacccgggaggtggaggttgcagtgagccaagatcatgccactgcactccagcctgggcgacagagcaagactctgtctcaaaaaaaaaaaacaaaacaaaactacaaatattcaaaatgttaacaaaaaatggacaaccttgcttagagaagtagataaaccaaaatccagactgttgtggtcactatgaataaacattacatttatttctgaagttcttaggtaaaaaaaaa

SEQ ID NO: 372897 - DNA, 1602 bp, Homo sapiens
gcggtcctacccggaagcgcgcccgggctcctgcaggcggggcgctgtgcgcgccgcgatccggtacgtgggcctccgggctgtcccctctgggggcggcgatcctccctccggagccccccttcaaccctcccggaagtgagcatttgcaggaccagggatgctgtgctgctctcccatgagccagtcaccgagtcggtctgctgcagccctttctgaacctctggccgtctggatgctccactgtgcttgccaagatgaagtgcgtcttggtggccactgagggcgcagaggtcctcttctactggacagatcaggagtttgaagagagtctccggctgaagttcgggcagtcagagaatgaggaagaagaggtgagtgcagggtaggcagtcccaggaggggtggataggaaggaaccatacaaaactcccagcaggcagagaggcaggaaaacctgtgttcaccctgtcctgggcagcatgagcagggtgctgggtggggtccagcatccttcacacctagacccttatcctcaaggttggcctcttgatgctctgagctcggtgaccccacccccacaccccaccagtcctctctggactaaatgagggcaagaagaagtcgaattttatcacgtaacagaagaacttggagccatcagtttctgtaacctaaaaagtttaacaaggctgggcgcggtggctcacgcctgtaatcacaacactttgggaagccaaggtgggccagttgcttgagctcagggatttgagaccagcctgggcagcatggcgaaaccctgtctctacaaaaaaaatacaaaaattagccaggtgtggtggtgcgtgcctatagtcccagctacttgggaggttgaggtgggaggatcacttgagtccaggtggtagaggctgcagtgagccgagactgtgcccatgcattccaacctgggcgacagagcaaaaaaaaaaaaaaaaagtttaacgtaagctgaacacgttaattttttaatagctgtattaaggtatgattaacataccataaattgcacatatttaaagtgcataatttgataagctttgatatgtatatacctatgattctatcacaatcaataaaaggaatatatctaccacctcaaacatttgtaatcccttctttcccatccccatcgcataggaactgctgatctgctttctgtcatgatagattagtttgtatcatatggccttatataaatggagtcatacagtatgtgcttggatttagtttggttttggtttgactgctttcactcagcataattattttgtgattcatctgtgttgtggcatgtatcaatcgttcattccttgtcattgagtagtaatctattgtatcaggatgccaccatttgttcattcatttacttgttgatggacatctgtgttattttcagtttttgactattacaaataaagcaactatgaacatgcacgtacaagtctatgtatacatggatgctttcatgtccaaggacagatacttaggatagactggctaggtcatgtaggtgtatgtgtaactttttaataaactgccaaacttttccaaagtggttgt

SEQ ID NO: 372898 - DNA, 1686 bp, Homo sapiens
gcggtcctacccggaagcgcgcccgggctcctgcaggcggggcgctgtgcgcgccgcgatccggtacgtgggcctccgggctgtcccctctgggggcggcgatcctccctccggagccccccttcaaccctcccggaagtgagcatttgcaggaccagggatgctgtgctgctctcccatgagccagtcaccgagtcggtctgctgcagccctttctgaacctctggccgtctggatgctccactgtgcttgccaagatgaagtgcgtcttggtggccactgagggcgcagaggtcctcttctactggacagatcaggagtttgaagagagtctccggctgaagttcgggcagtcagagaatgaggaagaagaggttggcctcttgatgctctgagctcggtgaccccacccccacaccccaccagtcctctctggactaaatgagggcaagaagaagtcgaattttatcacgtaacagaagaacttggagccatcagtttctgtaacctaaaaagtttaacaaggctgggcgcggtggctcacgcctgtaatcacaacactttgggaagccaaggtgggccagttgcttgagctcagggatttgagaccagcctgggcagcatggcgaaaccctgtctctacaaaaaaaatacaaaaattagccaggtgtggtggtgcgtgcctatagtcccagctacttgggaggttgaggtgggaggatcacttgagtccaggtggtagaggctgcagtgagccgagactgtgcccatgcattccaacctgggcgacagagcaaaaaaaaaaaaaaaaagtttaacgtaagctgaacacgttaattttttaatagctgtattaaggtatgattaacataccataaattgcacatatttaaagtgcataatttgataagctttgatatgtatatacctatgattctatcacaatcaataaaaggaatatatctaccacctcaaacatttgtaatcccttctttcccatccccatcgcataggaactgctgatctgctttctgtcatgatagattagtttgtatcatatggccttatataaatggagtcatacagtatgtgcttggatttagtttggttttggtttgactgctttcactcagcataattattttgtgattcatctgtgttgtggcatgtatcaatcgttcattccttgtcattgagtagtaatctattgtatcaggatgccaccatttgttcattcatttacttgttgatggacatctgtgttattttcagtttttgactattacaaataaagcaactatgaacatgccaagaaaaaaaaaaaaaaagcaaacaaaagcacaaagaaaacaggagagacgaacaagaaaagaggcacgcagacgaacagccggacaagaaggggaacgaggagagggcgacgagcaaggaggcacgaggcacgcgcgacggaacgcgggcgggacagggaggacaacgcgaaagagggagcggaggggaaagagagaggggagagacgagagaaccaagagagaggggagaagaggagcacgggatacaggggaagagagaggcagagaaagaggcgagaggacgagaagagagtaaagaaaggagacggaaaaaagcgagaaagagataggcaggaccgcaggagagggagaagaaagaagggagagaaaagaa

SEQ ID NO: 372899 - DNA, 2327 bp, Homo sapiens
  misc_feature (3)..(3): n is a, c, g, or t
  misc_feature (5)..(5): n is a, c, g, or t
  misc_feature (7)..(7): n is a, c, g, or t
ggngngnggggagcttgcggcacagctagggcatcccggcgaggagcgccgccaggccccgggccacagccgggcctggcggggggaccatgggcgcctcggtctccaggggccgggccgcccgggtccccgcgccggagccggaacccgaagaggcgctggacctgagccaactacccccagagctgcttctggtggtgctgagccacgtccccccgcgcacgctgctcgggcgctgccgccaagtgtgccggggctggcgagccctggtggacggccaggccctgtggctgctgatcctggcccgcgaccacggcgccaccggccgcgcgctgctgcacctcgcccgcagctgccagtctcccgcccgtaacgccaggccttgccccctgggccgcttctgcgcgcgcagacccatcggacgcaaccttattcgcaacccctgcggccaagaaggcctccgaaagtggatggtgcaacacggtggggacggctgggtggtggaggaaaacaggacaaccgtgcctggggccccttctcagacgtgcttcgtgacttcattcagctggtgttgcaagaagcaggtcttggacctagaggaggagggtctgtggccagaactgctggatagtggcaggattgagatttgtgtctctgactggtggggagcccgacacgacagcggctgtatgtacagactcctcgtccaacttctagacgccaaccagactgttctagataaattctctgctgtgcctgatcccatcccgcagtggaacaacaatgcctgccttcacgtcacccacgtgttctccaacatcaagatgggcgtccgctttgtgtctttcgaacaccggggccaggacacacagttctgggctggccactatggagcccgtgtgaccaactccagtgtgatcgtgcgagtccgtctgtcctagtccagcactacccttcttgcaagacagcctgactgtgccttccagggcctgggaccattggctgggacccctcattaaccaaccaagcacttgtacctccctggcatactgggaattcctgggtccaatcaaaggccctgacgggccctgtcttcaggttctagaaactaccagaagaagcttcttccatcttatctacctactgcagctgctgctttgcgggggggccctactgtactgaggggaaacccacaagtgagcatgggggaatgcccatcctggagaagaattcttgccctcccctctcttctcctcccaaccaaaaccctccgatccagccccaggcccctctgtaccatcccctcccctccgcaccactgacctcttgtctcctattgtttctgccacagggacttccttggtcccttcagggaagccctcaactcatctctgaacttagaatctcatccttagggctcagagagtcccagccctaagggtgtgaacctcacctcctggggcttccgagctacagggctgggaccaggtcatgcagctgaaagtctacgttaaaaaaaaaaagtttgggccaggcacagtggctcatgcctgtaatcccagcactttgggaggctgaggcaggcggatcacctgaggtcaggagttcaagaccagcctggccaacatggtgaaaccccgtctctactaaaaatccaaaaaattagccgggcttggtggtgtgcacctgtaattccagctactcgggaggctgaggcaggagaattgcttgagcccgggaggcagaggctgcagtgaaccaagatcatgccactgcactccagcctgggcaacacagcgagactccgtctcaaaaagaaaaagtttggatcaggcagggtggctcacacctgtaatccctgcactttgggaggccaaggtgggaggatcagttgagccccagagttcaagaccagcctgggcaatgtagtaagacccccatcgctacaaaaaatacaaaagttagccaggtacagtagtacacacctgtagtccaagctacttgggaggctgaagtgggaggatcatttgtgcccaggttgaggctatagtgagccatgatcataccactgcactccagcctgggtgacagagcgagaccctgtctcaaaaaaaaaaaagaatttggagatggttctgcccactctggtttctctgaaaaaacgaggtaattccctgagcccaaccctgatcctcaaggacctgtaattgtgtggtatttaaaattaaaataacattatttttattttgactttttttcaaacagtaagaataatatatcagcagcatgtatctgccaatcatatgtaataaatttcttattttgcc

SEQ ID NO: 372900 - DNA, 722 bp, Homo sapiens
ttgggcacaagccttttttatttcacagaaggcctccgaaagtggatggtgcaacacggtggggacggctgggtggtggaggaaaacaggacaaccgtgcctggggccccttctcagacgtgcttcgtgacttcattcaggtgaatgcccctgctatccaaaggtccggccccttgttgagaaaggcctgcctgttctcattaccctgtctcctgcattcccagctggtgttgcaagaagcaggtcttggacctagaggaggagggtctgtggccagaactgctggatagtggcaggattgagatttgtgtctctgactggtgagtgtgacgattaaaatagccccttgctaagcactgactgcatgtgacatggcctttttatgggtgacttaatttaggcctcctaacccctccttacagataaaaaatctgaagttcaggccagccatggtggctcacacctataatcccagcacttcggggggtcgaggcaggcagatcacttgaggtcaggagttcgagaccagcccaaccagcatggcaaaacctcgtctctactaaaaatacaaaaaaaaaattagccgggcctggtagtgcacacctgtagtcccacatacttgggtggctgaggcaggagaattacttgaacccaggaggtggaggttgtaccactacactccagcctggacgacagagtgagactcagtcctggaaaaaaaa

SEQ ID NO: 372901 - DNA, 2411 bp, Homo sapiens
  misc_feature (3)..(3): n is a, c, g, or t
  misc_feature (5)..(5): n is a, c, g, or t
  misc_feature (7)..(7): n is a, c, g, or t
ggngngnggggagcttgcggcacagctagggcatcccggcgaggagcgccgccaggccccgggccacagccgggcctggcggggggaccatgggcgcctcggtctccaggggccgggccgcccgggtccccgcgccggagccggaacccgaagaggcgctggacctgagccaactacccccagagctgcttctggtggtgctgagccacgtccccccgcgcacgctgctcgggcgctgccgccaagtgtgccggggctggcgagccctggtggacggccaggccctgtggctgctgatcctggcccgcgaccacggcgccaccggccgcgcgctgctgcacctcgcccgcagctgccagtctcccgcccgtaacgccaggccttgccccctgggccgcttctgcgcgcgcagacccatcggacgcaaccttattcgcaacccctgcggccaagaaggcctccgaaagtggatggtgcaacacggtggggacggctgggtggtggaggaaaacaggacaaccgtgcctggggccccttctcagacgtgcttcgtgacttcattcaggtgaatgcccctgctatccaaaggtccggccccttgttgagaaaggcctgcctgttctcattaccctgtctcctgcattcccagctggtgttgcaagaagcaggtcttggacctagaggaggagggtctgtggccagaactgctggatagtggcaggattgagatttgtgtctctgactggtggggagcccgacacgacagcggctgtatgtacagactcctcgtccaacttctagacgccaaccagactgttctagataaattctctgctgtgcctgatcccatcccgcagtggaacaacaatgcctgccttcacgtcacccacgtgttctccaacatcaagatgggcgtccgctttgtgtctttcgaacaccggggccaggacacacagttctgggctggccactatggagcccgtgtgaccaactccagtgtgatcgtgcgagtccgtctgtcctagtccagcactacccttcttgcaagacagcctgactgtgccttccagggcctgggaccattggctgggacccctcattaaccaaccaagcacttgtacctccctggcatactgggaattcctgggtccaatcaaaggccctgacgggccctgtcttcaggttctagaaactaccagaagaagcttcttccatcttatctacctactgcagctgctgctttgcgggggggccctactgtactgaggggaaacccacaagtgagcatgggggaatgcccatcctggagaagaattcttgccctcccctctcttctcctcccaaccaaaaccctccgatccagccccaggcccctctgtaccatcccctcccctccgcaccactgacctcttgtctcctattgtttctgccacagggacttccttggtcccttcagggaagccctcaactcatctctgaacttagaatctcatccttagggctcagagagtcccagccctaagggtgtgaacctcacctcctggggcttccgagctacagggctgggaccaggtcatgcagctgaaagtctacgttaaaaaaaaaaagtttgggccaggcacagtggctcatgcctgtaatcccagcactttgggaggctgaggcaggcggatcacctgaggtcaggagttcaagaccagcctggccaacatggtgaaaccccgtctctactaaaaatccaaaaaattagccgggcttggtggtgtgcacctgtaattccagctactcgggaggctgaggcaggagaattgcttgagcccgggaggcagaggctgcagtgaaccaagatcatgccactgcactccagcctgggcaacacagcgagactccgtctcaaaaagaaaaagtttggatcaggcagggtggctcacacctgtaatccctgcactttgggaggccaaggtgggaggatcagttgagccccagagttcaagaccagcctgggcaatgtagtaagacccccatcgctacaaaaaatacaaaagttagccaggtacagtagtacacacctgtagtccaagctacttgggaggctgaagtgggaggatcatttgtgcccaggttgaggctatagtgagccatgatcataccactgcactccagcctgggtgacagagcgagaccctgtctcaaaaaaaaaaaagaatttggagatggttctgcccactctggtttctctgaaaaaacgaggtaattccctgagcccaaccctgatcctcaaggacctgtaattgtgtggtatttaaaattaaaataacattatttttattttgactttttttcaaacagtaagaataatatatcagcagcatgtatctgccaatcatatgtaataaatttcttattttgcc

SEQ ID NO: 372902 - DNA, 1314 bp, Homo sapiens
  misc_feature (3)..(3): n is a, c, g, or t
  misc_feature (5)..(5): n is a, c, g, or t
  misc_feature (7)..(7): n is a, c, g, or t
  misc_feature (1304)..(1304): n is a, c, g, or t
ggngngnggggagcttgcggcacagctagggcatcccggcgaggagcgccgccaggccccgggccacagccgggcctggcggggggaccatgggcgcctcggtctccaggggccgggccgcccgggtccccgcgccggagccggaacccgaagaggcgctggacctgagccaactacccccagagctgcttctggtggtgctgagccacgtccccccgcgcacgctgctcgggcgctgccgccaagtgtgccggggctggcgagccctggtggacggccaggccctgtggctgctgatcctggcccgcgaccacggcgccaccggccgcgcgctgctgcacctcgcccgcagctgccagtctcccgcccgtaacgccaggccttgccccctgggccgcttctgcgcgcgcagacccatcggacgcaaccttattcgcaacccctgcggccaagaaggcctccgaaagtggatggtgcaacacggtggggacggctgggtggtggaggaaaacaggacaaccgtgcctggggccccttctcagacgtgcttcgtgacttcattcagctggtgttgcaagaagcaggtcttggacctagaggaggagggtctgtggccagaactgctggatagtggcaggattgagatttgtgtctctgactggtggggagcccgacacgacagcggctgtatgtacagactcctcgtccaacttctagacgccaaccagactgttctagataaattctctgctgtgcctgatcccatcccgcagtggaacaacaatgcctgccttcacagacacagtttcactatgttgcctgggctggtcttgaactcctgtgctcaagcaatcctctcgcctcagcctcccacagtgctgggattacaggcacaagccactgcatccagcccgtgcgtgtttttgagtgcaccaattccagctctaagattgacgaggtaaaaaggcttaggaaagccttgtttgtcacttgcacttgaaacagaaccttctagcctgcagcatcttggctttgctgctgccaaagaacagccactgacttgtggcttcctgaattcacagatcctactggcctggacctgactgtaagccaaaacctgatactgctgtctgctctgtgctgtttcagtctcagcatgtgctgtgctaaattaaaaacgggcgcacactccaggaacagcacttcgactatgagaccattgcagacttagggcaccctccgtgggacctaaactgaaaacatcatggatgctgactgtactccagcctgggatgacagagggnactccgtcta

SEQ ID NO: 372903 - DNA, 1481 bp, Homo sapiens
  misc_feature (3)..(3): n is a, c, g, or t
  misc_feature (5)..(5): n is a, c, g, or t
  misc_feature (7)..(7): n is a, c, g, or t
ggngngnggggagcttgcggcacagctagggcatcccggcgaggagcgccgccaggccccgggccacagccgggcctggcggggggaccatgggcgcctcggtctccaggggccgggccgcccgggtccccgcgccggagccggaacccgaagaggcgctggacctgagccaactacccccagagctgcttctggtggtgctgagccacgtccccccgcgcacgctgctcgggcgctgccgccaagtgtgccggggctggcgagccctggtggacggccaggccctgtggctgctgatcctggcccgcgaccacggcgccaccggccgcgcgctgctgcacctcgcccgcagctgccagtctcccgcccgtaacgccaggccttgccccctgggccgcttctgcgcgcgcagacccatcggacgcaaccttattcgcaacccctgcggccaagaaggcctccgaaagtggatggtgcaacacggtggggacggctgggtggtggaggaaaacaggacaaccgtgcctggggccccttctcagacgtgcttcgtgacttcattcagctggtgttgcaagaagcaggtcttggacctagaggaggagggtctgtggccagaactgctggatagtggcaggattgagatttgtgtctctgactggtggggagcccgacacgacagcggctgtatgtacagactcctcgtccaacttctagacgccaaccagactgttctagataaattctctgctgtgcctgatcccatcccgcagtggaacaacaatgcctgccttcacagacacagtttcactatgttgcctgggctggtcttgaactcctgtgctcaagcaatcctctcgcctcagcctcccacagtgctgggattacaggcacaagccactgcatccagcccgtgcgtgtttttgagtgcaccaattccagctctaagattgacgaggtaaaaaggcttaggaaagccttgtttgtcacttgcacttgaaacagaaccttctagcctgcagcatcttggctttgctgctgccaaagaacagccactgacttgtggcttcctgaattcacagatcctactggcctggacctgactgtaagccaaaacctgatactgctgtctgctctgtgctgtttcagtctcagcatgtgctgtgctaaattaaaaacgggcgcacactccaggaacagcacttcgactatgagaccattgcagacttagggcaccctccgtgggacctaaactgaaaacatcatggatgctgactggaccatctggatcacataaaaatgcccacaggaaagggcttctttttgttttttgagacggagtctcactgtctcccccaggctggagtgcagtgagctgaaatcgcgtaccacactccagcctgggtgacagagcgagactgtgtttcaaagaaaaaaaaaaacaagcagccttttgcttggttggaatctgaaaaaaaaaa

SEQ ID NO: 372904 - DNA, 1448 bp, Homo sapiens
  misc_feature (3)..(3): n is a, c, g, or t
  misc_feature (5)..(5): n is a, c, g, or t
  misc_feature (7)..(7): n is a, c, g, or t
ggngngnggggagcttgcggcacagctagggcatcccggcgaggagcgccgccaggccccgggccacagccgggcctggcggggggaccatgggcgcctcggtctccaggggccgggccgcccgggtccccgcgccggagccggaacccgaagaggcgctggacctgagccaactacccccagagctgcttctggtggtgctgagccacgtccccccgcgcacgctgctcgggcgctgccgccaagtgtgccggggctggcgagccctggtggacggccaggccctgtggctgctgatcctggcccgcgaccacggcgccaccggccgcgcgctgctgcacctcgcccgcagctgccagtctcccgcccgtaacgccaggccttgccccctgggccgcttctgcgcgcgcagacccatcggacgcaaccttattcgcaacccctgcggccaagaaggcctccgaaagtggatggtgcaacacggtggggacggctgggtggtggaggaaaacaggacaaccgtgcctggggccccttctcagacgtgcttcgtgacttcattcagctggtgttgcaagaagcaggtcttggacctagaggaggagggtctgtggccagaactgctggatagtggcaggattgagatttgtgtctctgactggtggggagcccgacacgacagcggctgtatgtacagactcctcgtccaacttctagacgccaaccagactgttctagataaattctctgctgtgcctgatcccatcccgcagtggaacaacaatgcctgccttcacagacacagtttcactatgttgcctgggctggtcttgaactcctgtgctcaagcaatcctctcgcctcagcctcccacagtgctgggattacaggcacaagccactgcatccagcccgtgcgtgtttttgagtgcaccaattccagctctaagattgacgagacggagtctcactgtctcccccaggctggagtgcagtggcgtgatctcagctcactgcaagctctgcctcccaggttcacgccattctcctgcctcagcctcccgagtagctgggactacaggcgcccaccaccacacccggctaatttttcgtatttttagtagagacggggtttcaccgtattagccaggatggtctcgatctcctgacctcgtgatccgctgccttggcctcccaaagtgctgggattacagatgtgagccaccacgccaggccaaggaaagggcttcttctttgaggaaaccatctacaatcaactggcttcttggctctatatttctttctttttattttcttttattttttttaatttttttttagacggagtctccttctgtcacccatgctggagtgcagtggtgtgatctcagctcactgcaacctccacctcctgggttcaagcaattctcctgcctcagcctcccaagt

SEQ ID NO: 372905 - DNA, 1731 bp, Homo sapiens
  misc_feature (3)..(3): n is a, c, g, or t
  misc_feature (5)..(5): n is a, c, g, or t
  misc_feature (7)..(7): n is a, c, g, or t
  misc_feature (1703)..(1703): n is a, c, g, or t
ggngngnggggagcttgcggcacagctagggcatcccggcgaggagcgccgccaggccccgggccacagccgggcctggcggggggaccatgggcgcctcggtctccaggggccgggccgcccgggtccccgcgccggagccggaacccgaagaggcgctggacctgagccaactacccccagagctgcttctggtggtgctgagccacgtccccccgcgcacgctgctcgggcgctgccgccaagtgtgccggggctggcgagccctggtggacggccaggccctgtggctgctgatcctggcccgcgaccacggcgccaccggccgcgcgctgctgcacctcgcccgcagctgccagtctcccgcccgtaacgccaggccttgccccctgggccgcttctgcgcgcgcagacccatcggacgcaaccttattcgcaacccctgcggccaagaaggcctccgaaagtggatggtgcaacacggtggggacggctgggtggtggaggaaaacaggacaaccgtgcctggggccccttctcagacgtgcttcgtgacttcattcagctggtgttgcaagaagcaggtcttggacctagaggaggagggtctgtggccagaactgctggatagtggcaggattgagatttgtgtctctgactggtggggagcccgacacgacagcggctgtatgtacagactcctcgtccaacttctagacgccaaccagactgttctagataaattctctgctgtgcctgatcccatcccgcagtggaacaacaatgcctgccttcacgtcacccacgtgttctccaacatcaagatgggcgtccgctttgtgtctttcgaacaccggggccaggacacacagttctgggctggccactatggagcccgtgtgaccaactccagtgtgatcgtgcgagtccgtctgtcctagtccagcactacccttcttgcaagacagcctgactgtgccttccagggcctgggaccattggctgggacccctcattaaccaaccaagcacttgtacctccctggcatactgggaattcctgggtccaatcaaaggccctgacgggccctgtcttcaggttctagaaactaccagaagaagcttcttccatcttatctacctactgcagctgctgctttgcgggggggccctactgtactgaggggaaacccacaagtgagcatgggggaatgcccatcctggagaagaattcttgccctcccctctcttctcctcccaaccaaaaccctccgatccagccccaggcccctctgtaccatcccctcccctccgcaccactgacctcttgtctcctattgtttctgccacagggacttccttggtcccttcagggaagccctcaactcatctctgaacttagaatctcatccttagggctcagagagtcccagccctaagggtgtgaacctcacctcctggggcttccgagctacagggctgggaccaggtcatgcagctgaaagtctacgttaaaaaaaaaaagtttgggccaggcacagtgtggctctcatgtgccgtgtaattcccaggccacttgtggggacgggcctgacggcagggcggatttcacctgtgagggctccagggagttctcaaaggaccaggccctgtggtgcccaaaacatgtgggcgtgaaaaaaaacgcgccgcgggttcgttccnataagctgttagaaacaagaagtttccc

SEQ ID NO: 372906 - DNA, 1902 bp, Homo sapiens
ttgggcacaagccttttttatttcacagaaggcctccgaaagtggatggtgcaacacggtggggacggctgggtggtggaggaaaacaggacaaccgtgcctggggccccttctcagacgtgcttcgtgacttcattcagctggtgttgcaagaagcaggtcttggacctagaggaggagggtctgtggccagaactgctggatagtggcaggattgagatttgtgtctctgactggtggggagcccgacacgacagcggctgtatgtacagactcctcgtccaacttctagacgccaaccagactgttctagataaattctctgctgtgcctgatcccatcccgcagtggaacaacaatgcctgccttcacgtcacccacgtgttctccaacatcaagatgggcgtccgctttgtgtctttcgaacaccggggccaggacacacagttctgggctggccactatggagcccgtgtgaccaactccagtgtgatcgtgcgagtccgtctgtcctagtccagcactacccttcttgcaagacagcctgactgtgccttccagggcctgggaccattggctgggacccctcattaaccaaccaagcacttgtacctccctggcatactgggaattcctgggtccaatcaaaggccctgacgggccctgtcttcaggttctagaaactaccagaagaagcttcttccatcttatctacctactgcagctgctgctttgcgggggggccctactgtactgaggggaaacccacaagtgagcatgggggaatgcccatcctggagaagaattcttgccctcccctctcttctcctcccaaccaaaaccctccgatccagccccaggcccctctgtaccatcccctcccctccgcaccactgacctcttgtctcctattgtttctgccacagggacttccttggtcccttcagggaagccctcaactcatctctgaacttagaatctcatccttagggctcagagagtcccagccctaagggtgtgaacctcacctcctggggcttccgagctacagggctgggaccaggtcatgcagctgaaagtctacgttaaaaaaaaaaagtttgggccaggcacagtggctcatgcctgtaatcccagcactttgggaggctgaggcaggcggatcacctgaggtcaggagttcaagaccagcctggccaacatggtgaaaccccgtctctactaaaaatccaaaaaattagccgggcttggtggtgtgcacctgtaattccagctactcgggaggctgaggcaggagaattgcttgagcccgggaggcagaggctgcagtgaaccaagatcatgccactgcactccagcctgggcaacacagcgagactccgtctcaaaaagaaaaagtttggatcaggcagggtggctcacacctgtaatccctgcactttgggaggccaaggtgggaggatcagttgagccccagagttcaagaccagcctgggcaatgtagtaagacccccatcgctacaaaaaatacaaaagttagccaggtacagtagtacacacctgtagtccaagctacttgggaggctgaagtgggaggatcatttgtgcccaggttgaggctatagtgagccatgatcataccactgcactccagcctgggtgacagagcgagaccctgtctcaaaaaaaaaaaagaatttggagatggttctgcccactctggtttctctgaaaaaacgaggtaattccctgagcccaaccctgatcctcaaggacctgtaattgtgtggtatttaaaattaaaataacattatttttattttgactttttttcaaacagtaagaataatatatcagcagcatgtatctgccaatcatatgtaataaatttcttattttgcc

SEQ ID NO: 372907 - DNA, 1889 bp, Homo sapiens
  misc_feature (3)..(3): n is a, c, g, or t
  misc_feature (5)..(5): n is a, c, g, or t
  misc_feature (7)..(7): n is a, c, g, or t
ggngngnggggagcttgcggcacagctagggcatcccggcgaggagcgccgccaggccccgggccacagccgggcctggcggggggaccatgggcgcctcggtctccaggggccgggccgcccgggtccccgcgccggagccggaacccgaagaggcgctggacctgagccaactacccccagagctgcttctggtggtgctgagccacgtccccccgcgcacgctgctcgggcgctgccgccaagtgtgccggggctggcgagccctggtggacggccaggccctgtggctgctgatcctggcccgcgaccacggcgccaccggccgcgcgctgctgcacctcgcccgcagctgccagtctcccgcccgtaacgccaggccttgccccctgggccgcttctgcgcgcgcagacccatcggacgcaaccttattcgcaacccctgcggccaagaaggcctccgaaagtggatggtgcaacacggtggggacggctgggtggtggaggaaaacaggacaaccgtgcctggggccccttctcagacgtgcttcgtgacttcattcagctggtgttgcaagaagcaggtcttggacctagaggaggagggtctgtggccagaactgctggatagtggcaggattgagatttgtgtctctgactggtggggagcccgacacgacagcggctgtatgtacagactcctcgtccaacttctagacgccaaccagactgttctagataaattctctgctgtgcctgatcccatcccgcagtggaacaacaatgcctgccttcactgctcctcaatgctgaattcatcttgaaatgtcaggcaactgcagctgcagacctcaatctatgagacacagtttcactatgttgcctgggctggtcttgaactcctgtgctcaagcaatcctctcgcctcagcctcccacagtgctgggattacaggcacaagccactgcatccagcccgtgcgtgtttttgagtgcaccaattccagctctaagattgacgaggtaaaaaggcttaggaaagccttgtttgtcacttgcacttgaaacagaaccttctagcctgcagcatcttggctttgctgctgccaaagaacagccactgacttgtggcttcctgaattcacagatcctactggcctggacctgactgtaagccaaaacctgatactgctgtctgctctgtgctgtttcagtctcagcatgtgctgtgctaaattaaaaacgggcgcacactccaggaacagcacttcgactatgagaccattgcagacttagggcaccctccgtgggacctaaactgaaaacatcatggatgctgactggaccatctggatcacataaaaatgcccacaggaaagggcttctttttgttttttgagacggagtctcactgtctcccccaggctggagtgcagtggcgtgatctcagctcactgcaagctctgcctcccaggttcacgccattctcctgcctcagcctcccgagtagctgggactacaggcgcccaccaccacacccggctaatttttcgtatttttagtagagacggggtttcaccgtattagccaggatggtctcgatctcctgacctcgtgatccgctgccttggcctcccaaagtgctgggattacagatgtgagccaccacgccaggccaaggaaagggcttcttctttgaggaaaccatctacaatcaactggcttcttggctctatatttctttctttttattttcttttattttttttaatttttttttagacggagtctccttctgtcacccatgctggagtgcagtggtgtgatctcagctcactgcaacctccacctcctgggttcaagcaattctcctgcctcagcctcccaagt

SEQ ID NO: 372908 - DNA, 628 bp, Homo sapiens
catcccggcgaggagcgccgccaggccccggggtaggacttggggtgcggtgtcggtgcggccgccgaggggggctgattgcatgcaattcggggcatacacacagaccgcggggtctccgggatatcggggctatcaaggacgggctgggggatggggacttggggacggggcccagggatggtgaagacgggggtgcggctggcagaatcagggcaggcagaggctgcgcgccgcggaggctgctggtccctgacgccttgacccttcctctcccgcagccacagccgggcctggcggggggaccatgggcgcctcggtctccaggggccgggccgcccgggtccccgcgccggagccggaacccgaagaggcgctggacctgagccaactacccccagagctgcttctggtggtgctgagccacgtccccccgcgcacgctgctcgggcgctgccgccaagtgtgccggggctggcgagccctggtggacggccaggccctgtggctgctgatcctggcccgcgaccacggcgccaccggccgcgcgctgctgcacctcgcccgcagctgccagtctcccgcccgtaacgccaggccttgccccctgggccgcttctgcgcgcgc

SEQ ID NO: 372909 - DNA, 2442 bp, Homo sapiens
aggctgtaccggtcccgaatttttgggcatcggctgcaggtgggtgcggggcgccgggctgttcggggtaccggtgtcgcagtcgccagtccgagctcacaccgggcgtggagttcagctgcgcatcgggttgcggcagcttcgccaggcctggggctggctgggccgcggggccgccctggaggccggagccactgggcctgcggcgcctcggcagcgagcagccgctttgctcgcgtgcaggaggctgttcgctacctcacacccccggctggcgctgtggcctcgcttagctctaccgtttagcacccggcgacatgcacccggtcggtttccgccaggatgcgggagagttggggcaagctacctgcgacagcttgaacttttcctagggattccgctccacccgccggttagagcgtattgctcattaaatccgagacctgtgtgcttgctactgaaataaaagaagtattttttccccagagtccttttaggacgttatgacttttctcctttgcaagactgcaaaaaactgacaagaagacaaaactcttcccactcccagggaccgcgttgtcttgagtttggctagtaaaggctagcaagtgaggctttgtctctgcatcccgttccccctaacatcctcagagaaccttcgtttctagaatctttctagtattcagagacttctccagggtcatgatcccaaaggcttaacccgtttacaaggagagagttgtctcctgacgcccaaaatggcagctaaaatggagataactttaagctccaacactgaagcttcctccaagcaagagagacacataatagccaaactagaagagaaacggggccctcctctgcaaaaaaactgcccagatcctgagctctgccgccagagcttcagacgcttttgttatcaagaggtgtctggaccccaagaggcgctctcccagctccgacagctctgccgtcagtggttgcaacccgagctgcacaccaaggagcagattttggagcttctggtgatggagcagttcctgaccatcctgcccccggagatccaggctcgggtcaggcatcgatgtccaatgagcagcaaggagattgtgaccctcgtggaagattttcacagagcatccaagaaaccaaagcagtgggtggccgtttgtatgcaggggcaaaaggtgctcttggagaaaactggatctcagcttggagaacaggaactgccagactttcaaccgcagactcctaggagagatctcagggagagctctccagcagagccttcccaggcaggagcttatgaccggctgagcccccatcattgggagaaatccccactcctccaagaaccaacccccaaattggctgggacagaggcccccagaatgagaagtgacaacaaggaaaatccacaacaggaaggggctaaaggagcaaagccatgtgcagtgtcagctggcagatccaaagggaatggtctgcagaatcctgaaccaagaggggcaaatatgagtgaacctcggttgtcacggaggcaggtcagctccccaaatgctcaaaagccatttgctcactaccagagacattgcagggtggaatacatcagcagccccctaaaaagccacccactgagagagctaaagaaaagcaaaggaggtaaacggagtctgagcaaccgtttgcaacatcttggtcaccagcccacccgctcagcaaagaaaccctacaaatgtgatgactgtgggaaaagcttcacgtggaattcagagctgaagagacacaagagagtccacacaggagagagaccctacacgtgcggagagtgtggaaactgctttgggcggcagtcaaccctgaagctgcaccagaggatccacactggagagaagccataccagtgtggccagtgtgggaaaagctttcgccagagctcaaaccttcaccagcatcaccgacttcaccatggggactaaaaggagcactccatgctttagattcacacggaaggtgtttgtgtttctcctcccccttacttgcatgtaaatcacaaaaactgtgtgacttacaaggaaagcacgaggcccttgaggaatgatgatgcacattctgctgtgaggaggcccagaaaaggccaaccagggcccaaccgtgcatgatgacagggtgaagagaaggcaggtctgggcactggggcaaagagaacttaagtctctgcagagagcaaggagtaactactgagagagaatcaggacaatcctgcaggtggcccgcttactgttaaatcgtccctctgttgctttatcctctaaaatatgttaagggataaattctatatatatagttatgcatttgctgtcataccagacaattttttatcatgagcacacttctttaataaagatgagtgatctaccagaaaaaaaaaaggcaaag

SEQ ID NO: 372910 - DNA, 2400 bp, Homo sapiens
cgcggacgtggcatctggcccgccgcggtcgcgttcgtctatctggtctggtccgaagttgatcgtgcagtgtgcggcgcgtgtcggtacgtgtccatcgcagtcgactcacacggcgtgatcagtggcatcggtgcggagtcgcagctggctgtggcgcggctgctgagctgacactggctgcgggctcgaggagcacgttgtcgcgtcaggagtgtcgtactcaacccgctggctgtggcctcgcttagctctaccgtttagcacccggcgacatgcacccggtcggtttccgccaggatgcgggagagttggggcaagctacctgcgacagcttgaacttttcctagggattccgctccacccgccggttagagcgtattgctcattaaatccgagacctgtgtgcttgctactgaaataaaagaagtattttttccccagagtccttttaggacgttatgacttttctcctttgcaagactgcaaaaaactgacaagaagacaaaactcttcccactcccagggaccgcgttgtcttgagtttggctagtaaaggctagcaagtgaggctttgtctctgcatcccgttccccctaacatcctcagagaaccttcgtttctagaatctttctagtattcagagacttctccagggtcatgatcccaaaggcttaacccgtttacaaggagagagttgtctcctgacgcccaaaatggcagctaaaatggagataactttaagctccaacactgaagcttcctccaagcaagagagacacataatagccaaactagaagagaaacggggccctcctctgcaaaaaaactgcccagatcctgagctctgccgccagagcttcagacgcttttgttatcaagaggtgtctggaccccaagaggcgctctcccagctccgacagctctgccgtcagtggttgcaacccgagctgcacaccaaggagcagattttggagcttctggtgatggagcagttcctgaccatcctgcccccggagatccaggctcgggtcaggcatcgatgtccaatgagcagcaaggagattgtgaccctcgtggaagattttcacagagcatccaagaaaccaaagcagtgggtggccgtttgtatgcaggggcaaaaggtgctcttggagaaaactggatctcagcttggagaacaggaactgccagactttcaaccgcagactcctaggagagatctcagggagagctctccagcagagccttcccaggcaggagcttatgaccggctgagcccccatcattgggagaaatccccactcctccaagaaccaacccccaaattggctgggacagaggcccccagaatgagaagtgacaacaaggaaaatccacaacaggaaggggctaaaggagcaaagccatgtgcagtgtcagctggcagatccaaagggaatggtctgcagaatcctgaaccaagaggggcaaatatgagtgaacctcggttgtcacggaggcaggtcagctccccaaatgctcaaaagccatttgctcactaccagagacattgcagggtggaatacatcagcagccccctaaaaagccacccactgagagagctaaagaaaagcaaaggaggtaaacggagtctgagcaaccgtttgcaacatcttggtcaccagcccacccgctcagcaaagaaaccctacaaatgtgatgactgtgggaaaagcttcacgtggaattcagagctgaagagacacaagagagtccacacaggagagagaccctacacgtgcggagagtgtggaaactgctttgggcggcagtcaaccctgaagctgcaccagaggatccacactggagagaagccataccagtgtggccagtgtgggaaaagctttcgccagagctcaaaccttcaccagcatcaccgacttcaccatggggactaaaaggagcactccatgctttagattcacacggaaggtgtttgtgtttctcctcccccttacttgcatgtaaatcacaaaaactgtgtgacttacaaggaaagcacgaggcccttgaggaatgatgatgcacattctgctgtgaggaggcccagaaaaggccaaccagggcccaaccgtgcatgatgacagggtgaagagaaggcaggtctgggcactggggcaaagagaacttaagtctctgcagagagcaaggagtaactactgagagagaatcaggacaatcctgcaggtggcccgcttactgttaaatcgtccctctgttgctttatcctctaaaatatgttaagggataaattctatatatatagttatgcatttgctgtcataccagacaattttttatcatgagcacacttctttaataaagatgagtgatctaccagaaaaaaaaaaggcaaag

SEQ ID NO: 372911 - DNA, 2463 bp, Homo sapiens
caaaaaaaaaaaaaaaaaaaaaaaaaaaaaaaaaaaatcggccccgcccccagcccgtgctcgccggtgtcgggtcctaagtccctcggtcttgggttcccggagaggtgagtcggctgcaggtgggtgcggggcgccgggctgttcggggtaccggtgtcgcagtcgccagtccgagctcacaccgggcgtggagttcagctgcgcatcgggttgcggcagcttcgccaggcctggggctggctgggccgcggggccgccctggaggccggagccactgggcctgcggcgcctcggcagcgagcagccgctttgctcgcgtgcaggaggctgttcgctacctcacacccccggctggcgctgtggcctcgcttagctctaccgtttagcacccggcgacatgcacccggtcggtttccgccaggatgcgggagagttggggcaagctacctgcgacagcttgaacttttcctagggattccgctccacccgccggttagagcgtattgctcattaaatccgagacctgtgtgcttgctactgaaataaaagaagtattttttccccagagtccttttaggacgttatgacttttctcctttgcaagactgcaaaaaactgacaagaagacaaaactcttcccactcccagggaccgcgttgtcttgagtttggctagtaaaggctagcaagtgaggctttgtctctgcatcccgttccccctaacatcctcagagaaccttcgtttctagaatctttctagtattcagagacttctccagggtcatgatcccaaaggcttaacccgtttacaaggagagagttgtctcctgacgcccaaaatggcagctaaaatggagataactttaagctccaacactgaagcttcctccaagcaagagagacacataatagccaaactagaagagaaacggggccctcctctgcaaaaaaactgcccagatcctgagctctgccgccagagcttcagacgcttttgttatcaagaggtgtctggaccccaagaggcgctctcccagctccgacagctctgccgtcagtggttgcaacccgagctgcacaccaaggagcagattttggagcttctggtgatggagcagttcctgaccatcctgcccccggagatccaggctcgggtcaggcatcgatgtccaatgagcagcaaggagattgtgaccctcgtggaagattttcacagagcatccaagaaaccaaagcagtgggtggccgtttgtatgcaggggcaaaaggtgctcttggagaaaactggatctcagcttggagaacaggaactgccagactttcaaccgcagactcctaggagagatctcagggagagctctccagcagagccttcccaggcaggagcttatgaccggctgagcccccatcattgggagaaatccccactcctccaagaaccaacccccaaattggctgggacagaacttcttatagaaaagacagatccaaatatggccacagatgaacttccatgcaagctatggctgagtttcattgcttaaaatgctcctctgtttagaggggcctggtagaaataaaaacccaccctatatcttatatctttgtcctcctctgtgatgttgcttgtacttcagatcctcaaatctatttccctttctctggtgtgatacttgtgtaactgctggccttgttctacacagtcctgtgatctctaagcctgaatgacagtgacatttggccaagcctggtgatgtgaatacaagatacagtgagcacgttagggaggagggttacaagatgacaaaaatcctcagtttcttaatatttgctacatccaatgaggtacttcgtgttttagtctgttcaggctgctaatataaaatgctagagactaggtagtttataaacaacaggagtttatttctcacagttctagaggctaggaagtctgagttcaaggtgccagcatggttgggttccagtgaggcccctcttccaggtcacagactgcctacttctcagtcctcatgtggcagaaggggaagacaggctcccgtggggctctttcatgaaggcactaatcccattccagtgagggcagcaccctcatgacctaatcacctcccaaaggccccatgtcctaacactattaccttgggagttagaatttcatatgaatttggaggaacataaacatttagcccctggcaaccacagtctactttttgtctctagaattgcttattctgaacattttatacaaatggaatcacacaggccaggcacagtggctcacgcctgtaatcccagcactttgggaggccaaggcaggcggatcacttaggctcaggagttcgagaccagcctgggcaacatggcgaaatcctgtctctacaaaaaatgcaaaaattagcggggcatggtgctgcacacctgtaatcccagctgcttgggggag

SEQ ID NO: 372912 - DNA, 1861 bp, Homo sapiens
caaaaaaaaaaaaaaaaaaaaaaaaaaaaaaaaaaaatcggccccgcccccagcccgtgctcgccggtgtcgggtcctaagtccctcggtcttgggttcccggagaggtgagtcggctgcaggtgggtgcggggcgccgggctgttcggggtaccggtgtcgcagtcgccagtccgagctcacaccgggcgtggagttcagctgcgcatcgggttgcggcagcttcgccaggcctggggctggctgggccgcggggccgccctggaggccggagccactgggcctgcggcgcctcggcagcgagcagccgctttgctcgcgtgcaggaggctgttcgctacctcacacccccggctggcgctgtggcctcgcttagctctaccgtttagcacccggcgacatgcacccggtcggtttccgccaggatgcgggagagttggggcaagctacctgcgacagcttgaacttttcctagggattccgctccacccgccggttagagcgtattgctcattaaatccgagacctgtgtgcttgctactgaaataaaagaagtattttttccccagagtccttttaggacgttatgacttttctcctttgcaagactgcaaaaaactgacaagaagacaaaactcttcccactcccagggaccgcgttgtcttgagtttggctagtaaaggctagcaagtgaggctttgtctctgcatcccgttccccctaacatcctcagagaaccttcgtttctagaatctttctagtattcagagacttctccagggtcatgatcccaaaggcttaacccgtttacaaggagagagttgtctcctgacgcccaaaatggcagctaaaatggagataactttaagctccaacactgaagcttcctccaagcaagagagacacataatagccaaactagaagagaaacggggccctcctctgcaaaaaaactgcccagatcctgagctctgccgccagagcttcagacgcttttgttatcaagaggtgtctggaccccaagaggcgctctcccagctccgacagctctgccgtcagtggttgcaacccgagctgcacaccaaggagcagattttggagcttctggtgatggagcagttcctgaccatcctgcccccggagatccaggctcgggtcaggcatcgatgtccaatgagcagcaaggagattgtgaccctcgtggaagattttcacagagcatccaagaaaccaaagcagtgggtggccgtttgtatgcaggggcaaaaggtgctcttggagaaaactggatctcagcttggagaacaggaactgccagactttcaaccgcagactcctaggagagatctcagggagagctctccagcagagccttcccaggcaggagcttatgaccggctgagcccccatcattgggagaaatccccactcctccaagaaccaacccccaaattggctgggacaggtaaacactctgccttttctctccctctcatcagccctttatctccatcaatgtatctcatggttctgcaaaggcatagaccacatgtgtgtgtttttttaaatgttatatataatagtagatgattattcactaaacaaatttcactaattaggatggtggtgatactacaagtaagtatgtttttatcgttttctgttaatgaaaatttaagaatccagtgcatgacagggttgtacctacttttctgtccgtttcagaacttcttatagaaaagacagatccaaatatggccacagatgaacttccatgcaagctatggctgagtttcattgcttaaaatgctcctctgtttagaggggcctggtagaaataaaaacccaccctatatctta

SEQ ID NO: 372913 - DNA, 2525 bp, Homo sapiens
caaaaaaaaaaaaaaaaaaaaaaaaaaaaaaaaaaaatcggccccgcccccagcccgtgctcgccggtgtcgggtcctaagtccctcggtcttgggttcccggagaggtgagtcggctgcaggtgggtgcggggcgccgggctgttcggggtaccggtgtcgcagtcgccagtccgagctcacaccgggcgtggagttcagctgcgcatcgggttgcggcagcttcgccaggcctggggctggctgggccgcggggccgccctggaggccggagccactgggcctgcggcgcctcggcagcgagcagccgctttgctcgcgtgcaggaggctgttcgctacctcacacccccggctggcgctgtggcctcgcttagctctaccgtttagcacccggcgacatgcacccggtcggtttccgccaggatgcgggagagttggggcaagctacctgcgacagcttgaacttttcctagggattccgctccacccgccggttagagcgtattgctcattaaatccgagacctgtgtgcttgctactgaaataaaagaagtattttttccccagagtccttttaggacgttatgacttttctcctttgcaagactgcaaaaaactgacaagaagacaaaactcttcccactcccagggaccgcgttgtcttgagtttggctagtaaaggctagcaagtgaggctttgtctctgcatcccgttccccctaacatcctcagagaaccttcgtttctagaatctttctagtattcagagacttctccagggtcatgatcccaaaggcttaacccgtttacaaggagagagttgtctcctgacgcccaaaatggcagctaaaatggagataactttaagctccaacactgaagcttcctccaagcaagagagacacataatagccaaactagaagagaaacggggccctcctctgcaaaaaaactgcccagatcctgagctctgccgccagagcttcagacgcttttgttatcaagaggtgtctggaccccaagaggcgctctcccagctccgacagctctgccgtcagtggttgcaacccgagctgcacaccaaggagcagattttggagcttctggtgatggagcagttcctgaccatcctgcccccggagatccaggctcgggtcaggcatcgatgtccaatgagcagcaaggagattgtgaccctcgtggaagattttcacagagcatccaagaaaccaaagcagtgggtggccgtttgtatgcaggggcaaaaggtgctcttggagaaaactggatctcagcttggagaacaggaactgccagactttcaaccgcagactcctaggagagatctcagggagagctctccagcagagccttcccaggcaggagcttatgaccggctgagcccccatcattgggagaaatccccactcctccaagaaccaacccccaaattggctgggacagaggcccccagaatgagaagtgacaacaaggaaaatccacaacaggaaggggctaaaggagcaaagccatgtgcagtgtcagctggcagatccaaagggaatggtctgcagaatcctgaaccaagaggggcaaatatgagtgaacctcggttgtcacggaggcaggtcagctccccaaatgctcaaaagccatttgctcactaccagagacattgcagggtggaatacatcagcagccccctaaaaagccacccactgagagagctaaagaaaagcaaaggaggtaaacggagtctgagcaaccgtttgcaacatcttggtcaccagcccacccgctcagcaaagaaaccctacaaatgtgatgactgtgggaaaagcttcacgtggaattcagagctgaagagacacaagagagtccacacaggagagagaccctacacgtgcggagagtgtggaaactgctttgggcggcagtcaaccctgaagctgcaccagaggatccacactggagagaagccataccagtgtggccagtgtgggaaaagctttcgccagagctcaaaccttcaccagcatcaccgacttcaccatggggactaaaaggagcactccatgctttagattcacacggaaggtgtttgtgtttctcctcccccttacttgcatgtaaatcacaaaaactgtgtgacttacaaggaaagcacgaggcccttgaggaatgatgatgcacattctgctgtgaggaggcccagaaaaggccaaccagggcccaaccgtgcatgatgacagggtgaagagaaggcaggtctgggcactggggcaaagagaacttaagtctctgcagagagcaaggagtaactactgagagagaatcaggacaatcctgcaggtggcccgcttactgttaaatcgtccctctgttgctttatcctctaaaatatgttaagggataaattctatatatatagttatgcatttgctgtcataccagacaattttttatcatgagcacacttctttaataaagatgagtgatctaccagaaaaaaaaaaggcaaag

SEQ ID NO: 372914 - DNA, 1601 bp, Homo sapiens
caaaaaaaaaaaaaaaaaaaaaaaaaaaaaaaaaaaatcggccccgcccccagcccgtgctcgccggtgtcgggtcctaagtccctcggtcttgggttcccggagaggtgagtcggctgcaggtgggtgcggggcgccgggctgttcggggtaccggtgtcgcagtcgccagtccgagctcacaccgggcgtggagttcagctgcgcatcgggttgcggcagcttcgccaggcctggggctggctgggccgcggggccgccctggaggccggagccactgggcctgcggcgcctcggcagcgagcagccgctttgctcgcgtgcaggaggctgttcgctacctcacacccccggctggcgctgtggcctcgcttagctctaccgtttagcacccggcgacatgcacccggtcggtttccgccaggatgcgggagagttggggcaagctacctgcgacagcttgaacttttcctagggattccgctccacccgccggttagagcgtattgctcattaaatccgagacctgtgtgcttgctactgaaataaaagaagtattttttccccagagtccttttaggacgttatgacttttctcctttgcaagactgcaaaaaactgacaagaagacaaaactcttcccactcccagggaccgcgttgtcttgagtttggctagtaaaggctagcaagtgaggctttgtctctgcatcccgttccccctaacatcctcagagaaccttcgtttctagaatctttctagtattcagagacttctccagggtcatgatcccaaaggcttaacccgtttacaaggagagagttgtctcctgacgcccaaaatggcagctaaaatggagataactttaagctccaacactgaagcttcctccaagcaagagagacacataatagccaaactagaagagaaacggggccctcctctgcaaaaaaactgcccagatcctgagctctgccgccagagcttcagacgcttttgttatcaagaggtgtctggaccccaagaggcgctctcccagctccgacagctctgccgtcagtggttgcaacccgagctgcacaccaaggagcagattttggagcttctggtgatggagcagttcctgaccatcctgcccccggagatccaggctcgggtcaggcatcgatgtccaatgagcagcaaggagattgtgaccctcgtggaagattttcacagagcatccaagaaaccaaagcagtgggtggccgtttgtatgcaggggcaaaaggtgctcttggagaaaactggatctcagcttggagaacaggaactgccagactttcaaccgcagactcctaggagagatctcagggagagctctccagcagagccttcccaggcaggagcttatgaccggctgagcccccatcattgggagaaatccccactcctccaagaaccaacccccaaattggctgggacagaacttcttatagaaaagacagatccaaatatggccacagatgaacttccatgcaagctatggctgagtttcattgcttaaaatgctcctctgtttagaggggcctggtagaaataaaaacccaccctatatctta

SEQ ID NO: 372915 - DNA, 2723 bp, Homo sapiens
caaaaaaaaaaaaaaaaaaaaaaaaaaaaaaaaaaaatcggccccgcccccagcccgtgctcgccggtgtcgggtcctaagtccctcggtcttgggttcccggagaggtgagtcggctgcaggtgggtgcggggcgccgggctgttcggggtaccggtgtcgcagtcgccagtccgagctcacaccgggcgtggagttcagctgcgcatcgggttgcggcagcttcgccaggcctggggctggctgggccgcggggccgccctggaggccggagccactgggcctgcggcgcctcggcagcgagcagccgctttgctcgcgtgcaggaggctgttcgctacctcacacccccggctggcgctgtggcctcgcttagctctaccgtttagcacccggcgacatgcacccggtcggtttccgccaggatgcgggagagttggggcaagctacctgcgacagcttgaacttttcctagggattccgctccacccgccggttagagcgtattgctcattaaatccgagacctgtgtgcttgctactgaaataaaagaagtattttttccccagagtccttttaggacgttatgacttttctcctttgcaagactgcaaaaaactgacaagaagacaaaactcttcccactcccagggaccgcgttgtcttgagtttggctagtaaaggctagcaagtgaggctttgtctctgcatcccgttccccctaacatcctcagagaaccttcgtttctagaatctttctagtattcagagacttctccagggtcatgatcccaaaggcttaacccgtttacaaggagagagttgtctcctgacgcccaaaatggcagctaaaatggagataactttaagctccaacactgaagcttcctccaagcaagagagacacataatagccaaactagaagagaaacggggccctcctctgcaaaaaaactgcccagatcctgagctctgccgccagagcttcagacgcttttgttatcaagaggtgtctggaccccaagaggcgctctcccagctccgacagctctgccgtcagtggttgcaacccgagctgcacaccaaggagcagattttggagcttctggtgatggagcagttcctgaccatcctgcccccggagatccaggctcgggtcaggcatcgatgtccaatgagcagcaaggagattgtgaccctcgtggaagattttcacagagcatccaagaaaccaaagcagtgggtggccgtttgtatgcaggggcaaaaggtgctcttggagaaaactggatctcagcttggagaacaggaactgccagactttcaaccgcagactcctaggagagatctcagggagagctctccagcagagccttcccaggcaggagcttatgaccggctgagcccccatcattgggagaaatccccactcctccaagaaccaacccccaaattggctgggacaggtaaacactctgccttttctctccctctcatcagccctttatctccatcaatgtatctcatggttctgcaaaggcatagaccacatgtgtgtgtttttttaaatgttatatataatagtagatgattattcactaaacaaatttcactaattaggatggtggtgatactacaagtaagtatgtttttatcgttttctgttaatgaaaatttaagaatccagtgcatgacagggttgtacctacttttctgtccgtttcagaacttcttatagaaaagacagatccaaatatggccacagatgaacttccatgcaagctatggctgagtttcattgcttaaaatgctcctctgtttagaggggcctggtagaaataaaaacccaccctatatcttatatctttgtcctcctctgtgatgttgcttgtacttcagatcctcaaatctatttccctttctctggtgtgatacttgtgtaactgctggccttgttctacacagtcctgtgatctctaagcctgaatgacagtgacatttggccaagcctggtgatgtgaatacaagatacagtgagcacgttagggaggagggttacaagatgacaaaaatcctcagtttcttaatatttgctacatccaatgaggtacttcgtgttttagtctgttcaggctgctaatataaaatgctagagactaggtagtttataaacaacaggagtttatttctcacagttctagaggctaggaagtctgagttcaaggtgccagcatggttgggttccagtgaggcccctcttccaggtcacagactgcctacttctcagtcctcatgtggcagaaggggaagacaggctcccgtggggctctttcatgaaggcactaatcccattccagtgagggcagcaccctcatgacctaatcacctcccaaaggccccatgtcctaacactattaccttgggagttagaatttcatatgaatttggaggaacataaacatttagcccctggcaaccacagtctactttttgtctctagaattgcttattctgaacattttatacaaatggaatcacacaggccaggcacagtggctcacgcctgtaatcccagcactttgggaggccaaggcaggcggatcacttaggctcaggagttcgagaccagcctgggcaacatggcgaaatcctgtctctacaaaaaatgcaaaaattagcggggcatggtgctgcacacctgtaatcccagctgcttgggggag

SEQ ID NO: 372916 - DNA, 532 bp, Homo sapiens
tgtgatgagcataaatgtaaaatccaagaaatgtttattttgtaaggggaaaaaagtgtgggtagaggagagactcagacaaacctaaatatagatataaattcaaatctcagttcagccactttgtagcttatgtagggggctttggcaaattatctaatttctttgaatcttagattcctcacttttttctttctttttgttttttttgagatagcctctgtcccctgggctggagtacagtgagccgagatggtgccactgcactccagcctggcaacagagcgagactccatctcaaaaaaaaaaaaaaagtaatgacatgattacctaagtgcccctccacacagccccatttctgtaaaaaaaaaaaaagtgcaaaaattggccaggcttggtggcaccagcctgtagtcccaactacttgggaggctgaggtgggaggatcacttgggcctaggaggctgaagatacagtgagtcgagatcacaccactgcacttcagcctcgtcaacagagcgagaccctgtct

SEQ ID NO: 372917 - DNA, 1031 bp, Homo sapiens
ccactgcattcagctcttcttttctttagatatgagagctgaagagcttagacacattttgcatgtattatttgaaaatctgatggaatcccaaagctgaggcaggagaatagcctgaacctgggaatcggaggttgcagggccaagatcgccccactgcactccagcctggcaatagaccgagactccgtctccaaaaaaaaaaaaaatacaatttttatttcttttactttttttagtaagttaatgtatataaaaatggcttcggacaaaatatctctgagttctgtgtattttcagtcaaaactttaaacctgtagaatcaatttaagtgttggaaaaaatttgtctgaaacatttcataatttgtttccagcatgaggtatctaaggatttagaccagaggtctagattaatactctatttttacatttaaaccttttattataagtcttacataaaccatttttgttactctcttccacatgttactggataaattgtttagtggaaaataggctttttaatcatgaatatgatgacaatcagttatacagttataaaattaaaagtttgaaaagcaatattgtatatttttatctatataaaataactaaaatgtatctaagaataataaaatcacgttaaaccaaatacacgtttgtctgtattgttaagtgccaaacaaaggatacttagtgcactgctacattgtgggatttatttctagatgatgtgcacatctaaggatatggatgtgtctaattttagtcttttcctgtaccaggtttttcttacaatacctgaagacttaccagtattctagtgtattatgaagctttcaacattactatgcacaaactagtgtttttcgatgttactaaattttaggtaaatgctttcatggcttttttcttcaaaatgttactgcttacatatatcatgcatagatttttgcttaaagtatgatttataatatcctcattatcaaagttgtatacaataatatataataaaataacaaatatgaa

SEQ ID NO: 372918 - DNA, 5873 bp, Homo sapiens
attcagccggtgcgcgcggcggcgggaggcagtggctggggagtcccgtcgacgctctgttccgagagcgtgccccggaccgccagctcagaacaggggcagccgtgtagccgaacggaagctgggagcagccgggactggtggcccgcgcccgagctccgcaggcgggaagcaccctggatttaggaagtcccgggagcagcgcggcggcacctccctcacccaaggggccgcggcgacggtcacggggcgcggcgccaccgtgagcgacccaggccaggattctaaatagacggcccaggctcctcctccgcccgggccgcctcacctgcgggcattgccgcgccgcctccgccggtgtagacggcacctgcgccgccttgctcgcgggtctccgcccctcgcccaccctcactgcgccaggcccaggcagctcacctgtactggcgcgggctgcggaagcctgcgtgagccgaggcgttgaggcgcggcgcccacgccactgtcccgagaggacgcaggtggagcgggcgcggcttcgcggaacccggcgccggccgccgcagtggtcccagcctacaccgggttccggggacccggccgccagtgcccggggagtagccgccgccgtcggctgggcaccatgaacagcagcagcgccaacatcacctacgccagtcgcaagcggcggaagccggtgcagaaaacagtaaagccaatcccagctgaaggaatcaagtcaaatccttccaagcggcatagagaccgacttaatacagagttggaccgtttggctagcctgctgcctttcccacaagatgttattaataagttggacaaactttcagttcttaggctcagcgtcagttacctgagagccaagagcttctttgatgttgcattaaaatcctcccctactgaaagaaacggaggccaggataactgtagagcagcaaatttcagagaaggcctgaacttacaagaaggagaattcttattacaggctctgaatggctttgtattagttgtcactacagatgctttggtcttttatgcttcttctactatacaagattatctagggtttcagcagtctgatgtcatacatcagagtgtatatgaacttatccataccgaagaccgagctgaatttcagcgtcagctacactgggcattaaatccttctcagtgtacagagtctggacaaggaattgaagaagccactggtctcccccagacagtagtctgttataacccagaccagattcctccagaaaactctcctttaatggagaggtgcttcatatgtcgtctaaggtgtctgctggataattcatctggttttctggcaatgaatttccaagggaagttaaagtatcttcatggacagaaaaagaaagggaaagatggatcaatacttccacctcagttggctttgtttgcgatagctactccacttcagccaccatccatacttgaaatccggaccaaaaattttatctttagaaccaaacacaaactagacttcacacctattggttgtgatgccaaaggaagaattgttttaggatatactgaagcagagctgtgcacgagaggctcaggttatcagtttattcatgcagctgatatgctttattgtgccgagtcccatatccgaatgattaagactggagaaagtggcatgatagttttccggcttcttacaaaaaacaaccgatggacttgggtccagtctaatgcacgcctgctttataaaaatggaagaccagattatatcattgtaactcagagaccactaacagatgaggaaggaacagagcatttacgaaaacgaaatacgaagttgccttttatgtttaccactggagaagctgtgttgtatgaggcaaccaacccttttcctgccataatggatcccttaccactaaggactaaaaatggcactagtggaaaagactctgctaccacatccactctaagcaaggactctctcaatcctagttccctcctggctgccatgatgcaacaagatgagtctatttatctctatcctgcttcaagtacttcaagtactgcaccttttgaaaacaactttttcaacgaatctatgaatgaatgcagaaattggcaagataatactgcaccgatgggaaatgatactatcctgaaacatgagcaaattgaccagcctcaggatgtgaactcatttgctggaggtcacccagggctctttcaagatagtaaaaacagtgacttgtacagcataatgaaaaacctaggcattgattttgaagacatcagacacatgcagaatgaaaaatttttcagaaatgatttttctggtgaggttgacttcagagacattgacttaacggatgaaatcctgacgtatgtccaagattctttaagtaagtctcccttcataccttcagattatcaacagcaacagtccttggctctgaactcaagctgtatggtacaggaacacctacatctagaacagcaacagcaacatcaccaaaagcaagtagtagtggagccacagcaacagctgtgtcagaagatgaagcacatgcaagttaatggcatgtttgaaaattggaactctaaccaattcgtgcctttcaattgtccacagcaagacccacaacaatataatgtctttacagacttacatgggatcagtcaagagttcccctacaaatctgaaatggattctatgccttatacacagaactttatttcctgtaatcagcctgtattaccacaacattccaaatgtacagagctggactaccctatggggagttttgaaccatccccataccccactacttctagtttagaagattttgtcacttgtttacaacttcctgaaaaccaaaagcatggattaaatccacagtcagccataataactcctcagacatgttatgctggggccgtgtcgatgtatcagtgccagccagaacctcagcacacccacgtgggtcagatgcagtacaatccagtactgccaggccaacaggcatttttaaacaagtttcagaatggagttttaaatgaaacatatccagctgaattaaataacataaataacactcagactaccacacatcttcagccacttcatcatccgtcagaagccagaccttttcctgatttgacatccagtggattcctgtaattccaagcccaattttgaccctggtttttggattaaattagtttgtgaaggattatggaaaaataaaactgtcactgttggacgtcagcaagttcacatggaggcattgatgcatgctattcacaattattccaaaccaaattttaatttttgcttttagaaaagggagtttaaaaatggtatcaaaattacatatactacagtcaagatagaaagggtgctgccacggagtggtgaggtaccgtctacatttcacattattctgggcaccacaaaatatacaaaactttatcagggaaactaagattcttttaaattagaaaatattctctatttgaattatttctgtcacagtaaaaataaaatactttgagttttgagctactggattcttattagttccccaaatacaaagttagagaactaaactagtttttcctatcatgttaacctctgcttttatctcagatgttaaaataaatggtttggtgctttttataaaaagataatctcagtgctttcctccttcactgtttcatctaagtgcctcacatttttttctacctataacactctaggatgtatattttatataaagtattctttttcttttttaaattaatatctttctgcacacaaatattatttgtgtttcctaaatccaaccattttcattaattcaggcatattttaactccactgcttacctactttcttcaggtaaagggcaaataatgatcgaaaaaataattatttattacataatttagttgtttctagactataaatgttgctatgtgccttatgttgaaaaaatttaaaagtaaaatgtctttccaaattatttcttaattattataaaaatattaagacaatagcacttaaattcctcaacagtgttttcagaagaaataaatataccactctttacctttattgatatctccatgatgatagttgaatgttgcaatgtgaaaaatctgctgttaactgcaaccttgtttattaaattgcaagaagctttatttctagctttttaattaagcaaagcacccatttcaatgtgtataaattgtctttaaaaactgttttagacctataatccttgataatatattgtgttgactttataaatttcgcttcttagaacagtggaaactatgtgtttttctcatatttgaggagtgttaagattgcagatagcaaggtttggtgcaaagtattgtaatgagtgaattgaatggtgcattgtatagatataatgaacaaaattatttgtaagatatttgcagtttttcattttaaaaagtccataccttatatatgcacttaatttgttggggctttacatactttatcaatgtgtctttctaagaaatcaagtaatgaatccaactgcttaaagttggtattaataaaaagacaaccacatagttcgtttaccttcaaactttaggtttttttaatgatatactgatcttcattaccaataggcaaattaatcaccctaccaactttactgtcctaacatggtttaaaagaaaaaatgacaccatcttttattcttttttttttttttttttgagagagagtcttactctgccgcccaaactggagtgcagtggcacaatcttggctcactgcaacctctacctcctgggttcaagtgattctcttgcctcagcctcccgagttgctgggattacgggcatggtggcgtgagcctgtagtcctagctactcgggaggctgaggcaggagaatagcctgaacctgggaatcggaggttgcagggccaagatcgccccactgcactccagcctggcaatagaccgagactccgtctccaaaaaaaaaaaaaatacaatttttatttcttttactttttttagtaagttaatgtatataaaaatggcttcggacaaaatatctctgagttctgtgtattttcagtcaaaactttaaacctgtagaatcaatttaagtgttggaaaaaatttgtctgaaacatttcataatttgtttccagcatgaggtatctaaggatttagaccagaggtctagattaatactctatttttacatttaaaccttttattataagtcttacataaaccatttttgttactctcttccacatgttactggataaattgtttagtggaaaataggctttttaatcatgaatatgatgacaatcagttatacagttataaaattaaaagtttgaaaagcaatattgtatatttttatctatataaaataactaaaatgtatctaagaataataaaatcacgttaaaccaaatacacgtttgtctgtattgttaagtgccaaacaaaggatacttagtgcactgctacattgtgggatttatttctagatgatgtgcacatctaaggatatggatgtgtctaattttagtcttttcctgtaccaggtttttcttacaatacctgaagacttaccagtattctagtgtattatgaagctttcaacattactatgcacaaactagtgtttttcgatgttactaaattttaggtaaatgctttcatggcttttttcttcaaaatgttactgcttacatatatcatgcatagatttttgcttaaagtatgatttataatatcctcattatcaaagttgtatacaataatatataataaaataacaaatatgaa

SEQ ID NO: 372919 - DNA, 5782 bp, Homo sapiens
attcagccggtgcgcgcggcggcgggaggcagtggctggggagtcccgtcgacgctctgttccgagagcgtgccccggaccgccagctcagaacaggggcagccgtgtagccgaacggaagctgggagcagccgggactggtggcccgcgcccgagctccgcaggcgggaagcaccctggatttaggaagtcccgggagcagcgcggcggcacctccctcacccaaggggccgcggcgacggtcacggggcgcggcgccaccgtgagcgacccaggccaggattctaaatagacggcccaggctcctcctccgcccgggccgcctcacctgcgggcattgccgcgccgcctccgccggtgtagacggcacctgcgccgccttgctcgcgggtctccgcccctcgcccaccctcactgcgccaggcccaggcagctcacctgtactggcgcgggctgcggaagcctgcgtgagccgaggcgttgaggcgcggcgcccacgccactgtcccgagaggacgcaggtggagcgggcgcggcttcgcggaacccggcgccggccgccgcagtggtcccagcctacaccgggttccggggacccggccgccagtgcccggggagtagccgccgccgtcggctgggcaccatgaacagcagcagcgccaacatcacctacgccagtcgcaagcggcggaagccggtgcagaaaacagtaaagccaatcccagctgaaggaatcaagtcaaatccttccaagcggcatagagaccgacttaatacagagttggaccgtttggctagcctgctgcctttcccacaagatgttattaataagttggacaaactttcagttcttaggctcagcgtcagttacctgagagccaagagcttctttgatgttgcattaaaatcctcccctactgaaagaaacggaggccaggataactgtagagcagcaaatttcagagaaggcctgaacttacaagaaggagaattcttattacaggctctgaatggctttgtattagttgtcactacagatgctttggtcttttatgcttcttctactatacaagattatctagggtttcagcagtctgatgtcatacatcagagtgtatatgaacttatccataccgaagaccgagctgaatttcagcgtcagctacactgggcattaaatccttctcagtgtacagagtctggacaaggaattgaagaagccactggtctcccccagacagtagtctgttataacccagaccagattcctccagaaaactctcctttaatggagaggtgcttcatatgtcgtctaaggtgtctgctggataattcatctggttttctggcaatgaatttccaagggaagttaaagtatcttcatggacagaaaaagaaagggaaagatggatcaatacttccacctcagttggctttgtttgcgatagctactccacttcagccaccatccatacttgaaatccggaccaaaaattttatctttagaaccaaacacaaactagacttcacacctattggttgtgatgccaaaggaagaattgttttaggatatactgaagcagagctgtgcacgagaggctcaggttatcagtttattcatgcagctgatatgctttattgtgccgagtcccatatccgaatgattaagactggagaaagtggcatgatagttttccggcttcttacaaaaaacaaccgatggacttgggtccagtctaatgcacgcctgctttataaaaatggaagaccagattatatcattgtaactcagagaccactaacagatgaggaaggaacagagcatttacgaaaacgaaatacgaagttgccttttatgtttaccactggagaagctgtgttgtatgaggcaaccaacccttttcctgccataatggatcccttaccactaaggactaaaaatggcactagtggaaaagactctgctaccacatccactctaagcaaggactctctcaatcctagttccctcctggctgccatgatgcaacaagatgagtctatttatctctatcctgcttcaagtacttcaagtactgcaccttttgaaaacaactttttcaacgaatctatgaatgaatgcagaaattggcaagataatactgcaccgatgggaaatgatactatcctgaaacatgagcaaattgaccagcctcaggatgtgaactcatttgctggaggtcacccagggctctttcaagatagtaaaaacagtgacttgtacagcataatgaaaaacctaggcattgattttgaagacatcagacacatgcagaatgaaaaatttttcagaaatgatttttctggtgaggttgacttcagagacattgacttaacggatgaaatcctgacgtatgtccaagattctttaagtaagtctcccttcataccttcagattatcaacagcaacagtccttggctctgaactcaagctgtatggtacaggaacacctacatctagaacagcaacagcaacatcaccaaaagcaagtagtagtggagccacagcaacagctgtgtcagaagatgaagcacatgcaagttaatggcatgtttgaaaattggaactctaaccaattcgtgcctttcaattgtccacagcaagacccacaacaatataatgtctttacagacttacatgggatcagtcaagagttcccctacaaatctgaaatggattctatgccttatacacagaactttatttcctgtaatcagcctgtattaccacaacattccaaatgtacagagctggactaccctatggggagttttgaaccatccccataccccactacttctagtttagaagattttgtcacttgtttacaacttcctgaaaaccaaaagcatggattaaatccacagtcagccataataactcctcagacatgttatgctggggccgtgtcgatgtatcagtgccagccagaacctcagcacacccacgtgggtcagatgcagtacaatccagtactgccaggccaacaggcatttttaaacaagtttcagaatggagttttaaatgaaacatatccagctgaattaaataacataaataacactcagactaccacacatcttcagccacttcatcatccgtcagaagccagaccttttcctgatttgacatccagtggattcctgtaattccaagcccaattttgaccctggtttttggattaaattagtttgtgaaggattatggaaaaataaaactgtcactgttggacgtcagcaagttcacatggaggcattgatgcatgctattcacaattattccaaaccaaattttaatttttgcttttagaaaagggagtttaaaaatggtatcaaaattacatatactacagtcaagatagaaagggtgctgccacggagtggtgaggtaccgtctacatttcacattattctgggcaccacaaaatatacaaaactttatcagggaaactaagattcttttaaattagaaaatattctctatttgaattatttctgtcacagtaaaaataaaatactttgagttttgagctactggattcttattagttccccaaatacaaagttagagaactaaactagtttttcctatcatgttaacctctgcttttatctcagatgttaaaataaatggtttggtgctttttataaaaagataatctcagtgctttcctccttcactgtttcatctaagtgcctcacatttttttctacctataacactctaggatgtatattttatataaagtattctttttcttttttaaattaatatctttctgcacacaaatattatttgtgtttcctaaatccaaccattttcattaattcaggcatattttaactccactgcttacctactttcttcaggtaaagggcaaataatgatcgaaaaaataattatttattacataatttagttgtttctagactataaatgttgctatgtgccttatgttgaaaaaatttaaaagtaaaatgtctttccaaattatttcttaattattataaaaatattaagacaatagcacttaaattcctcaacagtgttttcagaagaaataaatataccactctttacctttattgatatctccatgatgatagttgaatgttgcaatgtgaaaaatctgctgttaactgcaaccttgtttattaaattgcaagaagctttatttctagctttttaattaagcaaagcacccatttcaatgtgtataaattgtctttaaaaactgttttagacctataatccttgataatatattgtgttgactttataaatttcgcttcttagaacagtggaaactatgtgtttttctcatatttgaggagtgttaagattgcagatagcaaggtttggtgcaaagtattgtaatgagtgaattgaatggtgcattgtatagatataatgaacaaaattatttgtaagatatttgcagtttttcattttaaaaagtccataccttatatatgcacttaatttgttggggctttacatactttatcaatgtgtctttctaagaaatcaagtaatgaatccaactgcttaaagttggtattaataaaaagacaaccacatagttcgtttaccttcaaactttaggtttttttaatgatatactgatcttcattaccaataggcaaattaatcaccctaccaactttactgtcctaacatggtttaaaagaaaaaatgacaccatcttttattcttttttttttttttttttgagagagagtcttactctgccgcccaaactggagtgcagtggcacaatcttggctcactgcaacctctacctcgctgaggcaggagaatagcctgaacctgggaatcggaggttgcagggccaagatcgccccactgcactccagcctggcaatagaccgagactccgtctccaaaaaaaaaaaaaatacaatttttatttcttttactttttttagtaagttaatgtatataaaaatggcttcggacaaaatatctctgagttctgtgtattttcagtcaaaactttaaacctgtagaatcaatttaagtgttggaaaaaatttgtctgaaacatttcataatttgtttccagcatgaggtatctaaggatttagaccagaggtctagattaatactctatttttacatttaaaccttttattataagtcttacataaaccatttttgttactctcttccacatgttactggataaattgtttagtggaaaataggctttttaatcatgaatatgatgacaatcagttatacagttataaaattaaaagtttgaaaagcaatattgtatatttttatctatataaaataactaaaatgtatctaagaataataaaatcacgttaaaccaaatacacgtttgtctgtattgttaagtgccaaacaaaggatacttagtgcactgctacattgtgggatttatttctagatgatgtgcacatctaaggatatggatgtgtctaattttagtcttttcctgtaccaggtttttcttacaatacctgaagacttaccagtattctagtgtattatgaagctttcaacattactatgcacaaactagtgtttttcgatgttactaaattttaggtaaatgctttcatggcttttttcttcaaaatgttactgcttacatatatcatgcatagatttttgcttaaagtatgatttataatatcctcattatcaaagttgtatacaataatatataataaaataacaaatatgaa

SEQ ID NO: 372920 - DNA, 5660 bp, Homo sapiens
attcagccggtgcgcgcggcggcgggaggcagtggctggggagtcccgtcgacgctctgttccgagagcgtgccccggaccgccagctcagaacaggggcagccgtgtagccgaacggaagctgggagcagccgggactggtggcccgcgcccgagctccgcaggcgggaagcaccctggatttaggaagtcccgggagcagcgcggcggcacctccctcacccaaggggccgcggcgacggtcacggggcgcggcgccaccgtgagcgacccaggccaggattctaaatagacggcccaggctcctcctccgcccgggccgcctcacctgcgggcattgccgcgccgcctccgccggtgtagacggcacctgcgccgccttgctcgcgggtctccgcccctcgcccaccctcactgcgccaggcccaggcagctcacctgtactggcgcgggctgcggaagcctgcgtgagccgaggcgttgaggcgcggcgcccacgccactgtcccgagaggacgcaggtggagcgggcgcggcttcgcggaacccggcgccggccgccgcagtggtcccagcctacaccgggttccggggacccggccgccagtgcccggggagtagccgccgccgtcggctgggcaccatgaacagcagcagcgccaacatcacctacgccagtcgcaagcggcggaagccggtgcagaaaacagtaaagccaatcccagctgaaggaatcaagtcaaatccttccaagcggcatagagaccgacttaatacagagttggaccgtttggctagcctgctgcctttcccacaagatgttattaataagttggacaaactttcagttcttaggctcagcgtcagttacctgagagccaagagcttctttgatgttgcattaaaatcctcccctactgaaagaaacggaggccaggataactgtagagcagcaaatttcagagaaggcctgaacttacaagaaggagaattcttattacaggctctgaatggctttgtattagttgtcactacagatgctttggtcttttatgcttcttctactatacaagattatctagggtttcagcagtctgatgtcatacatcagagtgtatatgaacttatccataccgaagaccgagctgaatttcagcgtcagctacactgggcattaaatccttctcagtgtacagagtctggacaaggaattgaagaagccactggtctcccccagacagtagtctgttataacccagaccagattcctccagaaaactctcctttaatggagaggtgcttcatatgtcgtctaaggtgtctgctggataattcatctggttttctggcaatgaatttccaagggaagttaaagtatcttcatggacagaaaaagaaagggaaagatggatcaatacttccacctcagttggctttgtttgcgatagctactccacttcagccaccatccatacttgaaatccggaccaaaaattttatctttagaaccaaacacaaactagacttcacacctattggttgtgatgccaaaggaagaattgttttaggatatactgaagcagagctgtgcacgagaggctcaggttatcagtttattcatgcagctgatatgctttattgtgccgagtcccatatccgaatgattaagactggagaaagtggcatgatagttttccggcttcttacaaaaaacaaccgatggacttgggtccagtctaatgcacgcctgctttataaaaatggaagaccagattatatcattgtaactcagagaccactaacagatgaggaaggaacagagcatttacgaaaacgaaatacgaagttgccttttatgtttaccactggagaagctgtgttgtatgaggcaaccaacccttttcctgccataatggatcccttaccactaaggactaaaaatggcactagtggaaaagactctgctaccacatccactctaagcaaggactctctcaatcctagttccctcctggctgccatgatgcaacaagatgagtctatttatctctatcctgcttcaagtacttcaagtactgcaccttttgaaaacaactttttcaacgaatctatgaatgaatgcagaaattggcaagataatactgcaccgatgggaaatgatactatcctgaaacatgagcaaattgaccagcctcaggatgtgaactcatttgctggaggtcacccagggctctttcaagatagtaaaaacagtgacttgtacagcataatgaaaaacctaggcattgattttgaagacatcagacacatgcagaatgaaaaatttttcagaaatgatttttctggtgaggttgacttcagagacattgacttaacggatgaaatcctgacgtatgtccaagattctttaagtaagtctcccttcataccttcagattatcaacagcaacagtccttggctctgaactcaagctgtatggtacaggaacacctacatctagaacagcaacagcaacatcaccaaaagcaagtagtagtggagccacagcaacagctgtgtcagaagatgaagcacatgcaagttaatggcatgtttgaaaattggaactctaaccaattcgtgcctttcaattgtccacagcaagacccacaacaatataatgtctttacagacttacatgggatcagtcaagagttcccctacaaatctgaaatggattctatgccttatacacagaactttatttcctgtaatcagcctgtattaccacaacattccaaatgtacagagctggactaccctatggggagttttgaaccatccccataccccactacttctagtttagaagattttgtcacttgtttacaacttcctgaaaaccaaaagcatggattaaatccacagtcagccataataactcctcagacatgttatgctggggccgtgtcgatgtatcagtgccagccagaacctcagcacacccacgtgggtcagatgcagtacaatccagtactgccaggccaacaggcatttttaaacaagtttcagaatggagttttaaatgaaacatatccagctgaattaaataacataaataacactcagactaccacacatcttcagccacttcatcatccgtcagaagccagaccttttcctgatttgacatccagtggattcctgtaattccaagcccaattttgaccctggtttttggattaaattagtttgtgaaggattatggaaaaataaaactgtcactgttggacgtcagcaagttcacatggaggcattgatgcatgctattcacaattattccaaaccaaattttaatttttgcttttagaaaagggagtttaaaaatggtatcaaaattacatatactacagtcaagatagaaagggtgctgccacggagtggtgaggtaccgtctacatttcacattattctgggcaccacaaaatatacaaaactttatcagggaaactaagattcttttaaattagaaaatattctctatttgaattatttctgtcacagtaaaaataaaatactttgagttttgagctactggattcttattagttccccaaatacaaagttagagaactaaactagtttttcctatcatgttaacctctgcttttatctcagatgttaaaataaatggtttggtgctttttataaaaagataatctcagtgctttcctccttcactgtttcatctaagtgcctcacatttttttctacctataacactctaggatgtatattttatataaagtattctttttcttttttaaattaatatctttctgcacacaaatattatttgtgtttcctaaatccaaccattttcattaattcaggcatattttaactccactgcttacctactttcttcaggtaaagggcaaataatgatcgaaaaaataattatttattacataatttagttgtttctagactataaatgttgctatgtgccttatgttgaaaaaatttaaaagtaaaatgtctttccaaattatttcttaattattataaaaatattaagacaatagcacttaaattcctcaacagtgttttcagaagaaataaatataccactctttacctttattgatatctccatgatgatagttgaatgttgcaatgtgaaaaatctgctgttaactgcaaccttgtttattaaattgcaagaagctttatttctagctttttaattaagcaaagcacccatttcaatgtgtataaattgtctttaaaaactgttttagacctataatccttgataatatattgtgttgactttataaatttcgcttcttagaacagtggaaactatgtgtttttctcatatttgaggagtgttaagattgcagatagcaaggtttggtgcaaagtattgtaatgagtgaattgaatggtgcattgtatagatataatgaacaaaattatttgtaagatatttgcagtttttcattttaaaaagtccataccttatatatgcacttaatttgttggggctttacatactttatcaatgtgtctttctaagaaatcaagtaatgaatccaactgcttaaagttggtattaataaaaagacaaccacatagttcgtttaccttcaaactttaggtttttttaatgatatactgatcttcattaccaataggcaaattaatcaccctaccaactttactgtcctaacatggtttaaaagaaaaaatgacaccatcttttattcttttttttttttttttttgagagagagtcttactcttccagcctggcaatagaccgagactccgtctccaaaaaaaaaaaaaatacaatttttatttcttttactttttttagtaagttaatgtatataaaaatggcttcggacaaaatatctctgagttctgtgtattttcagtcaaaactttaaacctgtagaatcaatttaagtgttggaaaaaatttgtctgaaacatttcataatttgtttccagcatgaggtatctaaggatttagaccagaggtctagattaatactctatttttacatttaaaccttttattataagtcttacataaaccatttttgttactctcttccacatgttactggataaattgtttagtggaaaataggctttttaatcatgaatatgatgacaatcagttatacagttataaaattaaaagtttgaaaagcaatattgtatatttttatctatataaaataactaaaatgtatctaagaataataaaatcacgttaaaccaaatacacgtttgtctgtattgttaagtgccaaacaaaggatacttagtgcactgctacattgtgggatttatttctagatgatgtgcacatctaaggatatggatgtgtctaattttagtcttttcctgtaccaggtttttcttacaatacctgaagacttaccagtattctagtgtattatgaagctttcaacattactatgcacaaactagtgtttttcgatgttactaaattttaggtaaatgctttcatggcttttttcttcaaaatgttactgcttacatatatcatgcatagatttttgcttaaagtatgatttataatatcctcattatcaaagttgtatacaataatatataataaaataacaaatatgaa

SEQ ID NO: 372921 - DNA, 5386 bp, Homo sapiens
agaaagaaacccatacacatacagctgcatctgaaacctcagaaactaagctcaacccaattgattaaaaggatgttctttggataagcagatggacacaaaccatactttgagaaccatgttccacagtgccaatacaggaagtttctagataatggcagctcattttttaaaaatggcactacactatactgtattcacatgccagcaaaactgttaagagtaaagccaatcccagctgaaggaatcaagtcaaatccttccaagcggcatagagaccgacttaatacagagttggaccgtttggctagcctgctgcctttcccacaagatgttattaataagttggacaaactttcagttcttaggctcagcgtcagttacctgagagccaagagcttctttgatgttgcattaaaatcctcccctactgaaagaaacggaggccaggataactgtagagcagcaaatttcagagaaggcctgaacttacaagaaggagaattcttattacaggctctgaatggctttgtattagttgtcactacagatgctttggtcttttatgcttcttctactatacaagattatctagggtttcagcagtctgatgtcatacatcagagtgtatatgaacttatccataccgaagaccgagctgaatttcagcgtcagctacactgggcattaaatccttctcagtgtacagagtctggacaaggaattgaagaagccactggtctcccccagacagtagtctgttataacccagaccagattcctccagaaaactctcctttaatggagaggtgcttcatatgtcgtctaaggtgtctgctggataattcatctggttttctggcaatgaatttccaagggaagttaaagtatcttcatggacagaaaaagaaagggaaagatggatcaatacttccacctcagttggctttgtttgcgatagctactccacttcagccaccatccatacttgaaatccggaccaaaaattttatctttagaaccaaacacaaactagacttcacacctattggttgtgatgccaaaggaagaattgttttaggatatactgaagcagagctgtgcacgagaggctcaggttatcagtttattcatgcagctgatatgctttattgtgccgagtcccatatccgaatgattaagactggagaaagtggcatgatagttttccggcttcttacaaaaaacaaccgatggacttgggtccagtctaatgcacgcctgctttataaaaatggaagaccagattatatcattgtaactcagagaccactaacagatgaggaaggaacagagcatttacgaaaacgaaatacgaagttgccttttatgtttaccactggagaagctgtgttgtatgaggcaaccaacccttttcctgccataatggatcccttaccactaaggactaaaaatggcactagtggaaaagactctgctaccacatccactctaagcaaggactctctcaatcctagttccctcctggctgccatgatgcaacaagatgagtctatttatctctatcctgcttcaagtacttcaagtactgcaccttttgaaaacaactttttcaacgaatctatgaatgaatgcagaaattggcaagataatactgcaccgatgggaaatgatactatcctgaaacatgagcaaattgaccagcctcaggatgtgaactcatttgctggaggtcacccagggctctttcaagatagtaaaaacagtgacttgtacagcataatgaaaaacctaggcattgattttgaagacatcagacacatgcagaatgaaaaatttttcagaaatgatttttctggtgaggttgacttcagagacattgacttaacggatgaaatcctgacgtatgtccaagattctttaagtaagtctcccttcataccttcagattatcaacagcaacagtccttggctctgaactcaagctgtatggtacaggaacacctacatctagaacagcaacagcaacatcaccaaaagcaagtagtagtggagccacagcaacagctgtgtcagaagatgaagcacatgcaagttaatggcatgtttgaaaattggaactctaaccaattcgtgcctttcaattgtccacagcaagacccacaacaatataatgtctttacagacttacatgggatcagtcaagagttcccctacaaatctgaaatggattctatgccttatacacagaactttatttcctgtaatcagcctgtattaccacaacattccaaatgtacagagctggactaccctatggggagttttgaaccatccccataccccactacttctagtttagaagattttgtcacttgtttacaacttcctgaaaaccaaaagcatggattaaatccacagtcagccataataactcctcagacatgttatgctggggccgtgtcgatgtatcagtgccagccagaacctcagcacacccacgtgggtcagatgcagtacaatccagtactgccaggccaacaggcatttttaaacaagtttcagaatggagttttaaatgaaacatatccagctgaattaaataacataaataacactcagactaccacacatcttcagccacttcatcatccgtcagaagccagaccttttcctgatttgacatccagtggattcctgtaattccaagcccaattttgaccctggtttttggattaaattagtttgtgaaggattatggaaaaataaaactgtcactgttggacgtcagcaagttcacatggaggcattgatgcatgctattcacaattattccaaaccaaattttaatttttgcttttagaaaagggagtttaaaaatggtatcaaaattacatatactacagtcaagatagaaagggtgctgccacggagtggtgaggtaccgtctacatttcacattattctgggcaccacaaaatatacaaaactttatcagggaaactaagattcttttaaattagaaaatattctctatttgaattatttctgtcacagtaaaaataaaatactttgagttttgagctactggattcttattagttccccaaatacaaagttagagaactaaactagtttttcctatcatgttaacctctgcttttatctcagatgttaaaataaatggtttggtgctttttataaaaagataatctcagtgctttcctccttcactgtttcatctaagtgcctcacatttttttctacctataacactctaggatgtatattttatataaagtattctttttcttttttaaattaatatctttctgcacacaaatattatttgtgtttcctaaatccaaccattttcattaattcaggcatattttaactccactgcttacctactttcttcaggtaaagggcaaataatgatcgaaaaaataattatttattacataatttagttgtttctagactataaatgttgctatgtgccttatgttgaaaaaatttaaaagtaaaatgtctttccaaattatttcttaattattataaaaatattaagacaatagcacttaaattcctcaacagtgttttcagaagaaataaatataccactctttacctttattgatatctccatgatgatagttgaatgttgcaatgtgaaaaatctgctgttaactgcaaccttgtttattaaattgcaagaagctttatttctagctttttaattaagcaaagcacccatttcaatgtgtataaattgtctttaaaaactgttttagacctataatccttgataatatattgtgttgactttataaatttcgcttcttagaacagtggaaactatgtgtttttctcatatttgaggagtgttaagattgcagatagcaaggtttggtgcaaagtattgtaatgagtgaattgaatggtgcattgtatagatataatgaacaaaattatttgtaagatatttgcagtttttcattttaaaaagtccataccttatatatgcacttaatttgttggggctttacatactttatcaatgtgtctttctaagaaatcaagtaatgaatccaactgcttaaagttggtattaataaaaagacaaccacatagttcgtttaccttcaaactttaggtttttttaatgatatactgatcttcattaccaataggcaaattaatcaccctaccaactttactgtcctaacatggtttaaaagaaaaaatgacaccatcttttattcttttttttttttttttttgagagagagtcttactctgccgcccaaactggagtgcagtggcacaatcttggctcactgcaacctctacctcctgggttcaagtgattctcttgcctcagcctcccgagttgctgggattacgggcatggtggcgtgagcctgtagtcctagctactcgggaggctgaggcaggagaatagcctgaacctgggaatcggaggttgcagggccaagatcgccccactgcactccagcctggcaatagaccgagactccgtctccaaaaaaaaaaaaaatacaatttttatttcttttactttttttagtaagttaatgtatataaaaatggcttcggacaaaatatctctgagttctgtgtattttcagtcaaaactttaaacctgtagaatcaatttaagtgttggaaaaaatttgtctgaaacatttcataatttgtttccagcatgaggtatctaaggatttagaccagaggtctagattaatactctatttttacatttaaaccttttattataagtcttacataaaccatttttgttactctcttccacatgttactggataaattgtttagtggaaaataggctttttaatcatgaatatgatgacaatcagttatacagttataaaattaaaagtttgaaaagcaatattgtatatttttatctatataaaataactaaaatgtatctaagaataataaaatcacgttaaaccaaatacacgtttgtctgtattgttaagtgccaaacaaaggatacttagtgcactgctacattgtgggatttatttctagatgatgtgcacatctaaggatatggatgtgtctaattttagtcttttcctgtaccaggtttttcttacaatacctgaagacttaccagtattctagtgtattatgaagctttcaacattactatgcacaaactagtgtttttcgatgttactaaattttaggtaaatgctttcatggcttttttcttcaaaatgttactgcttacatatatcatgcatagatttttgcttaaagtatgatttataatatcctcattatcaaagttgtatacaataatatataataaaataacaaatatgaa

SEQ ID NO: 372922 - DNA, 4758 bp, Homo sapiens
attcagccggtgcgcgcggcggcgggaggcagtggctggggagtcccgtcgacgctctgttccgagagcgtgccccggaccgccagctcagaacaggggcagccgtgtagccgaacggaagctgggagcagccgggactggtggcccgcgcccgagctccgcaggcgggaagcaccctggatttaggaagtcccgggagcagcgcggcggcacctccctcacccaaggggccgcggcgacggtcacggggcgcggcgccaccgtgagcgacccaggccaggattctaaatagacggcccaggctcctcctccgcccgggccgcctcacctgcgggcattgccgcgccgcctccgccggtgtagacggcacctgcgccgccttgctcgcgggtctccgcccctcgcccaccctcactgcgccaggcccaggcagctcacctgtactggcgcgggctgcggaagcctgcgtgagccgaggcgttgaggcgcggcgcccacgccactgtcccgagaggacgcaggtggagcgggcgcggcttcgcggaacccggcgccggccgccgcagtggtcccagcctacaccgggttccggggacccggccgccagtgcccggggagtagccgccgccgtcggctgggcaccatgaacagcagcagcgccaacatcacctacgccagtcgcaagcggcggaagccggtgcagaaaacagtaaagccaatcccagctgaaggaatcaagtcaaatccttccaagcggcatagagaccgacttaatacagagttggaccgtttggctagcctgctgcctttcccacaagatgttattaataagttggacaaactttcagttcttaggctcagcgtcagttacctgagagccaagagcttctttgatgttgcattaaaatcctcccctactgaaagaaacggaggccaggataactgtagagcagcaaatttcagagaaggcctgaacttacaagaaggagaattcttattacaggctctgaatggctttgtattagttgtcactacagatgctttggtcttttatgcttcttctactatacaagattatctagggtttcagcagtctgatgtcatacatcagagtgtatatgaacttatccataccgaagaccgagctgaatttcagcgtcagctacactgggcattaaatccttctcagtgtacagagtctggacaaggaattgaagaagccactggtctcccccagacagtagtctgttataacccagaccagattcctccagaaaactctcctttaatggagaggtgcttcatatgtcgtctaaggtgtctgctggataattcatctggttttctggcaatgaatttccaagggaagttaaagtatcttcatggacagaaaaagaaagggaaagatggatcaatacttccacctcagttggctttgtttgcgatagctactccacttcagccaccatccatacttgaaatccggaccaaaaattttatctttagaaccaaacacaaactagacttcacacctattggttgtgatgccaaaggaagaattgttttaggatatactgaagcagagctgtgcacgagaggctcaggttatcagtttattcatgcagctgatatgctttattgtgccgagtcccatatccgaatgattaagactggagaaagtggcatgatagttttccggcttcttacaaaaaacaaccgatggacttgggtccagtctaatgcacgcctgctttataaaaatggaagaccagattatatcattgtaactcagagaccactaacagatgaggaaggaacagagcatttacgaaaacgaaatacgaagttgccttttatgtttaccactggagaagctgtgttgtatgaggcaaccaacccttttcctgccataatggatcccttaccactaaggactaaaaatggcactagtggaaaagactctgctaccacatccactctaagcaaggactctctcaatcctagttccctcctggctgccatgatgcaacaagatgagtctatttatctctatcctgcttcaagtacttcaagtactgcaccttttgaaaacaactttttcaacgaatctatgaatgaatgcagaaattggcaagataatactgcaccgatgggaaatgatactatcctgaaacatgagcaaattgaccagcctcaggatgtgaactcatttgctggaggtcacccagggctctttcaagatagtaaaaacagtgacttgtacagcataatgaaaaacctaggcattgattttgaagacatcagacacatgcagaatgaaaaatttttcagaaatgatttttctggtgaggttgacttcagagacattgacttaacggatgaaatcctgacgtatgtccaagattctttaagtaagtctcccttcataccttcagattatcaacagcaacagtccttggctctgaactcaagctgtatggtacaggaacacctacatctagaacagcaacagcaacatcaccaaaagcaagtagtagtggagccacagcaacagctgtgtcagaagatgaagcacatgcaagttaatggcatgtttgaaaattggaactctaaccaattcgtgcctttcaattgtccacagcaagacccacaacaatataatgtctttacagacttacatgggatcagtcaagagttcccctacaaatctgaaatggattctatgccttatacacagaactttatttcctgtaatcagcctgtattaccacaacattccaaatgtacagagctggactaccctatggggagttttgaaccatccccataccccactacttctagtttagaagattttgtcacttgtttacaacttcctgaaaaccaaaagcatggattaaatccacagtcagccataataactcctcagacatgttatgctggggccgtgtcgatgtatcagtgccagccagaacctcagcacacccacgtgggtcagatgcagtacaatccagtactgccaggccaacaggcatttttaaacaagtttcagaatggagttttaaatgaaacatatccagctgaattaaataacataaataacactcagactaccacacatcttcagccacttcatcatccgtcagaagccagaccttttcctgatttgacatccagtggattcctgtaattccaagcccaattttgaccctggtttttggattaaattagtttgtgaaggattatggaaaaataaaactgtcactgttggacgtcagcaagttcacatggaggcattgatgcatgctattcacaattattccaaaccaaattttaatttttgcttttagaaaagggagtttaaaaatggtatcaaaattacatatactacagtcaagatagaaagggtgctgccacggagtggtgaggtaccgtctacatttcacattattctgggcaccacaaaatatacaaaactttatcagggaaactaagattcttttaaattagaaaatattctctatttgaattatttctgtcacagtaaaaataaaatactttgagttttgagctactggattcttattagttccccaaatacaaagttagagaactaaactagtttttcctatcatgttaacctctgcttttatctcagatgttaaaataaatggtttggtgctttttataaaaagataatctcagtgctttcctccttcactgtttcatctaagtgcctcacatttttttctacctataacactctaggatgtatattttatataaagtattctttttcttttttaaattaatatctttctgcacacaaatattatttgtgtttcctaaatccaaccattttcattaattcaggcatattttaactccatccagcctggcaatagaccgagactccgtctccaaaaaaaaaaaaaatacaatttttatttcttttactttttttagtaagttaatgtatataaaaatggcttcggacaaaatatctctgagttctgtgtattttcagtcaaaactttaaacctgtagaatcaatttaagtgttggaaaaaatttgtctgaaacatttcataatttgtttccagcatgaggtatctaaggatttagaccagaggtctagattaatactctatttttacatttaaaccttttattataagtcttacataaaccatttttgttactctcttccacatgttactggataaattgtttagtggaaaataggctttttaatcatgaatatgatgacaatcagttatacagttataaaattaaaagtttgaaaagcaatattgtatatttttatctatataaaataactaaaatgtatctaagaataataaaatcacgttaaaccaaatacacgtttgtctgtattgttaagtgccaaacaaaggatacttagtgcactgctacattgtgggatttatttctagatgatgtgcacatctaaggatatggatgtgtctaattttagtcttttcctgtaccaggtttttcttacaatacctgaagacttaccagtattctagtgtattatgaagctttcaacattactatgcacaaactagtgtttttcgatgttactaaattttaggtaaatgctttcatggcttttttcttcaaaatgttactgcttacatatatcatgcatagatttttgcttaaagtatgatttataatatcctcattatcaaagttgtatacaataatatataataaaataacaaatatgaa

SEQ ID NO: 372923 - DNA, 2647 bp, Homo sapiens
attcagccggtgcgcgcggcggcgggaggcagtggctggggagtcccgtcgacgctctgttccgagagcgtgccccggaccgccagctcagaacaggggcagccgtgtagccgaacggaagctgggagcagccgggactggtggcccgcgcccgagctccgcaggcgggaagcaccctggatttaggaagtcccgggagcagcgcggcggcacctccctcacccaaggggccgcggcgacggtcacggggcgcggcgccaccgtgagcgacccaggccaggattctaaatagacggcccaggctcctcctccgcccgggccgcctcacctgcgggcattgccgcgccgcctccgccggtgtagacggcacctgcgccgccttgctcgcgggtctccgcccctcgcccaccctcactgcgccaggcccaggcagctcacctgtactggcgcgggctgcggaagcctgcgtgagccgaggcgttgaggcgcggcgcccacgccactgtcccgagaggacgcaggtggagcgggcgcggcttcgcggaacccggcgccggccgccgcagtggtcccagcctacaccgggttccggggacccggccgccagtgcccggggagtagccgccgccgtcggctgggcaccatgaacagcagcagcgccaacatcacctacgccagtcgcaagcggcggaagccggtgcagaaaacagtaaagccaatcccagctgaaggaatcaagtcaaatccttccaagcggcatagagaccgacttaatacagagttggaccgtttggctagcctgctgcctttcccacaagatgttattaataagttggacaaactttcagttcttaggctcagcgtcagttacctgagagccaagagcttctttgatgttgcattaaaatcctcccctactgaaagaaacggaggccaggataactgtagagcagcaaatttcagagaaggcctgaacttacaagaaggagaattcttattacaggctctgaatggctttgtattagttgtcactacagatgctttggtcttttatgcttcttctactatacaagattatctagggtttcagcagtctgatgtcatacatcagagtgtatatgaacttatccataccgaagaccgagctgaatttcagcgtcagctacactgggcattaaatccttctcagtgtacagagtctggacaaggaattgaagaagccactggtctcccccagacagtagtctgttataacccagaccagattcctccagaaaactctcctttaatggagaggtgcttcatatgtcgtctaaggtgtctgctggataattcatctggttttctggcaatgaatttccaagggaagttaaagtatcttcatggacagaaaaagaaagggaaagatggatcaatacttccacctcagttggctttgtttgcgatagctactccacttcagccaccatccatacttgaaatccggaccaaaaattttatctttagaaccaaacacaaactagacttcacacctattggttgtgatgccaaaggaagaattgttttaggatatactgaagcagagctgtgcacgagaggctcaggttatcagtttattcatgcagctgatatgctttattgtgccgagtcccatatccgaatgattaagactggagaaagtggcatgatagttttccggcttcttacaaaaaacaaccgatggacttgggtccagtctaatgcacgcctgctttataaaaatggaagaccagattatatcattgtaactcagagaccactaacagatgaggaaggaacagagcatttacgaaaacgaaatacgaagttgccttttatgtttaccactggagaagctgtgttgtatgaggcaaccaacccttttcctgccataatggatcccttaccactaaggactaaaaatggcactagtggaaaagactctgctaccacatccactctaagcaaggactctctcaatcctagttccctcctggctgccatgatgcaacaagatgagtctatttatctctatcctgcttcaagtacttcaagtactgcaccttttgaaaacaactttttcaacgaatctatgaatgaatgcagaaattggcaagataatactgcaccgatgggaaatgatactatcctgaaacatgagcaaattgaccagcctcaggatgtgaactcatttgctggaggtcacccagggctctttcaagatagtaaaaacagtgacttgtacagcataatgaaaaacctaggcattgattttgaagacatcagacacatgcagaaagcaaagatcatgagtaaggatttcgtgtgctggtactcgagtcaagagacagcgacctaacgactgttattgtgaaggaagtacgtgactgttttagttagtagccctgggagccttcagtttgatcttcttgctgacagttcgtaggtggtgaaattcatatatggggtactggaacactgtgggtgtagaacaatatcattcacagagtcagaggcgaagagacatggaccctgagcatcagcctgtgttcatgcaagatgagagcagaggctgggagatggaagaagtcgtggggtagcagatggagtaattgtgcacgaggcccag

SEQ ID NO: 372924 - DNA, 6289 bp, Homo sapiens
attcagccggtgcgcgcggcggcgggaggcagtggctggggagtcccgtcgacgctctgttccgagagcgtgccccggaccgccagctcagaacaggggcagccgtgtagccgaacggaagctgggagcagccgggactggtggcccgcgcccgagctccgcaggcgggaagcaccctggatttaggaagtcccgggagcagcgcggcggcacctccctcacccaaggggccgcggcgacggtcacggggcgcggcgccaccgtgagcgacccaggccaggattctaaatagacggcccaggctcctcctccgcccgggccgcctcacctgcgggcattgccgcgccgcctccgccggtgtagacggcacctgcgccgccttgctcgcgggtctccgcccctcgcccaccctcactgcgccaggcccaggcagctcacctgtactggcgcgggctgcggaagcctgcgtgagccgaggcgttgaggcgcggcgcccacgccactgtcccgagaggacgcaggtggagcgggcgcggcttcgcggaacccggcgccggccgccgcagtggtcccagcctacaccgggttccggggacccggccgccagtgcccggggagtagccgccgccgtcggctgggcaccatgaacagcagcagcgccaacatcacctacgccagtcgcaagcggcggaagccggtgcagaaaacagtaaagccaatcccagctgaaggaatcaagtcaaatccttccaagcggcatagagaccgacttaatacagagttggaccgtttggctagcctgctgcctttcccacaagatgttattaataagttggacaaactttcagttcttaggctcagcgtcagttacctgagagccaagagcttctttgatgttgcattaaaatcctcccctactgaaagaaacggaggccaggataactgtagagcagcaaatttcagagaaggcctgaacttacaagaaggagaattcttattacaggctctgaatggctttgtattagttgtcactacagatgctttggtcttttatgcttcttctactatacaagattatctagggtttcagcagtctgatgtcatacatcagagtgtatatgaacttatccataccgaagaccgagctgaatttcagcgtcagctacactgggcattaaatccttctcagtgtacagagtctggacaaggaattgaagaagccactggtctcccccagacagtagtctgttataacccagaccagattcctccagaaaactctcctttaatggagaggtgcttcatatgtcgtctaaggtgtctgctggataattcatctggttttctggcaatgaatttccaagggaagttaaagtatcttcatggacagaaaaagaaagggaaagatggatcaatacttccacctcagttggctttgtttgcgatagctactccacttcagccaccatccatacttgaaatccggaccaaaaattttatctttagaaccaaacacaaactagacttcacacctattggttgtgatgccaaaggaagaattgttttaggatatactgaagcagagctgtgcacgagaggctcaggttatcagtttattcatgcagctgatatgctttattgtgccgagtcccatatccgaatgattaagactggagaaagtggcatgatagttttccggcttcttacaaaaaacaaccgatggacttgggtccagtctaatgcacgcctgctttataaaaatggaagaccagattatatcattgtaactcagagaccactaacagatgaggaaggaacagagcatttacgaaaacgaaatacgaagttgccttttatgtttaccactggagaagctgtgttgtatgaggcaaccaacccttttcctgccataatggatcccttaccactaaggactaaaaatggcactagtggaaaagactctgctaccacatccactctaagcaaggactctctcaatcctagttccctcctggctgccatgatgcaacaagatgagtctatttatctctatcctgcttcaagtacttcaagtactgcaccttttgaaaacaactttttcaacgaatctatgaatgaatgcagaaattggcaagataatactgcaccgatgggaaatgatactatcctgaaacatgagcaaattgaccagcctcaggatgtgaactcatttgctggaggtcacccagggctctttcaagatagtaaaaacagtgacttgtacagcataatgaaaaacctaggcattgattttgaagacatcagacacatgcagaatgaaaaatttttcagaaatgatttttctggtgaggttgacttcagagacattgacttaacggatgaaatcctgacgtatgtccaagattctttaagtaagtctcccttcataccttcagattatcaacagcaacagtccttggctctgaactcaagctgtatggtacaggaacacctacatctagaacagcaacagcaacatcaccaaaagcaagtagtagtggagccacagcaacagctgtgtcagaagatgaagcacatgcaagttaatggcatgtttgaaaattggaactctaaccaattcgtgcctttcaattgtccacagcaagacccacaacaatataatgtctttacagacttacatgggatcagtcaagagttcccctacaaatctgaaatggattctatgccttatacacagaactttatttcctgtaatcagcctgtattaccacaacattccaaatgtacagagctggactaccctatggggagttttgaaccatccccataccccactacttctagtttagaagattttgtcacttgtttacaacttcctgaaaaccaaaagcatggattaaatccacagtcagccataataactcctcagacatgttatgctggggccgtgtcgatgtatcagtgccagccagaacctcagcacacccacgtgggtcagatgcagtacaatccagtactgccaggccaacaggcatttttaaacaagtttcagaatggagttttaaatgaaacatatccagctgaattaaataacataaataacactcagactaccacacatcttcagccacttcatcatccgtcagaagccagaccttttcctgatttgacatccagtggattcctgtaattccaagcccaattttgaccctggtttttggattaaattagtttgtgaaggattatggaaaaataaaactgtcactgttggacgtcagcaagttcacatggaggcattgatgcatgctattcacaattattccaaaccaaattttaatttttgcttttagaaaagggagtttaaaaatggtatcaaaattacatatactacagtcaagatagaaagggtgctgccacggagtggtgaggtaccgtctacatttcacattattctgggcaccacaaaatatacaaaactttatcagggaaactaagattcttttaaattagaaaatattctctatttgaattatttctgtcacagtaaaaataaaatactttgagttttgagctactggattcttattagttccccaaatacaaagttagagaactaaactagtttttcctatcatgttaacctctgcttttatctcagatgttaaaataaatggtttggtgctttttataaaaagataatctcagtgctttcctccttcactgtttcatctaagtgcctcacatttttttctacctataacactctaggatgtatattttatataaagtattctttttcttttttaaattaatatctttctgcacacaaatattatttgtgtttcctaaatccaaccattttcattaattcaggcatattttaactccactgcttacctactttcttcaggtaaagggcaaataatgatcgaaaaaataattatttattacataatttagttgtttctagactataaatgttgctatgtgccttatgttgaaaaaatttaaaagtaaaatgtctttccaaattatttcttaattattataaaaatattaagacaatagcacttaaattcctcaacagtgttttcagaagaaataaatataccactctttacctttattgatatctccatgatgatagttgaatgttgcaatgtgaaaaatctgctgttaactgcaaccttgtttattaaattgcaagaagctttatttctagctttttaattaagcaaagcacccatttcaatgtgtataaattgtctttaaaaactgttttagacctataatccttgataatatattgtgttgactttataaatttcgcttcttagaacagtggaaactatgtgtttttctcatatttgaggagtgttaagattgcagatagcaaggtttggtgcaaagtattgtaatgagtgaattgaatggtgcattgtatagatataatgaacaaaattatttgtaagatatttgcagtttttcattttaaaaagtccataccttatatatgcacttaatttgttggggctttacatactttatcaatgtgtctttctaagaaatcaagtaatgaatccaactgcttaaagttggtattaataaaaagacaaccacatagttcgtttaccttcaaactttaggtttttttaatgatatactgatcttcattaccaataggcaaattaatcaccctaccaactttactgtcctaacatggtttaaaagaaaaaatgacaccatcttttattcttttttttttttttttttgagagagagtcttactctgccgcccaaactggagtgcagtggcacaatcttggctcactgcaacctctacctcctgggttcaagtgattctcttgcctcagcctcccgagttgctgggattacgggcatggtggcgtgagcctgtagtcctagctactcgggaggctgaggcaggagaatagcctgaacctgggaatcggaggttgcagggccaagatcgccccactgcactccagcctggcaatagaccgagactccgtctccaaaaaaaaaaaaaatacaatttttatttcttttactttttttagtaagttaatgtatataaaaatggcttcggacaaaatatctctgagttctgtgtattttcagtcaaaactttaaacctgtagaatcaatttaagtgttggaaaaaatttgtctgaaacatttcataatttgtttccagcatgaggtatctaaggatttagaccagaggtctagattaatactctatttttacatttaaaccttttattataagtcttacataaaccatttttgttactctcttccacatgttactggataaattgtttagtggaaaataggctttttaatcatgaatatgatgacaatcagttatacagttataaaattaaaagtttgaaaagcaatattgtatatttttatctatataaaataactaaaatgtatctaagaataataaaatcacgttaaaccaaatacacgtttgtctgtattgttaagtgccaaacaaaggatacttagtgcactgctacattgtgggatttatttctagatgatgtgcacatctaaggatatggatgtgtctaattttagtcttttcctgtaccaggtttttcttacaatacctgaagacttaccagtattctagtgtattatgaagctttcaacattactatgcacaaactagtgtttttcgatgttactaaattttaggtaaatgctttcatggcttttttcttcaaaatgttactgcttacatatatcatgcatagatttttgcttaaagtatgatttataatatcctcattatcaaagttgtatacaataatatataataaaataacaaatatgaaaaaaaaaaaaaaaaaaacaaaaaaaaaaaaaaaaaaaaaaaaaaaaaaaaaaaaaaaacaaaaaaaacgaaacaaaacaaaaaaaaacaaaacaaaaaacagtgagcgggcacgcgccggcaccgagaaaaaaagaaacagcacacacaactttggggggccgcgggccaccacacagagagcacatcaacgggtgcgcacaagcggtccaacaaacaaaaaaccgcgggagacaaaaaaaagaggagagagagaccccacccacaacagaaaaaaaggaaaccgcgggggaacaaaaagaaacaacgctatcgcgaaacaaacacccaagaaggagaggagacagaggagaagaacaaaggaggaaaatcaacaaacagagagcacaacaaaaaggccacaaacagaaaaaagcg

SEQ ID NO: 372925 - DNA, 5700 bp, Homo sapiens
attcagccggtgcgcgcggcggcgggaggcagtggctggggagtcccgtcgacgctctgttccgagagcgtgccccggaccgccagctcagaacaggggcagccgtgtagccgaacggaagctgggagcagccgggactggtggcccgcgcccgagctccgcaggcgggaagcaccctggatttaggaagtcccgggagcagcgcggcggcacctccctcacccaaggggccgcggcgacggtcacggggcgcggcgccaccgtgagcgacccaggccaggattctaaatagacggcccaggctcctcctccgcccgggccgcctcacctgcgggcattgccgcgccgcctccgccggtgtagacggcacctgcgccgccttgctcgcgggtctccgcccctcgcccaccctcactgcgccaggcccaggcagctcacctgtactggcgcgggctgcggaagcctgcgtgagccgaggcgttgaggcgcggcgcccacgccactgtcccgagaggacgcaggtggagcgggcgcggcttcgcggaacccggcgccggccgccgcagtggtcccagcctacaccgggttccggggacccggccgccagtgcccggggagtagccgccgccgtcggctgggcaccatgaacagcagcagcgccaacatcacctacgccagtcgcaagcggcggaagccggtgcagaaaacagtaaagccaatcccagctgaaggaatcaagtcaaatccttccaagcggcatagagaccgacttaatacagagttggaccgtttggctagcctgctgcctttcccacaagatgttattaataagttggacaaactttcagttcttaggctcagcgtcagttacctgagagccaagagcttctttgatgttgcattaaaatcctcccctactgaaagaaacggaggccaggataactgtagagcagcaaatttcagagaaggcctgaacttacaagaaggagaattcttattacaggctctgaatggctttgtattagttgtcactacagatgctttggtcttttatgcttcttctactatacaagattatctagggtttcagcagtctgatgtcatacatcagagtgtatatgaacttatccataccgaagaccgagctgaatttcagcgtcagctacactgggcattaaatccttctcagtgtacagagtctggacaaggaattgaagaagccactggtctcccccagacagtagtctgttataacccagaccagattcctccagaaaactctcctttaatggagaggtgcttcatatgtcgtctaaggtgtctgctggataattcatctggttttctggcaatgaatttccaagggaagttaaagtatcttcatggacagaaaaagaaagggaaagatggatcaatacttccacctcagttggctttgtttgcgatagctactccacttcagccaccatccatacttgaaatccggaccaaaaattttatctttagaaccaaacacaaactagacttcacacctattggttgtgatgccaaaggaagaattgttttaggatatactgaagcagagctgtgcacgagaggctcaggttatcagtttattcatgcagctgatatgctttattgtgccgagtcccatatccgaatgattaagactggagaaagtggcatgatagttttccggcttcttacaaaaaacaaccgatggacttgggtccagtctaatgcacgcctgctttataaaaatggaagaccagattatatcattgtaactcagagaccactaacagatgaggaaggaacagagcatttacgaaaacgaaatacgaagttgccttttatgtttaccactggagaagctgtgttgtatgaggcaaccaacccttttcctgccataatggatcccttaccactaaggactaaaaatggcactagtggaaaagactctgctaccacatccactctaagcaaggactctctcaatcctagttccctcctggctgccatgatgcaacaagatgagtctatttatctctatcctgcttcaagtacttcaagtactgcaccttttgaaaacaactttttcaacgaatctatgaatgaatgcagaaattggcaagataatactgcaccgatgggaaatgatactatcctgaaacatgagcaaattgaccagcctcaggatgtgaactcatttgctggaggtcacccagggctctttcaagatagtaaaaacagtgacttgtacagcataatgaaaaacctaggcattgattttgaagacatcagacacatgcagaatgaaaaatttttcagaaatgatttttctggtgaggttgacttcagagacattgacttaacggatgaaatcctgacgtatgtccaagattctttaagtaagtctcccttcataccttcagattatcaacagcaacagtccttggctctgaactcaagctgtatggtacaggaacacctacatctagaacagcaacagcaacatcaccaaaagcaagtagtagtggagccacagcaacagctgtgtcagaagatgaagcacatgcaagttaatggcatgtttgaaaattggaactctaaccaattcgtgcctttcaattgtccacagcaagacccacaacaatataatgtctttacagacttacatgggatcagtcaagagttcccctacaaatctgaaatggattctatgccttatacacagaactttatttcctgtaatcagcctgtattaccacaacattccaaatgtacagagctggactaccctatggggagttttgaaccatccccataccccactacttctagtttagaagattttgtcacttgtttacaacttcctgaaaaccaaaagcatggattaaatccacagtcagccataataactcctcagacatgttatgctggggccgtgtcgatgtatcagtgccagccagaacctcagcacacccacgtgggtcagatgcagtacaatccagtactgccaggccaacaggcatttttaaacaagtttcagaatggagttttaaatgaaacatatccagctgaattaaataacataaataacactcagactaccacacatcttcagccacttcatcatccgtcagaagccagaccttttcctgatttgacatccagtggattcctgtaattccaagcccaattttgaccctggtttttggattaaattagtttgtgaaggattatggaaaaataaaactgtcactgttggacgtcagcaagttcacatggaggcattgatgcatgctattcacaattattccaaaccaaattttaatttttgcttttagaaaagggagtttaaaaatggtatcaaaattacatatactacagtcaagatagaaagggtgctgccacggagtggtgaggtaccgtctacatttcacattattctgggcaccacaaaatatacaaaactttatcagggaaactaagattcttttaaattagaaaatattctctatttgaattatttctgtcacagtaaaaataaaatactttgagttttgagctactggattcttattagttccccaaatacaaagttagagaactaaactagtttttcctatcatgttaacctctgcttttatctcagatgttaaaataaatggtttggtgctttttataaaaagataatctcagtgctttcctccttcactgtttcatctaagtgcctcacatttttttctacctataacactctaggatgtatattttatataaagtattctttttcttttttaaattaatatctttctgcacacaaatattatttgtgtttcctaaatccaaccattttcattaattcaggcatattttaactccactgcttacctactttcttcaggtaaagggcaaataatgatcgaaaaaataattatttattacataatttagttgtttctagactataaatgttgctatgtgccttatgttgaaaaaatttaaaagtaaaatgtctttccaaattatttcttaattattataaaaatattaagacaatagcacttaaattcctcaacagtgttttcagaagaaataaatataccactctttacctttattgatatctccatgatgatagttgaatgttgcaatgtgaaaaatctgctgttaactgcaaccttgtttattaaattgcaagaagctttatttctagctttttaattaagcaaagcacccatttcaatgtgtataaattgtctttaaaaactgttttagacctataatccttgataatatattgtgttgactttataaatttcgcttcttagaacagtggaaactatgtgtttttctcatatttgaggagtgttaagattgcagatagcaaggtttggtgcaaagtattgtaatgagtgaattgaatggtgcattgtatagatataatgaacaaaattatttgtaagatatttgcagtttttcattttaaaaagtccataccttatatatgcacttaatttgttggggctttacatactttatcaatgtgtctttctaagaaatcaagtaatgaatccaactgcttaaagttggtattaataaaaagacaaccacatagttcgtttaccttcaaactttaggtttttttaatgatatactgatcttcattaccaataggcaaattaatcaccctaccaactttactgtcctaacatgcgggcatggtggcgtgagcctgtagtcctagctactcgggaggctgaggcaggagaatagcctgaacctgggaatcggaggttgcagggccaagatcgccccactgcactccagcctggcaatagaccgagactccgtctccaaaaaaaaaaaaaatacaatttttatttcttttactttttttagtaagttaatgtatataaaaatggcttcggacaaaatatctctgagttctgtgtattttcagtcaaaactttaaacctgtagaatcaatttaagtgttggaaaaaatttgtctgaaacatttcataatttgtttccagcatgaggtatctaaggatttagaccagaggtctagattaatactctatttttacatttaaaccttttattataagtcttacataaaccatttttgttactctcttccacatgttactggataaattgtttagtggaaaataggctttttaatcatgaatatgatgacaatcagttatacagttataaaattaaaagtttgaaaagcaatattgtatatttttatctatataaaataactaaaatgtatctaagaataataaaatcacgttaaaccaaatacacgtttgtctgtattgttaagtgccaaacaaaggatacttagtgcactgctacattgtgggatttatttctagatgatgtgcacatctaaggatatggatgtgtctaattttagtcttttcctgtaccaggtttttcttacaatacctgaagacttaccagtattctagtgtattatgaagctttcaacattactatgcacaaactagtgtttttcgatgttactaaattttaggtaaatgctttcatggcttttttcttcaaaatgttactgcttacatatatcatgcatagatttttgcttaaagtatgatttataatatcctcattatcaaagttgtatacaataatatataataaaataacaaatatgaa

SEQ ID NO: 372926 - DNA, 4874 bp, Homo sapiens
caagcacccactaatctaaataggctttaaaattaatttagccatattttttaatcagtccttttgttgtattccttgtatcttttttctttagtctgatgtcatacatcagagtgtatatgaacttatccataccgaagaccgagctgaatttcagcgtcagctacactgggcattaaatccttctcagtgtacagagtctggacaaggaattgaagaagccactggtctcccccagacagtagtctgttataacccagaccagattcctccagaaaactctcctttaatggagaggtgcttcatatgtcgtctaaggtgtctgctggataattcatctggttttctggcaatgaatttccaagggaagttaaagtatcttcatggacagaaaaagaaagggaaagatggatcaatacttccacctcagttggctttgtttgcgatagctactccacttcagccaccatccatacttgaaatccggaccaaaaattttatctttagaaccaaacacaaactagacttcacacctattggttgtgatgccaaaggaagaattgttttaggatatactgaagcagagctgtgcacgagaggctcaggttatcagtttattcatgcagctgatatgctttattgtgccgagtcccatatccgaatgattaagactggagaaagtggcatgatagttttccggcttcttacaaaaaacaaccgatggacttgggtccagtctaatgcacgcctgctttataaaaatggaagaccagattatatcattgtaactcagagaccactaacagatgaggaaggaacagagcatttacgaaaacgaaatacgaagttgccttttatgtttaccactggagaagctgtgttgtatgaggcaaccaacccttttcctgccataatggatcccttaccactaaggactaaaaatggcactagtggaaaagactctgctaccacatccactctaagcaaggactctctcaatcctagttccctcctggctgccatgatgcaacaagatgagtctatttatctctatcctgcttcaagtacttcaagtactgcaccttttgaaaacaactttttcaacgaatctatgaatgaatgcagaaattggcaagataatactgcaccgatgggaaatgatactatcctgaaacatgagcaaattgaccagcctcaggatgtgaactcatttgctggaggtcacccagggctctttcaagatagtaaaaacagtgacttgtacagcataatgaaaaacctaggcattgattttgaagacatcagacacatgcagaatgaaaaatttttcagaaatgatttttctggtgaggttgacttcagagacattgacttaacggatgaaatcctgacgtatgtccaagattctttaagtaagtctcccttcataccttcagattatcaacagcaacagtccttggctctgaactcaagctgtatggtacaggaacacctacatctagaacagcaacagcaacatcaccaaaagcaagtagtagtggagccacagcaacagctgtgtcagaagatgaagcacatgcaagttaatggcatgtttgaaaattggaactctaaccaattcgtgcctttcaattgtccacagcaagacccacaacaatataatgtctttacagacttacatgggatcagtcaagagttcccctacaaatctgaaatggattctatgccttatacacagaactttatttcctgtaatcagcctgtattaccacaacattccaaatgtacagagctggactaccctatggggagttttgaaccatccccataccccactacttctagtttagaagattttgtcacttgtttacaacttcctgaaaaccaaaagcatggattaaatccacagtcagccataataactcctcagacatgttatgctggggccgtgtcgatgtatcagtgccagccagaacctcagcacacccacgtgggtcagatgcagtacaatccagtactgccaggccaacaggcatttttaaacaagtttcagaatggagttttaaatgaaacatatccagctgaattaaataacataaataacactcagactaccacacatcttcagccacttcatcatccgtcagaagccagaccttttcctgatttgacatccagtggattcctgtaattccaagcccaattttgaccctggtttttggattaaattagtttgtgaaggattatggaaaaataaaactgtcactgttggacgtcagcaagttcacatggaggcattgatgcatgctattcacaattattccaaaccaaattttaatttttgcttttagaaaagggagtttaaaaatggtatcaaaattacatatactacagtcaagatagaaagggtgctgccacggagtggtgaggtaccgtctacatttcacattattctgggcaccacaaaatatacaaaactttatcagggaaactaagattcttttaaattagaaaatattctctatttgaattatttctgtcacagtaaaaataaaatactttgagttttgagctactggattcttattagttccccaaatacaaagttagagaactaaactagtttttcctatcatgttaacctctgcttttatctcagatgttaaaataaatggtttggtgctttttataaaaagataatctcagtgctttcctccttcactgtttcatctaagtgcctcacatttttttctacctataacactctaggatgtatattttatataaagtattctttttcttttttaaattaatatctttctgcacacaaatattatttgtgtttcctaaatccaaccattttcattaattcaggcatattttaactccactgcttacctactttcttcaggtaaagggcaaataatgatcgaaaaaataattatttattacataatttagttgtttctagactataaatgttgctatgtgccttatgttgaaaaaatttaaaagtaaaatgtctttccaaattatttcttaattattataaaaatattaagacaatagcacttaaattcctcaacagtgttttcagaagaaataaatataccactctttacctttattgatatctccatgatgatagttgaatgttgcaatgtgaaaaatctgctgttaactgcaaccttgtttattaaattgcaagaagctttatttctagctttttaattaagcaaagcacccatttcaatgtgtataaattgtctttaaaaactgttttagacctataatccttgataatatattgtgttgactttataaatttcgcttcttagaacagtggaaactatgtgtttttctcatatttgaggagtgttaagattgcagatagcaaggtttggtgcaaagtattgtaatgagtgaattgaatggtgcattgtatagatataatgaacaaaattatttgtaagatatttgcagtttttcattttaaaaagtccataccttatatatgcacttaatttgttggggctttacatactttatcaatgtgtctttctaagaaatcaagtaatgaatccaactgcttaaagttggtattaataaaaagacaaccacatagttcgtttaccttcaaactttaggtttttttaatgatatactgatcttcattaccaataggcaaattaatcaccctaccaactttactgtcctaacatggtttaaaagaaaaaatgacaccatcttttattcttttttttttttttttttgagagagagtcttactctgccgcccaaactggagtgcagtggcacaatcttggctcactgcaacctctacctcctgggttcaagtgattctcttgcctcagcctcccgagttgctgggattacgggcatggtggcgtgagcctgtagtcctagctactcgggaggctgaggcaggagaatagcctgaacctgggaatcggaggttgcagggccaagatcgccccactgcactccagcctggcaatagaccgagactccgtctccaaaaaaaaaaaaaatacaatttttatttcttttactttttttagtaagttaatgtatataaaaatggcttcggacaaaatatctctgagttctgtgtattttcagtcaaaactttaaacctgtagaatcaatttaagtgttggaaaaaatttgtctgaaacatttcataatttgtttccagcatgaggtatctaaggatttagaccagaggtctagattaatactctatttttacatttaaaccttttattataagtcttacataaaccatttttgttactctcttccacatgttactggataaattgtttagtggaaaataggctttttaatcatgaatatgatgacaatcagttatacagttataaaattaaaagtttgaaaagcaatattgtatatttttatctatataaaataactaaaatgtatctaagaataataaaatcacgttaaaccaaatacacgtttgtctgtattgttaagtgccaaacaaaggatacttagtgcactgctacattgtgggatttatttctagatgatgtgcacatctaaggatatggatgtgtctaattttagtcttttcctgtaccaggtttttcttacaatacctgaagacttaccagtattctagtgtattatgaagctttcaacattactatgcacaaactagtgtttttcgatgttactaaattttaggtaaatgctttcatggcttttttcttcaaaatgttactgcttacatatatcatgcatagatttttgcttaaagtatgatttataatatcctcattatcaaagttgtatacaataatatataataaaataacaaatatgaa

SEQ ID NO: 372927 - DNA, 2287 bp, Homo sapiens
attcagccggtgcgcgcggcggcgggaggcagtggctggggagtcccgtcgacgctctgttccgagagcgtgccccggaccgccagctcagaacaggggcagccgtgtagccgaacggaagctgggagcagccgggactggtggcccgcgcccgagctccgcaggcgggaagcaccctggatttaggaagtcccgggagcagcgcggcggcacctccctcacccaaggggccgcggcgacggtcacggggcgcggcgccaccgtgagcgacccaggccaggattctaaatagacggcccaggctcctcctccgcccgggccgcctcacctgcgggcattgccgcgccgcctccgccggtgtagacggcacctgcgccgccttgctcgcgggtctccgcccctcgcccaccctcactgcgccaggcccaggcagctcacctgtactggcgcgggctgcggaagcctgcgtgagccgaggcgttgaggcgcggcgcccacgccactgtcccgagaggacgcaggtggagcgggcgcggcttcgcggaacccggcgccggccgccgcagtggtcccagcctacaccgggttccggggacccggccgccagtgcccggggagtagccgccgccgtcggctgggcaccatgaacagcagcagcgccaacatcacctacgccagtcgcaagcggcggaagccggtgcagaaaacagtaaagccaatcccagctgaaggaatcaagtcaaatccttccaagcggcatagagaccgacttaatacagagttggaccgtttggctagcctgctgcctttcccacaagatgttattaataagttggacaaactttcagttcttaggctcagcgtcagttacctgagagccaagagcttctttgatgttgcattaaaatcctcccctactgaaagaaacggaggccaggataactgtagagcagcaaatttcagagaaggcctgaacttacaagaaggagaattcttattacaggctctgaatggctttgtattagttgtcactacagatgctttggtcttttatgcttcttctactatacaagattatctagggtttcagcagtctgatgtcatacatcagagtgtatatgaacttatccataccgaagaccgagctgaatttcagcgtcagctacactgggcattaaatccttctcagtgtacagagtctggacaaggaattgaagaagccactggtctcccccagacagtagtctgttataacccagaccagattcctccagaaaactctcctttaatggagaggtgcttcatatgtcgtctaaggtgtctgctggataattcatctggttttctggcaatgaatttccaagggaagttaaagtatcttcatggacagaaaaagaaagggaaagatggatcaatacttccacctcagttggctttgtttgcgatagctactccacttcagccaccatccatacttgaaatccggaccaaaaattttatctttagaaccaaacacaaactagacttcacacctattggttgtgatgccaaaggaagaattgttttaggatatactgaagcagagctgtgcacgagaggctcaggttatcagtttattcatgcagctgatatgctttattgtgccgagtcccatatccgaatgattaagactggagaaagtggcatgatagttttccggcttcttacaaaaaacaaccgatggacttgggtccagtctaatgcacgcctgctttataaaaatggaagaccagattatatcattgtaactcagagaccactaacagatgaggaaggaacagagcatttacgaaaacgaaatacgaagttgccttttatgtttaccactggagaagctgtgttgtatgaggcaaccaacccttttcctgccataatggatcccttaccactaaggactaaaaatggcactagtggaaaagactctgctaccacatccactctaagcaaggactctctcaatcctagttccctcctggctgccatgatgcaacaagatgagtctatttatctctatcctgcttcaagtacttcaagtactgcaccttttgaaaacaactttttcaacgaatctatgaatgaatgcagaaattggcaagataatactgcaccgatgggaaatgatactatcctgaaacatgagcaaattgaccagcctcaggatgtgaactcatttgctggaggtcacccaggggtatcacctgttagcaagatcagtgactctgctgagcgtcgttttacactcaggaat

SEQ ID NO: 372928 - DNA, 490 bp, Homo sapiens
tctgcacgcctcccgcagcctcagtttccctgtccgtggtactgaggatgctcgggcctagaagttcagggctggaggcccagggaccgtcgagggaggggcatcatccccgccatggggccgccgcaactgcccagagcacaggccaaaggaagctgcaggatgaagacaacagcatcacaaggaggaagccaggatccctgtgttaccacaaggaggagagatgcctaaccaagaccgtctgcaaggattttgtgtgagccagaagcagagctgtatggtgttcagccactgagatttgagggctgtttgttacagcagttgacctatcctgactgacacatcacatcattcctttccccaccatgtgtctaacatgctaccaaattgaattttaagtaaattagtacttataaattaagtacaaatgcttttcaaattcacatgaatctttggtaaataaaactggttgtaaaattattgataaata

SEQ ID NO: 372929 - DNA, 517 bp, Homo sapiens
atgtgactccttaattaggtcacttctctctcctgggaggccctctctgccctctctaagtctaactagtggcaaaggatctaagggaagaaacctggcagagttactagtcccaagaagcctgggtccctgaatcaccacatggaagtctacgcgcccaccacctgaatggactaaggaagctgcaggatgaagacaacagcatcacaaggaggaagccaggatccctgtgttaccacaaggaggagagatgcctaaccaagaccgtctgcaaggattttgtgtgagccagaagcagagctgtatggtgttcagccactgagatttgagggctgtttgttacagcagttgacctatcctgactgacacatcacatcattcctttccccaccatgtgtctaacatgctaccaaattgaattttaagtaaattagtacttataaattaagtacaaatgcttttcaaattcacatgaatctttggtaaataaaactggttgtaaaattattgataaata

SEQ ID NO: 372930 - DNA, 613 bp, Homo sapiens
atgtgactccttaattaggtcacttctctctcctgggaggccctctctgccctctctaagtctaactagtggcaaaggatctaagggaagaaacctggcagagttactagtcccaagaagcctgggtccctgaatcaccacatggaagtctacgcgcccaccacctgaatggactaaggtatgaacagaagtaatacacacccctttagggccaaggaggtgaaacagctggtatgccttcctcacactctcctctgctttcctggtgacctaggaagctgcaggatgaagacaacagcatcacaaggaggaagccaggatccctgtgttaccacaaggaggagagatgcctaaccaagaccgtctgcaaggattttgtgtgagccagaagcagagctgtatggtgttcagccactgagatttgagggctgtttgttacagcagttgacctatcctgactgacacatcacatcattcctttccccaccatgtgtctaacatgctaccaaattgaattttaagtaaattagtacttataaattaagtacaaatgcttttcaaattcacatgaatctttggtaaataaaactggttgtaaaattattgataaata

SEQ ID NO: 372931 - DNA, 341 bp, Homo sapiens
gatttagatttaacaccagagcagcagctggtgcctcgtccattttaggacaactcattcttgtgattagctggaggttcactcttcttcagaagccagaatgtaaacggctcttccctgtgccgtcccccagaggtagcaatcaactgagaggtacagagccaccttccattcaatcagccagccctttgggttcacaaggaaatgacggttggcttttgaaaccaattcttgataagctcacccctaagaatgaaaattttcagggaacaggaaccctgtcctggggaactctgggacacatcattccccacagcattcagattaaaaataccttctat

SEQ ID NO: 372932 - DNA, 335 bp, Homo sapiens
aatttatgggtcagactactggaaacgaaggaggtacacaaagaaaggcctccagaaatctgtacaatttatgggtcagactactggaaacgaaggaggtacacaaagaaaggcctccagaaatctgtacagtcttcggctgaataaaaatttgtgcatacttagggtgaaatcccttgaggccatagaggaaagaaagatctaattaaatatgccgggcattcagtagagacctaggggccacatctcagaagcaaggctaaattagtcccagaaaaaaggctacatagatcagtggttctcaaaagggagggggagattttgcctccaagggg

SEQ ID NO: 372933 - DNA, 755 bp, Homo sapiens
tgataatgaggattgctaattaaatttttcaaaaatagggatggatctctgttaaaaatttttagtgacataggaaaatgcttaagacttaaaaaggaaagatttaaaacttacgttttatacaatcccaattttgttaagtgttttttagtctatgactgaattttgcttttatggcttttgctctcaaaaagtagcaaagctcccaagaaacggtgaggatagaaggggccgtaaaatatcaaacagagattaaatttgtgtatgcacagacctcttttgtttttttttcttcattttcatcacagttttaacagttggccttctgggctatttttatagacaaagttgaactgctgtaaaaagccattctttcccttcctgccttgtctactttcatccttactaggaactcagcaaattcagtacttaataggcaccgagggtatacaatggtgaacaaaaagctcactgttcacttagaaaagacagtcaacggtcacctaaataaatacatcattacaaattgtgctcactactctggacaaaactgcagagtgttacacagaaagaaatgaaggtggagatcagggaatcattttggacaaggaagtttgcaaagacctccataatgaggaagggacacttaaagtcagttttgaagtatgagtaggagttagtctcacaaagtgtggagggaaagcactctatgaagagggacaaggacatagaaaggttttcaagcaaaaaaaaaa

SEQ ID NO: 372934 - DNA, 3826 bp, Homo sapiens
ctcccttcttgtaagagagtgctaggcacatagcctcctcctattcctaatcctcccaccaaagaaagaggcacagagttcattacttagtgggggccagctgtgatcggccaactgccagctgccttaaaaaggaagaccagtgatgctaggatggagtgaaacccaagaggaagtgccatcatgaggaatcaatgagagatctgtgaagagagagggctgggtgggagcccagaaggatagaacctggaagatcaatatctcccgtgagggaaataacaatggagccaggttctaagtcagtgtctaggtcagactggcaacctgaaccacaccagaggcctataaccccgctagagcctgggccagaaaagacacccatagcccagccagaatcgaagactctgcagggatccaatacccaacagaagcctgcttcaaaccaaagacccctcacccagcaggagacccctgcacaacatgatgctgaatcccagaaggaacctagagcccaacaaaaatctgcttcacaagaggaatttcttgccccacagaagcccgcaccacagcaatcaccttacatccaaagggtgctgctcactcaacaggaagctgcctcccagcagggacctgggctaggaaaagaatctataactcaacaggagccagcattgagacaaagacatgtagcccagccagggcctgggccaggagagccacctccagctcaacaagaagctgaatcaacacctgcggcccaggctaaacctggagccaaaagggagccatctgccccgactgaatctacgtcccaagagacacctgaacagtcagacaagcaaacaacgccagtccagggagccaaatccaagcagggatctttgacagagctgggatttctaacaaaacttcaggaactatccatacagcgatcagccctagagtggaaggcactttctgagtgggtcgcagattctgagtcagaatcagatgtgggatcatcttcagacacagattctccagccacgatgggtggaatggtggcccagggagtgaagctaggcttcaaaggaaaatctggttataaagtgatgtcaggatacagtgggacgtcgccacatgagaaaaccagtgctcggaatcacagacactaccaggatacagcctcaaggctcatccacaacatggacctgcgcacaatgacacagtcgctggtgactctggcggaggacaacatagccttcttctcgagccagggtcctggggaaacggcccagcggctgtcaggcgtttttgccggtgtacgggagcaggcgctggggctggagccggccctgggccgcctgctgggtgtggcgcacctctttgacctggacccagagacaccggccaacgggtaccgcagcctagtgcacacagcccgctgctgcctggcgcacctcctgcacaaatcccgctatgtggcctccaaccgccgcagcatcttcttccgcaccagccacaacctggccgagctggaggcctacctggctgccctcacccagctccgcgctctggtctactacgcccagcgcctgctggttaccaatcggccgggggtactcttctttgagggcgacgaggggctcaccgccgacttcctccgggagtatgtcacgctgcataagggatgcttctatggccgctgcctgggcttccagttcacgcctgccatccggccattcctgcagaccatctccattgggctggtgtccttcggggagcactacaaacgcaacgagacaggcctcagtgtggccgccagctctctcttcaccagcggccgctttgccatcgaccccgagctgcgtggggctgagtttgagcggatcacacagaacctggacgtgcacttctggaaagccttctggaacatcaccgagatggaagtgctatcgtctctggccaacatggcatcggccaccgtgagggtaagccgcctgctcagcctgccacccgaagcctttgagatgccactgactgccgaccccacgctcacggtcaccatctcacccccactggcccacacaggccctgggcccgtcctcgtcaggctcatctcctatgacctgcgtgaaggacaggacagtgaggagctcagcagcctgataaagtccaacggccaacggagcctggagctgtggccgcgcccccagcaggcaccccgctcgcggtccctgatagtgcacttccacggcggtggctttgtggcccagacctccagatcccacgagccctacctcaagagctgggcccaggagctgggcgcccccatcatctccatcgactactccctggcccctgaggcccccttcccccgtgcgctggaggagtgcttcttcgcctactgctgggccatcaagcactgcgccctccttggctcaacaggggaacgaatctgccttgcgggggacagtgcaggcgggaacctctgcttcaccgtggctcttcgggcagcagcctacggggtgcgggtgccagatggcatcatggcagcctacccggccacaatgctgcagcctgccgcctctccctcccgcctgctgagcctcatggaccccttgctgcccctcagtgtgctctccaagtgtgtcagcgcctatgctggtgcaaagacggaggaccactccaactcagaccagaaagccctcggcatgatggggctggtgcggcgggacacagccctgctcctccgagacttccgcctgggtgcctcctcatggctcaactccttcctggagttaagtgggcgcaagtcccagaagatgtcggagcccatagcagagccgatgcgccgcagtgtgtctgaagcagcactggcccagccccagggcccactgggcacggattccctcaagaacctgaccctgagggacttgagcctgaggggaaactccgagacgtcgtcggacacccccgagatgtcgctgtcagctgagacacttagcccctccacaccctccgatgtcaacttcttattaccacctgaggatgcaggggaagaggctgaggccaaaaatgagctgagccccatggacagaggcctgggcgtccgtgccgccttccccgagggtttccacccccgacgctccagccagggtgccacacagatgcccctctactcctcacccatagtcaagaaccccttcatgtcgccgctgctggcacccgacagcatgctcaagagcctgccacctgtgcacatcgtggcgtgcgcgctggaccccatgctggacgactcggtcatgctcgcgcggcgactgcgcaacctgggccagccggtgacgctgcgcgtggtggaggacctgccgcacggcttcctgaccctagcggcgctgtgccgcgagacgcgccaggccgcagagctgtgcgtggagcgcatccgcctcgtcctcactcctcccgccggagccgggccgagcggggagacgggggctgcgggggtagacgggggctgcggggggcgacactaaaagcctgttgttcccatctgcgccggcctccgtcatgaatgccttccgggccgggcggaaggggacgcgggctgtgccttacttaagtcgggggtggcaagggggcggggcgggggcccgaaagctgagaccctcgccacggggagggggacgcgcacacacaccggtcaccgagacggctggacctgcacgccaccgctgccttttgctgctgctgctgcggcgaccgccgcagggacggggactggccctcccttgcaggtcggtttggtttgttgtaaataaaagtatttaattagtttggcctctctcaa

SEQ ID NO: 372935 - DNA, 1313 bp, Homo sapiens
agggtgggctgagaggggtaagtggcaggtccaggttacccagtgtggtcacaccacccagtaggaccgacaggcagctcaggcccctagctgagcctggcactgcccttaatcggcttttgtccttccaggagggacaggcagggctggctacctcctctctccccccaacagctggggctggctgtgccagggccagactaggaggcgggagctgagatcactgggcctttggctccctgagtcctctctggggacagagagggcagcctggctgggtgagaggggacggtttgttcaggactggggctaggactcctgggtcctaaaggatgaaggggctgggggcctggactcctgggtctgagggaggaggggctgtgggtgtggactcctgggttctaaggcagaggagcctgtaacaggactaccagttgagctgagtctgggagcaggtggggggcagagcagggagctgagccctctactctgtttacagcacgtggtcctcactgatctttctgggtgggaggtggcttgtgcggctacaccctgggcaggccagccccgcccccgggtttattgccccaggctgctactggcacaagccacagaccagcagtcccagcccagggaagctcggaagatgcctaggagggcctcaaggctcatccacaacatggacctgcgcacaatgacacagtcgctggtgactctggcggaggacaacatagccttcttctcgagccagggtcctggggaaacggcccagcggctgtcaggcgtttttgccggtgtacgggagcaggcgctggggctggagccggccctgggccgcctgctgggtgtggcgcacctctttgacctggacccagagacaccggccaacgggtaccgcagcctagtgcacacagcccgctgctgcctggcgcacctcctgcacaaatcccgctatgtggcctccaaccgccgcagcatcttcttccgcaccagccacaacctggccgagctggaggcctacctggctgccctcacccagctccgcgctctggtctactacgcccagcgcctgctggttaccaatcggccgggggtactcttctttgagggcgacgaggggctcaccgccgacttcctccgggagtatgtcacgctgcataagggatgcttctatggccgctgcctgggcttccagttcacgcctgccatccggccattcctgcagaccatctccattgggctggtgtccttcggggagcactacaaacgcaacgagacaggcctcagtgagtcccagccaggttctactcgca

SEQ ID NO: 372936 - DNA, 434 bp, Homo sapiens
aaagtgtacaattttagtgtaatacagcttggaaagttaacccctccgccagggatctggacagcatagaaacacgtagaactcaaggtgtacacatgagatttcggggggcgacactaaaagcctgttgttcccatctgcgccggcctccgtcatgaatgccttccgggccgggcggaaggggacgcgggctgtgccttacttaagtcgggggtggcaagggggcggggcgggggcccgaaagctgagaccctcgccacggggagggggacgcgcacacacaccggtcaccgagacggctggacctgcacgccaccgctgccttttgctgctgctgctgcggcgaccgccgcagggacggggactggccctcccttgcaggtcggtttggtttgttgtaaataaaagtatttaattagtttggcctctctcaa

SEQ ID NO: 372937 - DNA, 393 bp, Homo sapiens
aacgggatgatccattgtgagaagggggtgatgtgacagccgagaggcccaccctggcacagggactagctgacgcccggatcggcttgggagcagagtccggaatgcgagcttcgtggaccagggttcccgctcggattccgtattcgctgtgtgaccaagggcaacggatgccctcagtgtttcccacctggggaatgcttcaagcgccgatgttcagggctccagcgctcttgagaggataagggggaaggaggttagcaggtgttactcaaagaggaagtctagcggtgagtcaaggagaggtaggaggaaggggtgcccatagtggagagtgcagcggggccagtaaagttcatcgcagtcccggcctcccacccggcaagtcagtcc

SEQ ID NO: 372938 - DNA, 3598 bp, Homo sapiens
ctcccttcttgtaagagagtgctaggcacatagcctcctcctattcctaatcctcccaccaaagaaagaggcacagagttcattacttagtgggggccagctgtgatcggccaactgccagctgccttaaaaaggaagaccagtgatgctaggatggagtgaaacccaagaggaagtgccatcatgaggaatcaatgagagatctgtgaagagagagggctgggtgggagcccagaaggatagaacctggaagatcaatatctcccgtgagggaaataacaatggagccaggttctaagtcagtgtctaggtcagactggcaacctgaaccacaccagaggcctataaccccgctagagcctgggccagaaaagacacccatagcccagccagaatcgaagactctgcagggatccaatacccaacagaagcctgcttcaaaccaaagacccctcacccagcaggagacccctgcacaacatgatgctgaatcccagaaggaacctagagcccaacaaaaatctgcttcacaagaggaatttcttgccccacagaagcccgcaccacagcaatcaccttacatccaaagggtgctgctcactcaacaggaagctgcctcccagcagggacctgggctaggaaaagaatctataactcaacaggagccagcattgagacaaagacatgtagcccagccagggcctgggccaggagagccacctccagctcaacaagaagctgaatcaacacctgcggcccaggctaaacctggagccaaaagggagccatctgccccgactgaatctacgtcccaagagacacctgaacagtcagacaagcaaacaacgccagtccagggagccaaatccaagcagggatctttgacagagctgggatttctaacaaaacttcaggaactatccatacagcgatcagccctagagtggaaggcactttctgagtgggtcgcagattctgagtcagaatcagatgtgggatcatcttcagacacagattctccagccacgatgggtggaatggtggcccagggagtgaagctaggcttcaaaggaaaatctggttataaagtgatgtcaggatacagtgggacgtcgccacatgagaaaaccagtgctcggaatcacagacactaccaggatacagcctcaaggctcatccacaacatggacctgcgcacaatgacacagtcgctggtgactctggcggaggacaacatagccttcttctcgagccagggtcctggggaaacggcccagcggctgtcaggcgtttttgccggtgtacgggagcaggcgctggggctggagccggccctgggccgcctgctgggtgtggcgcacctctttgacctggacccagagacaccggccaacgggtaccgcagcctagtgcacacagcccgctgctgcctggcgcacctcctgcacaaatcccgctatgtggcctccaaccgccgcagcatcttcttccgcaccagccacaacctggccgagctggaggcctacctggctgccctcacccagctccgcgctctggtctactacgcccagcgcctgctggttaccaatcggccgggggtactcttctttgagggcgacgaggggctcaccgccgacttcctccgggagtatgtcacgctgcataagggatgcttctatggccgctgcctgggcttccagttcacgcctgccatccggccattcctgcagaccatctccattgggctggtgtccttcggggagcactacaaacgcaacgagacaggcctcagtgtggccgccagctctctcttcaccagcggccgctttgccatcgaccccgagctgcgtggggctgagtttgagcggatcacacagaacctggacgtgcacttctggaaagccttctggaacatcaccgagatggaagtgctatcgtctctggccaacatggcatcggccaccgtgagggtaagccgcctgctcagcctgccacccgaagcctttgagatgccactgactgccgaccccacgctcacggtcaccatctcacccccactggcccacacaggccctgggcccgtcctcgtcaggctcatctcctatgacctgcgtgaaggacaggacagtgaggagctcagcagcctgataaagtccaacggccaacggagcctggagctgtggccgcgcccccagcaggcaccccgctcgcggtccctgatagtgcacttccacggcggtggctttgtggcccagacctccagatcccacgagccctacctcaagagctgggcccaggagctgggcgcccccatcatctccatcgactactccctggcccctgaggcccccttcccccgtgcgctggaggagtgcttcttcgcctactgctgggccatcaagcactgcgccctccttggtgcaaagacggaggaccactccaactcagaccagaaagccctcggcatgatggggctggtgcggcgggacacagccctgctcctccgagacttccgcctgggtgcctcctcatggctcaactccttcctggagttaagtgggcgcaagtcccagaagatgtcggagcccatagcagagccgatgcgccgcagtgtgtctgaagcagcactggcccagccccagggcccactgggcacggattccctcaagaacctgaccctgagggacttgagcctgaggggaaactccgagacgtcgtcggacacccccgagatgtcgctgtcagctgagacacttagcccctccacaccctccgatgtcaacttcttattaccacctgaggatgcaggggaagaggctgaggccaaaaatgagctgagccccatggacagaggcctgggcgtccgtgccgccttccccgagggtttccacccccgacgctccagccagggtgccacacagatgcccctctactcctcacccatagtcaagaaccccttcatgtcgccgctgctggcacccgacagcatgctcaagagcctgccacctgtgcacatcgtggcgtgcgcgctggaccccatgctggacgactcggtcatgctcgcgcggcgactgcgcaacctgggccagccggtgacgctgcgcgtggtggaggacctgccgcacggcttcctgaccctagcggcgctgtgccgcgagacgcgccaggccgcagagctgtgcgtggagcgcatccgcctcgtcctcactcctcccgccggagccgggccgagcggggagacgggggctgcgggggtagacgggggctgcggggggcgacactaaaagcctgttgttcccatctgcgccggcctccgtcatgaatgccttccgggccgggcggaaggggacgcgggctgtgccttacttaagtcgggggtggcaagggggcggggcgggggcccgaaagctgagaccctcgccacggggagggggacgcgcacacacaccggtcaccgagacggctggacctgcacgccaccgctgccttttgctgctgctgctgcggcgaccgccgcagggacggggactggccctcccttgcaggtcggtttggtttgttgtaaataaaagtatttaattagtttggcctctctcaa

SEQ ID NO: 372939 - DNA, 3412 bp, Homo sapiens
agggtgggctgagaggggtaagtggcaggtccaggttacccagtgtggtcacaccacccagtaggaccgacaggcagctcaggcccctagctgagcctggcactgcccttaatcggcttttgtccttccaggagggacaggcagggctggctacctcctctctccccccaacagctggggctggctgtgccagggccagactaggaggcgggagctgagatcactgggcctttggctccctgagtcctctctggggacagagagggcagcctggctgggtgagaggggacggtttgttcaggactggggctaggactcctgggtcctaaaggatgaaggggctgggggcctggactcctgggtctgagggaggaggggctgtgggtgtggactcctgggttctaaggcagaggagcctgtaacaggactaccagttgagctgagtctgggagcaggtggggggcagagcagggagctgagccctctactctgtttacagcacgtggtcctcactgatctttctgggtgggaggtggcttgtgcggctacaccctgggcaggccagccccgcccccgggtttattgccccaggctgctactggcacaagccacagaccagcagtcccagcccagggaagctcggaagatgcctaggaggggtgagtgtccagccagctgagagacgggaatggccgctgccaggccccaggacctagaagggaaaggaaataccttcttctaggggaacagcctcaaggctcatccacaacatggacctgcgcacaatgacacagtcgctggtgactctggcggaggacaacatagccttcttctcgagccagggtcctggggaaacggcccagcggctgtcaggcgtttttgccggtgtacgggagcaggcgctggggctggagccggccctgggccgcctgctgggtgtggcgcacctctttgacctggacccagagacaccggccaacgggtaccgcagcctagtgcacacagcccgctgctgcctggcgcacctcctgcacaaatcccgctatgtggcctccaaccgccgcagcatcttcttccgcaccagccacaacctggccgagctggaggcctacctggctgccctcacccagctccgcgctctggtctactacgcccagcgcctgctggttaccaatcggccgggggtactcttctttgagggcgacgaggggctcaccgccgacttcctccgggagtatgtcacgctgcataagggatgcttctatggccgctgcctgggcttccagttcacgcctgccatccggccattcctgcagaccatctccattgggctggtgtccttcggggagcactacaaacgcaacgagacaggcctcagtgtggccgccagctctctcttcaccagcggccgctttgccatcgaccccgagctgcgtggggctgagtttgagcggatcacacagaacctggacgtgcacttctggaaagccttctggaacatcaccgagatggaagtgctatcgtctctggccaacatggcatcggccaccgtgagggtaagccgcctgctcagcctgccacccgaagcctttgagatgccactgactgccgaccccacgctcacggtcaccatctcacccccactggcccacacaggccctgggcccgtcctcgtcaggctcatctcctatgacctgcgtgaaggacaggacagtgaggagctcagcagcctgataaagtccaacggccaacggagcctggagctgtggccgcgcccccagcaggcaccccgctcgcggtccctgatagtgcacttccacggcggtggctttgtggcccagacctccagatcccacgagccctacctcaagagctgggcccaggagctgggcgcccccatcatctccatcgactactccctggcccctgaggcccccttcccccgtgcgctggaggagtgcttcttcgcctactgctgggccatcaagcactgcgccctccttggctcaacaggggaacgaatctgccttgcgggggacagtgcaggcgggaacctctgcttcaccgtggctcttcgggcagcagcctacggggtgcgggtgccagatggcatcatggcagcctacccggccacaatgctgcagcctgccgcctctccctcccgcctgctgagcctcatggaccccttgctgcccctcagtgtgctctccaagtgtgtcagcgcctatgctggtgcaaagacggaggaccactccaactcagaccagaaagccctcggcatgatggggctggtgcggcgggacacagccctgctcctccgagacttccgcctgggtgcctcctcatggctcaactccttcctggagttaagtgggcgcaagtcccagaagatgtcggagcccatagcagagccgatgcgccgcagtgtgtctgaagcagcactggcccagccccagggcccactgggcacggattccctcaagaacctgaccctgagggacttgagcctgaggggaaactccgagacgtcgtcggacacccccgagatgtcgctgtcagctgagacacttagcccctccacaccctccgatgtcaacttcttattaccacctgaggatgcaggggaagaggctgaggccaaaaatgagctgagccccatggacagaggcctgggcgtccgtgccgccttccccgagggtttccacccccgacgctccagccagggtgccacacagatgcccctctactcctcacccatagtcaagaaccccttcatgtcgccgctgctggcacccgacagcatgctcaagagcctgccacctgtgcacatcgtggcgtgcgcgctggaccccatgctggacgactcggtcatgctcgcgcggcgactgcgcaacctgggccagccggtgacgctgcgcgtggtggaggacctgccgcacggcttcctgaccctagcggcgctgtgccgcgagacgcgccaggccgcagagctgtgcgtggagcgcatccgcctcgtcctcactcctcccgccggagccgggccgagcggggagacgggggctgcgggggtagacgggggctgcggggggcgacactaaaagcctgttgttcccatctgcgccggcctccgtcatgaatgccttccgggccgggcggaaggggacgcgggctgtgccttacttaagtcgggggtggcaagggggcggggcgggggcccgaaagctgagaccctcgccacggggagggggacgcgcacacacaccggtcaccgagacggctggacctgcacgccaccgctgccttttgctgctgctgctgcggcgaccgccgcagggacggggactggccctcccttgcaggtcggtttggtttgttgtaaataaaagtatttaattagtttggcctctctcaa

SEQ ID NO: 372940 - DNA, 3321 bp, Homo sapiens
agggtgggctgagaggggtaagtggcaggtccaggttacccagtgtggtcacaccacccagtaggaccgacaggcagctcaggcccctagctgagcctggcactgcccttaatcggcttttgtccttccaggagggacaggcagggctggctacctcctctctccccccaacagctggggctggctgtgccagggccagactaggaggcgggagctgagatcactgggcctttggctccctgagtcctctctggggacagagagggcagcctggctgggtgagaggggacggtttgttcaggactggggctaggactcctgggtcctaaaggatgaaggggctgggggcctggactcctgggtctgagggaggaggggctgtgggtgtggactcctgggttctaaggcagaggagcctgtaacaggactaccagttgagctgagtctgggagcaggtggggggcagagcagggagctgagccctctactctgtttacagcacgtggtcctcactgatctttctgggtgggaggtggcttgtgcggctacaccctgggcaggccagccccgcccccgggtttattgccccaggctgctactggcacaagccacagaccagcagtcccagcccagggaagctcggaagatgcctaggagggcctcaaggctcatccacaacatggacctgcgcacaatgacacagtcgctggtgactctggcggaggacaacatagccttcttctcgagccagggtcctggggaaacggcccagcggctgtcaggcgtttttgccggtgtacgggagcaggcgctggggctggagccggccctgggccgcctgctgggtgtggcgcacctctttgacctggacccagagacaccggccaacgggtaccgcagcctagtgcacacagcccgctgctgcctggcgcacctcctgcacaaatcccgctatgtggcctccaaccgccgcagcatcttcttccgcaccagccacaacctggccgagctggaggcctacctggctgccctcacccagctccgcgctctggtctactacgcccagcgcctgctggttaccaatcggccgggggtactcttctttgagggcgacgaggggctcaccgccgacttcctccgggagtatgtcacgctgcataagggatgcttctatggccgctgcctgggcttccagttcacgcctgccatccggccattcctgcagaccatctccattgggctggtgtccttcggggagcactacaaacgcaacgagacaggcctcagtgtggccgccagctctctcttcaccagcggccgctttgccatcgaccccgagctgcgtggggctgagtttgagcggatcacacagaacctggacgtgcacttctggaaagccttctggaacatcaccgagatggaagtgctatcgtctctggccaacatggcatcggccaccgtgagggtaagccgcctgctcagcctgccacccgaagcctttgagatgccactgactgccgaccccacgctcacggtcaccatctcacccccactggcccacacaggccctgggcccgtcctcgtcaggctcatctcctatgacctgcgtgaaggacaggacagtgaggagctcagcagcctgataaagtccaacggccaacggagcctggagctgtggccgcgcccccagcaggcaccccgctcgcggtccctgatagtgcacttccacggcggtggctttgtggcccagacctccagatcccacgagccctacctcaagagctgggcccaggagctgggcgcccccatcatctccatcgactactccctggcccctgaggcccccttcccccgtgcgctggaggagtgcttcttcgcctactgctgggccatcaagcactgcgccctccttggctcaacaggggaacgaatctgccttgcgggggacagtgcaggcgggaacctctgcttcaccgtggctcttcgggcagcagcctacggggtgcgggtgccagatggcatcatggcagcctacccggccacaatgctgcagcctgccgcctctccctcccgcctgctgagcctcatggaccccttgctgcccctcagtgtgctctccaagtgtgtcagcgcctatgctggtgcaaagacggaggaccactccaactcagaccagaaagccctcggcatgatggggctggtgcggcgggacacagccctgctcctccgagacttccgcctgggtgcctcctcatggctcaactccttcctggagttaagtgggcgcaagtcccagaagatgtcggagcccatagcagagccgatgcgccgcagtgtgtctgaagcagcactggcccagccccagggcccactgggcacggattccctcaagaacctgaccctgagggacttgagcctgaggggaaactccgagacgtcgtcggacacccccgagatgtcgctgtcagctgagacacttagcccctccacaccctccgatgtcaacttcttattaccacctgaggatgcaggggaagaggctgaggccaaaaatgagctgagccccatggacagaggcctgggcgtccgtgccgccttccccgagggtttccacccccgacgctccagccagggtgccacacagatgcccctctactcctcacccatagtcaagaaccccttcatgtcgccgctgctggcacccgacagcatgctcaagagcctgccacctgtgcacatcgtggcgtgcgcgctggaccccatgctggacgactcggtcatgctcgcgcggcgactgcgcaacctgggccagccggtgacgctgcgcgtggtggaggacctgccgcacggcttcctgaccctagcggcgctgtgccgcgagacgcgccaggccgcagagctgtgcgtggagcgcatccgcctcgtcctcactcctcccgccggagccgggccgagcggggagacgggggctgcgggggtagacgggggctgcggggggcgacactaaaagcctgttgttcccatctgcgccggcctccgtcatgaatgccttccgggccgggcggaaggggacgcgggctgtgccttacttaagtcgggggtggcaagggggcggggcgggggcccgaaagctgagaccctcgccacggggagggggacgcgcacacacaccggtcaccgagacggctggacctgcacgccaccgctgccttttgctgctgctgctgcggcgaccgccgcagggacggggactggccctcccttgcaggtcggtttggtttgttgtaaataaaagtatttaattagtttggcctctctcaa

SEQ ID NO: 372941 - DNA, 2416 bp, Homo sapiens
aacgggatgatccattgtgagaagggggtgatgtgacagccgagaggcccaccctggcacagggactagctgacgcccggatcggcttgggagcagagtccggaatgcgagcttcgtggaccagggttcccgctcggattccgtattcgctgtgtgaccaagggcaacggatgccctcagtgtttcccacctggggaatgcttcaagcgccgatgttcagggctccagcgctcttgagaggataagggggaaggaggttagcaggtgttactcaaagaggaagtctagcgttcacgcctgccatccggccattcctgcagaccatctccattgggctggtgtccttcggggagcactacaaacgcaacgagacaggcctcagtgtggccgccagctctctcttcaccagcggccgctttgccatcgaccccgagctgcgtggggctgagtttgagcggatcacacagaacctggacgtgcacttctggaaagccttctggaacatcaccgagatggaagtgctatcgtctctggccaacatggcatcggccaccgtgagggtaagccgcctgctcagcctgccacccgaagcctttgagatgccactgactgccgaccccacgctcacggtcaccatctcacccccactggcccacacaggccctgggcccgtcctcgtcaggctcatctcctatgacctgcgtgaaggacaggacagtgaggagctcagcagcctgataaagtccaacggccaacggagcctggagctgtggccgcgcccccagcaggcaccccgctcgcggtccctgatagtgcacttccacggcggtggctttgtggcccagacctccagatcccacgagccctacctcaagagctgggcccaggagctgggcgcccccatcatctccatcgactactccctggcccctgaggcccccttcccccgtgcgctggaggagtgcttcttcgcctactgctgggccatcaagcactgcgccctccttggctcaacaggggaacgaatctgccttgcgggggacagtgcaggcgggaacctctgcttcaccgtggctcttcgggcagcagcctacggggtgcgggtgccagatggcatcatggcagcctacccggccacaatgctgcagcctgccgcctctccctcccgcctgctgagcctcatggaccccttgctgcccctcagtgtgctctccaagtgtgtcagcgcctatgctggtgcaaagacggaggaccactccaactcagaccagaaagccctcggcatgatggggctggtgcggcgggacacagccctgctcctccgagacttccgcctgggtgcctcctcatggctcaactccttcctggagttaagtgggcgcaagtcccagaagatgtcggagcccatagcagagccgatgcgccgcagtgtgtctgaagcagcactggcccagccccagggcccactgggcacggattccctcaagaacctgaccctgagggacttgagcctgaggggaaactccgagacgtcgtcggacacccccgagatgtcgctgtcagctgagacacttagcccctccacaccctccgatgtcaacttcttattaccacctgaggatgcaggggaagaggctgaggccaaaaatgagctgagccccatggacagaggcctgggcgtccgtgccgccttccccgagggtttccacccccgacgctccagccagggtgccacacagatgcccctctactcctcacccatagtcaagaaccccttcatgtcgccgctgctggcacccgacagcatgctcaagagcctgccacctgtgcacatcgtggcgtgcgcgctggaccccatgctggacgactcggtcatgctcgcgcggcgactgcgcaacctgggccagccggtgacgctgcgcgtggtggaggacctgccgcacggcttcctgaccctagcggcgctgtgccgcgagacgcgccaggccgcagagctgtgcgtggagcgcatccgcctcgtcctcactcctcccgccggagccgggccgagcggggagacgggggctgcgggggtagacgggggctgcggggggcgacactaaaagcctgttgttcccatctgcgccggcctccgtcatgaatgccttccgggccgggcggaaggggacgcgggctgtgccttacttaagtcgggggtggcaagggggcggggcgggggcccgaaagctgagaccctcgccacggggagggggacgcgcacacacaccggtcaccgagacggctggacctgcacgccaccgctgccttttgctgctgctgctgcggcgaccgccgcagggacggggactggccctcccttgcaggtcggtttggtttgttgtaaataaaagtatttaattagtttggcctctctcaa

SEQ ID NO: 372942 - DNA, 489 bp, Homo sapiens
gcggccgctttgccatcgaccccgagctgcgtggggctgagtttgagcggatcacacagaacctggacgtgcacttctggaaagccttctggaacatcaccgagatggaagtgctatcggtgagggcctgttgcagatggggacactgaggcccagagactcatctgaggccacagtaggtctctgtggggctccaggcccagggatggcacacaaggggaaagactggggatcagagggagaggtgaagggcacccctgcaggcagaccttccctagcaccccttctgtcccctccctccagtctctggccaacatggcatcggccaccgtgagggtaagccgcctgctcagcctgccacccgaagcctttgagatgccactgactgccgaccccacgctcacggtcaccatctcacccccactggcccacacaggccctgggcccgtcctcgtcaggctcatctcctatgacctgcgtgaaggacag

SEQ ID NO: 372943 - DNA, 2485 bp, Homo sapiens
ctcccttcttgtaagagagtgctaggcacatagcctcctcctattcctaatcctcccaccaaagaaagaggcacagagttcattacttagtgggggccagctgtgatcggccaactgccagctgccttaaaaaggaagaccagtgatgctaggatggagtgaaacccaagaggaagtgccatcatgaggaatcaatgagagatctgtgaagagagagggctgggtgggagcccagaaggatagaacctggaagatcaatatctcccgtgagggaaataacaatggagccaggttctaagtcagtgtctaggtcagactggcaacctgaaccacaccagaggcctataaccccgctagagcctgggccagaaaagacacccatagcccagccagaatcgaagactctgcagggatccaatacccaacagaagcctgcttcaaaccaaagacccctcacccagcaggagacccctgcacaacatgatgctgaatcccagaaggaacctagagcccaacaaaaatctgcttcacaagaggaatttcttgccccacagaagcccgcaccacagcaatcaccttacatccaaagggtgctgctcactcaacaggaagctgcctcccagcagggacctgggctaggaaaagaatctataactcaacaggagccagcattgagacaaagacatgtagcccagccagggcctgggccaggagagccacctccagctcaacaagaagctgaatcaacacctgcggcccaggctaaacctggagccaaaagggagccatctgccccgactgaatctacgtcccaagagacacctgaacagtcagacaagcaaacaacgccagtccagggagccaaatccaagcagggatctttgacagagctgggatttctaacaaaacttcaggaactatccatacagcgatcagccctagagtggaaggcactttctgagtgggtcgcagattctgagtcagaatcagatgtgggatcatcttcagacacagattctccagccacgatgggtggaatggtggcccagggagtgaagctaggcttcaaaggaaaatctggttataaagtgatgtcaggatacagtgggacgtcgccacatgagaaaaccagtgctcggaatcacagacactaccaggatacagcctcaaggctcatccacaacatggacctgcgcacaatgacacagtcgctggtgactctggcggaggacaacatagccttcttctcgagccagggtcctggggaaacggcccagcggctgtcaggcgtttttgccggtgtacgggagcaggcgctggggctggagccggccctgggccgcctgctgggtgtggcgcacctctttgacctggacccagagacaccggccaacgggtaccgcagcctagtgcacacagcccgctgctgcctggcgcacctcctgcacaaatcccgctatgtggcctccaaccgccgcagcatcttcttccgcaccagccacaacctggccgagctggaggcctacctggctgccctcacccagctccgcgctctggtctactacgcccagcgcctgctggttaccaatcggccgggggtactcttctttgagggcgacgaggggctcaccgccgacttcctccgggagtatgtcacgctgcataagggatgcttctatggccgctgcctgggcttccagttcacgcctgccatccggccattcctgcagaccatctccattgggctggtgtccttcggggagcactacaaacgcaacgagacaggcctcagtgtggccgccagctctctcttcaccagcggccgctttgccatcgaccccgagctgcgtggggctgagtttgagcggatcacacagaacctggacgtgcacttctggaaagccttctggaacatcaccgagatggaagtgctatcgtctctggccaacatggcatcggccaccgtgagggtaagccgcctgctcagcctgccacccgaagcctttgagatgccactgactgccgaccccacgctcacggtcaccatctcacccccactggcccacacaggccctgggcccgtcctcgtcaggctcatctcctatgacctgcgtgaaggacaggacagtgaggagctcagcagcctgataaagtccaacggccaacggagcctggagctgtggccgcgcccccagcaggcaccccgctcgcggtccctgatagtgcacttccacggcggtggctttgtggcccagacctccagatcccacgagccctacctcaagagctgggcccaggagctgggcgcccccatcatctccatcgactaacacaccggtcaccgagacggctggacctgcacgccaccgctgccttttgctgctgctgctgcggcgaccgccgcagggacggggactggccctcccttgcaggtcggtttggtttgttgtaaataaaagtatttaattagtttggcctctctcaa

SEQ ID NO: 372944 - DNA, 2092 bp, Homo sapiens
ctcccttcttgtaagagagtgctaggcacatagcctcctcctattcctaatcctcccaccaaagaaagaggcacagagttcattacttagtgggggccagctgtgatcggccaactgccagctgccttaaaaaggaagaccagtgatgctaggatggagtgaaacccaagaggaagtgccatcatgaggaatcaatgagagatctgtgaagagagagggctgggtgggagcccagaaggatagaacctggaagatcaatatctcccgtgagggaaataacaatggagccaggttctaagtcagtgtctaggtcagactggcaacctgaaccacaccagaggcctataaccccgctagagcctgggccagaaaagacacccatagcccagccagaatcgaagactctgcagggatccaatacccaacagaagcctgcttcaaaccaaagacccctcacccagcaggagacccctgcacaacatgatgctgaatcccagaaggaacctagagcccaacaaaaatctgcttcacaagaggaatttcttgccccacagaagcccgcaccacagcaatcaccttacatccaaagggtgctgctcactcaacaggaagctgcctcccagcagggacctgggctaggaaaagaatctataactcaacaggagccagcattgagacaaagacatgtagcccagccagggcctgggccaggagagccacctccagctcaacaagaagctgaatcaacacctgcggcccaggctaaacctggagccaaaagggagccatctgccccgactgaatctacgtcccaagagacacctgaacagtcagacaagcaaacaacgccagtccagggagccaaatccaagcagggatctttgacagagctgggatttctaacaaaacttcaggaactatccatacagcgatcagccctagagtggaaggcactttctgagtgggtcgcagattctgagtcagaatcagatgtgggatcatcttcagacacagattctccagccacgatgggtggaatggtggcccagggagtgaagctaggcttcaaaggaaaatctggttataaagtgatgtcaggatacagtgggacgtcgccacatgagaaaaccagtgctcggaatcacagacactaccaggatacagcctcaaggctcatccacaacatggacctgcgcacaatgacacagtcgctggtgactctggcggaggacaacatagccttcttctcgagccagggtcctggggaaacggcccagcggctgtcaggcgtttttgccggtgtacgggagcaggcgctggggctggagccggccctgggccgcctgctgggtgtggcgcacctctttgacctggacccagagacaccggccaacgggtaccgcagcctagtgcacacagcccgctgctgcctggcgcacctcctgcacaaatcccgctatgtggcctccaaccgccgcagcatcttcttccgcaccagccacaacctggccgagctggaggcctacctggctgccctcacccagctccgcgctctggtctactacgcccagcgcctgctggttaccaatcggccgggggtactcttctttgagggcgacgaggggctcaccgccgacttcctccgggagtatgtcacgctgcataagggatgcttctatggccgctgcctgggcttccagttcacgcctgccatccggccattcctgcagaccatctccattgggctggtgtccttcggggagcactacaaacgcaacgagacaggcctcagtgtggccgccagctctctcttcaccagcggccgctttgccatcgaccccgagctgcgtggggctgagtttgagcggatcacacagaacctggacgtgcacttctggaaagctgagaccctcgccacggggagggggacgcgcacacacaccggtcaccgagacggctggacctgcacgccaccgctgccttttgctgctgctgctgcggcgaccgccgcagggacggggactggccctcccttgcaggtcggtttggtttgttgtaaataaaagtatttaattagtttggcctctctcaa

SEQ ID NO: 372945 - DNA, 1463 bp, Homo sapiens
ggaactacaggcgtgcaccaccactaccacgcccagctaatttttgtgtttttcgctatgttgcccaggctggtcttgaactcctgggctcaagccatcctctcgccttggcctcccaaagtactgggactacaggcgtgagccactgcgcccagcctccttatcccttttgaagcgattggatattctcgggtccctgggaccacagatgcctgaagttctgggcgttaaaactgggcccagaaaggggaaaacaactcagctacccacatatattctgcaggtgcaaagacggaggaccactccaactcagaccagaaagccctcggcatgatggggctggtgcggcgggacacagccctgctcctccgagacttccgcctgggtgcctcctcatggctcaactccttcctggagttaagtgggcgcaagtcccagaagatgtcggagcccatagcagagccgatgcgccgcagtgtgtctgaagcagcactggcccagccccagggcccactgggcacggattccctcaagaacctgaccctgagggacttgagcctgaggggaaactccgagacgtcgtcggacacccccgagatgtcgctgtcagctgagacacttagcccctccacaccctccgatgtcaacttcttattaccacctgaggatgcaggggaagaggctgaggccaaaaatgagctgagccccatggacagaggcctgggcgtccgtgccgccttccccgagggtttccacccccgacgctccagccagggtgccacacagatgcccctctactcctcacccatagtcaagaaccccttcatgtcgccgctgctggcacccgacagcatgctcaagagcctgccacctgtgcacatcgtggcgtgcgcgctggaccccatgctggacgactcggtcatgctcgcgcggcgactgcgcaacctgggccagccggtgacgctgcgcgtggtggaggacctgccgcacggcttcctgaccctagcggcgctgtgccgcgagacgcgccaggccgcagagctgtgcgtggagcgcatccgcctcgtcctcactcctcccgccggagccgggccgagcggggagacgggggctgcgggggtagacgggggctgcggggggcgacactaaaagcctgttgttcccatctgcgccggcctccgtcatgaatgccttccgggccgggcggaaggggacgcgggctgtgccttacttaagtcgggggtggcaagggggcggggcgggggcccgaaagctgagaccctcgccacggggagggggacgcgcacacacaccggtcaccgagacggctggacctgcacgccaccgctgccttttgctgctgctgctgcggcgaccgccgcagggacggggactggccctcccttgcaggtcggtttggtttgttgtaaataaaagtatttaattagtttggcctctctcaa

SEQ ID NO: 372946 - DNA, 765 bp, Homo sapiens
gcacaaacacagccactgcagcctcaacctcatgggctcaggcggtcctccctcagcctctgaaagtgctgggattgcaagtgtaaaccattgtgcctggcctattatacttgacattaaaaagaagatttttgcccgggcatggtgggtcacacctgtaacctcagcacttttggaggccaagggagaaccacttgaggccaggagttcgagaccagcctgggcaacatagtgagacccccatcactacaaaacaaaatattagtcaggtgtggtggcatgcccttatggttccagctgctcaggggggctgaagtggaaggattgcctcagcctgggaggtcaaggctgcagtgacccgtgtttgcgccactgcactccagcctgggtgacagagttagaccctgtctcaaaaaaaaaaaaaaaaaaaaaagatccttaattggagaaatgtcaggatgtagaaagaaaaagtcgtcaatgaaaatggaatatttgagtaaatggagtattatactcacttggggaggttttatttgagttggtttatttgaaattagaatcagtgactttaccggtatgaataacctttagtaatttttcaaactgtgggaccagaggaaataagacctttcattgtttgcctgcaataacaccaaaatatcactgtagtcacctgagtaagttttgttacaaaacacattaatcaaagttcactttctttaggctaatgtgccttttcttacagatgttctttgcatatag

SEQ ID NO: 372947 - DNA, 605 bp, Homo sapiens
tctctctatgtatctgtcaggctatgctgcagtaacaaacagcccccaattcttggtggttgaaaacaacgaaacttatttctcactcatgaaagatgtctagtgctggtcagcggggggcttttctctacagagtcactcagggacccaggctggtgtgggctctgccattttgcaatgttgccatctcaggacagcagaagagaagagagcactagaaagtgtggctcctgtaataagatgatttcacctggaaattacaccagtcatgtttgttcagaatccactgaccagaatgagtcacatgacaccccctaattttaagaagacccagtgataacccgctcactaatataccctgaattgcctgccttcctttctctggctcgcttccccactccctacttcctgatgccctctgggatcactttccaaataaattatatgcacctgaacttgttgtcttagcgtctgcttctggtagagcccaaatgaagacacccctgctctttatcattaattaattcagtctgtcaatacgtattttctgagcacctactatgtgctagatcctatgtaggcactgggggcacgaagatgactga

SEQ ID NO: 372948 - DNA, 218 bp, Homo sapiens
gcaacagggatttccacacatgctcattgctgatagtgcctagtaagtaagttttccagaactggttgttggaaaggttagaacatgaattttgtgaagtttctagaatcgggagtatttgaacctaacctatatctttccaaaattttaagtcctagtagtttgtgagtagctaggttgagttttgtccagacaagaaaacttaactacagaaagtc

SEQ ID NO: 372949 - DNA, 1025 bp, Homo sapiens
aacataactgtgtttacttcccatgcacttaatacccttatgcgctaattttgtgaattaagtttactgattatagaagtatgtgctgcatagaagtctgtgcttagagggtgaagttcctaagcttaccttgaattacagctacatttcagtgttaaatgtgcatattaagaataattcttttggggaaagaaattatgaatcttcaggacagtctacaatggtttagagttacattctgcctagacttttatgacttgctgctattgttttaaaaaccccacttagtctcttcctttctgatttctaaagtaagcctcagaatttccaaaccaattcatccacagctgtttctgggctggtttttaaagtagctgcaacagaatcatgaggctttccctttttatcaaatacgaaaaacattttttaaaattctgcacacccagtgatcatcttttgtgcgggaaagcaagatgatgatggatgattttattcatccttttagtaaagacacaaaacatttttctcaacatttgtacagttctgaaaaaaacctggtcaccaaaaatatcttctctgctaattcagcaattcttgggctccagttaggggagctggggcctcactttctcccagaattgtgggcttcactggaagtgaaggtgcaggaatgactggactgtccaccccagccctgcctgcctgtggttttggccagggagcaagccatgaggtgccctggcacatgcacaaattgatcctttgcgtgacagtcttgtatggaaaacagatgctgacagaattgtagactaccatgccacacaaaaaggctaaatatctactccaatgggtttccagttcagtttgaagtcaatcaaatttttgtattttcggtgtctccttgattggttttgctagtaattctgtaaattgtacatttgcaatatgaggttttttttccttttgtacaatttgaaactgatgcttcacctttcctttaataaactattcaaaatcaggcttgt

SEQ ID NO: 372950 - DNA, 971 bp, Homo sapiens
aacataactgtgtttacttcccatgcacttaatacccttatgcgctaattttgtgaattaagtttactgattatagaagtatgtgctgcatagaagtctgtgcttagagggtgaagttcctaagcttaccttgaattacagctacatttcagtgttaaatgtgcatattaagaataattcttttggggaaagaaattatgaatcttcaggacagtctacaatggtttagagttacattctgcctagacttttatgacttgctgctattgttttaaaaaccccacttagtctcttcctttctgatttctaaagtaagcctcagaatttccaaaccaattcatccacagctgtttctgggctggtttttaaagtagctgcaacagaatcatgaggctttccctttttatcaaatacgaaaaacattttttaaaattctgcacacccagtgatcatcttttgtgcgggaaagcaagatgatgatggatgattttattcatccttttagtaaagacacaaaacatttttctcaacatttgtacagttctgaaaaaaacctggtcaccaaaaatatcttctctgctaattcagcaattcttgggctccagttaggggagctggggcctcactttctcccagaattgtgggcttcactggaagtgaaggtgcaggaatgactggactgtccaccccagccctgcctgcctgtggttttggccagggagcaagccatgaggtgccctggcacatgcacaaattgatcctttgcgtgacagtcttgtatggtctactccaatgggtttccagttcagtttgaagtcaatcaaatttttgtattttcggtgtctccttgattggttttgctagtaattctgtaaattgtacatttgcaatatgaggttttttttccttttgtacaatttgaaactgatgcttcacctttcctttaataaactattcaaaatcaggcttgt

SEQ ID NO: 372951 - DNA, 721 bp, Homo sapiens
ggtccggacgcgtgggtcgacccacgcgtcctgatggtataagcaaaacaaataaaacgtttataaaagttgtatcttgaaacactggtgttcaacagctagcagcttatgtgattcaccccatgccacgttagtgtcacaaattttatggtttatctccagcaacatttctctagtacttgcacttattatcttttgtctaatttaaccttaactgaattctccgtttctcctggaggcatttatattcagtgataattccttcccttagatgcatagggagagtctctaaatttgatggaaatggacacttgagtagtgacttagccttatgtactctgttggaatttgtgctagcagtttgagcactagttctgtgtgcctatgaagttaatgctgcttattgtctcattctgacttcatggagaattaatcccacctttaagcaaaggctactaagttaatggtattttctgtgcagaaattaaattttattttcagcatttagcccaggaattcttccagtaggtgctcagctatttaaaaacaaaactattctcaaacattcatcattagacaactggagtttttgctggttttgtaacctaccaaaatggataggctgttgaacattccacattcaaaagttttgtagggtggtgggaaatgggggatcttcaatgtttattttaaaataaaataaaataagttcttgactttt

SEQ ID NO: 372952 - DNA, 325 bp, Homo sapiens
gctcggtaccccagggccccggtatccattcatcaagcctctagcaccacgggagcctccacgagacacaccacgactattgtaatagggctgattgctacgtggaaatccagcgtggtgctagaggcttgatgaatggataccggggccctgccaatggattcagaggtaaaaaaataaaaaaggaggttctaatgaccttttactagttcaaattattttttgatttgtaaaatatatcacacagtttttgggaaggatgtatctgcattagcctcctatgtgcaatttaaacaatgtatattttggtacaatttgtgtattt

SEQ ID NO: 372953 - DNA, 4168 bp, Homo sapiens
cgggcagcccgagcggccgcgaaggcccccgctctccgcttctcccgcccctcgcgacccagagggctgctggctggctaagtccctcccgctcccggctctcgcctcactaggagcggctctcggtgcagcgggacagggcgaagcggcctgcgcccacggagcgcgcgacactgcccggaagggaccgccacccttgccccctcagctgcccactcgtgatttccagcggcctccgcgcgcgcacgatgccctcggccaccagccacagcgggagcggcagcaagtcgtccggaccgccaccgccgtcgggttcctccgggagtgaggcggccgcgggagccggggccgccgcgccggcttctcagcaccccgcaaccggcaccggcgctgtccagaccgaggccatgaagcagattctcggggtgatcgacaagaaacttcggaacctggagaagaaaaagggtaagcttgatgattaccaggaacgaatgaacaaaggggaaaggcttaatcaagatcagctggatgccgtttctaagtaccaggaagtcacaaataatttggagtttgcaaaagaattacagaggagtttcatggcactaagtcaagatattcagaaaacaataaagaagacagcacgtcgggagcagcttatgagagaagaagctgaacagaaacgtttaaaaactgtacttgagctacagtatgttttggacaaattgggagatgatgaagtgcggactgacctgaaacaaggtttgaatggagtgccaatattgtccgaagaggagttgtcattgttggatgaattctataagctagtagaccctgaacgggacatgagcttgaggttgaatgaacagtatgaacatgcctccattcacctgtgggacctgctggaagggaaggaaaaacctgtatgtggaaccacctataaagttctaaaggaaattgttgagcgtgtttttcagtcaaactactttgacagcacccacaaccaccagaatgggctgtgtgaggaagaagaggcagcctcagcacctgcagttgaagaccaggtacctgaagctgaacctgagccagcagaagagtacactgagcaaagtgaagttgaatcaacagagtatgtaaatagacagttcatggcagaaacacagttcaccagtggtgaaaaggagcaggtagatgagtggacagttgaaacggttgaggtggtaaattcactccagcagcaacctcaggctgcatccccttcagtaccagagccccactctttgactccagtggctcaggcagatccccttgtgagaagacagcgagtacaagaccttatggcacaaatgcagggtccctataatttcatacaggattcaatgctggattttgaaaatcagacacttgatcctgccattgtatctgcacagcctatgaatccaacacaaaacatggacatgccccagctggtttgccctccagttcattctgaatctagacttgctcagcctaatcaagttcctgtacaaccagaagcgacacaggttcctttggtatcatccacaagtgaggggtacacagcatctcaacccttgtaccagccttctcatgctacagagcaacgaccacagaaggaaccaattgatcagattcaggcaacaatctctttaaatacagaccagactacagcatcatcatcccttcctgctgcgtctcagcctcaagtatttcaggctgggacaagcaaacctttacatagcagtggaatcaatgtaaatgcagctccattccaatccatgcaaacggtgttcaatatgaatgccccagttcctcctgttaatgaaccagaaactttaaaacagcaaaatcagtaccaggccagttataaccagagcttttctagtcagcctcaccaagtagaacaaacagagcttcagcaagaacagcttcaaacagtggttggcacttaccatggttccccagaccagtcccatcaagtgactggtaaccaccagcagcctcctcagcagaacactggatttccacgtagcaatcagccctattacaatagtcgtggtgtgtctcgtggaggctcccgtggtgctagaggcttgatgaatggataccggggccctgccaatggattcagaggaggatatgatggttaccgcccttcattctctaacactccaaacagtggttatacacagtctcagttcagtgctccccgggattactctggctatcaacgggatggatatcagcagaatttcaagcgaggctctgggcagagtggaccacggggagccccacgaggtcgtggagggcccccaagacccaacagagggatgccgcaaatgaacactcagcaagtgaattaatctgattcacaggattatgtttaatcgccaaaaacacactggccagtgtaccataatatgttaccagaagagttattatctatttgttctccctttcaggaaacttattgtaaagggactgttttcatcccataaagacaggactacaattgtcagctttctattacctggatatggaaggaaactatttttactctgcatgttctgtcctaagcgtcatcttgagccttgcacatgatactcagattcctcacccttgcttaggagtaaaacaatatactttacagggtgataataatctccatagttatttgaagtggcttgaaaaaggcaagattgacttttatgacattggataaaatctacaaatcagccctcgagttattcaatgataactgacaaactaaattatttccctagaaaggaagatgaaaggagtggagtgtggtttggcagaacaactgcatttcacagcttttccagttaaattggagcactgaacgttcagatgcataccaaattatgcatgggtcctaatcacacatataaggctggctaccagctttgacacagcactgttcatctggccaaacaactgtggttaaaaacacatgtaaaatgctttttaacagctgatactgtataagacaaagccaagatgcaaaattaggctttgattggcactttttgaaaaatatgcaacaaatatgggatgtaatccggatggccgcttctgtacttaatgtgaaatatttagatacctttttgaacacttaacagtttctttgagacaatgacttttgtaaggattggtactatctatcattccttatgacatgtacattgtctgtcactaatccttggattttgctgtattgtcacctaaattggtacaggtactgatgaaaatctctagtggataatcataacactctcggtcacatgtttttccttcagcttgaaagcttttttttaaaaggaaaagataccaaatgcctgctgctaccacccttttcaattgctatcttttgaaaggcaccagtatgtgttttagattgatttccctgtttcagggaaatcacggacagtagtttcagttctgatggtataagcaaaacaaataaaacgtttataaaagttgtatcttgaaacactggtgttcaacagctagcagcttatgtgattcaccccatgccacgttagtgtcacaaattttatggtttatctccagcaacatttctctagtacttgcacttattatcttttgtctaatttaaccttaactgaattctccgtttctcctggaggcatttatattcagtgataattccttcccttagatgcatagggagagtctctaaatttgatggaaatggacacttgagtagtgacttagccttatgtactctgttggaatttgtgctagcagtttgagcactagttctgtgtgcctatgaagttaatgctgcttattgtctcattctgacttcatggagaattaatcccacctttaagcaaaggctactaagttaatggtattttctgtgcagaaattaaattttattttcagcatttagcccaggaattcttccagtaggtgctcagctatttaaaaacaaaactattctcaaacattcatcattagacaactggagtttttgctggttttgtaacctaccaaaatggataggctgttgaacattccacattcaaaagttttgtagggtggtgggaaatgggggatcttcaatgtttattttaaaataaaataaaataagttcttgactttt

SEQ ID NO: 372954 - DNA, 4179 bp, Homo sapiens
  misc_feature (4096)..(4096): n is a, c, g, or t
  misc_feature (4102)..(4102): n is a, c, g, or t
cgggcagcccgagcggccgcgaaggcccccgctctccgcttctcccgcccctcgcgacccagagggctgctggctggctaagtccctcccgctcccggctctcgcctcactaggagcggctctcggtgcagcgggacagggcgaagcggcctgcgcccacggagcgcgcgacactgcccggaagggaccgccacccttgccccctcagctgcccactcgtgatttccagcggcctccgcgcgcgcacgatgccctcggccaccagccacagcgggagcggcagcaagtcgtccggaccgccaccgccgtcgggttcctccgggagtgaggcggccgcgggagccggggccgccgcgccggcttctcagcaccccgcaaccggcaccggcgctgtccagaccgaggccatgaagcagattctcggggtgatcgacaagaaacttcggaacctggagaagaaaaagggtaagcttgatgattaccaggaacgaatgaacaaaggggaaaggcttaatcaagatcagctggatgccgtttctaagtaccaggaagtcacaaataatttggagtttgcaaaagaattacagaggagtttcatggcactaagtcaagatattcagaaaacaataaagaagacagcacgtcgggagcagcttatgagagaagaagctgaacagaaacgtttaaaaactgtacttgagctacagtatgttttggacaaattgggagatgatgaagtgcggactgacctgaaacaaggtttgaatggagtgccaatattgtccgaagaggagttgtcattgttggatgaattctataagctagtagaccctgaacgggacatgagcttgaggttgaatgaacagtatgaacatgcctccattcacctgtgggacctgctggaagggaaggaaaaacctgtatgtggaaccacctataaagttctaaaggaaattgttgagcgtgtttttcagtcaaactactttgacagcacccacaaccaccagaatgggctgtgtgaggaagaagaggcagcctcagcacctgcagttgaagaccaggtacctgaagctgaacctgagccagcagaagagtacactgagcaaagtgaagttgaatcaacagagtatgtaaatagacagttcatggcagaaacacagttcaccagtggtgaaaaggagcaggtagatgagtggacagttgaaacggttgaggtggtaaattcactccagcagcaacctcaggctgcatccccttcagtaccagagccccactctttgactccagtggctcaggcagatccccttgtgagaagacagcgagtacaagaccttatggcacaaatgcagggtccctataatttcatacaggattcaatgctggattttgaaaatcagacacttgatcctgccattgtatctgcacagcctatgaatccaacacaaaacatggacatgccccagctggtttgccctccagttcattctgaatctagacttgctcagcctaatcaagttcctgtacaaccagaagcgacacaggttcctttggtatcatccacaagtgaggggtacacagcatctcaacccttgtaccagccttctcatgctacagagcaacgaccacagaaggaaccaattgatcagattcaggcaacaatctctttaaatacagaccagactacagcatcatcatcccttcctgctgcgtctcagcctcaagtatttcaggctgggacaagcaaacctttacatagcagtggaatcaatgtaaatgcagctccattccaatccatgcaaacggtgttcaatatgaatgccccagttcctcctgttaatgaaccagaaactttaaaacagcaaaatcagtaccaggccagttataaccagagcttttctagtcagcctcaccaagtagaacaaacagagcttcagcaagaacagcttcaaacagtggttggcacttaccatggttccccagaccagtcccatcaagtgactggtaaccaccagcagcctcctcagcagaacactggatttccacgtagcaatcagccctattacaatagtcgtggtgtgtctcgtggaggctcccgtggtgctagaggcttgatgaatggataccggggccctgccaatggattcagaggaggatatgatggttaccgcccttcattctctaacactccaaacagtggttatacacagtctcagttcagtgctccccgggattactctggctatcaacgggatggatatcagcagaatttcaagcgaggctctgggcagagtggaccacggggagccccacgaggtcgtggagggcccccaagacccaacagagggatgccgcaaatgaacactcagcaagtgaattaatctgattcacaggattatgtttaatcgccaaaaacacactggccagtgtaccataatatgttaccagaagagttattatctatttgttctccctttcaggaaacttattgtaaagggactgttttcatcccataaagacaggactacaattgtcagctttctattacctggatatggaaggaaactatttttactctgcatgttctgtcctaagcgtcatcttgagccttgcacatgatactcagattcctcacccttgcttaggagtaaaacaatatactttacagggtgataataatctccatagttatttgaagtggcttgaaaaaggcaagattgacttttatgacattggataaaatctacaaatcagccctcgagttattcaatgataactgacaaactaaattatttccctagaaaggaagatgaaaggagtggagtgtggtttggcagaacaactgcatttcacagcttttccagttaaattggagcactgaacgttcagatgcataccaaattatgcatgggtcctaatcacacatataaggctggctaccagctttgacacagcactgttcatctggccaaacaactgtggttaaaaacacatgtaaaatgctttttaacagctgatactgtataagacaaagccaagatgcaaaattaggctttgattggcactttttgaaaaatatgcaacaaatatgggatgtaatccggatggccgcttctgtacttaatgtgaaatatttagatacctttttgaacacttaacagtttctttgagacaatgacttttgtaaggattggtactatctatcattccttatgacatgtacattgtctgtcactaatccttggattttgctgtattgtcacctaaattggtacaggtactgatgaaaatctctagtggataatcataacactctcggtcacatgtttttccttcagcttgaaagcttttttttaaaaggaaaagataccaaatgcctgctgctaccacccttttcaattgctatcttttgaaaggcaccagtatgtgttttagattgatttccctgtttcagggaaatcacggacagtagtttcagttctgatggtataagcaaaacaaataaaacgtttataaaagttgtatcttgaaacactggtgttcaacagctagcagcttatgtgattcaccccatgccacgttagtgtcacaaattttatggtttatctccagcaacatttctctagtacttgcacttattatcttttgtctaatttaaccttaactgaattctccgtttctcctggaggcatttatattcagtgataattccttcccttagatgcatagggagagtctctaaatttgatggaaatggacacttgagtagtgacttagccttatgtactctgttggaatttgtgctagcagtttgagcactagttctgtgtgcctatgaagttaatgctgcttattgtctcattctgacttcatggagaattaatcccacctttaagcaaaggctactaagttaatggtattttctgtgcagaaattaaattttattttcagcatttagcccaggaattcttccagtaggtgctcagctatttaaaaacaaaactattctcaaacattcatcattagacaactggagttttgctgtttgaacctaccaatggttggtgtgacttccccttcaagttgtgggggggagggnttccgntttaaaaaaaattggtttaaaaaaagggggctttcggccgcgcccttgaaggcgagataagcgcgaagttactgggg

SEQ ID NO: 372955 - DNA, 4136 bp, Homo sapiens
cgggcagcccgagcggccgcgaaggcccccgctctccgcttctcccgcccctcgcgacccagagggctgctggctggctaagtccctcccgctcccggctctcgcctcactaggagcggctctcggtgcagcgggacagggcgaagcggcctgcgcccacggagcgcgcgacactgcccggaagggaccgccacccttgccccctcagctgcccactcgtgatttccagcggcctccgcgcgcgcacgatgccctcggccaccagccacagcgggagcggcagcaagtcgtccggaccgccaccgccgtcgggttcctccgggagtgaggcggccgcgggagccggggccgccgcgccggcttctcagcaccccgcaaccggcaccggcgctgtccagaccgaggccatgaagcagattctcggggtgatcgacaagaaacttcggaacctggagaagaaaaagggtaagcttgatgattaccaggaacgaatgaacaaaggggaaaggcttaatcaagatcagctggatgccgtttctaagtaccaggaagtcacaaataatttggagtttgcaaaagaattacagaggagtttcatggcactaagtcaagatattcagaaaacaataaagaagacagcacgtcgggagcagcttatgagagaagaagctgaacagaaacgtttaaaaactgtacttgagctacagtatgttttggacaaattgggagatgatgaagtgcggactgacctgaaacaaggtttgaatggagtgccaatattgtccgaagaggagttgtcattgttggatgaattctataagctagtagaccctgaacgggacatgagcttgaggttgaatgaacagtatgaacatgcctccattcacctgtgggacctgctggaagggaaggaaaaacctgtatgtggaaccacctataaagttctaaaggaaattgttgagcgtgtttttcagtcaaactactttgacagcacccacaaccaccagaatgggctgtgtgaggaagaagaggcagcctcagcacctgcagttgaagaccaggtacctgaagctgaacctgagccagcagaagagtacactgagcaaagtgaagttgaatcaacagagtatgtaaatagacagttcatggcagaaacacagttcaccagtggtgaaaaggagcaggtagatgagtggacagttgaaacggttgaggtggtaaattcactccagcagcaacctcaggctgcatccccttcagtaccagagccccactctttgactccagtggctcaggcagatccccttgtgagaagacagcgagtacaagaccttatggcacaaatgcagggtccctataatttcatacaggattcaatgctggattttgaaaatcagacacttgatcctgccattgtatctgcacagcctatgaatccaacacaaaacatggacatgccccagctggtttgccctccagttcattctgaatctagacttgctcagcctaatcaagttcctgtacaaccagaagcgacacaggttcctttggtatcatccacaagtgaggggtacacagcatctcaacccttgtaccagccttctcatgctacagagcaacgaccacagaaggaaccaattgatcagattcaggcaacaatctctttaaatacagaccagactacagcatcatcatcccttcctgctgcgtctcagcctcaagtatttcaggctgggacaagcaaacctttacatagcagtggaatcaatgtaaatgcagctccattccaatccatgcaaacggtgttcaatatgaatgccccagttcctcctgttaatgaaccagaaactttaaaacagcaaaatcagtaccaggccagttataaccagagcttttctagtcagcctcaccaagtagaacaaacagagcttcagcaagaacagcttcaaacagtggttggcacttaccatggttccccagaccagtcccatcaagtgactggtaaccaccagcagcctcctcagcagaacactggatttccacgtagcaatcagccctattacaatagtcgtggtgtgtctcgtggaggctcccgtggtgctagaggcttgatgaatggataccggggccctgccaatggattcagaggaggatatgatggttaccgcccttcattctctaacactccaaacagtggttatacacagtctcagttcagtgctccccgggattactctggctatcaacgggatggatatcagcagaatttcaagcgaggctctgggcagagtggaccacggggagccccacgaggtcgtggagggcccccaagacccaacagagggatgccgcaaatgaacactcagcaagtgaattaatctgattcacaggattatgtttaatcgccaaaaacacactggccagtgtaccataatatgttaccagaagagttattatctatttgttctccctttcaggaaacttattgtaaagggactgttttcatcccataaagacaggactacaattgtcagctttctattacctggatatggaaggaaactatttttactctgcatgttctgtcctaagcgtcatcttgagccttgcacatgatactcagattcctcacccttgcttaggagtaaaacaatatactttacagggtgataataatctccatagttatttgaagtggcttgaaaaaggcaagattgacttttatgacattggataaaatctacaaatcagccctcgagttattcaatgataactgacaaactaaattatttccctagaaaggaagatgaaaggagtggagtgtggtttggcagaacaactgcatttcacagcttttccagttaaattggagcactgaacgttcagatgcataccaaattatgcatgggtcctaatcacacatataaggctggctaccagctttgacacagcactgttcatctggccaaacaactgtggttaaaaacacatgtaaaatgctttttaacagctgatactgtataagacaaagccaagatgcaaaattaggctttgattggcactttttgaaaaatatgcaacaaatatgggatgtaatccggatggccgcttctgtacttaatgtgaaatatttagatacctttttgaacacttaacagtttctttgagacaatgacttttgtaaggattggtactatctatcattccttatgacatgtacattgtctgtcactaatccttggattttgctgtattgtcacctaaattggtacaggtactgatgaaaatctctagtggataatcataacactctcggtcacatgtttttccttcagcttgaaagcttttttttaaaaggaaaagataccaaatgcctgctgctaccacccttttcaattgctatcttttgaaaggcaccagtatgtgttttagattgatttccctgtttcagggaaatcacggacagtagtttcagttctgatggtataagcaaaacaaataaaacgtttataaaagttgtatcttgaaacactggtgttcaacagctagcagcttatgtgattcaccccatgccacgttagtgtcacaaattttatggtttatctccagcaacatttctctagtacttgcacttattatcttttgtctaatttaaccttaactgaattctccgtttctcctggaggcatttatattcagtgataattccttcccttagatgcatagggagagtctctaaatttgatggaaatggacacttgagtagtgacttagccttatgtactctgttggaatttgtgctagcagtttgagcactagttctgtgtgcctatgaagttaatgctgcttattgtctcattctgacttcatggagaattaatcccacctttaagcaaaggctactaagttaatggtattttctgtgcagaaattaaattttattttcagcatttagcccaggaattcttccagtaggtgctcagctatttaaaaacaaactgcgctggcatctgtatcacacagtcgtttgaagattattttacttcttctgttggccgggccctgactgctaactcgccttggaagataatcatgaaacaagacaaagaaagcattgaagcaatgaaggctaataa

SEQ ID NO: 372956 - DNA, 5436 bp, Homo sapiens
cgggcagcccgagcggccgcgaaggcccccgctctccgcttctcccgcccctcgcgacccagagggctgctggctggctaagtccctcccgctcccggctctcgcctcactaggagcggctctcggtgcagcgggacagggcgaagcggcctgcgcccacggagcgcgcgacactgcccggaagggaccgccacccttgccccctcagctgcccactcgtgatttccagcggcctccgcgcgcgcacgatgccctcggccaccagccacagcgggagcggcagcaagtcgtccggaccgccaccgccgtcgggttcctccgggagtgaggcggccgcgggagccggggccgccgcgccggcttctcagcaccccgcaaccggcaccggcgctgtccagaccgaggccatgaagcagattctcggggtgatcgacaagaaacttcggaacctggagaagaaaaagggtaagcttgatgattaccaggaacgaatgaacaaaggggaaaggcttaatcaagatcagctggatgccgtttctaagtaccaggaagtcacaaataatttggagtttgcaaaagaattacagaggagtttcatggcactaagtcaagatattcagaaaacaataaagaagacagcacgtcgggagcagcttatgagagaagaagctgaacagaaacgtttaaaaactgtacttgagctacagtatgttttggacaaattgggagatgatgaagtgcggactgacctgaaacaaggtttgaatggagtgccaatattgtccgaagaggagttgtcattgttggatgaattctataagctagtagaccctgaacgggacatgagcttgaggttgaatgaacagtatgaacatgcctccattcacctgtgggacctgctggaagggaaggaaaaacctgtatgtggaaccacctataaagttctaaaggaaattgttgagcgtgtttttcagtcaaactactttgacagcacccacaaccaccagaatgggctgtgtgaggaagaagaggcagcctcagcacctgcagttgaagaccaggtacctgaagctgaacctgagccagcagaagagtacactgagcaaagtgaagttgaatcaacagagtatgtaaatagacagttcatggcagaaacacagttcaccagtggtgaaaaggagcaggtagatgagtggacagttgaaacggttgaggtggtaaattcactccagcagcaacctcaggctgcatccccttcagtaccagagccccactctttgactccagtggctcaggcagatccccttgtgagaagacagcgagtacaagaccttatggcacaaatgcagggtccctataatttcatacaggattcaatgctggattttgaaaatcagacacttgatcctgccattgtatctgcacagcctatgaatccaacacaaaacatggacatgccccagctggtttgccctccagttcattctgaatctagacttgctcagcctaatcaagttcctgtacaaccagaagcgacacaggttcctttggtatcatccacaagtgaggggtacacagcatctcaacccttgtaccagccttctcatgctacagagcaacgaccacagaaggaaccaattgatcagattcaggcaacaatctctttaaatacagaccagactacagcatcatcatcccttcctgctgcgtctcagcctcaagtatttcaggctgggacaagcaaacctttacatagcagtggaatcaatgtaaatgcagctccattccaatccatgcaaacggtgttcaatatgaatgccccagttcctcctgttaatgaaccagaaactttaaaacagcaaaatcagtaccaggccagttataaccagagcttttctagtcagcctcaccaagtagaacaaacagagcttcagcaagaacagcttcaaacagtggttggcacttaccatggttccccagaccagtcccatcaagtgactggtaaccaccagcagcctcctcagcagaacactggatttccacgtagcaatcagccctattacaatagtcgtggtgtgtctcgtggaggctcccgtggtgctagaggcttgatgaatggataccggggccctgccaatggattcagaggaggatatgatggttaccgcccttcattctctaacactccaaacagtggttatacacagtctcagttcagtgctccccgggattactctggctatcaacgggatggatatcagcagaatttcaagcgaggctctgggcagagtggaccacggggagccccacgaggtaatattttgtggtggtgatcctagctcctaagtggagcttctgttctggccttggaagagctgttaatagtctgcatgttaggaatacatttatcctttccagacttgttgctagggattaaatgaaatgctctgtttctaaaacttaatcttggacccaaattttaatttttgaatgatttaattttccctgttactatataaactgtcttgaaaactagaacatattctcttctcagaaaaagtgtttttccaactgaaaattatttttcaggtcctaaaacctgctaaatgtttttaggaagtacttactgaaacatttttgtaagacatttttggaatgagattgaacatttatataaatttattattcctctttcatttttttgaaacatgcctattatattttagggccagacaccctttaatggccggataagccatagttctctgatttgagggaggttaaacatcaaacaggtttcctctattggccataacatgtataaaatgtgtgttaaggaggaattacaacgtactttgatttgaatactagtagaaactggccaggaaaaaggtacatttttctaaaaattaatggatcacttgggaattactgacttgactagaagtatcaaaggatgtttgcatgtgaatgtgggttatgttctttcccaccttgtagcatattcgatgaaagttgagttaactgatagctaaaaatctgttttaacagcatgtaaaaagttattttatctgttaaaagtcattatacagttttgaatgttatgtagtttctttttaacagtttaggtaataaggtctgttttcattctggtgcttttattaattttgatagtatgatgttacttactactgaaatgtaagctagagtgtacactagaatgtaagctccatgagagcaggtaccttgtctgtcttctctgctgtatctattcccaacgcttgatgatggtgcctggcacatagtaggcactcaataaatatttgttgaatgaatgaatgaatgagtactggtggaatactccattagctttactcttcttttagctaagagaacatgagcaaatttgcgcatgacaacttccaggacaggggaaacttgaacactgaagaattgacctcttaagcctaataatgtggtgacaggctgcccacatgcttcttgacttcagatgaaaatctgcttgaaggcaaaacaaataatatttgaaagaaaaatcaaatgccatttttgtcttctaggtcgtggagggcccccaagacccaacagagggatgccgcaaatgaacactcagcaagtgaattaatctgattcacaggattatgtttaatcgccaaaaacacactggccagtgtaccataatatgttaccagaagagttattatctatttgttctccctttcaggaaacttattgtaaagggactgttttcatcccataaagacaggactacaattgtcagctttctattacctggatatggaaggaaactatttttactctgcatgttctgtcctaagcgtcatcttgagccttgcacatgatactcagattcctcacccttgcttaggagtaaaacaatatactttacagggtgataataatctccatagttatttgaagtggcttgaaaaaggcaagattgacttttatgacattggataaaatctacaaatcagccctcgagttattcaatgataactgacaaactaaattatttccctagaaaggaagatgaaaggagtggagtgtggtttggcagaacaactgcatttcacagcttttccagttaaattggagcactgaacgttcagatgcataccaaattatgcatgggtcctaatcacacatataaggctggctaccagctttgacacagcactgttcatctggccaaacaactgtggttaaaaacacatgtaaaatgctttttaacagctgatactgtataagacaaagccaagatgcaaaattaggctttgattggcactttttgaaaaatatgcaacaaatatgggatgtaatccggatggccgcttctgtacttaatgtgaaatatttagatacctttttgaacacttaacagtttctttgagacaatgacttttgtaaggattggtactatctatcattccttatgacatgtacattgtctgtcactaatccttggattttgctgtattgtcacctaaattggtacaggtactgatgaaaatctctagtggataatcataacactctcggtcacatgtttttccttcagcttgaaagcttttttttaaaaggaaaagataccaaatgcctgctgctaccacccttttcaattgctatcttttgaaaggcaccagtatgtgttttagattgatttccctgtttcagggaaatcacggacagtagtttcagttctgatggtataagcaaaacaaataaaacgtttataaaagttgtatcttgaaacactggtgttcaacagctagcagcttatgtgattcaccccatgccacgttagtgtcacaaattttatggtttatctccagcaacatttctctagtacttgcacttattatcttttgtctaatttaaccttaactgaattctccgtttctcctggaggcatttatattcagtgataattccttcccttagatgcatagggagagtctctaaatttgatggaaatggacacttgagtagtgacttagccttatgtactctgttggaatttgtgctagcagtttgagcactagttctgtgtgcctatgaagttaatgctgcttattgtctcattctgacttcatggagaattaatcccacctttaagcaaaggctactaagttaatggtattttctgtgcagaaattaaattttattttcagcatttagcccaggaattcttccagtaggtgctcagctatttaaaaacaaaactattctcaaacattcatcattagacaactggagtttttgctggttttgtaacctaccaaaatggataggctgttgaacattccacattcaaaagttttgtagggtggtgggaaatgggggatcttcaatgtttattttaaaataaaataaaataagttcttgactttt

SEQ ID NO: 372957 - DNA, 4135 bp, Homo sapiens
cgggcagcccgagcggccgcgaaggcccccgctctccgcttctcccgcccctcgcgacccagagggctgctggctggctaagtccctcccgctcccggctctcgcctcactaggagcggctctcggtgcagcgggacagggcgaagcggcctgcgcccacggagcgcgcgacactgcccggaagggaccgccacccttgccccctcagctgcccactcgtgatttccagcggcctccgcgcgcgcacgatgccctcggccaccagccacagcgggagcggcagcaagtcgtccggaccgccaccgccgtcgggttcctccgggagtgaggcggccgcgggagccggggccgccgcgccggcttctcagcaccccgcaaccggcaccggcgctgtccagaccgaggccatgaagcagattctcggggtgatcgacaagaaacttcggaacctggagaagaaaaagggtaagcttgatgattaccaggaacgaatgaacaaaggggaaaggcttaatcaagatcagctggatgccgtttctaagtaccaggaagtcacaaataatttggagtttgcaaaagaattacagaggagtttcatggcactaagtcaagatattcagaaaacaataaagaagacagcacgtcgggagcagcttatgagagaagaagctgaacagaaacgtttaaaaactgtacttgagctacagtatgttttggacaaattgggagatgatgaagtgcggactgacctgaaacaaggtttgaatggagtgccaatattgtccgaagaggagttgtcattgttggatgaattctataagctagtagaccctgaacgggacatgagcttgaggttgaatgaacagtatgaacatgcctccattcacctgtgggacctgctggaagggaaggaaaaacctgtatgtggaaccacctataaagttctaaaggaaattgttgagcgtgtttttcagtcaaactactttgacagcacccacaaccaccagaatgggctgtgtgaggaagaagaggcagcctcagcacctgcagttgaagaccaggtacctgaagctgaacctgagccagcagaagagtacactgagcaaagtgaagttgaatcaacagagtatgtaaatagacagttcatggcagaaacacagttcaccagtggtgaaaaggagcaggtagatgagtggacagttgaaacggttgaggtggtaaattcactccagcagcaacctcaggctgcatccccttcagtaccagagccccactctttgactccagtggctcaggcagatccccttgtgagaagacagcgagtacaagaccttatggcacaaatgcagggtccctataatttcatacaggattcaatgctggattttgaaaatcagacacttgatcctgccattgtatctgcacagcctatgaatccaacacaaaacatggacatgccccagctggtttgccctccagttcattctgaatctagacttgctcagcctaatcaagttcctgtacaaccagaagcgacacaggttcctttggtatcatccacaagtgaggggtacacagcatctcaacccttgtaccagccttctcatgctacagagcaacgaccacagaaggaaccaattgatcagattcaggcaacaatctctttaaatacagaccagactacagcatcatcatcccttcctgctgcgtctcagcctcaagtatttcaggctgggacaagcaaacctttacatagcagtggaatcaatgtaaatgcagctccattccaatccatgcaaacggtgttcaatatgaatgccccagttcctcctgttaatgaaccagaaactttaaaacagcaaaatcagtaccaggccagttataaccagagcttttctagtcagcctcaccaagtagaacaaacagagcttcagcaagaacagcttcaaacagtggttggcacttaccatggttccccagaccagtcccatcaagtgactggtaaccaccagcagcctcctcagcagaacactggatttccacgtagcaatcagccctattacaatagtcgtggtgtgtctcgtggaggctcccgtggtgctagaggcttgatgaatggataccggggccctgccaatggattcagaggaggatatgatggttaccgcccttcattctctaacactccaaacagtggttatacacagtctcagttcagtgctccccgggattactctggctatcaacgggatggatatcagcagaatttcaagcgaggaggtcgtggagggcccccaagacccaacagagggatgccgcaaatgaacactcagcaagtgaattaatctgattcacaggattatgtttaatcgccaaaaacacactggccagtgtaccataatatgttaccagaagagttattatctatttgttctccctttcaggaaacttattgtaaagggactgttttcatcccataaagacaggactacaattgtcagctttctattacctggatatggaaggaaactatttttactctgcatgttctgtcctaagcgtcatcttgagccttgcacatgatactcagattcctcacccttgcttaggagtaaaacaatatactttacagggtgataataatctccatagttatttgaagtggcttgaaaaaggcaagattgacttttatgacattggataaaatctacaaatcagccctcgagttattcaatgataactgacaaactaaattatttccctagaaaggaagatgaaaggagtggagtgtggtttggcagaacaactgcatttcacagcttttccagttaaattggagcactgaacgttcagatgcataccaaattatgcatgggtcctaatcacacatataaggctggctaccagctttgacacagcactgttcatctggccaaacaactgtggttaaaaacacatgtaaaatgctttttaacagctgatactgtataagacaaagccaagatgcaaaattaggctttgattggcactttttgaaaaatatgcaacaaatatgggatgtaatccggatggccgcttctgtacttaatgtgaaatatttagatacctttttgaacacttaacagtttctttgagacaatgacttttgtaaggattggtactatctatcattccttatgacatgtacattgtctgtcactaatccttggattttgctgtattgtcacctaaattggtacaggtactgatgaaaatctctagtggataatcataacactctcggtcacatgtttttccttcagcttgaaagcttttttttaaaaggaaaagataccaaatgcctgctgctaccacccttttcaattgctatcttttgaaaggcaccagtatgtgttttagattgatttccctgtttcagggaaatcacggacagtagtttcagttctgatggtataagcaaaacaaataaaacgtttataaaagttgtatcttgaaacactggtgttcaacagctagcagcttatgtgattcaccccatgccacgttagtgtcacaaattttatggtttatctccagcaacatttctctagtacttgcacttattatcttttgtctaatttaaccttaactgaattctccgtttctcctggaggcatttatattcagtgataattccttcccttagatgcatagggagagtctctaaatttgatggaaatggacacttgagtagtgacttagccttatgtactctgttggaatttgtgctagcagtttgagcactagttctgtgtgcctatgaagttaatgctgcttattgtctcattctgacttcatggagaattaatcccacctttaagcaaaggctactaagttaatggtattttctgtgcagaaattaaattttattttcagcatttagcccaggaattcttccagtaggtgctcagctatttaaaaacaaaactattctcaaacattcatcattagacaactggagtttttgctggttttgtaacctaccaaaatggataggctgttgaacattccacattcaaaagttttgtagggtggtgggaaatgggggatcttcaatgtttattttaaaataaaataaaataagttcttgactttt

SEQ ID NO: 372958 - DNA, 4137 bp, Homo sapiens
cgggcagcccgagcggccgcgaaggcccccgctctccgcttctcccgcccctcgcgacccagagggctgctggctggctaagtccctcccgctcccggctctcgcctcactaggagcggctctcggtgcagcgggacagggcgaagcggcctgcgcccacggagcgcgcgacactgcccggaagggaccgccacccttgccccctcagctgcccactcgtgatttccagcggcctccgcgcgcgcacgatgccctcggccaccagccacagcgggagcggcagcaagtcgtccggaccgccaccgccgtcgggttcctccgggagtgaggcggccgcgggagccggggccgccgcgccggcttctcagcaccccgcaaccggcaccggcgctgtccagaccgaggccatgaagcagattctcggggtgatcgacaagaaacttcggaacctggagaagaaaaagggtaagcttgatgattaccaggaacgaatgaacaaaggggaaaggcttaatcaagatcagctggatgccgtttctaagtaccaggaagtcacaaataatttggagtttgcaaaagaattacagaggagtttcatggcactaagtcaagatattcagaaaacaataaagaagacagcacgtcgggagcagcttatgagagaagaagctgaacagaaacgtttaaaaactgtacttgagctacagtatgttttggacaaattgggagatgatgaagtgcggactgacctgaaacaaggtttgaatggagtgccaatattgtccgaagaggagttgtcattgttggatgaattctataagctagtagaccctgaacgggacatgagcttgaggttgaatgaacagtatgaacatgcctccattcacctgtgggacctgctggaagggaaggaaaaacctgtatgtggaaccacctataaagttctaaaggaaattgttgagcgtgtttttcagtcaaactactttgacagcacccacaaccaccagaatgggctgtgtgaggaagaagaggcagcctcagcacctgcagttgaagaccaggtacctgaagctgaacctgagccagcagaagagtacactgagcaaagtgaagttgaatcaacagagtatgtaaatagacagttcatggcagaaacacagttcaccagtggtgaaaaggagcaggtagatgagtggacagttgaaacggttgaggtggtaaattcactccagcagcaacctcaggctgcatccccttcagtaccagagccccactctttgactccagtggctcaggcagatccccttgtgagaagacagcgagtacaagaccttatggcacaaatgcagggtccctataatttcatacaggattcaatgctggattttgaaaatcagacacttgatcctgccattgtatctgcacagcctatgaatccaacacaaaacatggacatgccccagctggtttgccctccagttcattctgaatctagacttgctcagcctaatcaagttcctgtacaaccagaagcgacacaggttcctttggtatcatccacaagtgaggggtacacagcatctcaacccttgtaccagccttctcatgctacagagcaacgaccacagaaggaaccaattgatcagattcaggcaacaatctctttaaatacagaccagactacagcatcatcatcccttcctgctgcgtctcagcctcaagtatttcaggctgggacaagcaaacctttacatagcagtggaatcaatgtaaatgcagctccattccaatccatgcaaacggtgttcaatatgaatgccccagttcctcctgttaatgaaccagaaactttaaaacagcaaaatcagtaccaggccagttataaccagagcttttctagtcagcctcaccaagtagaacaaacagagcttcagcaagaacagcttcaaacagtggttggcacttaccatggttccccagaccagtcccatcaagtgactggtaaccaccagcagcctcctcagcagaacactggatttccacgtagcaatcagccctattacaatagtcgtggtgtgtctcgtggaggctcccgtggtgctagaggcttgatgaatggataccggggccctgccaatggattcagaggaggatatgatggttaccgcccttcattctctaacactccaaacagtggttatacacagtctcagttcagtgctccccgggattactctggctatcaacctctgggcagagtggaccacggggagccccacgaggtcgtggagggcccccaagacccaacagagggatgccgcaaatgaacactcagcaagtgaattaatctgattcacaggattatgtttaatcgccaaaaacacactggccagtgtaccataatatgttaccagaagagttattatctatttgttctccctttcaggaaacttattgtaaagggactgttttcatcccataaagacaggactacaattgtcagctttctattacctggatatggaaggaaactatttttactctgcatgttctgtcctaagcgtcatcttgagccttgcacatgatactcagattcctcacccttgcttaggagtaaaacaatatactttacagggtgataataatctccatagttatttgaagtggcttgaaaaaggcaagattgacttttatgacattggataaaatctacaaatcagccctcgagttattcaatgataactgacaaactaaattatttccctagaaaggaagatgaaaggagtggagtgtggtttggcagaacaactgcatttcacagcttttccagttaaattggagcactgaacgttcagatgcataccaaattatgcatgggtcctaatcacacatataaggctggctaccagctttgacacagcactgttcatctggccaaacaactgtggttaaaaacacatgtaaaatgctttttaacagctgatactgtataagacaaagccaagatgcaaaattaggctttgattggcactttttgaaaaatatgcaacaaatatgggatgtaatccggatggccgcttctgtacttaatgtgaaatatttagatacctttttgaacacttaacagtttctttgagacaatgacttttgtaaggattggtactatctatcattccttatgacatgtacattgtctgtcactaatccttggattttgctgtattgtcacctaaattggtacaggtactgatgaaaatctctagtggataatcataacactctcggtcacatgtttttccttcagcttgaaagcttttttttaaaaggaaaagataccaaatgcctgctgctaccacccttttcaattgctatcttttgaaaggcaccagtatgtgttttagattgatttccctgtttcagggaaatcacggacagtagtttcagttctgatggtataagcaaaacaaataaaacgtttataaaagttgtatcttgaaacactggtgttcaacagctagcagcttatgtgattcaccccatgccacgttagtgtcacaaattttatggtttatctccagcaacatttctctagtacttgcacttattatcttttgtctaatttaaccttaactgaattctccgtttctcctggaggcatttatattcagtgataattccttcccttagatgcatagggagagtctctaaatttgatggaaatggacacttgagtagtgacttagccttatgtactctgttggaatttgtgctagcagtttgagcactagttctgtgtgcctatgaagttaatgctgcttattgtctcattctgacttcatggagaattaatcccacctttaagcaaaggctactaagttaatggtattttctgtgcagaaattaaattttattttcagcatttagcccaggaattcttccagtaggtgctcagctatttaaaaacaaaactattctcaaacattcatcattagacaactggagtttttgctggttttgtaacctaccaaaatggataggctgttgaacattccacattcaaaagttttgtagggtggtgggaaatgggggatcttcaatgtttattttaaaataaaataaaataagttcttgactttt

SEQ ID NO: 372959 - DNA, 4114 bp, Homo sapiens
cgggcagcccgagcggccgcgaaggcccccgctctccgcttctcccgcccctcgcgacccagagggctgctggctggctaagtccctcccgctcccggctctcgcctcactaggagcggctctcggtgcagcgggacagggcgaagcggcctgcgcccacggagcgcgcgacactgcccggaagggaccgccacccttgccccctcagctgcccactcgtgatttccagcggcctccgcgcgcgcacgatgccctcggccaccagccacagcgggagcggcagcaagtcgtccggaccgccaccgccgtcgggttcctccgggagtgaggcggccgcgggagccggggccgccgcgccggcttctcagcaccccgcaaccggcaccggcgctgtccagaccgaggccatgaagcagattctcggggtgatcgacaagaaacttcggaacctggagaagaaaaagggtaagcttgatgattaccaggaacgaatgaacaaaggggaaaggcttaatcaagatcagctggatgccgtttctaagtaccaggaagtcacaaataatttggagtttgcaaaagaattacagaggagtttcatggcactaagtcaagatattcagaaaacaataaagaagacagcacgtcgggagcagcttatgagagaagaagctgaacagaaacgtttaaaaactgtacttgagctacagtatgttttggacaaattgggagatgatgaagtgcggactgacctgaaacaaggtttgaatggagtgccaatattgtccgaagaggagttgtcattgttggatgaattctataagctagtagaccctgaacgggacatgagcttgaggttgaatgaacagtatgaacatgcctccattcacctgtgggacctgctggaagggaaggaaaaacctgtatgtggaaccacctataaagttctaaaggaaattgttgagcgtgtttttcagtcaaactactttgacagcacccacaaccaccagaatgggctgtgtgaggaagaagaggcagcctcagcacctgcagttgaagaccaggtacctgaagctgaacctgagccagcagaagagtacactgagcaaagtgaagttgaatcaacagagtatgtaaatagacagttcatggcagaaacacagttcaccagtggtgaaaaggagcaggtagatgagtggacagttgaaacggttgaggtggtaaattcactccagcagcaacctcaggctgcatccccttcagtaccagagccccactctttgactccagtggctcaggcagatccccttgtgagaagacagcgagtacaagaccttatggcacaaatgcagggtccctataatttcatacaggattcaatgctggattttgaaaatcagacacttgatcctgccattgtatctgcacagcctatgaatccaacacaaaacatggacatgccccagctggtttgccctccagttcattctgaatctagacttgctcagcctaatcaagttcctgtacaaccagaagcgacacaggttcctttggtatcatccacaagtgaggggtacacagcatctcaacccttgtaccagccttctcatgctacagagcaacgaccacagaaggaaccaattgatcagattcaggcaacaatctctttaaatacagaccagactacagcatcatcatcccttcctgctgcgtctcagcctcaagtatttcaggctgggacaagcaaacctttacatagcagtggaatcaatgtaaatgcagctccattccaatccatgcaaacggtgttcaatatgaatgccccagttcctcctgttaatgaaccagaaactttaaaacagcaaaatcagtaccaggccagttataaccagagcttttctagtcagcctcaccaagtagaacaaacagagcttcagcaagaacagcttcaaacagtggttggcacttaccatggttccccagaccagtcccatcaagtgactggtaaccaccagcagcctcctcagcagaacactggatttccacgtagcaatcagccctattacaatagtcgtggtgtgtctcgtggaggctcccgtggtgctagaggcttgatgaatggataccggggccctgccaatggattcagaggaggatatgatggttaccgcccttcattctctaacactccaaacagtggttatacacagtctcagttcagtgctccccgggattactctggctatcaacgggatggatatcagcagaatttcaagcgaggctctgggcagagtggaccacggggagccccacgaggtcgtggagggcccccaagacccaacagagggatgccgcaaatgaacactcagcaagtgaattaatctgattcacaggattatgtttaatcgccaaaaacacactggccagtgtaccataatatgttaccagaagagttattatctatttgttctccctttcaggaaacttattgtaaagggactgttttcatcccataaagacaggactacaattgtcagctttctattacctggatatggaaggaaactatttttactctgcatgttctgtcctaagcgtcatcttgagccttgcacatgatactcagattcctcacccttgcttaggagtaaaacaatatactttacagggtgataataatctccatagttatttgaagtggcttgaaaaaggcaagattgacttttatgacattggattttccctagaaaggaagatgaaaggagtggagtgtggtttggcagaacaactgcatttcacagcttttccagttaaattggagcactgaacgttcagatgcataccaaattatgcatgggtcctaatcacacatataaggctggctaccagctttgacacagcactgttcatctggccaaacaactgtggttaaaaacacatgtaaaatgctttttaacagctgatactgtataagacaaagccaagatgcaaaattaggctttgattggcactttttgaaaaatatgcaacaaatatgggatgtaatccggatggccgcttctgtacttaatgtgaaatatttagatacctttttgaacacttaacagtttctttgagacaatgacttttgtaaggattggtactatctatcattccttatgacatgtacattgtctgtcactaatccttggattttgctgtattgtcacctaaattggtacaggtactgatgaaaatctctagtggataatcataacactctcggtcacatgtttttccttcagcttgaaagcttttttttaaaaggaaaagataccaaatgcctgctgctaccacccttttcaattgctatcttttgaaaggcaccagtatgtgttttagattgatttccctgtttcagggaaatcacggacagtagtttcagttctgatggtataagcaaaacaaataaaacgtttataaaagttgtatcttgaaacactggtgttcaacagctagcagcttatgtgattcaccccatgccacgttagtgtcacaaattttatggtttatctccagcaacatttctctagtacttgcacttattatcttttgtctaatttaaccttaactgaattctccgtttctcctggaggcatttatattcagtgataattccttcccttagatgcatagggagagtctctaaatttgatggaaatggacacttgagtagtgacttagccttatgtactctgttggaatttgtgctagcagtttgagcactagttctgtgtgcctatgaagttaatgctgcttattgtctcattctgacttcatggagaattaatcccacctttaagcaaaggctactaagttaatggtattttctgtgcagaaattaaattttattttcagcatttagcccaggaattcttccagtaggtgctcagctatttaaaaacaaaactattctcaaacattcatcattagacaactggagtttttgctggttttgtaacctaccaaaatggataggctgttgaacattccacattcaaaagttttgtagggtggtgggaaatgggggatcttcaatgtttattttaaaataaaataaaataagttcttgactttt

SEQ ID NO: 372960 - DNA, 4049 bp, Homo sapiens
cgggcagcccgagcggccgcgaaggcccccgctctccgcttctcccgcccctcgcgacccagagggctgctggctggctaagtccctcccgctcccggctctcgcctcactaggagcggctctcggtgcagcgggacagggcgaagcggcctgcgcccacggagcgcgcgacactgcccggaagggaccgccacccttgccccctcagctgcccactcgtgatttccagcggcctccgcgcgcgcacgatgccctcggccaccagccacagcgggagcggcagcaagtcgtccggaccgccaccgccgtcgggttcctccgggagtgaggcggccgcgggagccggggccgccgcgccggcttctcagcaccccgcaaccggcaccggcgctgtccagaccgaggccatgaagcagattctcggggtgatcgacaagaaacttcggaacctggagaagaaaaagggtaagcttgatgattaccaggaacgaatgaacaaaggggaaaggcttaatcaagatcagctggatgccgtttctaagtaccaggaagtcacaaataatttggagtttgcaaaagaattacagaggagtttcatggcactaagtcaagatattcagaaaacaataaagaagacagcacgtcgggagcagcttatgagagaagaagctgaacagaaacgtttaaaaactgtacttgagctacagtatgttttggacaaattgggagatgatgaagtgcggactgacctgaaacaaggtttgaatggagtgccaatattgtccgaagaggagttgtcattgttggatgaattctataagctagtagaccctgaacgggacatgagcttgaggttgaatgaacagtatgaacatgcctccattcacctgtgggacctgctggaagggaaggaaaaacctgtatgtggaaccacctataaagttctaaaggaaattgttgagcgtgtttttcagtcaaactactttgacagcacccacaaccaccagaatgggctgtgtgaggaagaagaggcagcctcagcacctgcagttgaagaccaggtacctgaagctgaacctgagccagcagaagagtacactgagcaaagtgaagttgaatcaacagagtatgtaaatagacagttcatggcagaaacacagttcaccagtggtgaaaaggagcaggtagatgagtggacagttgaaacggttgaggtggtaaattcactccagcagcaacctcaggctgcatccccttcagtaccagagccccactctttgactccagtggctcaggcagatccccttgtgagaagacagcgagtacaagaccttatggcacaaatgcagggtccctataatttcatacaggattcaatgctggattttgaaaatcagacacttgatcctgccattgtatctgcacagcctatgaatccaacacaaaacatggacatgccccagctggtttgccctccagttcattctgaatctagacttgctcagcctaatcaagttcctgtacaaccagaagcgacacaggttcctttggtatcatccacaagtgaggggtacacagcatctcaacccttgtaccagccttctcatgctacagagcaacgaccacagaaggaaccaattgatcagattcaggcaacaatctctttaaatacagaccagactacagcatcatcatcccttcctgctgcgtctcagcctcaagtatttcaggctgggacaagcaaacctttacatagcagtggaatcaatgtaaatgcagctccattccaatccatgcaaacggtgttcaatatgaatgccccagttcctcctgttaatgaaccagaaactttaaaacagcaaaatcagtaccaggccagttataaccagagcttttctagtcagcctcaccaagtagaacaaacagagcttcagcaagaacagcttcaaacagtggttggcacttaccatggttccccagaccagtcccatcaagtgactggtaaccaccagcagcctcctcagcagaacactggatttccacgtagcaatcagccctattacaatagtcgtggtgctagaggcttgatgaatggataccggggccctgccaatggattcagaggaggatatgatggttaccgcccttcattctctaacactccaaacagtggttatacacagtctcagttcagtgctccccgggattactctggctatcaacgggatgccgcaaatgaacactcagcaagtgaattaatctgattcacaggattatgtttaatcgccaaaaacacactggccagtgtaccataatatgttaccagaagagttattatctatttgttctccctttcaggaaacttattgtaaagggactgttttcatcccataaagacaggactacaattgtcagctttctattacctggatatggaaggaaactatttttactctgcatgttctgtcctaagcgtcatcttgagccttgcacatgatactcagattcctcacccttgcttaggagtaaaacaatatactttacagggtgataataatctccatagttatttgaagtggcttgaaaaaggcaagattgacttttatgacattggataaaatctacaaatcagccctcgagttattcaatgataactgacaaactaaattatttccctagaaaggaagatgaaaggagtggagtgtggtttggcagaacaactgcatttcacagcttttccagttaaattggagcactgaacgttcagatgcataccaaattatgcatgggtcctaatcacacatataaggctggctaccagctttgacacagcactgttcatctggccaaacaactgtggttaaaaacacatgtaaaatgctttttaacagctgatactgtataagacaaagccaagatgcaaaattaggctttgattggcactttttgaaaaatatgcaacaaatatgggatgtaatccggatggccgcttctgtacttaatgtgaaatatttagatacctttttgaacacttaacagtttctttgagacaatgacttttgtaaggattggtactatctatcattccttatgacatgtacattgtctgtcactaatccttggattttgctgtattgtcacctaaattggtacaggtactgatgaaaatctctagtggataatcataacactctcggtcacatgtttttccttcagcttgaaagcttttttttaaaaggaaaagataccaaatgcctgctgctaccacccttttcaattgctatcttttgaaaggcaccagtatgtgttttagattgatttccctgtttcagggaaatcacggacagtagtttcagttctgatggtataagcaaaacaaataaaacgtttataaaagttgtatcttgaaacactggtgttcaacagctagcagcttatgtgattcaccccatgccacgttagtgtcacaaattttatggtttatctccagcaacatttctctagtacttgcacttattatcttttgtctaatttaaccttaactgaattctccgtttctcctggaggcatttatattcagtgataattccttcccttagatgcatagggagagtctctaaatttgatggaaatggacacttgagtagtgacttagccttatgtactctgttggaatttgtgctagcagtttgagcactagttctgtgtgcctatgaagttaatgctgcttattgtctcattctgacttcatggagaattaatcccacctttaagcaaaggctactaagttaatggtattttctgtgcagaaattaaattttattttcagcatttagcccaggaattcttccagtaggtgctcagctatttaaaaacaaaactattctcaaacattcatcattagacaactggagtttttgctggttttgtaacctaccaaaatggataggctgttgaacattccacattcaaaagttttgtagggtggtgggaaatgggggatcttcaatgtttattttaaaataaaataaaataagttcttgactttt

SEQ ID NO: 372961 - DNA, 4114 bp, Homo sapiens
cgggcagcccgagcggccgcgaaggcccccgctctccgcttctcccgcccctcgcgacccagagggctgctggctggctaagtccctcccgctcccggctctcgcctcactaggagcggctctcggtgcagcgggacagggcgaagcggcctgcgcccacggagcgcgcgacactgcccggaagggaccgccacccttgccccctcagctgcccactcgtgatttccagcggcctccgcgcgcgcacgatgccctcggccaccagccacagcgggagcggcagcaagtcgtccggaccgccaccgccgtcgggttcctccgggagtgaggcggccgcgggagccggggccgccgcgccggcttctcagcaccccgcaaccggcaccggcgctgtccagaccgaggccatgaagcagattctcggggtgatcgacaagaaacttcggaacctggagaagaaaaagggtaagcttgatgattaccaggaacgaatgaacaaaggggaaaggcttaatcaagatcagctggatgccgtttctaagtaccaggaagtcacaaataatttggagtttgcaaaagaattacagaggagtttcatggcactaagtcaagatattcagaaaacaataaagaagacagcacgtcgggagcagcttatgagagaagaagctgaacagaaacgtttaaaaactgtacttgagctacagtatgttttggacaaattgggagatgatgaagtgcggactgacctgaaacaaggtttgaatggagtgccaatattgtccgaagaggagttgtcattgttggatgaattctataagctagtagaccctgaacgggacatgagcttgaggttgaatgaacagtatgaacatgcctccattcacctgtgggacctgctggaagggaaggaaaaacctgtatgtggaaccacctataaagttctaaaggaaattgttgagcgtgtttttcagtcaaactactttgacagcacccacaaccaccagaatgggctgtgtgaggaagaagaggcagcctcagcacctgcagttgaagaccaggtacctgaagctgaacctgagccagcagaagagtacactgagcaaagtgaagttgaatcaacagagtatgtaaatagacagttcatggcagaaacacagttcaccagtggtgaaaaggagcaggtagatgagtggacagttgaaacggttgaggtggtaaattcactccagcagcaacctcaggctgcatccccttcagtaccagagccccactctttgactccagtggctcaggcagatccccttgtgagaagacagcgagtacaagaccttatggcacaaatgcagggtccctataatttcatacaggattcaatgctggattttgaaaatcagacacttgatcctgccattgtatctgcacagcctatgaatccaacacaaaacatggacatgccccagctggtttgccctccagttcattctgaatctagacttgctcagcctaatcaagttcctgtacaaccagaagcgacacaggttcctttggtatcatccacaagtgaggggtacacagcatctcaacccttgtaccagccttctcatgctacagagcaacgaccacagaaggaaccaattgatcagattcaggcaacaatctctttaaatacagaccagactacagcatcatcatcccttcctgctgcgtctcagcctcaagtatttcaggctgggacaagcaaacctttacatagcagtggaatcaatgtaaatgcagctccattccaatccatgcaaacggtgttcaatatgaatgccccagttcctcctgttaatgaaccagaaactttaaaacagcaaaatcagtaccaggccagttataaccagagcttttctagtcagcctcaccaagtagaacaaacagagcttcagcaagaacagcttcaaacagtggttggcacttaccatggttccccagaccagtcccatcaagtgactggtaaccaccagcagcctcctcagcagaacactggatttccacgtagcaatcagccctattacaatagtcgtggtgtgtctcgtggaggctcccgtggtgctagaggcttgatgaatggataccggggccctgccaatggattcagaggaggatatgatggttaccgcccttcattctctaacactccaaacagtggttatacacagtctcagttcagtgctccccgggattactctggctatcaacgggatggatatcagcagaatttcaagcgaggctctgggcagagtggaccacggggagccccacgaggtcgtggagggcccccaagacccaacagagggatgccgcaaatgaacactcagcaagtgaattaatctgattcacaggattatgtttaatcgccaaaaacacactggccagtgtaccataatatgttaccagaagagttattatctatttgttctccctttcaggaaacttattgtaaagggactgttttcatcccataaagacaggactacaattgtcagctttctattacctggatatggaaggaaactatttttactctgcatgttctgtcctaagcgtcatcttgagccttgcacatgatactcagattcctcacccttgcttaggagtaaaacaatatactttacagggtgataataatctccatagttatttgaagtggcttgaaaaaggcaagattgacttttatgacattggataaaatctacaaatcagccctcgagttattcaatgataactgacaaactaaattatttccctagaaaggaagatgaaaggagtggagtgtggtttggcagaacaactgcatttcacagcttttccagttaaattggagcactgaacgttcagatgcataccaaattatgcatgggtcctaatcacacatataaggctggctaccagctttgacacagcactgttcatctggccaaacaactgtggttaaaaacacatgtaaaatgctttttaacagctgatactgtataagacaaagccaagatgcaaaattaggctttgattggcactttttgaaaaatatgcaacaaatatgggatgtaatccggatggccgcttctgtacttaatgtgaaatatttagatacctttttgaacacttaacagtttctttgagacaatgacttttgtaaggattggtactatctatcattccttatgacatgtacattgtctgtcactaatccttggattttgctgtattgtcacctaaattggtacaggtactgatgaaaatctctagtggataatcataacactctcggtcacatgtttttccttcagcttgaaagcttttttttaaaaggaaaagataccaaatgcctgctgctaccacccttttcaattgctatcttttgaaaggcaccagtatgtgttttagattgatttccctgtttcagggaaatcacggacagtagtttcagttctgatggtataagcaaaacaaataaaacgtttatccccatgccacgttagtgtcacaaattttatggtttatctccagcaacatttctctagtacttgcacttattatcttttgtctaatttaaccttaactgaattctccgtttctcctggaggcatttatattcagtgataattccttcccttagatgcatagggagagtctctaaatttgatggaaatggacacttgagtagtgacttagccttatgtactctgttggaatttgtgctagcagtttgagcactagttctgtgtgcctatgaagttaatgctgcttattgtctcattctgacttcatggagaattaatcccacctttaagcaaaggctactaagttaatggtattttctgtgcagaaattaaattttattttcagcatttagcccaggaattcttccagtaggtgctcagctatttaaaaacaaaactattctcaaacattcatcattagacaactggagtttttgctggttttgtaacctaccaaaatggataggctgttgaacattccacattcaaaagttttgtagggtggtgggaaatgggggatcttcaatgtttattttaaaataaaataaaataagttcttgactttt

SEQ ID NO: 372962 - DNA, 4107 bp, Homo sapiens
cgggcagcccgagcggccgcgaaggcccccgctctccgcttctcccgcccctcgcgacccagagggctgctggctggctaagtccctcccgctcccggctctcgcctcactaggagcggctctcggtgcagcgggacagggcgaagcggcctgcgcccacggagcgcgcgacactgcccggaagggaccgccacccttgccccctcagctgcccactcgtgatttccagcggcctccgcgcgcgcacgatgccctcggccaccagccacagcgggagcggcagcaagtcgtccggaccgccaccgccgtcgggttcctccgggagtgaggcggccgcgggagccggggccgccgcgccggcttctcagcaccccgcaaccggcaccggcgctgtccagaccgaggccatgaagcagattctcggggtgatcgacaagaaacttcggaacctggagaagaaaaagggtaagcttgatgattaccaggaacgaatgaacaaaggggaaaggcttaatcaagatcagctggatgccgtttctaagtaccaggaagtcacaaataatttggagtttgcaaaagaattacagaggagtttcatggcactaagtcaagatattcagaaaacaataaagaagacagcacgtcgggagcagcttatgagagaagaagctgaacagaaacgtttaaaaactgtacttgagctacagtatgttttggacaaattgggagatgatgaagtgcggactgacctgaaacaaggtttgaatggagtgccaatattgtccgaagaggagttgtcattgttggatgaattctataagctagtagaccctgaacgggacatgagcttgaggttgaatgaacagtatgaacatgcctccattcacctgtgggacctgctggaagggaaggaaaaacctgtatgtggaaccacctataaagttctaaaggaaattgttgagcgtgtttttcagtcaaactactttgacagcacccacaaccaccagaatgggctgtgtgaggaagaagaggcagcctcagcacctgcagttgaagaccaggtacctgaagctgaacctgagccagcagaagagtacactgagcaaagtgaagttgaatcaacagagtatgtaaatagacagttcatggcagaaacacagttcaccagtggtgaaaaggagcaggtagatgagtggacagttgaaacggttgaggtggtaaattcactccagcagcaacctcaggctgcatccccttcagtaccagagccccactctttgactccagtggctcaggcagatccccttgtgagaagacagcgagtacaagaccttatggcacaaatgcagggtccctataatttcatacaggattcaatgctggattttgaaaatcagacacttgatcctgccattgtatctgcacagcctatgaatccaacacaaaacatggacatgccccagctggtttgccctccagttcattctgaatctagacttgctcagcctaatcaagttcctgtacaaccagaagcgacacaggttcctttggtatcatccacaagtgaggggtacacagcatctcaacccttgtaccagccttctcatgctacagagcaacgaccacagaaggaaccaattgatcagattcaggcaacaatctctttaaatacagaccagactacagcatcatcatcccttcctgctgcgtctcagcctcaagtatttcaggctgggacaagcaaacctttacatagcagtggaatcaatgtaaatgcagctccattccaatccatgcaaacggtgttcaatatgaatgccccagttcctcctgttaatgaaccagaaactttaaaacagcaaaatcagtaccaggccagttataaccagagcttttctagtcagcctcaccaagtagaacaaacagagcttcagcaagaacagcttcaaacagtggttggcacttaccatggttccccagaccagtcccatcaagtgactggtaaccaccagcagcctcctcagcagaacactggatttccacgtagcaatcagccctattacaatagtcgtggtgtgtctcgtggaggctcccgtggtgctagaggcttgatgaatggataccggggccctgccaatggattcagaggaggatatgatggttaccgcccttcattctctaacactccaaacagtggttatacacagtctcagttcagtgctccccgggattactctggctatcaacgggatggatatcagcagaatttcaagcgaggctctgggcagagtggaccacggggagccccacgaggtcgtggagggcccccaagacccaacagagggatgccgcaaatgaacactcagcaagtgaattaatctgattcacaggattatgtttaatcgccaaaaacacactggccagtgtaccataatatgttaccagaagagttattatctatttgttctccctttcaggaaacttattgtaaagggactgttttcatcccataaagacaggactacaattgtcagctttctattacctggatatggaaggaaactatttttactctgcatgttctgtcctaagcgtcatcttgagccttgcacatgatactcagattcctcacccttgcttaggagtaaaacaatatactttacagggtgataataatctccatagttatttgaagtggcttgaaaaaggcaagattgacttttatgacattggataaaatctacaaatcagccctcgagttattcaatgataactgacaaactaaattatttccctagaaaggaagatgaaaggagtggagtgtggtttggcagaacaactgcatttcacagcttttccagttaaattggagcactgaacgttcagatgcataccaaattatgcatgggtcctaatcacacatataaggctggctaccagctttgacacagcactgttcatctggccaaacaactgtggttaaaaacacatgtaaaatgctttttaacagctgatactgtataagacaaagccaagatgcttaggctttgattggcactttttgatgtatttagatacctttttgaacacttaacagtttctttgagacaatgacttttgtaaggattggtactatctatcattccttatgacatgtacattgtctgtcactaatccttggattttgctgtattgtcacctaaattggtacaggtactgatgaaaatctctagtggataatcataacactctcggtcacatgtttttccttcagcttgaaagcttttttttaaaaggaaaagataccaaatgcctgctgctaccacccttttcaattgctatcttttgaaaggcaccagtatgtgttttagattgatttccctgtttcagggaaatcacggacagtagtttcagttctgatggtataagcaaaacaaataaaacgtttataaaagttgtatcttgaaacactggtgttcaacagctagcagcttatgtgattcaccccatgccacgttagtgtcacaaattttatggtttatctccagcaacatttctctagtacttgcacttattatcttttgtctaatttaaccttaactgaattctccgtttctcctggaggcatttatattcagtgataattccttcccttagatgcatagggagagtctctaaatttgatggaaatggacacttgagtagtgacttagccttatgtactctgttggaatttgtgctagcagtttgagcactagttctgtgtgcctatgaagttaatgctgcttattgtctcattctgacttcatggagaattaatcccacctttaagcaaaggctactaagttaatggtattttctgtgcagaaattaaattttattttcagcatttagcccaggaattcttccagtaggtgctcagctatttaaaaacaaaactattctcaaacattcatcattagacaactggagtttttgctggttttgtaacctaccaaaatggataggctgttgaacattccacattcaaaagttttgtagggtggtgggaaatgggggatcttcaatgtttattttaaaataaaataaaataagttcttgactttt

SEQ ID NO: 372963 - DNA, 4113 bp, Homo sapiens
cgggcagcccgagcggccgcgaaggcccccgctctccgcttctcccgcccctcgcgacccagagggctgctggctggctaagtccctcccgctcccggctctcgcctcactaggagcggctctcggtgcagcgggacagggcgaagcggcctgcgcccacggagcgcgcgacactgcccggaagggaccgccacccttgccccctcagctgcccactcgtgatttccagcggcctccgcgcgcgcacgatgccctcggccaccagccacagcgggagcggcagcaagtcgtccggaccgccaccgccgtcgggttcctccgggagtgaggcggccgcgggagccggggccgccgcgccggcttctcagcaccccgcaaccggcaccggcgctgtccagaccgaggccatgaagcagattctcggggtgatcgacaagaaacttcggaacctggagaagaaaaagggtaagcttgatgattaccaggaacgaatgaacaaaggggaaaggcttaatcaagatcagctggatgccgtttctaagtaccaggaagtcacaaataatttggagtttgcaaaagaattacagaggagtttcatggcactaagtcaagatattcagaaaacaataaagaagacagcacgtcgggagcagcttatgagagaagaagctgaacagaaacgtttaaaaactgtacttgagctacagtatgttttggacaaattgggagatgatgaagtgcggactgacctgaaacaaggtttgaatggagtgccaatattgtccgaagaggagttgtcattgttggatgaattctataagctagtagaccctgaacgggacatgagcttgaggttgaatgaacagtatgaacatgcctccattcacctgtgggacctgctggaagggaaggaaaaacctgtatgtggaaccacctataaagttctaaaggaaattgttgagcgtgtttttcagtcaaactactttgacagcacccacaaccaccagaatgggctgtgtgaggaagaagaggcagcctcagcacctgcagttgaagaccaggtacctgaagctgaacctgagccagcagaagagtacactgagcaaagtgaagttgaatcaacagagtatgtaaatagacagttcatggcagaaacacagttcaccagtggtgaaaaggagcaggtagatgagtggacagttgaaacggttgaggtggtaaattcactccagcagcaacctcaggctgcatccccttcagtaccagagccccactctttgactccagtggctcaggcagatccccttgtgagaagacagcgagtacaagaccttatggcacaaatgcagggtccctataatttcatacaggattcaatgctggattttgaaaatcagacacttgatcctgccattgtatctgcacagcctatgaatccaacacaaaacatggacatgccccagctggtttgccctccagttcattctgaatctagacttgctcagcctaatcaagttcctgtacaaccagaagcgacacaggttcctttggtatcatccacaagtgaggggtacacagcatctcaacccttgtaccagccttctcatgctacagagcaacgaccacagaaggaaccaattgatcagattcaggcaacaatctctttaaatacagaccagactacagcatcatcatcccttcctgctgcgtctcagcctcaagtatttcaggctgggacaagcaaacctttacatagcagtggaatcaatgtaaatgcagctccattccaatccatgcaaacggtgttcaatatgaatgccccagttcctcctgttaatgaaccagaaactttaaaacagcaaaatcagtaccaggccagttataaccagagcttttctagtcagcctcaccaagtagaacaaacagagcttcagcaagaacagcttcaaacagtggttggcacttaccatggttccccagaccagtcccatcaagtgactggtaaccaccagcagcctcctcagcagaacactggatttccacgtagcaatcagccctattacaatagtcgtggtgtgtctcgtggaggctcccgtggtgctagaggcttgatgaatggataccggggccctgccaatggattcagaggaggatatgatggttaccgcccttcattctctaacactccaaacagtggttatacacagtctcagttcagtgctccccgggattactctggctatcaacgggatggatatcagcagaatttcaagcgaggctctgggcagagtggaccacggggagccccacgaggtcgtggagggcccccaagacccaacagagggatgccgcaaatgaacactcagcaagtgaattaatctgattcacaggattatgtttaatcgccaaaaacacactggccagtgtaccataatatgttaccagaagagttattatctatttgttctccctttcaggaaacttattgtaaagggactgttttcatcccataaagacaggactacaattgtcagctttctattacctggatatggaaggaaactatttttactctgcatgttctgtcctaagcgtcatcttgagccttgcacatgatactcagattcctcacccttgcttaggagtaaaacaatatactttacagggtgataataatctccatagttatttgaagtggcttgaaaaaggcaagattgacttttatgacattggataaaatctacaaatcagccctcgagttattcaatgataactgacaaactaaattatttccctagaaaggaagatgaaaggagtggagtgtggtttggcagaacaactgcatttcacagcttttccagttaaattggagcactgaacgttcagatgcataccaaattatgcatgggtcctaatcacacatataaggctggctaccagctttgacacagcactgttcatctggccaaacaactgtggttaaaaacacatgtaaaatgctttttaacagctgatactgtataagacaaagccaagatgcaaaattaggctttgattggcactttttgaaaaatatgcaacaaatatgggatgtaatccggatggccgcttctgtacttaatgtgaaatatttagatacctttttgaacacttaacagtttctttgagacaatgacttttgtaaggattggtactatctatcattccttatgacatgtacattgtctgtcactaatccttggattttgctgtattgtcacctaaattggtacaggtactgatgaaaatctctagtggataatcataacactctcggtcacatgtttttccttcagcttgaaagctttttttttgaaaggcaccagtatgtgttttagattgatttccctgtttcagggaaatcacggacagtagtttcagttctgatggtataagcaaaacaaataaaacgtttataaaagttgtatcttgaaacactggtgttcaacagctagcagcttatgtgattcaccccatgccacgttagtgtcacaaattttatggtttatctccagcaacatttctctagtacttgcacttattatcttttgtctaatttaaccttaactgaattctccgtttctcctggaggcatttatattcagtgataattccttcccttagatgcatagggagagtctctaaatttgatggaaatggacacttgagtagtgacttagccttatgtactctgttggaatttgtgctagcagtttgagcactagttctgtgtgcctatgaagttaatgctgcttattgtctcattctgacttcatggagaattaatcccacctttaagcaaaggctactaagttaatggtattttctgtgcagaaattaaattttattttcagcatttagcccaggaattcttccagtaggtgctcagctatttaaaaacaaaactattctcaaacattcatcattagacaactggagtttttgctggttttgtaacctaccaaaatggataggctgttgaacattccacattcaaaagttttgtagggtggtgggaaatgggggatcttcaatgtttattttaaaataaaataaaataagttcttgactttt

SEQ ID NO: 372964 - DNA, 3589 bp, Homo sapiens
cgggcagcccgagcggccgcgaaggcccccgctctccgcttctcccgcccctcgcgacccagagggctgctggctggctaagtccctcccgctcccggctctcgcctcactaggagcggctctcggtgcagcgggacagggcgaagcggcctgcgcccacggagcgcgcgacactgcccggaagggaccgccacccttgccccctcagctgcccactcgtgatttccagcggcctccgcgcgcgcacgatgccctcggccaccagccacagcgggagcggcagcaagtcgtccggaccgccaccgccgtcgggttcctccgggagtgaggcggccgcgggagccggggccgccgcgccggcttctcagcaccccgcaaccggcaccggcgctgtccagaccgaggccatgaagcagattctcggggtgatcgacaagaaacttcggaacctggagaagaaaaagggtaagcttgatgattaccaggaacgaatgaacaaaggggaaaggcttaatcaagatcagctggatgccgtttctaagtaccaggaagtcacaaataatttggagtttgcaaaagaattacagaggagtttcatggcactaagtcaagatattcagaaaacaataaagaagacagcacgtcgggagcagcttatgagagaagaagctgaacagaaacgtttaaaaactgtacttgagctacagtatgttttggacaaattgggagatgatgaagtgcggactgacctgaaacaaggtttgaatggagtgccaatattgtccgaagaggagttgtcattgttggatgaattctataagctagtagaccctgaacgggacatgagcttgaggttgaatgaacagtatgaacatgcctccattcacctgtgggacctgctggaagggaaggaaaaacctgtatgtggaaccacctataaagttctaaaggaaattgttgagcgtgtttttcagtcaaactactttgacagcacccacaaccaccagaatgggctgtgtgaggaagaagaggcagcctcagcacctgcagttgaagaccaggtacctgaagctgaacctgagccagcagaagagtacactgagcaaagtgaagttgaatcaacagagtatgtaaatagacagttcatggcagaaacacagttcaccagtggtgaaaaggagcaggtagatgagtggacagttgaaacggttgaggtggtaaattcactccagcagcaacctcaggctgcatccccttcagtaccagagccccactctttgactccagtggctcaggcagatccccttgtgagaagacagcgagtacaagaccttatggcacaaatgcagggtccctataatttcatacaggattcaatgctggattttgaaaatcagacacttgatcctgccattgtatctgcacagcctatgaatccaacacaaaacatggacatgccccagctggtttgccctccagttcattctgaatctagacttgctcagcctaatcaagttcctgtacaaccagaagcgacacaggttcctttggtatcatccacaagtgaggggtacacagcatctcaacccttgtaccagccttctcatgctacagagcaacgaccacagaaggaaccaattgatcagattcaggcaacaatctctttaaatacagaccagactacagcatcatcatcccttcctgctgcgtctcagcctcaagtatttcaggctgggacaagcaaacctttacatagcagtggaatcaatgtaaatgcagctccattccaatccatgcaaacggtgttcaatatgaatgccccagttcctcctgttaatgaaccagtgtaccataatatgttaccagaagagttattatctatttgttctccctttcaggaaacttattgtaaagggactgttttcatcccataaagacaggactacaattgtcagctttctattacctggatatggaaggaaactatttttactctgcatgttctgtcctaagcgtcatcttgagccttgcacatgatactcagattcctcacccttgcttaggagtaaaacaatatactttacagggtgataataatctccatagttatttgaagtggcttgaaaaaggcaagattgacttttatgacattggataaaatctacaaatcagccctcgagttattcaatgataactgacaaactaaattatttccctagaaaggaagatgaaaggagtggagtgtggtttggcagaacaactgcatttcacagcttttccagttaaattggagcactgaacgttcagatgcataccaaattatgcatgggtcctaatcacacatataaggctggctaccagctttgacacagcactgttcatctggccaaacaactgtggttaaaaacacatgtaaaatgctttttaacagctgatactgtataagacaaagccaagatgcaaaattaggctttgattggcactttttgaaaaatatgcaacaaatatgggatgtaatccggatggccgcttctgtacttaatgtgaaatatttagatacctttttgaacacttaacagtttctttgagacaatgacttttgtaaggattggtactatctatcattccttatgacatgtacattgtctgtcactaatccttggattttgctgtattgtcacctaaattggtacaggtactgatgaaaatctctagtggataatcataacactctcggtcacatgtttttccttcagcttgaaagcttttttttaaaaggaaaagataccaaatgcctgctgctaccacccttttcaattgctatcttttgaaaggcaccagtatgtgttttagattgatttccctgtttcagggaaatcacggacagtagtttcagttctgatggtataagcaaaacaaataaaacgtttataaaagttgtatcttgaaacactggtgttcaacagctagcagcttatgtgattcaccccatgccacgttagtgtcacaaattttatggtttatctccagcaacatttctctagtacttgcacttattatcttttgtctaatttaaccttaactgaattctccgtttctcctggaggcatttatattcagtgataattccttcccttagatgcatagggagagtctctaaatttgatggaaatggacacttgagtagtgacttagccttatgtactctgttggaatttgtgctagcagtttgagcactagttctgtgtgcctatgaagttaatgctgcttattgtctcattctgacttcatggagaattaatcccacctttaagcaaaggctactaagttaatggtattttctgtgcagaaattaaattttattttcagcatttagcccaggaattcttccagtaggtgctcagctatttaaaaacaaaactattctcaaacattcatcattagacaactggagtttttgctggttttgtaacctaccaaaatggataggctgttgaacattccacattcaaaagttttgtagggtggtgggaaatgggggatcttcaatgtttattttaaaataaaataaaataagttcttgactttt

SEQ ID NO: 372965 - DNA, 1723 bp, Homo sapiens
ggtccggacgcgtgggtcgacccacgcgtccggaaacttattgtaaagggactgttttcatcccataaagacaggactacaattgtcagctttctattacctggatatggaaggaaactatttttactctgcatgttctgtcctaagcgtcatcttgagccttgcacatgatactcagattcctcacccttgcttaggagtaaaacaatatactttacagggtgataataatctccatagttatttgaagtggcttgaaaaaggcaagattgacttttatgacattggataaaatctacaaatcagccctcgagttattcaatgataactgacaaactaaattatttccctagaaaggaagatgaaaggagtggagtgtggtttggcagaacaactgcatttcacagcttttccagttaaattggagcactgaacgttcagatgcataccaaattatgcatgggtcctaatcacacatataaggctggctaccagctttgacacagcactgttcatctggccaaacaactgtggttaaaaacacatgtaaaatgctttttaacagctgatactgtataagacaaagccaagatgcaaaattaggctttgattggcactttttgaaaaatatgcaacaaatatgggatgtaatccggatggccgcttctgtacttaatgtgaaatatttagatacctttttgaacacttaacagtttctttgagacaatgacttttgtaaggattggtactatctatcattccttatgacatgtacattgtctgtcactaatccttggattttgctgtattgtcacctaaattggtacaggtactgatgaaaatctctagtggataatcataacactctcggtcacatgtttttccttcagcttgaaagcttttttttaaaaggaaaagataccaaatgcctgctgctaccacccttttcaattgctatcttttgaaaggcaccagtatgtgttttagattgatttccctgtttcagggaaatcacggacagtagtttcagttctgatggtataagcaaaacaaataaaacgtttataaaagttgtatcttgaaacactggtgttcaacagctagcagcttatgtgattcaccccatgccacgttagtgtcacaaattttatggtttatctccagcaacatttctctagtacttgcacttattatcttttgtctaatttaaccttaactgaattctccgtttctcctggaggcatttatattcagtgataattccttcccttagatgcatagggagagtctctaaatttgatggaaatggacacttgagtagtgacttagccttatgtactctgttggaatttgtgctagcagtttgagcactagttctgtgtgcctatgaagttaatgctgcttattgtctcattctgacttcatggagaattaatcccacctttaagcaaaggctactaagttaatggtattttctgtgcagaaattaaattttattttcagcatttagcccaggaattcttccagtaggtgctcagctatttaaaaacaaaactattctcaaacattcatcattagacaactggagtttttgctggttttgtaacctaccaaaatggataggctgttgaacattccacattcaaaagttttgtagggtggtgggaaatgggggatcttcaatgtttattttaaaataaaataaaataagttcttgactttt

SEQ ID NO: 372966 - DNA, 3148 bp, Homo sapiens
cgggcagcccgagcggccgcgaaggcccccgctctccgcttctcccgcccctcgcgacccagagggctgctggctggctaagtccctcccgctcccggctctcgcctcactaggagcggctctcggtgcagcgggacagggcgaagcggcctgcgcccacggagcgcgcgacactgcccggaagggaccgccacccttgccccctcagctgcccactcgtgatttccagcggcctccgcgcgcgcacgatgccctcggccaccagccacagcgggagcggcagcaagtcgtccggaccgccaccgccgtcgggttcctccgggagtgaggcggccgcgggagccggggccgccgcgccggcttctcagcaccccgcaaccggcaccggcgctgtccagaccgaggccatgaagcagattctcggggtgatcgacaagaaacttcggaacctggagaagaaaaagggtaagcttgatgattaccaggaacgaatgaacaaaggggaaaggcttaatcaagatcagctggatgccgtttctaagtaccaggaagtcacaaataatttggagtttgcaaaagaattacagaggagtttcatggcactaagtcaagatattcagaaaacaataaagaagacagcacgtcgggagcagcttatgagagaagaagctgaacagaaacgtttaaaaactgtacttgagctacagtatgttttggacaaattgggagatgatgaagtgcggactgacctgaaacaaggtttgaatggagtgccaatattgtccgaagaggagttgtcattgttggatgaattctataagctagtagaccctgaacgggacatgagcttgaggttgaatgaacagtatgaacatgcctccattcacctgtgggacctgctggaagggaaggaaaaacctgtatgtggaaccacctataaagttctaaaggaaattgttgagcgtgtttttcagtcaaactactttgacagcacccacaaccaccagaatgggctgtgtgaggaagaagaggcagcctcagcacctgcagttgaagaccaggtacctgaagctgaacctgagccagcagaagagtacactgagcaaagtgaagttgaatcaacagagtatgtaaatagacagttcatggcagaaacacagttcaccagtggtgaaaaggagcaggtagatgagtggacagttgaaacggttgaggtggtaaattcactccagcagcaacctcaggctgcatccccttcagtaccagagccccactctttgactccagtggctcaggcagatccccttgtgagaagacagcgagtacaagaccttatggcacaaatgcagggtccctataatttcatacaggattcaatgctggattttgaaaatcagacacttgatcctgccattgtatctgcacagcctatgaatccaacacaaaacatggacatgccccagctggtttgccctccagttcattctgaatctagacttgctcagcctaatcaagttcctgtacaaccagaagcgacacaggttcctttggtatcatccacaagtgaggggtacacagcatctcaacccttgtaccagccttctcatgctacagagcaacgaccacagaaggaaccaattgatcagattcaggcaacaatctctttaaatacagaccagactacagcatcatcatcccttcctgctgcgtctcagcctcaagtatttcaggctgggacaagcaaacctttacatagcagtggaatcaatgtaaatgcagctccattccaatccatgcaaacggtgttcaatatgaatgccccagttcctcctgttaatgaaccagaaactttaaaacagcaaaatcagtaccaggccagttataaccagagcttttctagtcagcctcaccaagtagaacaaacagagcttcagcaagaacagcttcaaacagtggttggcacttaccatggttccccagaccagtcccatcaagtgactggtaaccaccagcagcctcctcagcagaacactggatttccacgtagcaatcagccctattacaatagtcgtggtgtgtctcgtggaggctcccgtggtgctagaggcttgatgaatggataccggggccctgccaatggattcagaggaggatatgatggttaccgcccttcattctctaacactccaaacagtggttatacacagtctcagttcagtgctccccgggattactctggctatcaacgggatggatatcagcagaatttcaagcgaggctctgggcagagtggaccacggggagccccacgaggtcgtggagggcccccaagacccaacagagggatgccgcaaatgaacactcagcaagtgaattaatctgattcacaggattatgtttaatcgccaaaaacacactggccagtgtaccataatatgttaccagaagagttattatctatttgttctccctttcaggaaacttattgtaaagggactgttttcatcccataaagacaggactacaattgtcagctttctattacctggatatggaaggaaactatttttactctgcatgttctgtcctaagcgtcatcttgagccttgcacatgatactcagattcctcacccttgcttaggagtaaaacaatatactttacagggtgataataatctccatagttatttgaagtggcttgaaaaaggcaagattgacttttatgacattggataaaatctacaaatcagccctcgagttattcaatgataactgacaaactaaattatttccctagaaaggaagatgaaaggagtggagtgtggtttggcagaacaactgcatttcacagcttttccagttaaattggagcactgaacgttcagatgcataccaaattatgcatgggtcctaatcacacatataaggctggctaccagctttgacacagcactgttcatctggccaaacaactgtggttaaaaacacatgtaaaatgctttttaacagctgatactgtataagacaaagccaagatgcacacaaggcacagatagcacatgatgacgaatacgcgcccgtatcccatccaaggactgaggaactgagctgtcagagaagtgtaatatgtacataacttattcgttc

SEQ ID NO: 372967 - DNA, 3559 bp, Homo sapiens
cgggcagcccgagcggccgcgaaggcccccgctctccgcttctcccgcccctcgcgacccagagggctgctggctggctaagtccctcccgctcccggctctcgcctcactaggagcggctctcggtgcagcgggacagggcgaagcggcctgcgcccacggagcgcgcgacactgcccggaagggaccgccacccttgccccctcagctgcccactcgtgatttccagcggcctccgcgcgcgcacgatgccctcggccaccagccacagcgggagcggcagcaagtcgtccggaccgccaccgccgtcgggttcctccgggagtgaggcggccgcgggagccggggccgccgcgccggcttctcagcaccccgcaaccggcaccggcgctgtccagaccgaggccatgaagcagattctcggggtgatcgacaagaaacttcggaacctggagaagaaaaagggtaagcttgatgattaccaggaacgaatgaacaaaggggaaaggcttaatcaagatcagctggatgccgtttctaagtaccaggaagtcacaaataatttggagtttgcaaaagaattacagaggagtttcatggcactaagtcaagatattcagaaaacaataaagaagacagcacgtcgggagcagcttatgagagaagaagctgaacagaaacgtttaaaaactgtacttgagctacagtatgttttggacaaattgggagatgatgaagtgcggactgacctgaaacaaggtttgaatggagtgccaatattgtccgaagaggagttgtcattgttggatgaattctataagctagtagaccctgaacgggacatgagcttgaggttgaatgaacagtatgaacatgcctccattcacctgtgggacctgctggaagggaaggaaaaacctgtatgtggaaccacctataaagttctaaaggaaattgttgagcgtgtttttcagtcaaactactttgacagcacccacaaccaccagaatgggctgtgtgaggaagaagaggcagcctcagcacctgcagttgaagaccaggtacctgaagctgaacctgagccagcagaagagtacactgagcaaagtgaagttgaatcaacagagtatgtaaatagacagttcatggcagaaacacagttcaccagtggtgaaaaggagcaggtagatgagtggacagttgaaacggttgaggtggtaaattcactccagcagcaacctcaggctgcatccccttcagtaccagagccccactctttgactccagtggctcaggcagatccccttgtgagaagacagcgagtacaagaccttatggcacaaatgcagggtccctataatttcatacaggattcaatgctggattttgaaaatcagacacttgatcctgccattgtatctgcacagcctatgaatccaacacaaaacatggacatgccccagctggtttgccctccagttcattctgaatctagacttgctcagcctaatcaagttcctgtacaaccagaagcgacacaggttcctttggtatcatccacaagtgaggggtacacagcatctcaacccttgtaccagccttctcatgctacagagcaacgaccacagaaggaaccaattgatcagattcaggcaacaatctctttaaatacagaccagactacagcatcatcatcccttcctgctgcgtctcagcctcaagtatttcaggctgggacaagcaaacctttacatagcagtggaatcaatgtaaatgcagctccattccaatccatgcaaacggtgttcaatatgaatgccccagttcctcctgttaatgaaccagaaactttaaaacagcaaaatcagtaccaggccagttataaccagagcttttctagtcagcctcaccaagtagaacaaacagagcttcagcaagaacagcttcaaacagtggttggcacttaccatggttccccagaccagtcccatcaagtgactggtaaccaccagcagcctcctcagcagaacactggatttccacgtagcaatcagccctattacaatagtcgtggtgtgtctcgtggaggctcccgtggtgctagaggcttgatgaatggataccggggccctgccaatggattcagaggaggatatgatggttaccgcccttcattctctaacactccaaacagtggttatacacagtctcagttcagtgctccccgggattactctggctatcaacgggatggatatcagcagaatttcaagcgaggctctgggcagagtggaccacggggagccccacgaggtaatattttgtggtggtgatcctagctcctaagtggagcttctgttctggccttggaagagctgttaatagtctgcatgttaggaatacatttatcctttccagacttgttgctagggattaaatgaaatgctctgtttctaaaacttaatcttggacccaaattttaatttttgaatgatttaattttccctgttactatataaactgtcttgaaaactagaacatattctcttctcagaaaaagtgtttttccaactgaaaattatttttcaggtcctaaaacctgctaaatgtttttaggaagtacttactgaaacatttttgtaagacatttttggaatgagattgaacatttatataaatttattattcctctttcatttttttgaaacatgcctattatattttagggccagacaccctttaatggccggataagccatagttaacatttagagaaccatttagaagtgatagaactaatggaatttgcaatgccttttggacctctattagtgatataaatatcaagttatttctgacttttaaacaaaactcccaaattcctaacttattgagctatacttaaaaaaaattacaggtttagagagttttttgtttttcttttactgttggaaaactacttcccattttggcaggaagttaacctatttaacaattagagctagcatttcatgtagtctgaaattctaaatggttctctgatttgagggaggttaaacatcaaacaggtttcctctattggccataacatgtataaaatgtgtgttaaggaggaattacaacgtactttgatttgaatactagtagaaactggccaggaaaaaggtacatttttctaaaaattaatggatcacttgggaattactgacttgactagaagtatcaaaggatgtttgcatgtgaatgtgggttatgttctttcccaccttgtagcatattcgatgaaagttgagttaactgatagctaaaaatctgttttaacagcatgtaaaaagttattttatctgttaaaagtcattatacagttttgaatgttatgtagtttctttttaacagtttaggtaataaggtctgttttcattctggtgcttttattaattttgatagtatgatgttacttactactgaaatgtaagctagagtgtacactagaatgtaagctccatgagacaaggtacctgctctcatggtcgacgcggccgcgaatttagtagtagta

SEQ ID NO: 372968 - DNA, 854 bp, Homo sapiens
ggactagttctagatcgcgagcggccgcccttttttttaaaaggaaaagataccaaatgcctgctgctaccacccttttcaattgctatcttttgaaaggcaccagtatgtgttttagattgatttccctgtttcagggaaatcacggacagtagtttcagttctgatggtataagcaaaacaaataaaacgtttataaaagttgtatcttgaaacactggtgttcaacagctagcagcttatgtgattcaccccatgccacgttagtgtcacaaattttatggtttatctccagcaacatttctctagtacttgcacttattatcttttgtctaatttaaccttaactgaattctccgtttctcctggaggcatttatattcagtgataattccttcccttagatgcatagggagagtctctaaatttgatggaaatggacacttgagtagtgacttagccttatgtactctgttggaatttgtgctagcagtttgagcactagttctgtgtgcctatgaagttaatgctgcttattgtctcattctgacttcatggagaattaatcccacctttaagcaaaggctactaagttaatggtattttctgtgcagaaattaaattttattttcagcatttagcccaggaattcttccagtaggtgctcagctatttaaaaacaaaactattctcaaacattcatcattagacaactggagtttttgctggttttgtaacctaccaaaatggataggctgttgaacattccacattcaaaagttttgtagggtggtgggaaatgggggatcttcaatgtttattttaaaataaaataaaataagttcttgactttt

SEQ ID NO: 372969 - DNA, 2446 bp, Homo sapiens
  misc_feature (2408)..(2408): n is a, c, g, or t
  misc_feature (2415)..(2415): n is a, c, g, or t
  misc_feature (2433)..(2433): n is a, c, g, or t
  misc_feature (2443)..(2443): n is a, c, g, or t
cgggcagcccgagcggccgcgaaggcccccgctctccgcttctcccgcccctcgcgacccagagggctgctggctggctaagtccctcccgctcccggctctcgcctcactaggagcggctctcggtgcagcgggacagggcgaagcggcctgcgcccacggagcgcgcgacactgcccggaagggaccgccacccttgccccctcagctgcccactcgtgatttccagcggcctccgcgcgcgcacgatgccctcggccaccagccacagcgggagcggcagcaagtcgtccggaccgccaccgccgtcgggttcctccgggagtgaggcggccgcgggagccggggccgccgcgccggcttctcagcaccccgcaaccggcaccggcgctgtccagaccgaggccatgaagcagattctcggggtgatcgacaagaaacttcggaacctggagaagaaaaagggtaagcttgatgattaccaggaacgaatgaacaaaggggaaaggcttaatcaagatcagctggatgccgtttctaagtaccaggaagtcacaaataatttggagtttgcaaaagaattacagaggagtttcatggcactaagtcaagatattcagaaaacaataaagaagacagcacgtcgggagcagcttatgagagaagaagctgaacagaaacgtttaaaaactgtacttgagctacagtatgttttggacaaattgggagatgatgaagtgcggactgacctgaaacaaggtttgaatggagtgccaatattgtccgaagaggagttgtcattgttggatgaattctataagctagtagaccctgaacgggacatgagcttgaggttgaatgaacagtatgaacatgcctccattcacctgtgggacctgctggaagggaaggaaaaacctgtatgtggaaccacctataaagttctaaaggaaattgttgagcgtgtttttcagtcaaactactttgacagcacccacaaccaccagaatgggctgtgtgaggaagaagaggcagcctcagcacctgcagttgaagaccaggtacctgaagctgaacctgagccagcagaagagtacactgagcaaagtgaagttgaatcaacagagtatgtaaatagacagttcatggcagaaacacagttcaccagtggtgaaaaggagcaggtagatgagtggacagttgaaacggttgaggtggtaaattcactccagcagcaacctcaggctgcatccccttcagtaccagagccccactctttgactccagtggctcaggcagatccccttgtgagaagacagcgagtacaagaccttatggcacaaatgcagggtccctataatttcatacaggattcaatgctggattttgaaaatcagacacttgatcctgccattgtatctgcacagcctatgaatccaacacaaaacatggacatgccccagctggtttgccctccagttcattctgaatctagacttgctcagcctaatcaagttcctgtacaaccagaagcgacacaggttcctttggtatcatccacaagtgaggggtacacagcatctcaacccttgtaccagccttctcatgctacagagcaacgaccacagaaggaaccaattgatcagattcaggcaacaatctctttaaatacagaccagactacagcatcatcatcccttcctgctgcgtctcagcctcaagtatttcaggctgggacaagcaaacctttacatagcagtggaatcaatgtaaatgcagctccattccaatccatgcaaacggtgttcaatatgaatgccccagttcctcctgttaatgaaccagaaactttaaaacagcaaaatcagtaccaggccagttataaccagagcttttctagtcagcctcaccaagtagaacaaacagagcttcagcaagaacagcttcaaacagtggttggcacttaccatggttccccagaccagtcccatcaagtgactggtaaccaccagcagcctcctcagcagaacactggatttccacgtagcaatcagccctattacaatagtcgtggtgtgtctcgtggaggctcccgtggtgctagaggcttgatgaatggataccggggccctgccaatggattcagaggaggatatgatggttaccgcccttcattctctaacactccaaacagtggttatacacagtctcagttcagtgctccccgggattactctggctatcaacctctgggcagagtggaccacggggagccccacgaggtcgtggagggcccccaagacccaacagagggatgccgcaaatgaacactcagcaagtgaattaatctgattcacaggattatgtttaatcgccaaaaacacactggccagttgttaccattaatntgtttanccaagaaagaatttattnatcctatttngtt

SEQ ID NO: 372970 - DNA, 2030 bp, Homo sapiens
tgccgaagatgcaccttatgtcaatactgaaatcaggtaacaacgtgttacacgcaaaatgaccagtacaacgttcatatgaccagagatatagtccggcggagagttactattaataaaatctgagcattttctcttttatgatctctagtatataagtatacatctatatttatctgtatatatatgtgcttgctttttgagcatccactccagatagccggcgatatcctctagagctcgcccatgcgtgcgcatgccatgccttgcgctggggcctgacgcccacctcgtcggcgacggggataaccctgggggtattttctgtgcagaaattaaattttattttcagcatttagcccaggaattcttccagtaggtgctcagctatttaaaaacaaaactattctcaaacattcatcattagacaactggagtttttgctggttttgtaacctaccaaaatggataggctgttgaacattccacattcaaaagttttgtagggtggtgggaaatgggggatcttcaatgtttattttaaaataaaataaaataagttcttgacttttctcatgtgtggttgtggtacatcatattggaagggttaacctgttactttggcaaatgagtatttttttgctagcacctccccttgcgtgctttaaatgacatctgcctgggatgtaccacaaccatatgttacctgtatcttaggggaatggataaaatatttgtggtttactgggtaatccctagatgatgtatgcttgcagtcctatataaaactaaatttgctatctgtgtagaaaataatttcatgacatttacaatcaggactgaagtaagttcttcacacagtgacctctgaatcagtttcagagaagggatgggggagaaaatgccttctaggttttgaacttctatgcattagtgcagatgttgtgaatgtgtaaaggtgttcatagtttgactgtttctatgtatgttttttcaaagaattgttcctttttttgaactataatttttctttttttggttattttaccatcacagtttaaatgtatatcttttatgtctctactcagaccatatttttaaaggggtgcctcattatggggcagagaacttttcaataagtctcattaagatctgaatcttggttctaagcattctgtataatatgtgattgcttgtcctagctgcagaaggccttttgtttggtcaaatgcatattttagcagagtttcaaggaaatgattgtcacacatgtcactgtagcctcttggtgtagcaagctcacatacaaaatacttttgtatatgcataatataaatcatctcatgtggatatgaaacttcttttttaaaacttaaaaaggtagaatgttattgattaccttgattagggcagttttatttccagatcctaataattcctaaaaaatatggaaaagttttttttcaatcattgtaccttgatattaaaacaaatatcctttaagtatttctaatcagttagcttctacagttcttttgtctccttttatatgcagctcttacgtgggagacttttccacttaaaggagacatagaatgtgtgcttattctcagaaggttcattaactgaggtgatgagttaacaactagttgagcagtcagcttcctaagtgttttaggacatttgttcattatattttccgtcatataactagaggaagtggaatgcagataagtgccgaattcaaacccttcattttatgtttaagctcctgaatctgcattccacttgggttgtttttaagcattctaaattttagttgattataagttagatttcacagaatcagtattgcccttgatcttgtcctttttatggagttaacggggaggaagacccctcaggaaaacgaaagtaaattgttaaggctcatcttcatacctttttccattttgaatcctacaaaaatactgcaaaagactagtgaatgtttaaaattacactagattaaataatatgaaagtcaggtt

SEQ ID NO: 372971 - DNA, 1220 bp, Homo sapiens
cgggcagcccgagcggccgcgaaggcccccgctctccgcttctcccgcccctcgcgacccagagggctgctggctggctaagtccctcccgctcccggctctcgcctcactaggagcggctctcggtgcagcgggacagggcgaagcggcctgcgcccacggagcgcgcgacactgcccggaagggaccgccacccttgccccctcagctgcccactcgtgatttccagcggcctccgcgcgcgcacgatgccctcggccaccagccacagcgggagcggcagcaagtcgtccggaccgccaccgccgtcgggttcctccgggagtgaggcggccgcgggagccggggccgccgcgccggcttctcagcaccccgcaaccggcaccggcgctgtccagaccgaggccatgaagcagattctcggggtgatcgacaagaaacttcggaacctggagaagaaaaaacctgactcggacgcggcactgtaccccaggcctctttattactcttccgctgtgggtccggctttttggcctttaggagtgggacatgtgagggtgggggcctgtcgtcaggacttcactgtatggtgcccttctttccgtctctgaggcccgatttctctgacgagggcccaaaatgaagaggtccctgcgcggggggctccgggttcaaccgaccgcctcgtggagttggggcggcctgcgtcctgcagccttggggtctgtccgctcggttaccatgcactcgagacctgtcgagcgtcccctcttcttccgtaggagagaagtgtgtttagaatcttaaggtagaactgcctttccggcaggcccattttgaatgggtcttcgatttgctacccccgcgcccatgcgatgggctcccctgcgtttccctctttgtttcaattgtttaggtgtccccccgagcctcaggctcagctcaatcgcgagatgattttctgcagcgactttttgttcctaggggactgtgaaggggcgggggactgccacgatttagattcgttgggggctgggtcctggggagactggagaggatggctgggactcggggcacatggagagagcgtctaacatggcggcggctgcggggagagggaagcgctttactggagctgcattgtgagcacaaagcgaaagcagagggggagggcagagaccaggcagccgccccgactggcctccttaggcccccctcta

SEQ ID NO: 372972 - DNA, 1244 bp, Homo sapiens
agcgggatctcggcacgctcggtatgtctccttgactggccgtcgttttacaacctcccgatgcttctctctccttggcctgaaatgccctcggcacatccactggaagggattccggaccacgccgtcgggttcctccgggagtgaggcggccgcgggagccggggccgccgcgccggcttctcagcaccccgcaaccggcaccggcgctgtccagaccgaggccatgaagcagattctcggggtgatcgacaagaaacttcggaacctggagaagaaaaaggtgccaggagttggcggggaagggaggggtggctgcggccgggctctgcggcccctccgaccctggtcgctggagccttcgcttcttttcgtctcgggagcgttactaggtcccctcctcccaccccctggcccacacgccccgtctccacgttcagcgggagcttcgtgcccagaaaacgggctcttggaagaggcacttgtcacctgactcggacgcggcactgtaccccaggcctctttattactcttccgctgtgggtccggctttttggcctttaggagtgggacatgtgagggtgggggcctgtcgtcaggacttcactgtatggtgcccttctttccgtctctgaggcccgatttctctgacgagggcccaaaatgaagaggtccctgcgcggggggctccgggttcaaccgaccgcctcgtggagttggggcggcctgcgtcctgcagccttggggtctgtccgctcggttaccatgcactcgagacctgtcgagcgtcccctcttcttccgtaggagagaagtgtgtttagaatcttaaggtagaactgcctttccggcaggcccattttgaatgggtcttcgatttgctacccccgcgcccatgcgatgggctcccctgcgtttccctctttgtttcaattgtttaggtgtccccccgagcctcaggctcagctcaatcgcgagatgattttctgcagcgactttttgttcctaggggactgtgaaggggcgggggactgccacgatttagattcgttgggggctgggtcctggggagactggagaggatggctgggactcggggcacatggagagagcgtctaacatggcggcggctgcggggagagggaagcgctttactggagctgcattgtgagcacaaagcgaaagcagagggggagggcagagaccaggcagccgccccgactggcctccttaggcccccctcta

SEQ ID NO: 372973 - DNA, 606 bp, Homo sapiens
acagaacaaggtgtagctgtgataaactgatactgaagtgtctaaaagattaaggaagaattctgtattgagtgttagactgaaagaatagatgggtaagcattttttaaaaagtaccttttcaatactaactagcttgtcttttagggatggatatcagcagaatttcaagcgaggctctgggcagagtggaccacggggagccccacgaggtaatattttgtggtggtgatcctagctcctaagtggagcttctgttctggccttggaagagctgttaatagtctgcatgttaggaatacatttatcctttccagacttgttgctagggattaaatgaaatgctctgtttctaaaacttaatcttggacccaaattttaatttttgaatgatttaattttccctgttactatataaactgtcttgaaaactagaacatattctcttctcagaaaaagtgtttttccaactgaaaattatttttcaggtcctaaaacctgctaaatgtttttaggaagtacttactgaaacatttttgtaagacatttttggaatgagattgaacatttatataaatttattattcctctttcatttttttgaaa

SEQ ID NO: 372974 - DNA, 1036 bp, Homo sapiens
cgggcagcccgagcggccgcgaaggcccccgctctccgcttctcccgcccctcgcgacccagagggctgctggctggctaagtccctcccgctcccggctctcgcctcactaggagcggctctcggtgcagcgggacagggcgaagcggcctgcgcccacggagcgcgcgacactgcccggaagggaccgccacccttgccccctcagctgcccactcgtgatttccagcggcctccgcgcgcgcacgatgccctcggccaccagccacagcgggagcggcagcaagtcgtccggaccgccaccgccgtcgggttcctccgggagtgaggcggccgcgggagccggggccgccgcgccggcttctcagcaccccgcaaccggcaccggcgctgtccagaccgaggccatgaagcagattctcggggtgatcgacaagaaacttcggaacctggagaagaaaaagggtaagcttgatgattaccaggaacgaatgaacaaaggggaaaggcttaatcaagatcagctggatgccgccggaaaggcgtttgggatgccaacgatgaggctgctgtcatttgtggtgttggctctatttgctgtcactcaagcagaggaaggagccaggcttttggttccaaatcactgctgaacagatacgccgtggagggacgagactgaccttgcagtacaacatctacaatgttggctcaagtgctgcattagaccgtggaactatctgatgattccttcctccagaagactttggcattgtggtctggatggtccatgtcaaatgggaccggattggccctgtagcattgtctccccactgtggtctgcgcctcttcaggctgtttttccacttcccttcggcacattttactggcagaggtggccgtgggttggtctcccaggccctggcgcggggactggccgcggttgacggggtcccctttggggggttggtgcgctccccgggcccgttggtgcccggaatgcccagaagttggggcgccccacaagctcagggccgtg

SEQ ID NO: 372975 - DNA, 5626 bp, Homo sapiens
cgggcagcccgagcggccgcgaaggcccccgctctccgcttctcccgcccctcgcgacccagagggctgctggctggctaagtccctcccgctcccggctctcgcctcactaggagcggctctcggtgcagcgggacagggcgaagcggcctgcgcccacggagcgcgcgacactgcccggaagggaccgccacccttgccccctcagctgcccactcgtgatttccagcggcctccgcgcgcgcacgatgccctcggccaccagccacagcgggagcggcagcaagtcgtccggaccgccaccgccgtcgggttcctccgggagtgaggcggccgcgggagccggggccgccgcgccggcttctcagcaccccgcaaccggcaccggcgctgtccagaccgaggccatgaagcagattctcggggtgatcgacaagaaacttcggaacctggagaagaaaaagggtaagcttgatgattaccaggaacgaatgaacaaaggggaaaggcttaatcaagatcagctggatgccgtttctaagtaccaggaagtcacaaataatttggagtttgcaaaagaattacagaggagtttcatggcactaagtcaagatattcagaaaacaataaagaagacagcacgtcgggagcagcttatgagagaagaagctgaacagaaacgtttaaaaactgtacttgagctacagtatgttttggacaaattgggagatgatgaagtgcggactgacctgaaacaaggtttgaatggagtgccaatattgtccgaagaggagttgtcattgttggatgaattctataagctagtagaccctgaacgggacatgagcttgaggttgaatgaacagtatgaacatgcctccattcacctgtgggacctgctggaagggaaggaaaaacctgtatgtggaaccacctataaagttctaaaggaaattgttgagcgtgtttttcagtcaaactactttgacagcacccacaaccaccagaatgggctgtgtgaggaagaagaggcagcctcagcacctgcagttgaagaccaggtacctgaagctgaacctgagccagcagaagagtacactgagcaaagtgaagttgaatcaacagagtatgtaaatagacagttcatggcagaaacacagttcaccagtggtgaaaaggagcaggtagatgagtggacagttgaaacggttgaggtggtaaattcactccagcagcaacctcaggctgcatccccttcagtaccagagccccactctttgactccagtggctcaggcagatccccttgtgagaagacagcgagtacaagaccttatggcacaaatgcagggtccctataatttcatacaggattcaatgctggattttgaaaatcagacacttgatcctgccattgtatctgcacagcctatgaatccaacacaaaacatggacatgccccagctggtttgccctccagttcattctgaatctagacttgctcagcctaatcaagttcctgtacaaccagaagcgacacaggttcctttggtatcatccacaagtgaggggtacacagcatctcaacccttgtaccagccttctcatgctacagagcaacgaccacagaaggaaccaattgatcagattcaggcaacaatctctttaaatacagaccagactacagcatcatcatcccttcctgctgcgtctcagcctcaagtatttcaggctgggacaagcaaacctttacatagcagtggaatcaatgtaaatgcagctccattccaatccatgcaaacggtgttcaatatgaatgccccagttcctcctgttaatgaaccagaaactttaaaacagcaaaatcagtaccaggccagttataaccagagcttttctagtcagcctcaccaagtagaacaaacagagcttcagcaagaacagcttcaaacagtggttggcacttaccatggttccccagaccagtcccatcaagtgactggtaaccaccagcagcctcctcagcagaacactggatttccacgtagcaatcagccctattacaatagtcgtggtgtgtctcgtggaggctcccgtggtgctagaggcttgatgaatggataccggggccctgccaatggattcagaggaggatatgatggttaccgcccttcattctctaacactccaaacagtggttatacacagtctcagttcagtgctccccgggattactctggctatcaacgggatggatatcagcagaatttcaagcgaggctctgggcagagtggaccacggggagccccacgaggtcgtggagggcccccaagacccaacagagggatgccgcaaatgaacactcagcaagtgaattaatctgattcacaggattatgtttaatcgccaaaaacacactggccagtgtaccataatatgttaccagaagagttattatctatttgttctccctttcaggaaacttattgtaaagggactgttttcatcccataaagacaggactacaattgtcagctttctattacctggatatggaaggaaactatttttactctgcatgttctgtcctaagcgtcatcttgagccttgcacatgatactcagattcctcacccttgcttaggagtaaaacaatatactttacagggtgataataatctccatagttatttgaagtggcttgaaaaaggcaagattgacttttatgacattggataaaatctacaaatcagccctcgagttattcaatgataactgacaaactaaattatttccctagaaaggaagatgaaaggagtggagtgtggtttggcagaacaactgcatttcacagcttttccagttaaattggagcactgaacgttcagatgcataccaaattatgcatgggtcctaatcacacatataaggctggctaccagctttgacacagcactgttcatctggccaaacaactgtggttaaaaacacatgtaaaatgctttttaacagctgatactgtataagacaaagccaagatgcaaaattaggctttgattggcactttttgaaaaatatgcaacaaatatgggatgtaatccggatggccgcttctgtacttaatgtgaaatatttagatacctttttgaacacttaacagtttctttgagacaatgacttttgtaaggattggtactatctatcattccttatgacatgtacattgtctgtcactaatccttggattttgctgtattgtcacctaaattggtacaggtactgatgaaaatctctagtggataatcataacactctcggtcacatgtttttccttcagcttgaaagcttttttttaaaaggaaaagataccaaatgcctgctgctaccacccttttcaattgctatcttttgaaaggcaccagtatgtgttttagattgatttccctgtttcagggaaatcacggacagtagtttcagttctgatggtataagcaaaacaaataaaacgtttataaaagttgtatcttgaaacactggtgttcaacagctagcagcttatgtgattcaccccatgccacgttagtgtcacaaattttatggtttatctccagcaacatttctctagtacttgcacttattatcttttgtctaatttaaccttaactgaattctccgtttctcctggaggcatttatattcagtgataattccttcccttagatgcatagggagagtctctaaatttgatggaaatggacacttgagtagtgacttagccttatgtactctgttggaatttgtgctagcagtttgagcactagttctgtgtgcctatgaagttaatgctgcttattgtctcattctgacttcatggagaattaatcccacctttaagcaaaggctactaagttaatggtattttctgtgcagaaattaaattttattttcagcatttagcccaggaattcttccagtaggtgctcagctatttaaaaacaaaactattctcaaacattcatcattagacaactggagtttttgctggttttgtaacctaccaaaatggataggctgttgaacattccacattcaaaagttttgtagggtggtgggaaatgggggatcttcaatgtttattttaaaataaaataaaataagttcttgacttttctcatgtgtggttgtggtacatcatattggaagggttaacctgttactttggcaaatgagtatttttttgctagcacctccccttgcgtgctttaaatgacatctgcctgggatgtaccacaaccatatgttacctgtatcttaggggaatggataaaatatttgtggtttactgggtaatccctagatgatgtatgcttgcagtcctatataaaactaaatttgctatctgtgtagaaaataatttcatgacatttacaatcaggactgaagtaagttcttcacacagtgacctctgaatcagtttcagagaagggatgggggagaaaatgccttctaggttttgaacttctatgcattagtgcagatgttgtgaatgtgtaaaggtgttcatagtttgactgtttctatgtatgttttttcaaagaattgttcctttttttgaactataatttttctttttttggttattttaccatcacagtttaaatgtatatcttttatgtctctactcagaccatatttttaaaggggtgcctcattatggggcagagaacttttcaataagtctcattaagatctgaatcttggttctaagcattctgtataatatgtgattgcttgtcctagctgcagaaggccttttgtttggtcaaatgcatattttagcagagtttcaaggaaatgattgtcacacatgtcactgtagcctcttggtgtagcaagctcacatacaaaatacttttgtatatgcataatataaatcatctcatgtggatatgaaacttcttttttaaaacttaaaaaggtagaatgttattgattaccttgattagggcagttttatttccagatcctaataattcctaaaaaatatggaaaagttttttttcaatcattgtaccttgatattaaaacaaatatcctttaagtatttctaatcagttagcttctacagttcttttgtctccttttatatgcagctcttacgtgggagacttttccacttaaaggagacatagaatgtgtgcttattctcagaaggttcattaactgaggtgatgagttaacaactagttgagcagtcagcttcctaagtgttttaggacatttgttcattatattttccgtcatataactagaggaagtggaatgcagataagtgccgaattcaaacccttcattttatgtttaagctcctgaatctgcattccacttgggttgtttttaagcattctaaattttagttgattataagttagatttcacagaatcagtattgcccttgatcttgtcctttttatggagttaacggggaggaagacccctcaggaaaacgaaagtaaattgttaaggctcatcttcatacctttttccattttgaatcctacaaaaatactgcaaaagactagtgaatgtttaaaattacactagattaaataatatgaaagtcaggtt

SEQ ID NO: 372976 - DNA, 3987 bp, Homo sapiens
agcgggatctcggcacgctcggtatgtctccttgactggccgtcgttttacaacctcccgatgcttctctctccttggcctgaaatgccctcggcacatccactggaagggattccggaccacgccgtcgggttcctccgggagtgaggcggccgcgggagccggggccgccgcgccggcttctcagcaccccgcaaccggcaccggcgctgtccagaccgaggccatgaagcagattctcggggtgatcgacaagaaacttcggaacctggagaagaaaaagggtaagcttgatgattaccaggaacgaatgaacaaaggggaaaggcttaatcaagatcagctggatgccgtttctaagtaccaggaagtcacaaataatttggagtttgcaaaagaattacagaggagtttcatggcactaagtcaagatattcagaaaacaataaagaagacagcacgtcgggagcagcttatgagagaagaagctgaacagaaacgtttaaaaactgtacttgagctacagtatgttttggacaaattgggagatgatgaagtgcggactgacctgaaacaaggtttgaatggagtgccaatattgtccgaagaggagttgtcattgttggatgaattctataagctagtagaccctgaacgggacatgagcttgaggttgaatgaacagtatgaacatgcctccattcacctgtgggacctgctggaagggaaggaaaaacctgtatgtggaaccacctataaagttctaaaggaaattgttgagcgtgtttttcagtcaaactactttgacagcacccacaaccaccagaatgggctgtgtgaggaagaagaggcagcctcagcacctgcagttgaagaccaggtacctgaagctgaacctgagccagcagaagagtacactgagcaaagtgaagttgaatcaacagagtatgtaaatagacagttcatggcagaaacacagttcaccagtggtgaaaaggagcaggtagatgagtggacagttgaaacggttgaggtggtaaattcactccagcagcaacctcaggctgcatccccttcagtaccagagccccactctttgactccagtggctcaggcagatccccttgtgagaagacagcgagtacaagaccttatggcacaaatgcagggtccctataatttcatacaggattcaatgctggattttgaaaatcagacacttgatcctgccattgtatctgcacagcctatgaatccaacacaaaacatggacatgccccagctggtttgccctccagttcattctgaatctagacttgctcagcctaatcaagttcctgtacaaccagaagcgacacaggttcctttggtatcatccacaagtgaggggtacacagcatctcaacccttgtaccagccttctcatgctacagagcaacgaccacagaaggaaccaattgatcagattcaggcaacaatctctttaaatacagaccagactacagcatcatcatcccttcctgctgcgtctcagcctcaagtatttcaggctgggacaagcaaacctttacatagcagtggaatcaatgtaaatgcagctccattccaatccatgcaaacggtgttcaatatgaatgccccagttcctcctgttaatgaaccagaaactttaaaacagcaaaatcagtaccaggccagttataaccagagcttttctagtcagcctcaccaagtagaacaaacagagcttcagcaagaacagcttcaaacagtggttggcacttaccatggttccccagaccagtcccatcaagtgactggtaaccaccagcagcctcctcagcagaacactggatttccacgtagcaatcagccctattacaatagtcgtggtgtgtctcgtggaggctcccgtggtgctagaggcttgatgaatggataccggggccctgccaatggattcagaggaggatatgatggttaccgcccttcattctctaacactccaaacagtggttatacacagtctcagttcagtgctccccgggattactctggctatcaacgggatggatatcagcagaatttcaagcgaggctctgggcagagtggaccacggggagccccacgaggtcgtggagggcccccaagacccaacagagggatgccgcaaatgaacactcagcaagtgaattaatctgattcacaggattatgtttaatcgccaaaaacacactggccagtgtaccataatatgttaccagaagagttattatctatttgttctccctttcaggaaacttattgtaaagggactgttttcatcccataaagacaggactacaattgtcagctttctattacctggatatggaaggaaactatttttactctgcatgttctgtcctaagcgtcatcttgagccttgcacatgatactcagattcctcacccttgcttaggagtaaaacaatatactttacagggtgataataatctccatagttatttgaagtggcttgaaaaaggcaagattgacttttatgacattggataaaatctacaaatcagccctcgagttattcaatgataactgacaaactaaattatttccctagaaaggaagatgaaaggagtggagtgtggtttggcagaacaactgcatttcacagcttttccagttaaattggagcactgaacgttcagatgcataccaaattatgcatgggtcctaatcacacatataaggctggctaccagctttgacacagcactgttcatctggccaaacaactgtggttaaaaacacatgtaaaatgctttttaacagctgatactgtataagacaaagccaagatgcaaaattaggctttgattggcactttttgaaaaatatgcaacaaatatgggatgtaatccggatggccgcttctgtacttaatgtgaaatatttagatacctttttgaacacttaacagtttctttgagacaatgacttttgtaaggattggtactatctatcattccttatgacatgtacattgtctgtcactaatccttggattttgctgtattgtcacctaaattggtacaggtactgatgaaaatctctagtggataatcataacactctcggtcacatgtttttccttcagcttgaaagcttttttttaaaaggaaaagataccaaatgcctgctgctaccacccttttcaattgctatcttttgaaaggcaccagtatgtgttttagattgatttccctgtttcagggaaatcacggacagtagtttcagttctgatggtataagcaaaacaaataaaacgtttataaaagttgtatcttgaaacactggtgttcaacagctagcagcttatgtgattcaccccatgccacgttagtgtcacaaattttatggtttatctccagcaacatttctctagtacttgcacttattatcttttgtctaatttaaccttaactgaattctccgtttctcctggaggcatttatattcagtgataattccttcccttagatgcatagggagagtctctaaatttgatggaaatggacacttgagtagtgacttagccttatgtactctgttggaatttgtgctagcagtttgagcactagttctgtgtgcctatgaagttaatgctgcttattgtctcattctgacttcatggagaattaatcccacctttaagcaaaggctactaagttaatggtattttctgtgcagaaattaaattttattttcagcatttagcccaggaattcttccagtaggtgctcagctatttaaaaacaaaactattctcaaacattcatcattagacaactggagtttttgctggttttgtaacctaccaaaatggataggctgttgaacattccacattcaaaagttttgtagggtggtgggaaatgggggatcttcaatgtttattttaaaataaaataaaataagttcttgactttt

SEQ ID NO: 372977 - DNA, 4580 bp, Homo sapiens
cgggcagcccgagcggccgcgaaggcccccgctctccgcttctcccgcccctcgcgacccagagggctgctggctggctaagtccctcccgctcccggctctcgcctcactaggagcggctctcggtgcagcgggacagggcgaagcggcctgcgcccacggagcgcgcgacactgcccggaagggaccgccacccttgccccctcagctgcccactcgtgatttccagcggcctccgcgcgcgcacgatgccctcggccaccagccacagcgggagcggcagcaagtcgtccggaccgccaccgccgtcgggttcctccgggagtgaggcggccgcgggagccggggccgccgcgccggcttctcagcaccccgcaaccggcaccggcgctgtccagaccgaggccatgaagcagattctcggggtgatcgacaagaaacttcggaacctggagaagaaaaagggtaagcttgatgattaccaggaacgaatgaacaaaggggaaaggcttaatcaagatcagctggatgccgtttctaagtaccaggaagtcacaaataatttggagtttgcaaaagaattacagaggagtttcatggcactaagtcaagatattcagaaaacaataaagaagacagcacgtcgggagcagcttatgagagaagaagctgaacagaaacgtttaaaaactgtacttgagctacagtatgttttggacaaattgggagatgatgaagtgcggactgacctgaaacaaggtttgaatggagtgccaatattgtccgaagaggagttgtcattgttggatgaattctataagctagtagaccctgaacgggacatgagcttgaggttgaatgaacagtatgaacatgcctccattcacctgtgggacctgctggaagggaaggaaaaacctgtatgtggaaccacctataaagttctaaaggaaattgttgagcgtgtttttcagtcaaactactttgacagcacccacaaccaccagaatgggctgtgtgaggaagaagaggcagcctcagcacctgcagttgaagaccaggtacctgaagctgaacctgagccagcagaagagtacactgagcaaagtgaagttgaatcaacagagtatgtaaatagacagttcatggcagaaacacagttcaccagtggtgaaaaggagcaggtagatgagtggacagttgaaacggttgaggtggtaaattcactccagcagcaacctcaggctgcatccccttcagtaccagagccccactctttgactccagtggctcaggcagatccccttgtgagaagacagcgagtacaagaccttatggcacaaatgcagggtccctataatttcatacaggattcaatgctggattttgaaaatcagacacttgatcctgccattgtatctgcacagcctatgaatccaacacaaaacatggacatgccccagctggtttgccctccagttcattctgaatctagacttgctcagcctaatcaagttcctgtacaaccagaagcgacacaggttcctttggtatcatccacaagtgaggggtacacagcatctcaacccttgtaccagccttctcatgctacagagcaacgaccacagaaggaaccaattgatcagattcaggcaacaatctctttaaatacagaccagactacagcatcatcatcccttcctgctgcgtctcagcctcaagtatttcaggctgggacaagcaaacctttacatagcagtggaatcaatgtaaatgcagctccattccaatccatgcaaacggtgttcaatatgaatgccccagttcctcctgttaatgaaccagaaactttaaaacagcaaaatcagtaccaggccagttataaccagagcttttctagtcagcctcaccaagtagaacaaacagagcttcagcaagaacagcttcaaacagtggttggcacttaccatggttccccagaccagtcccatcaagtgactggtaaccaccagcagcctcctcagcagaacactggatttccacgtagcaatcagccctattacaatagtcgtggtgtgtctcgtggaggctcccgtggtgctagaggcttgatgaatggataccggggccctgccaatggattcagaggaggatatgatggttaccgcccttcattctctaacactccaaacagtggttatacacagtctcagttcagtgctccccgggattactctggctatcaacgggatggatatcagcagaatttcaagcgaggctctgggcagagtggaccacggggagccccacgaggtcgtggagggcccccaagacccaacagagggatgccgcaaatgaacactcagcaagtgaattaatctgattcacaggattatgtttaatcgccaaaaacacactggccagtgtaccataatatgttaccagaagagttattatctatttgttctccctttcaggaaacttattgtaaagggactgttttcatcccataaagacaggactacaattgtcagctttctattacctggatatggaaggaaactatttttactctgcatgttctgtcctaagcgtcatcttgagccttgcacatgatactcagattcctcacccttgcttaggagtaaaacaatatactttacagggtgataataatctccatagttatttgaagtggcttgaaaaaggcaagattgacttttatgacattggataaaatctacaaatcagccctcgagttattcaatgataactgacaaactaaattatttccctagaaaggaagatgaaaggagtggagtgtggtttggcagaacaactgcatttcacagcttttccagttaaattggagcactgaacgttcagatgcataccaaattatgcatgggtcctaatcacacatataaggctggctaccagctttgacacagcactgttcatctggccaaacaactgtggttaaaaacacatgtaaaatgctttttaacagctgatactgtataagacaaagccaagatgcaaaattaggctttgattggcactttttgaaaaatatgcaacaaatatgggatgtaatccggatggccgcttctgtacttaatgtgaaatatttagatacctttttgaacacttaacagtttctttgagacaatgacttttgtaaggattggtactatctatcattccttatgacatgtacattgtctgtcactaatccttggattttgctgtattgtcacctaaattggtacaggtactgatgaaaatctctagtggataatcataacactctcggtcacatgtttttccttcagcttgaaagcttttttttaaaaggaaaagataccaaatgcctgctgctaccacccttttcaattgctatcttttgaaaggcaccagtatgtgttttagattgatttccctgtttcagggaaatcacggacagtagtttcagttctgatggtataagcaaaacaaataaaacgtttataaaagttgtatcttgaaacactggtgttcaacagctagcagcttatgtgattcaccccatgccacgttagtgtcacaaattttatggtttatctccagcaacatttctctagtacttgcacttattatcttttgtctaatttaaccttaactgaattctccgtttctcctggaggcatttatattcagtgataattccttcccttagatgcatagggagagtctctaaatttgatggaaatggacacttgagtagtgacttagccttatgtactctgttggaatttgtgctagcagtttgagcactagttctgtgtgcctatgaagttaatgctgcttattgtctcattctgacttcatggagaattaatcccacctttaagcaaaggctactaagttaatggtattttctgtgcagaaattaaattttattttcagcatttagcccaggaattcttccagtaggtgctcagctatttaaaaacaaaactattctcaaacattcatcattagacaactggagtttttgctggttttgtaacctaccaaaatggataggctgttgaacattccacattcaaaagttttgtagggtggtgggaaatgggggatcttcaatgtttattttaaaataaaataaaataagttcttgacttttctcatgtgtggttgtggtacatcatattggaagggttaacctgttactttggcaaatgagtatttttttgctagcacctccccttgcgtgctttaaatgacatctgcctgggatgtaccacaaccatatgttacctgtatcttaggggaatggataaaatatttgtggtttactgggtaatccctagatgatgtatgcttgcagtcctatataaaactaaatttgctatctgtgtagaaaacaaaaccacaaaaaaaattttttgggcggctttgggccctgaaaaatttttaaaacccttttgtttggggccggggccccaaatgggtatgggaaccatgggcacaaagggtgtcccacagagaaaacccggcgctaacatagggctgggttttcccccaatataaaaagc

SEQ ID NO: 372978 - DNA, 3966 bp, Homo sapiens
cggacgacttgctgccgctcccgctgtggctggtggccgagggcatcgtgcgcgcgcggaggccgctggaaatcacgagtgggcagctgagggggcaagggtggcggtcccttccgggcagtgtcgcgcgctccgtgggcgcaggccgcttcgccctgtcccgctgcaccgagagccgctcctagtgaggcgagagccgggagcgggagggacttagccagccagcagccctctgggtcgcgaggggcgggagaagcaaaagggtaagcttgatgattaccaggaacgaatgaacaaaggggaaaggcttaatcaagatcagctggatgccgtttctaagtaccaggaagtcacaaataatttggagtttgcaaaagaattacagaggagtttcatggcactaagtcaagatattcagaaaacaataaagaagacagcacgtcgggagcagcttatgagagaagaagctgaacagaaacgtttaaaaactgtacttgagctacagtatgttttggacaaattgggagatgatgaagtgcggactgacctgaaacaaggtttgaatggagtgccaatattgtccgaagaggagttgtcattgttggatgaattctataagctagtagaccctgaacgggacatgagcttgaggttgaatgaacagtatgaacatgcctccattcacctgtgggacctgctggaagggaaggaaaaacctgtatgtggaaccacctataaagttctaaaggaaattgttgagcgtgtttttcagtcaaactactttgacagcacccacaaccaccagaatgggctgtgtgaggaagaagaggcagcctcagcacctgcagttgaagaccaggtacctgaagctgaacctgagccagcagaagagtacactgagcaaagtgaagttgaatcaacagagtatgtaaatagacagttcatggcagaaacacagttcaccagtggtgaaaaggagcaggtagatgagtggacagttgaaacggttgaggtggtaaattcactccagcagcaacctcaggctgcatccccttcagtaccagagccccactctttgactccagtggctcaggcagatccccttgtgagaagacagcgagtacaagaccttatggcacaaatgcagggtccctataatttcatacaggattcaatgctggattttgaaaatcagacacttgatcctgccattgtatctgcacagcctatgaatccaacacaaaacatggacatgccccagctggtttgccctccagttcattctgaatctagacttgctcagcctaatcaagttcctgtacaaccagaagcgacacaggttcctttggtatcatccacaagtgaggggtacacagcatctcaacccttgtaccagccttctcatgctacagagcaacgaccacagaaggaaccaattgatcagattcaggcaacaatctctttaaatacagaccagactacagcatcatcatcccttcctgctgcgtctcagcctcaagtatttcaggctgggacaagcaaacctttacatagcagtggaatcaatgtaaatgcagctccattccaatccatgcaaacggtgttcaatatgaatgccccagttcctcctgttaatgaaccagaaactttaaaacagcaaaatcagtaccaggccagttataaccagagcttttctagtcagcctcaccaagtagaacaaacagagcttcagcaagaacagcttcaaacagtggttggcacttaccatggttccccagaccagtcccatcaagtgactggtaaccaccagcagcctcctcagcagaacactggatttccacgtagcaatcagccctattacaatagtcgtggtgtgtctcgtggaggctcccgtggtgctagaggcttgatgaatggataccggggccctgccaatggattcagaggaggatatgatggttaccgcccttcattctctaacactccaaacagtggttatacacagtctcagttcagtgctccccgggattactctggctatcaacgggatggatatcagcagaatttcaagcgaggctctgggcagagtggaccacggggagccccacgaggtcgtggagggcccccaagacccaacagagggatgccgcaaatgaacactcagcaagtgaattaatctgattcacaggattatgtttaatcgccaaaaacacactggccagtgtaccataatatgttaccagaagagttattatctatttgttctccctttcaggaaacttattgtaaagggactgttttcatcccataaagacaggactacaattgtcagctttctattacctggatatggaaggaaactatttttactctgcatgttctgtcctaagcgtcatcttgagccttgcacatgatactcagattcctcacccttgcttaggagtaaaacaatatactttacagggtgataataatctccatagttatttgaagtggcttgaaaaaggcaagattgacttttatgacattggataaaatctacaaatcagccctcgagttattcaatgataactgacaaactaaattatttccctagaaaggaagatgaaaggagtggagtgtggtttggcagaacaactgcatttcacagcttttccagttaaattggagcactgaacgttcagatgcataccaaattatgcatgggtcctaatcacacatataaggctggctaccagctttgacacagcactgttcatctggccaaacaactgtggttaaaaacacatgtaaaatgctttttaacagctgatactgtataagacaaagccaagatgcaaaattaggctttgattggcactttttgaaaaatatgcaacaaatatgggatgtaatccggatggccgcttctgtacttaatgtgaaatatttagatacctttttgaacacttaacagtttctttgagacaatgacttttgtaaggattggtactatctatcattccttatgacatgtacattgtctgtcactaatccttggattttgctgtattgtcacctaaattggtacaggtactgatgaaaatctctagtggataatcataacactctcggtcacatgtttttccttcagcttgaaagcttttttttaaaaggaaaagataccaaatgcctgctgctaccacccttttcaattgctatcttttgaaaggcaccagtatgtgttttagattgatttccctgtttcagggaaatcacggacagtagtttcagttctgatggtataagcaaaacaaataaaacgtttataaaagttgtatcttgaaacactggtgttcaacagctagcagcttatgtgattcaccccatgccacgttagtgtcacaaattttatggtttatctccagcaacatttctctagtacttgcacttattatcttttgtctaatttaaccttaactgaattctccgtttctcctggaggcatttatattcagtgataattccttcccttagatgcatagggagagtctctaaatttgatggaaatggacacttgagtagtgacttagccttatgtactctgttggaatttgtgctagcagtttgagcactagttctgtgtgcctatgaagttaatgctgcttattgtctcattctgacttcatggagaattaatcccacctttaagcaaaggctactaagttaatggtattttctgtgcagaaattaaattttattttcagcatttagcccaggaattcttccagtaggtgctcagctatttaaaaacaaaactattctcaaacattcatcattagacaactggagtttttgctggttttgtaacctaccaaaatggataggctgttgaacattccacattcaaaagttttgtagggtggtgggaaatgggggatcttcaatgtttattttaaaataaaataaaataagttcttgactttt

SEQ ID NO: 372979 - DNA, 4069 bp, Homo sapiens
cgggcagcccgagcggccgcgaaggcccccgctctccgcttctcccgcccctcgcgacccagagggctgctggctggctaagtccctcccgctcccggctctcgcctcactaggagcggctctcggtgcagcgggacagggcgaagcggcctgcgcccacggagcgcgcgacactgcccggaagggaccgccacccttgccccctcagctgcccactcgtgatttccagcggcctccgcgcgcgcacgatgccctcggccaccagccacagcgggagcggcagcaagtcgtccggaccgccaccgccgtcgggttcctccgggagtgaggcggccgcgggagccggggccgccgcgccggcttctcagcaccccgcaaccggcaccggcgctgtccagaccgaggccatgaagcagattctcggggtgatcgacaagaaacttcggaacctggagaagaaaaagggtaagcttgatgattaccaggaacgaatgaacaaaggggaaaggcttaatcaagatcagctggatgccgtttctaagtaccaggaagtcacaaataatttggagtttgcaaaagaattacagaggagtttcatggcactaagtcaagatattcagaaaacaataaagaagacagcacgtcgggagcagcttatgagagaagaagctgaacagaaacgtttaaaaactgtacttgagctacagtatgttttggacaaattgggagatgatgaagtgcggactgacctgaaacaaggtttgaatggagtgccaatattgtccgaagaggagttgtcattgttggatgaattctataagctagtagaccctgaacgggacatgagcttgaggttgaatgaacagtatgaacatgcctccattcacctgtgggacctgctggaagggaaggaaaaacctgtatgtggaaccacctataaagttctaaaggaaattgttgagcgtgtttttcagtcaaactactttgacagcacccacaaccaccagaatgggctgtgtgaggaagaagaggcagcctcagcacctgcagttgaagaccaggtacctgaagctgaacctgagccagcagaagagtacactgagcaaagtgaagttgaatcaacagagtatgtaaatagacagttcatggcagaaacacagttcaccagtggtgaaaaggagcaggtagatgagtggacagttgaaacggttgaggtggtaaattcactccagcagcaacctcaggctgcatccccttcagtaccagagccccactctttgactccagtggctcaggcagatccccttgtgagaagacagcgagtacaagaccttatggcacaaatgcagggtccctataatttcatacaggattcaatgctggattttgaaaatcagacacttgatcctgccattgtatctgcacagcctatgaatccaacacaaaacatggacatgccccagctggtttgccctccagttcattctgaatctagacttgctcagcctaatcaagttcctgtacaaccagaagcgacacaggttcctttggtatcatccacaagtgaggggtacacagcatctcaacccttgtaccagccttctcatgctacagagcaacgaccacagaaggaaccaattgatcagattcaggcaacaatctctttaaatacagaccagactacagcatcatcatcccttcctgctgcgtctcagcctcaagtatttcaggctgggacaagcaaacctttacatagcagtggaatcaatgtaaatgcagctccattccaatccatgcaaacggtgttcaatatgaatgccccagttcctcctgttaatgaaccagaaactttaaaacagcaaaatcagtaccaggccagttataaccagagcttttctagtcagcctcaccaagtagaacaaacagagcttcagcaagaacagcttcaaacagtggttggcacttaccatggttccccagaccagtcccatcaagtgactggtaaccaccagcagcctcctcagcagaacactggatttccacgtagcaatcagccctattacaatagtcgtggtgtgtctcgtggaggctcccgtggtgctagaggcttgatgaatggataccggggccctgccaatggattcagaggaggatatgatggttaccgcccttcattctctaacactccaaacagtggttatacacagtctcagttcagtgctccccgggattactctggctatcaacgggatggatatcagcagaatttcaagcgaggctctgggcagagtggaccacggggagccccacgaggtcgtggagggcccccaagacccaacagagggatgccgcaaatgaacactcagcaagtgaattaatctgattcacaggattatgtttaatcgccaaaaacacactggccagtgtaccataatatgttaccagaagagttattatctatttgttctccctttcaggaaacttattgtaaagggactgttttcatcccataaagacaggactacaattgtcagctttctattacctggatatggaaggaaactatttttactctgcatgttctgtcctaagcgtcatcttgagccttgcacatgatactcagattcctcacccttgcttaggagtaaaacaatatactttacagggtgataataatctccatagttatttgaagtggcttgaaaaaggcaagattgacttttatgacattggataaaatctacaaatcagccctcgagttattcaatgataactgacaaactaaattatttccctagaaaggaagatgaaaggagtggagtgtggtttggcagaacaactgcatttcacagcttttccagttaaattggagcactgaacgttcagatgcataccaaattatgcatgggtcctaatcacacatataaggctggctaccagctttgacacagcactgttcatctggccaaacaactgtggttaaaaacacatgtaaaatgctttttaacagctgatactgtataagacaaagccaagatgcaaaattaggctttgattggcactttttgaaaaatatgcaacaaatatgggatgtaatccggatggccgcttctgtacttaatgtgaaatatttagatacctttttgaacacttaacagtttctttgagacaatgacttttgtaaggattggtactatctatcattccttatgacatgtacattgtctgtcactaatccttggattttgctgtattgtcacctaaattggtacaggtactgatgaaaatctctagtggataatcataacactctcggtcacatgtttttccttcagcttgaaagcttttttttaaaaggaaaagataccaaatgcctgctgctaccacccttttcaattgctatcttttgaaaggcaccagtatgtgttttagattgatttccctgtttcagggaaatcacggacagtagtttcagttctgatggtataagcaaaacaaataaaacgtttataaaagttgtatcttgaaacactggtgttcaacagctagcagcttatgtgattcaccccatgccacgttagtgtcacaaattttatggtttatctccagcaacatttctctagtacttgcacttattatcttttgtctaatttaaccttaactgaattctccgtttctcctggaggcatttatattcagtgataattccttcccttagatgcatagggagagtctctaaatttgatggaaatggacacttgagtagtgacttagccttatgtactctgttggaatttgtgctagcagtttgagcactagttctgtgtgcctatgaagttaatgctgcttattgtctcattctgacttcatggagaattaatcccacctttaagcaaaggctactaagttaatggtattttctgtgcagaaattaaattttattttcagcatttagcccaggaattcttccagtaggtgctcagctatttaaaaacaaaactattctcaaacattcatcattagacaactggagttttggggaggaacggggacctctagagtgacctca

SEQ ID NO: 372980 - DNA, 5709 bp, Homo sapiens
cgggcagcccgagcggccgcgaaggcccccgctctccgcttctcccgcccctcgcgacccagagggctgctggctggctaagtccctcccgctcccggctctcgcctcactaggagcggctctcggtgcagcgggacagggcgaagcggcctgcgcccacggagcgcgcgacactgcccggaagggaccgccacccttgccccctcagctgcccactcgtgatttccagcggcctccgcgcgcgcacgatgccctcggccaccagccacagcgggagcggcagcaagtcgtccggaccgccaccgccgtcgggttcctccgggagtgaggcggccgcgggagccggggccgccgcgccggcttctcagcaccccgcaaccggcaccggcgctgtccagaccgaggccatgaagcagattctcggggtgatcgacaagaaacttcggaacctggagaagaaaaagggtaagcttgatgattaccaggaacgaatgaacaaaggggaaaggcttaatcaagatcagctggatgccgtttctaagtaccaggaagtcacaaataatttggagtttgcaaaagaattacagaggagtttcatggcactaagtcaagatattcagaaaacaataaagaagacagcacgtcgggagcagcttatgagagaagaagctgaacagaaacgtttaaaaactgtacttgagctacagtatgttttggacaaattgggagatgatgaagtgcggactgacctgaaacaaggtttgaatggagtgccaatattgtccgaagaggagttgtcattgttggatgaattctataagctagtagaccctgaacgggacatgagcttgaggttgaatgaacagtatgaacatgcctccattcacctgtgggacctgctggaagggaaggaaaaacctgtatgtggaaccacctataaagttctaaaggaaattgttgagcgtgtttttcagtcaaactactttgacagcacccacaaccaccagaatgggctgtgtgaggaagaagaggcagcctcagcacctgcagttgaagaccaggtacctgaagctgaacctgagccagcagaagagtacactgagcaaagtgaagttgaatcaacagagtatgtaaatagacagttcatggcagaaacacagttcaccagtggtgaaaaggagcaggtagatgagtggacagttgaaacggttgaggtggtaaattcactccagcagcaacctcaggctgcatccccttcagtaccagagccccactctttgactccagtggctcaggcagatccccttgtgagaagacagcgagtacaagaccttatggcacaaatgcagggtccctataatttcatacaggattcaatgctggattttgaaaatcagacacttgatcctgccattgtatctgcacagcctatgaatccaacacaaaacatggacatgccccagctggtttgccctccagttcattctgaatctagacttgctcagcctaatcaagttcctgtacaaccagaagcgacacaggttcctttggtatcatccacaagtgaggggtacacagcatctcaacccttgtaccagccttctcatgctacagagcaacgaccacagaaggaaccaattgatcagattcaggcaacaatctctttaaatacagaccagactacagcatcatcatcccttcctgctgcgtctcagcctcaagtatttcaggctgggacaagcaaacctttacatagcagtggaatcaatgtaaatgcagctccattccaatccatgcaaacggtgttcaatatgaatgccccagttcctcctgttaatgaaccagaaactttaaaacagcaaaatcagtaccaggccagttataaccagagcttttctagtcagcctcaccaagtagaacaaacagagcttcagcaagaacagcttcaaacagtggttggcacttaccatggttccccagaccagtcccatcaagtgactggtaaccaccagcagcctcctcagcagaacactggatttccacgtagcaatcagccctattacaatagtcgtggtgtgtctcgtggaggctcccgtggtgctagaggcttgatgaatggataccggggccctgccaatggattcagaggaggatatgatggttaccgcccttcattctctaacactccaaacagtggttatacacagtctcagttcagtgctccccgggattactctggctatcaacgggatggatatcagcagaatttcaagcgaggctctgggcagagtggaccacggggagccccacgaggtaatattttgtggtggtgatcctagctcctaagtggagcttctgttctggccttggaagagctgttaatagtctgcatgttaggaatacatttatcctttccagacttgttgctagggattaaatgaaatgctctgtttctaaaacttaatcttggacccaaattttaatttttgaatgatttaattttccctgttactatataaactgtcttgaaaactagaacatattctcttctcagaaaaagtgtttttccaactgaaaattatttttcaggtcctaaaacctgctaaatgtttttaggaagtacttactgaaacatttttgtaagacatttttggaatgagattgaacatttatataaatttattattcctctttcatttttttgaaacatgcctattatattttagggccagacaccctttaatggccggataagccatagttaacatttagagaaccatttagaagtgatagaactaatggaatttgcaatgccttttggacctctattagtgatataaatatcaagttatttctgacttttaaacaaaactcccaaattcctaacttattgagctatacttaaaaaaaattacaggtttagagagttttttgtttttcttttactgttggaaaactacttcccattttggcaggaagttaacctatttaacaattagagctagcatttcatgtagtctgaaattctaaatggttctctgatttgagggaggttaaacatcaaacaggtttcctctattggccataacatgtataaaatgtgtgttaaggaggaattacaacgtactttgatttgaatactagtagaaactggccaggaaaaaggtacatttttctaaaaattaatggatcacttgggaattactgacttgactagaagtatcaaaggatgtttgcatgtgaatgtgggttatgttctttcccaccttgtagcatattcgatgaaagttgagttaactgatagctaaaaatctgttttaacagcatgtaaaaagttattttatctgttaaaagtcattatacagttttgaatgttatgtagtttctttttaacagtttaggtaataaggtctgttttcattctggtgcttttattaattttgatagtatgatgttacttactactgaaatgtaagctagagtgtacactagaatgtaagctccatgagagcaggtaccttgtctgtcttctctgctgtatctattcccaacgcttgatgatggtgcctggcacatagtaggcactcaataaatatttgttgaatgaatgaatgaatgagtactggtggaatactccattagctttactcttcttttagctaagagaacatgagcaaatttgcgcatgacaacttccaggacaggggaaacttgaacactgaagaattgacctcttaagcctaataatgtggtgacaggctgcccacatgcttcttgacttcagatgaaaatctgcttgaaggcaaaacaaataatatttgaaagaaaaatcaaatgccatttttgtcttctaggtcgtggagggcccccaagacccaacagagggatgccgcaaatgaacactcagcaagtgaattaatctgattcacaggattatgtttaatcgccaaaaacacactggccagtgtaccataatatgttaccagaagagttattatctatttgttctccctttcaggaaacttattgtaaagggactgttttcatcccataaagacaggactacaattgtcagctttctattacctggatatggaaggaaactatttttactctgcatgttctgtcctaagcgtcatcttgagccttgcacatgatactcagattcctcacccttgcttaggagtaaaacaatatactttacagggtgataataatctccatagttatttgaagtggcttgaaaaaggcaagattgacttttatgacattggataaaatctacaaatcagccctcgagttattcaatgataactgacaaactaaattatttccctagaaaggaagatgaaaggagtggagtgtggtttggcagaacaactgcatttcacagcttttccagttaaattggagcactgaacgttcagatgcataccaaattatgcatgggtcctaatcacacatataaggctggctaccagctttgacacagcactgttcatctggccaaacaactgtggttaaaaacacatgtaaaatgctttttaacagctgatactgtataagacaaagccaagatgcaaaattaggctttgattggcactttttgaaaaatatgcaacaaatatgggatgtaatccggatggccgcttctgtacttaatgtgaaatatttagatacctttttgaacacttaacagtttctttgagacaatgacttttgtaaggattggtactatctatcattccttatgacatgtacattgtctgtcactaatccttggattttgctgtattgtcacctaaattggtacaggtactgatgaaaatctctagtggataatcataacactctcggtcacatgtttttccttcagcttgaaagcttttttttaaaaggaaaagataccaaatgcctgctgctaccacccttttcaattgctatcttttgaaaggcaccagtatgtgttttagattgatttccctgtttcagggaaatcacggacagtagtttcagttctgatggtataagcaaaacaaataaaacgtttataaaagttgtatcttgaaacactggtgttcaacagctagcagcttatgtgattcaccccatgccacgttagtgtcacaaattttatggtttatctccagcaacatttctctagtacttgcacttattatcttttgtctaatttaaccttaactgaattctccgtttctcctggaggcatttatattcagtgataattccttcccttagatgcatagggagagtctctaaatttgatggaaatggacacttgagtagtgacttagccttatgtactctgttggaatttgtgctagcagtttgagcactagttctgtgtgcctatgaagttaatgctgcttattgtctcattctgacttcatggagaattaatcccacctttaagcaaaggctactaagttaatggtattttctgtgcagaaattaaattttattttcagcatttagcccaggaattcttccagtaggtgctcagctatttaaaaacaaaactattctcaaacattcatcattagacaactggagtttttgctggttttgtaacctaccaaaatggataggctgttgaacattccacattcaaaagttttgtagggtggtgggaaatgggggatcttcaatgtttattttaaaataaaataaaataagttcttgactttt

SEQ ID NO: 372981 - DNA, 4073 bp, Homo sapiens
cgggcagcccgagcggccgcgaaggcccccgctctccgcttctcccgcccctcgcgacccagagggctgctggctggctaagtccctcccgctcccggctctcgcctcactaggagcggctctcggtgcagcgggacagggcgaagcggcctgcgcccacggagcgcgcgacactgcccggaagggaccgccacccttgccccctcagctgcccactcgtgatttccagcggcctccgcgcgcgcacgatgccctcggccaccagccacagcgggagcggcagcaagtcgtccggaccgccaccgccgtcgggttcctccgggagtgaggcggccgcgggagccggggccgccgcgccggcttctcagcaccccgcaaccggcaccggcgctgtccagaccgaggccatgaagcagattctcggggtgatcgacaagaaacttcggaacctggagaagaaaaagggtaagcttgatgattaccaggaacgaatgaacaaaggggaaaggcttaatcaagatcagctggatgccgtttctaagtaccaggaagtcacaaataatttggagtttgcaaaagaattacagaggagtttcatggcactaagtcaagatattcagaaaacaataaagaagacagcacgtcgggagcagcttatgagagaagaagctgaacagaaacgtttaaaaactgtacttgagctacagtatgttttggacaaattgggagatgatgaagtgcggactgacctgaaacaaggtttgaatggagtgccaatattgtccgaagaggagttgtcattgttggatgaattctataagctagtagaccctgaacgggacatgagcttgaggttgaatgaacagtatgaacatgcctccattcacctgtgggacctgctggaagggaaggaaaaacctgtatgtggaaccacctataaagttctaaaggaaattgttgagcgtgtttttcagtcaaactactttgacagcacccacaaccaccagaatgggctgtgtgaggaagaagaggcagcctcagcacctgcagttgaagaccaggtacctgaagctgaacctgagccagcagaagagtacactgagcaaagtgaagttgaatcaacagagtatgtaaatagacagttcatggcagaaacacagttcaccagtggtgaaaaggagcaggtagatgagtggacagttgaaacggttgaggtggtaaattcactccagcagcaacctcaggctgcatccccttcagtaccagagccccactctttgactccagtggctcaggcagatccccttgtgagaagacagcgagtacaagaccttatggcacaaatgcagggtccctataatttcatacaggattcaatgctggattttgaaaatcagacacttgatcctgccattgtatctgcacagcctatgaatccaacacaaaacatggacatgccccagctggtttgccctccagttcattctgaatctagacttgctcagcctaatcaagttcctgtacaaccagaagcgacacaggttcctttggtatcatccacaagtgaggggtacacagcatctcaacccttgtaccagccttctcatgctacagagcaacgaccacagaaggaaccaattgatcagattcaggcaacaatctctttaaatacagaccagactacagcatcatcatcccttcctgctgcgtctcagcctcaagtatttcaggctgggacaagcaaacctttacatagcagtggaatcaatgtaaatgcagctccattccaatccatgcaaacggtgttcaatatgaatgccccagttcctcctgttaatgaaccagaaactttaaaacagcaaaatcagtaccaggccagttataaccagagcttttctagtcagcctcaccaagtagaacaaacagagcttcagcaagaacagcttcaaacagtggttggcacttaccatggttccccagaccagtcccatcaagtgactggtaaccaccagcagcctcctcagcagaacactggatttccacgtagcaatcagccctattacaatagtcgtggtgtgtctcgtggaggctcccgtggtgctagaggcttgatgaatggataccggggccctgccaatggattcagaggaggatatgatggttaccgcccttcattctctaacactccaaacagtggttatacacagtctcagttcagtgctccccgggattactctggctatcaacgggatgccgcaaatgaacactcagcaagtgaattaatctgattcacaggattatgtttaatcgccaaaaacacactggccagtgtaccataatatgttaccagaagagttattatctatttgttctccctttcaggaaacttattgtaaagggactgttttcatcccataaagacaggactacaattgtcagctttctattacctggatatggaaggaaactatttttactctgcatgttctgtcctaagcgtcatcttgagccttgcacatgatactcagattcctcacccttgcttaggagtaaaacaatatactttacagggtgataataatctccatagttatttgaagtggcttgaaaaaggcaagattgacttttatgacattggataaaatctacaaatcagccctcgagttattcaatgataactgacaaactaaattatttccctagaaaggaagatgaaaggagtggagtgtggtttggcagaacaactgcatttcacagcttttccagttaaattggagcactgaacgttcagatgcataccaaattatgcatgggtcctaatcacacatataaggctggctaccagctttgacacagcactgttcatctggccaaacaactgtggttaaaaacacatgtaaaatgctttttaacagctgatactgtataagacaaagccaagatgcaaaattaggctttgattggcactttttgaaaaatatgcaacaaatatgggatgtaatccggatggccgcttctgtacttaatgtgaaatatttagatacctttttgaacacttaacagtttctttgagacaatgacttttgtaaggattggtactatctatcattccttatgacatgtacattgtctgtcactaatccttggattttgctgtattgtcacctaaattggtacaggtactgatgaaaatctctagtggataatcataacactctcggtcacatgtttttccttcagcttgaaagcttttttttaaaaggaaaagataccaaatgcctgctgctaccacccttttcaattgctatcttttgaaaggcaccagtatgtgttttagattgatttccctgtttcagggaaatcacggacagtagtttcagttctgatggtataagcaaaacaaataaaacgtttataaaagttgtatcttgaaacactggtgttcaacagctagcagcttatgtgattcaccccatgccacgttagtgtcacaaattttatggtttatctccagcaacatttctctagtacttgcacttattatcttttgtctaatttaaccttaactgaattctccgtttctcctggaggcatttatattcagtgataattccttcccttagatgcatagggagagtctctaaatttgatggaaatggacacttgagtagtgacttagccttatgtactctgttggaatttgtgctagcagtttgagcactagttctgtgtgcctatgaagttaatgctgcttattgtctcattctgacttcatggagaattaatcccacctttaagcaaaggctactaagttaatggtattttctgtgcagaaattaaattttattttcagcatttagcccaggaattcttccagtaggtgctcagctatttaaaaacaaaactattctcaaacattcatcattagacaactggagtttttgctggttttgtaacctaccaaaatggataggctgttgaacattccacattcaaaagttttgtagggtggtgggaaatgggggatcttcaatgtttattttaaaataaaataaaataagttcttgactttt

SEQ ID NO: 372982 - DNA, 3915 bp, Homo sapiens
cgggcagcccgagcggccgcgaaggcccccgctctccgcttctcccgcccctcgcgacccagagggctgctggctggctaagtccctcccgctcccggctctcgcctcactaggagcggctctcggtgcagcgggacagggcgaagcggcctgcgcccacggagcgcgcgacactgcccggaagggaccgccacccttgccccctcagctgcccactcgtgatttccagcggcctccgcgcgcgcacgatgccctcggccaccagccacagcgggagcggcagcaagtcgtccggaccgccaccgccgtcgggttcctccgggagtgaggcggccgcgggagccggggccgccgcgccggcttctcagcaccccgcaaccggcaccggcgctgtccagaccgaggccatgaagcagattctcggggtgatcgacaagaaacttcggaacctggagaagaaaaagggtaagcttgatgattaccaggaacgaatgaacaaaggggaaaggcttaatcaagatcagctggatgccgtttctaagtaccaggaagtcacaaataatttggagtttgcaaaagaattacagaggagtttcatggcactaagtcaagatattcagaaaacaataaagaagacagcacgtcgggagcagcttatgagagaagaagctgaacagaaacgtttaaaaactgtacttgagctacagtatgttttggacaaattgggagatgatgaagtgcggactgacctgaaacaaggtttgaatggagtgccaatattgtccgaagaggagttgtcattgttggatgaattctataagctagtagaccctgaacgggacatgagcttgaggttgaatgaacagtatgaacatgcctccattcacctgtgggacctgctggaagggaaggaaaaacctgtatgtggaaccacctataaagttctaaaggaaattgttgagcgtgtttttcagtcaaactactttgacagcacccacaaccaccagaatgggctgtgtgaggaagaagaggcagcctcagcacctgcagttgaagaccaggtacctgaagctgaacctgagccagcagaagagtacactgagcaaagtgaagttgaatcaacagagtatgtaaatagacagttcatggcagaaacacagttcaccagtggtgaaaaggagcaggtagatgagtggacagttgaaacggttgaggtggtaaattcactccagcagcaacctcaggctgcatccccttcagtaccagagccccactctttgactccagtggctcaggcagatccccttgtgagaagacagcgagtacaagaccttatggcacaaatgcagggtccctataatttcatacaggattcaatgctggattttgaaaatcagacacttgatcctgccattgtatctgcacagcctatgaatccaacacaaaacatggacatgccccagctggtttgccctccagttcattctgaatctagacttgctcagcctaatcaagttcctgtacaaccagaagcgacacaggttcctttggtatcatccacaagtgaggggtacacagcatctcaacccttgtaccagccttctcatgctacagagcaacgaccacagaaggaaccaattgatcagattcaggcaacaatctctttaaatacagaccagactacagcatcatcatcccttcctgctgcgtctcagcctcaagtatttcaggctgggacaagcaaacctttacatagcagtggaatcaatgtaaatgcagctccattccaatccatgcaaacggtgttcaatatgaatgccccagttcctcctgttaatgaaccagaaactttaaaacagcaaaatcagtaccaggccagttataaccagagcttttctagtcagcctcaccaagtagaacaaacagagcttcagcaagaacagcttcaaacagtggttggcacttaccatggttccccagaccagtcccatcaagtgactggtaaccaccagcagcctcctcagcagaacactggatttccacgtagcaatcagccctattacaatagtcgtggtgtgtctcgtggaggctcccgtggtgctagaggcttgatgaatggataccggggccctgccaatggattcagaggaggatatgatggttaccgcccttcattctctaacactccaaacagtggttatacacagtctcagttcagtgctccccgggattactctggctatcaactttcatcccataaagacaggactacaattgtcagctttctattacctggatatggaaggaaactatttttactctgcatgttctgtcctaagcgtcatcttgagccttgcacatgatactcagattcctcacccttgcttaggagtaaaacaatatactttacagggtgataataatctccatagttatttgaagtggcttgaaaaaggcaagattgacttttatgacattggataaaatctacaaatcagccctcgagttattcaatgataactgacaaactaaattatttccctagaaaggaagatgaaaggagtggagtgtggtttggcagaacaactgcatttcacagcttttccagttaaattggagcactgaacgttcagatgcataccaaattatgcatgggtcctaatcacacatataaggctggctaccagctttgacacagcactgttcatctggccaaacaactgtggttaaaaacacatgtaaaatgctttttaacagctgatactgtataagacaaagccaagatgcaaaattaggctttgattggcactttttgaaaaatatgcaacaaatatgggatgtaatccggatggccgcttctgtacttaatgtgaaatatttagatacctttttgaacacttaacagtttctttgagacaatgacttttgtaaggattggtactatctatcattccttatgacatgtacattgtctgtcactaatccttggattttgctgtattgtcacctaaattggtacaggtactgatgaaaatctctagtggataatcataacactctcggtcacatgtttttccttcagcttgaaagcttttttttaaaaggaaaagataccaaatgcctgctgctaccacccttttcaattgctatcttttgaaaggcaccagtatgtgttttagattgatttccctgtttcagggaaatcacggacagtagtttcagttctgatggtataagcaaaacaaataaaacgtttataaaagttgtatcttgaaacactggtgttcaacagctagcagcttatgtgattcaccccatgccacgttagtgtcacaaattttatggtttatctccagcaacatttctctagtacttgcacttattatcttttgtctaatttaaccttaactgaattctccgtttctcctggaggcatttatattcagtgataattccttcccttagatgcatagggagagtctctaaatttgatggaaatggacacttgagtagtgacttagccttatgtactctgttggaatttgtgctagcagtttgagcactagttctgtgtgcctatgaagttaatgctgcttattgtctcattctgacttcatggagaattaatcccacctttaagcaaaggctactaagttaatggtattttctgtgcagaaattaaattttattttcagcatttagcccaggaattcttccagtaggtgctcagctatttaaaaacaaaactattctcaaacattcatcattagacaactggagtttttgctggttttgtaacctaccaaaatggataggctgttgaacattccacattcaaaagttttgtagggtggtgggaaatgggggatcttcaatgtttattttaaaataaaataaaataagttcttgactttt

SEQ ID NO: 372983 - DNA, 3075 bp, Homo sapiens
cgggcagcccgagcggccgcgaaggcccccgctctccgcttctcccgcccctcgcgacccagagggctgctggctggctaagtccctcccgctcccggctctcgcctcactaggagcggctctcggtgcagcgggacagggcgaagcggcctgcgcccacggagcgcgcgacactgcccggaagggaccgccacccttgccccctcagctgcccactcgtgatttccagcggcctccgcgcgcgcacgatgccctcggccaccagccacagcgggagcggcagcaagtcgtccggaccgccaccgccgtcgggttcctccgggagtgaggcggccgcgggagccggggccgccgcgccggcttctcagcaccccgcaaccggcaccggcgctgtccagaccgaggccatgaagcagattctcggggtgatcgacaagaaacttcggaacctggagaagaaaaagggtaagcttgatgattaccaggaacgaatgaacaaaggggaaaggcttaatcaagatcagctggatgccgtttctaagtaccaggaagtcacaaataatttggagtttgcaaaagaattacagaggagtttcatggcactaagtcaagatattcagaaaacaataaagaagacagcacgtcgggagcagcttatgagagaagaagctgaacagaaacgtttaaaaactgtacttgagctacagtatgttttggacaaattgggagatgatgaagtgcggactgacctgaaacaaggtttgaatggagtgccaatattgtccgaagaggagttgtcattgttggatgaattctataagctagtagaccctgaacgggacatgagcttgaggttgaatgaacagtatgaacatgcctccattcacctgtgggacctgctggaagggaaggaaaaacctgtatgtggaaccacctataaagttctaaaggaaattgttgagcgtgtttttcagtcaaactactttgacagcacccacaaccaccagaatgggctgtgtgaggaagaagaggcagcctcagcacctgcagttgaagaccaggtacctgaagctgaacctgagccagcagaagagtacactgagcaaagtgaagttgaatcaacagagtatgtaaatagacagttcatggcagaagggatggatatcagcagaatttcaagcgaggctctgggcagagtggaccacggggagccccacgaggtcgtggagggcccccaagacccaacagagggatgccgcaaatgaacactcagcaagtgaattaatctgattcacaggattatgtttaatcgccaaaaacacactggccagtgtaccataatatgttaccagaagagttattatctatttgttctccctttcaggaaacttattgtaaagggactgttttcatcccataaagacaggactacaattgtcagctttctattacctggatatggaaggaaactatttttactctgcatgttctgtcctaagcgtcatcttgagccttgcacatgatactcagattcctcacccttgcttaggagtaaaacaatatactttacagggtgataataatctccatagttatttgaagtggcttgaaaaaggcaagattgacttttatgacattggataaaatctacaaatcagccctcgagttattcaatgataactgacaaactaaattatttccctagaaaggaagatgaaaggagtggagtgtggtttggcagaacaactgcatttcacagcttttccagttaaattggagcactgaacgttcagatgcataccaaattatgcatgggtcctaatcacacatataaggctggctaccagctttgacacagcactgttcatctggccaaacaactgtggttaaaaacacatgtaaaatgctttttaacagctgatactgtataagacaaagccaagatgcaaaattaggctttgattggcactttttgaaaaatatgcaacaaatatgggatgtaatccggatggccgcttctgtacttaatgtgaaatatttagatacctttttgaacacttaacagtttctttgagacaatgacttttgtaaggattggtactatctatcattccttatgacatgtacattgtctgtcactaatccttggattttgctgtattgtcacctaaattggtacaggtactgatgaaaatctctagtggataatcataacactctcggtcacatgtttttccttcagcttgaaagcttttttttaaaaggaaaagataccaaatgcctgctgctaccacccttttcaattgctatcttttgaaaggcaccagtatgtgttttagattgatttccctgtttcagggaaatcacggacagtagtttcagttctgatggtataagcaaaacaaataaaacgtttataaaagttgtatcttgaaacactggtgttcaacagctagcagcttatgtgattcaccccatgccacgttagtgtcacaaattttatggtttatctccagcaacatttctctagtacttgcacttattatcttttgtctaatttaaccttaactgaattctccgtttctcctggaggcatttatattcagtgataattccttcccttagatgcatagggagagtctctaaatttgatggaaatggacacttgagtagtgacttagccttatgtactctgttggaatttgtgctagcagtttgagcactagttctgtgtgcctatgaagttaatgctgcttattgtctcattctgacttcatggagaattaatcccacctttaagcaaaggctactaagttaatggtattttctgtgcagaaattaaattttattttcagcatttagcccaggaattcttccagtaggtgctcagctatttaaaaacaaaactattctcaaacattcatcattagacaactggagtttttgctggttttgtaacctaccaaaatggataggctgttgaacattccacattcaaaagttttgtagggtggtgggaaatgggggatcttcaatgtttattttaaaataaaataaaataagttcttgactttt

SEQ ID NO: 372984 - DNA, 3607 bp, Homo sapiens
  misc_feature (3547)..(3547): n is a, c, g, or t
  misc_feature (3553)..(3553): n is a, c, g, or t
  misc_feature (3562)..(3562): n is a, c, g, or t
  misc_feature (3578)..(3579): n is a, c, g, or t
  misc_feature (3582)..(3582): n is a, c, g, or t
  misc_feature (3586)..(3586): n is a, c, g, or t
  misc_feature (3596)..(3596): n is a, c, g, or t
  misc_feature (3601)..(3601): n is a, c, g, or t
  misc_feature (3604)..(3604): n is a, c, g, or t
cgggcagcccgagcggccgcgaaggcccccgctctccgcttctcccgcccctcgcgacccagagggctgctggctggctaagtccctcccgctcccggctctcgcctcactaggagcggctctcggtgcagcgggacagggcgaagcggcctgcgcccacggagcgcgcgacactgcccggaagggaccgccacccttgccccctcagctgcccactcgtgatttccagcggcctccgcgcgcgcacgatgccctcggccaccagccacagcgggagcggcagcaagtcgtccggaccgccaccgccgtcgggttcctccgggagtgaggcggccgcgggagccggggccgccgcgccggcttctcagcaccccgcaaccggcaccggcgctgtccagaccgaggccatgaagcagattctcggggtgatcgacaagaaacttcggaacctggagaagaaaaagggtaagcttgatgattaccaggaacgaatgaacaaaggggaaaggcttaatcaagatcagctggatgccgtttctaagtaccaggaagtcacaaataatttggagtttgcaaaagaattacagaggagtttcatggcactaagtcaagatattcagaaaacaataaagaagacagcacgtcgggagcagcttatgagagaagaagctgaacagaaacgtttaaaaactgtacttgagctacagtatgttttggacaaattgggagatgatgaagtgcggactgacctgaaacaaggtttgaatggagtgccaatattgtccgaagaggagttgtcattgttggatgaattctataagctagtagaccctgaacgggacatgagcttgaggttgaatgaacagtatgaacatgcctccattcacctgtgggacctgctggaagggaaggaaaaacctgtatgtggaaccacctataaagttctaaaggaaattgttgagcgtgtttttcagtcaaactactttgacagcacccacaaccaccagaatgggctgtgtgaggaagaagaggcagcctcagcacctgcagttgaagaccaggtacctgaagctgaacctgagccagcagaagagtacactgagcaaagtgaagttgaatcaacagagtatgtaaatagacagttcatggcagaaacacagttcaccagtggtgaaaaggagcaggtagatgagtggacagttgaaacggttgaggtggtaaattcactccagcagcaacctcaggctgcatccccttcagtaccagagccccactctttgactccagtggctcaggcagatccccttgtgagaagacagcgagtacaagaccttatggcacaaatgcagggtccctataatttcatacaggattcaatgctggattttgaaaatcagacacttgatcctgccattgtatctgcacagcctatgaatccaacacaaaacatggacatgccccagctggtttgccctccagttcattctgaatctagacttgctcagcctaatcaagttcctgtacaaccagaagcgacacaggttcctttggtatcatccacaagtgaggggtacacagcatctcaacccttgtaccagccttctcatgctacagagcaacgaccacagaaggaaccaattgatcagattcaggcaacaatctctttaaatacagaccagactacagcatcatcatcccttcctgctgcgtctcagcctcaagtatttcaggctgggacaagcaaacctttacatagcagtggaatcaatgtaaatgcagctccattccaatccatgcaaacggtgttcaatatgaatgccccagttcctcctgttaatgaaccagaaactttaaaacagcaaaatcagtaccaggccagttataaccagagcttttctagtcagcctcaccaagtagaacaaacagagcttcagcaagaacagcttcaaacagtggttggcacttaccatggttccccagaccagtcccatcaagtgactggtaaccaccagcagcctcctcagcagaacactggatttccacgtagcaatcagccctattacaatagtcgtggtgtgtctcgtggaggctcccgtggtgctagaggcttgatgaatggataccggggccctgccaatggattcagaggaggatatgatggttaccgcccttcattctctaacactccaaacagtggttatacacagtctcagttcagtgctccccgggattactctggctatcaacgggatggatatcagcagaatttcaagcgaggctctgggcagagtggaccacggggagccccacgaggtcgtggagggcccccaagacccaacagagggatgccgcaaatgaacactcagcaagtgaattaatctgattcacaggattatgtttaatcgccaaaaacacactggccagtgtaccataatatgttaccagaagagttattatctatttgttctccctttcaggaaacttattgtaaagggactgttttcatcccataaagacaggactacaattgtcagctttctattacctggatatggaaggaaactatttttactctgcatgttctgtcctaagcgtcatcttgagccttgcacatgatactcagattcctcacccttgcttaggagtaaaacaatatactttacagggtgataataatctccatagttatttgaagtggcttgaaaaaggcaagattgacttttatgacattggataaaatctacaaatcagccctcgagttattcaatgataactgacaaactaaattatttccctagaaaggaagatgaaaggagtggagtgtggtttggcagaacaactgcatttcacagcttttccagttaaattggagcactgaacgttcagatgcataccaaattatgcatgggtcctaatcacacatataaggctggctaccagctttgacacagcactgttcatctggccaaacaactgtggttaaaaacacatgtaaaatgctttttaacagctgatactgtataagacaaagccaagatgcaaaattaggctttgattggcactttttgaaaaatatgcaacaaatatgggatgtaatccggatggccgcttctgtacttaatgtgaaatatttagatacctttttgaacacttaacagtttctttgagacaatgacttttgtaaggattggtactatctatcattccttatgacatgtacattgtctgtcactaatccttggattttgctgtattgtcacctaaattggtacaggtactgatgaaaatctctagtggataatcataacactctcggtcacatgtttttccttcagcttgaaagcttttttttaaaaggaaaagataccaaatgcctgctgctaccacccttttcaattgctatcttttgaaaggcaccagtatgtgttttagattgatttccctgtttcagggaaatcacggacagtagtttcagttctgatggtataagcaaaacaaataaaacgtttataaaaaaaaaaaaaaaaaaaaaaaaaaaaaaaaaaanaaaaanaaaaaaaanaaaaaaaaaaaaaaannaanaaanaaaaaaaaanaaaanaanaga

SEQ ID NO: 372985 - DNA, 3538 bp, Homo sapiens
  misc_feature (3481)..(3482): n is a, c, g, or t
  misc_feature (3487)..(3487): n is a, c, g, or t
  misc_feature (3511)..(3511): n is a, c, g, or t
cgggcagcccgagcggccgcgaaggcccccgctctccgcttctcccgcccctcgcgacccagagggctgctggctggctaagtccctcccgctcccggctctcgcctcactaggagcggctctcggtgcagcgggacagggcgaagcggcctgcgcccacggagcgcgcgacactgcccggaagggaccgccacccttgccccctcagctgcccactcgtgatttccagcggcctccgcgcgcgcacgatgccctcggccaccagccacagcgggagcggcagcaagtcgtccggaccgccaccgccgtcgggttcctccgggagtgaggcggccgcgggagccggggccgccgcgccggcttctcagcaccccgcaaccggcaccggcgctgtccagaccgaggccatgaagcagattctcggggtgatcgacaagaaacttcggaacctggagaagaaaaagggtaagcttgatgattaccaggaacgaatgaacaaaggggaaaggcttaatcaagatcagctggatgccgtttctaagtaccaggaagtcacaaataatttggagtttgcaaaagaattacagaggagtttcatggcactaagtcaagatattcagaaaacaataaagaagacagcacgtcgggagcagcttatgagagaagaagctgaacagaaacgtttaaaaactgtacttgagctacagtatgttttggacaaattgggagatgatgaagtgcggactgacctgaaacaaggtttgaatggagtgccaatattgtccgaagaggagttgtcattgttggatgaattctataagctagtagaccctgaacgggacatgagcttgaggttgaatgaacagtatgaacatgcctccattcacctgtgggacctgctggaagggaaggaaaaacctgtatgtggaaccacctataaagttctaaaggaaattgttgagcgtgtttttcagtcaaactactttgacagcacccacaaccaccagaatgggctgtgtgaggaagaagaggcagcctcagcacctgcagttgaagaccaggtacctgaagctgaacctgagccagcagaagagtacactgagcaaagtgaagttgaatcaacagagtatgtaaatagacagttcatggcagaaacacagttcaccagtggtgaaaaggagcaggtagatgagtggacagttgaaacggttgaggtggtaaattcactccagcagcaacctcaggctgcatccccttcagtaccagagccccactctttgactccagtggctcaggcagatccccttgtgagaagacagcgagtacaagaccttatggcacaaatgcagggtccctataatttcatacaggattcaatgctggattttgaaaatcagacacttgatcctgccattgtatctgcacagcctatgaatccaacacaaaacatggacatgccccagctggtttgccctccagttcattctgaatctagacttgctcagcctaatcaagttcctgtacaaccagaagcgacacaggttcctttggtatcatccacaagtgaggggtacacagcatctcaacccttgtaccagccttctcatgctacagagcaacgaccacagaaggaaccaattgatcagattcaggcaacaatctctttaaatacagaccagactacagcatcatcatcccttcctgctgcgtctcagcctcaagtatttcaggctgggacaagcaaacctttacatagcagtggaatcaatgtaaatgcagctccattccaatccatgcaaacggtgttcaatatgaatgccccagttcctcctgttaatgaaccagaaactttaaaacagcaaaatcagtaccaggccagttataaccagagcttttctagtcagcctcaccaagtagaacaaacagagcttcagcaagaacagcttcaaacagtggttggcacttaccatggttccccagaccagtcccatcaagtgactggtaaccaccagcagcctcctcagcagaacactggatttccacgtagcaatcagccctattacaatagtcgtggtgtgtctcgtggaggctcccgtggtgctagaggcttgatgaatggataccggggccctgccaatggattcagaggaggatatgatggttaccgcccttcattctctaacactccaaacagtggttatacacagtctcagttcagtgctccccgggattactctggctatcaacgggatggatatcagcagaatttcaagcgaggctctgggcagagtggaccacggggagccccacgaggtcgtggagggcccccaagacccaacagagggatgccgcaaatgaacactcagcaagtgaattaatctgattcacaggattatgtttaatcgccaaaaacacactggccagtgtaccataatatgttaccagaagagttattatctatttgttctccctttcaggaaacttattgtaaagggactgttttcatcccataaagacaggactacaattgtcagctttctattacctggatatggaaggaaactatttttactctgcatgttctgtcctaagcgtcatcttgagccttgcacatgatactcagattcctcacccttgcttaggagtaaaacaatatactttacagggtgataataatctccatagttatttgaagtggcttgaaaaaggcaagattgacttttatgacattggataaaatctacaaatcagccctcgagttattcaatgataactgacaaactaaattatttccctagaaaggaagatgaaaggagtggagtgtggtttggcagaacaactgcatttcacagcttttccagttaaattggagcactgaacgttcagatgcataccaaattatgcatgggtcctaatcacacatataaggctggctaccagctttgacacagcactgttcatctggccaaacaactgtggttaaaaacacatgtaaaatgctttttaacagctgatactgtataagacaaagccaagatgcaaaattaggctttgattggcactttttgaaaaatatgcaacaaatatgggatgtaatccggatggccgcttctgtacttaatgtgaaatatttagatacctttttgaacacttaacagtttctttgagacaatgacttttgtaaggattggtactatctatcattccttatgacatgtacattgtctgtcactaatccttggattttgctgtattgtcacctaaattggtacaggtactgatgaaaatctctagtggataatcataacactctcggtcacatgtttttccttcagcttgaaagcttttttttaaaaggaaaagataccaaatgcctgctgctaccacccttttcaattgctatcttttgaaaggcaccagtatgtgttttagattgatttccctgtttcagggaaatcacggacagtagtttcagttcctnngactnggtagtataacgcccgcaccatanaataaaaagctgtatatttaagtttgc

SEQ ID NO: 372986 - DNA, 3611 bp, Homo sapiens
cgggcagcccgagcggccgcgaaggcccccgctctccgcttctcccgcccctcgcgacccagagggctgctggctggctaagtccctcccgctcccggctctcgcctcactaggagcggctctcggtgcagcgggacagggcgaagcggcctgcgcccacggagcgcgcgacactgcccggaagggaccgccacccttgccccctcagctgcccactcgtgatttccagcggcctccgcgcgcgcacgatgccctcggccaccagccacagcgggagcggcagcaagtcgtccggaccgccaccgccgtcgggttcctccgggagtgaggcggccgcgggagccggggccgccgcgccggcttctcagcaccccgcaaccggcaccggcgctgtccagaccgaggccatgaagcagattctcggggtgatcgacaagaaacttcggaacctggagaagaaaaagggtaagcttgatgattaccaggaacgaatgaacaaaggggaaaggcttaatcaagatcagctggatgccgtttctaagtaccaggaagtcacaaataatttggagtttgcaaaagaattacagaggagtttcatggcactaagtcaagatattcagaaaacaataaagaagacagcacgtcgggagcagcttatgagagaagaagctgaacagaaacgtttaaaaactgtacttgagctacagtatgttttggacaaattgggagatgatgaagtgcggactgacctgaaacaaggtttgaatggagtgccaatattgtccgaagaggagttgtcattgttggatgaattctataagctagtagaccctgaacgggacatgagcttgaggttgaatgaacagtatgaacatgcctccattcacctgtgggacctgctggaagggaaggaaaaacctgtatgtggaaccacctataaagttctaaaggaaattgttgagcgtgtttttcagtcaaactactttgacagcacccacaaccaccagaatgggctgtgtgaggaagaagaggcagcctcagcacctgcagttgaagaccaggtacctgaagctgaacctgagccagcagaagagtacactgagcaaagtgaagttgaatcaacagagtatgtaaatagacagttcatggcagaaacacagttcaccagtggtgaaaaggagcaggtagatgagtggacagttgaaacggttgaggtggtaaattcactccagcagcaacctcaggctgcatccccttcagtaccagagccccactctttgactccagtggctcaggcagatccccttgtgagaagacagcgagtacaagaccttatggcacaaatgcagggtccctataatttcatacaggattcaatgctggattttgaaaatcagacacttgatcctgccattgtatctgcacagcctatgaatccaacacaaaacatggacatgccccagctggtttgccctccagttcattctgaatctagacttgctcagcctaatcaagttcctgtacaaccagaagcgacacaggttcctttggtatcatccacaagtgaggggtacacagcatctcaacccttgtaccagccttctcatgctacagagcaacgaccacagaaggaaccaattgatcagattcaggcaacaatctctttaaatacagaccagactacagcatcatcatcccttcctgctgcgtctcagcctcaagtatttcaggctgggacaagcaaacctttacatagcagtggaatcaatgtaaatgcagctccattccaatccatgcaaacggtgttcaatatgaatgccccagttcctcctgttaatgaaccagaaactttaaaacagcaaaatcagtaccaggccagttataaccagagcttttctagtcagcctcaccaagtagaacaaacagagcttcagcaagaacagcttcaaacagtggttggcacttaccatggttccccagaccagtcccatcaagtgactggtaaccaccagcagcctcctcagcagaacactggatttccacgtagcaatcagccctattacaatagtcgtggtgtgtctcgtggaggctcccgtggtgctagaggcttgatgaatggataccggggccctgccaatggattcagaggaggatatgatggttaccgcccttcattctctaacactccaaacagtggttatacacagtctcagttcagtgctccccgggattactctggctatcaacgggatggatatcagcagaatttcaagcgaggctctgggcagagtggaccacggggagccccacgaggtaatattttgtggtggtgatcctagctcctaagtggagcttctgttctggccttggaagagctgttaatagtctgcatgttaggaatacatttatcctttccagacttgttgctagggattaaatgaaatgctctgtttctaaaacttaatcttggacccaaattttaatttttgaatgatttaattttccctgttactatataaactgtcttgaaaactagaacatattctcttctcagaaaaagtgtttttccaactgaaaattatttttcaggtcctaaaacctgctaaatgtttttaggaagtacttactgaaacatttttgtaagacatttttggaatgagattgaacatttatataaatttattattcctctttcatttttttgaaacatgcctattatattttagggccagacaccctttaatggccggataagccatagttaacatttagagaaccatttagaagtgatagaactaatggaatttgcaatgccttttggacctctattagtgatataaatatcaagttatttctgacttttaaacaaaactcccaaattcctaacttattgagctatacttaaaaaaaattacaggtttagagagttttttgtttttcttttactgttggaaaactacttcccattttggcaggaagttaacctatttaacaattagagctagcatttcatgtagtctgaaattctaaatggttctctgatttgagggaggttaaacatcaaacaggtttcctctattggccataacatgtataaaatgtgtgttaaggaggaattacaacgtactttgatttgaatactagtagaaactggccaggaaaaaggtacatttttctaaaaattaatggatcacttgggaattactgacttgactagaagtatcaaaggatgtttgcatgtgaatgtgggttatgttctttcccaccttgtagcatattcgatgaaagttgagttaactgatagctaaaaatctgttttaacagcatgtaaaaagttattttatctgttaaaagtcattatacagttttgaatgttatgtagtttctttttaacagtttaggtaataaggtctgttttcattctggtgcttttattaattttgatagtatgatgttacttactactgaaatgtaagctagagtgtacactagaatgtaagctccatgagagcaggtaccttgtctgtcttctctgctgtatctattcccaacgcttgatgatggtgcctggcacatagtaggcactcaataaatatttgttgaatgaatga

SEQ ID NO: 372987 - DNA, 2629 bp, Homo sapiens
  misc_feature (2569)..(2569): n is a, c, g, or t
  misc_feature (2575)..(2575): n is a, c, g, or t
  misc_feature (2584)..(2584): n is a, c, g, or t
  misc_feature (2600)..(2601): n is a, c, g, or t
  misc_feature (2604)..(2604): n is a, c, g, or t
  misc_feature (2608)..(2608): n is a, c, g, or t
  misc_feature (2618)..(2618): n is a, c, g, or t
  misc_feature (2623)..(2623): n is a, c, g, or t
  misc_feature (2626)..(2626): n is a, c, g, or t
cgggcagcccgagcggccgcgaaggcccccgctctccgcttctcccgcccctcgcgacccagagggctgctggctggctaagtccctcccgctcccggctctcgcctcactaggagcggctctcggtgcagcgggacagggcgaagcggcctgcgcccacggagcgcgcgacactgcccggaagggaccgccacccttgccccctcagctgcccactcgtgatttccagcggcctccgcgcgcgcacgatgccctcggccaccagccacagcgggagcggcagcaagtcgtccggaccgccaccgccgtcgggttcctccgggagtgaggcggccgcgggagccggggccgccgcgccggcttctcagcaccccgcaaccggcaccggcgctgtccagaccgaggccatgaagcagattctcggggtgatcgacaagaaacttcggaacctggagaagaaaaagggtaagcttgatgattaccaggaacgaatgaacaaaggggaaaggcttaatcaagatcagctggatgccgtttctaagtaccaggaagtcacaaataatttggagtttgcaaaagaattacagaggagtttcatggcactaagtcaagatattcagaaaacaataaagaagacagcacgtcgggagcagcttatgagagaagaagctgaacagaaacgtttaaaaactgtacttgagctacagtatgttttggacaaattgggagatgatgaagtgcggactgacctgaaacaaggtttgaatggagtgccaatattgtccgaagaggagttgtcattgttggatgaattctataagctagtagaccctgaacgggacatgagcttgaggttgaatgaacagtatgaacatgcctccattcacctgtgggacctgctggaagggaaggaaaaacctgtatgtggaaccacctataaagttctaaaggaaattgttgagcgtgtttttcagtcaaactactttgacagcacccacaaccaccagaatgggctgtgtgaggaagaagaggcagcctcagcacctgcagttgaagaccaggtacctgaagctgaacctgagccagcagaagagtacactgagcaaagtgaagttgaatcaacagagtatgtaaatagacagttcatggcagaaacacagttcaccagtggtgaaaaggagcaggtagatgagtggacagttgaaacggttgaggtggtaaattcactccagcagcaacctcaggctgcatccccttcagtaccagagccccactctttgactccagtggctcaggcagatccccttgtgagaagacagcgagtacaagaccttatggcacaaatgcagggtccctataatttcatacaggattcaatgctggattttgaaaatcagacacttgatcctgccattgtatctgcacagcctatgaatccaacacaaaacatggacatgccccagctggtttgccctccagttcattctgaatctagacttgctcagcctaatcaagttcctgtacaaccagaagcgacacaggttcctttggtatcatccacaagtgaggggtacacagcatctcaacccttgtaccagccttctcatgctacagagcaacgaccacagaaggaaccaattgatcagattcaggcaacaatctctttaaatacagaccagactacagcatcatcatcccttcctgctgcgtctcagcctcaagtatttcaggctgggacaagcaaacctttacatagcagtggaatcaatgtaaatgcagctccattccaatccatgcaaacggtgttcaatatgaatgccccagttcctcctgttaatgaaccagaaactttaaaacagcaaaatcagtaccaggccagttataaccagagcttttctagtcagcctcaccaagtagaacaaacagagcttcagcaagaacagcttcaaacagtggttggcacttaccatggttccccagaccagtcccatcaagtgactggtaaccaccagcagcctcctcagcagaacactggatttccacgtagcaatcagccctattacaatagtcgtggtgtgtctcgtggaggctcccgtggtgctagaggcttgatgaatggataccggggccctgccaatggattcagaggaggatatgatggttaccgcccttcattctctaacactccaaacagtggttatacacagtctcagttcagtgctccccgggattactctggctatcaacgggatggatatcagcagaatttcaagcgaggctctgggcagagtggaccacggggagccccacgaggtcgtggagggcccccaagacccaacagagggatgccgcaaatgaacactcagcaagtgaattaatctgattcacaggattatgtttaatcgccaaaaacacactggccagtgtaccataatatgttaccagaagagttattatctatttgttctccctttcaggaaacttattgtaaagggactgttttcatcccataaagacaggactacaattgtcaaaaaaaaaaaaaaaaaaaaaaaaaaaaaaaaaaaanaaaaanaaaaaaaanaaaaaaaaaaaaaaannaanaaanaaaaaaaaanaaaanaanaga

SEQ ID NO: 372988 - DNA, 1493 bp, Homo sapiens
cgggcagcccgagcggccgcgaaggcccccgctctccgcttctcccgcccctcgcgacccagagggctgctggctggctaagtccctcccgctcccggctctcgcctcactaggagcggctctcggtgcagcgggacagggcgaagcggcctgcgcccacggagcgcgcgacactgcccggaagggaccgccacccttgccccctcagctgcccactcgtgatttccagcggcctccgcgcgcgcacgatgccctcggccaccagccacagcgggagcggcagcaagtcgtccggaccgccaccgccgtcgggttcctccgggagtgaggcggccgcgggagccggggccgccgcgccggcttctcagcaccccgcaaccggcaccggcgctgtccagaccgaggccatgaagcagattctcggggtgatcgacaagaaacttcggaacctggagaagaaaaagggtaagcttgatgattaccaggaacgaatgaacaaaggggaaaggcttaatcaagatcagctggatgccgtttctaagtaccaggaagtcacaaataatttggattttgctgtattgtcacctaaattggtacaggtactgatgaaaatctctagtggataatcataacactctcggtcacatgtttttccttcagcttgaaagcttttttttaaaaggaaaagataccaaatgcctgctgctaccacccttttcaattgctatcttttgaaaggcaccagtatgtgttttagattgatttccctgtttcagggaaatcacggacagtagtttcagttctgatggtataagcaaaacaaataaaacgtttataaaagttgtatcttgaaacactggtgttcaacagctagcagcttatgtgattcaccccatgccacgttagtgtcacaaattttatggtttatctccagcaacatttctctagtacttgcacttattatcttttgtctaatttaaccttaactgaattctccgtttctcctggaggcatttatattcagtgataattccttcccttagatgcatagggagagtctctaaatttgatggaaatggacacttgagtagtgacttagccttatgtactctgttggaatttgtgctagcagtttgagcactagttctgtgtgcctatgaagttaatgctgcttattgtctcattctgacttcatggagaattaatcccacctttaagcaaaggctactaagttaatggtattttctgtgcagaaattaaattttattttcagcatttagcccaggaattcttccagtaggtgctcagctatttaaaaacaaaactattctcaaacattcatcattagacaactggagtttttgctggttttgtaacctaccaaaatggataggctgttgaacattccacattcaaaagttttgtagggtggtgggaaatgggggatcttcaatgtttattttaaaataaaataaaataagttcttgactttt

SEQ ID NO: 372989 - DNA, 1435 bp, Homo sapiens
cgggcagcccgagcggccgcgaaggcccccgctctccgcttctcccgcccctcgcgacccagagggctgctggctggctaagtccctcccgctcccggctctcgcctcactaggagcggctctcggtgcagcgggacagggcgaagcggcctgcgcccacggagcgcgcgacactgcccggaagggaccgccacccttgccccctcagctgcccactcgtgatttccagcggcctccgcgcgcgcacgatgccctcggccaccagccacagcgggagcggcagcaagtcgtccggaccgccaccgccgtcgggttcctccgggagtgaggcggccgcgggagccggggccgccgcgccggcttctcagcaccccgcaaccggcaccggcgctgtccagaccgaggccatgaagcagattctcggggtgatcgacaagaaacttcggaacctggagaagaaaaagggtaagcttgatgattaccaggaacgaatgaacaaaggggaaaggcttaatcaagatcagctggatgccgtttctaagtaccaggaagtcacaaataatttggagtttgcaaaagaattacagaggagtttcatggcactaagtcaagatattcagaaaacaataaagaagacagcacgtcgggagcagcttatgagagaagaagctgaacagaaacgtttaaaaactgtacttgagctacagtatgttttggacaaattgggagatgatgaagtgcggactgacctgaaacaaggtttgaatggagtgccaatattgtccgaagaggagttgtcattgttggatgaattctataagctagtagaccctgaacgggacatgagcttgaggttgaatgaacagtatgaacatgcctccattcacctgtgggacctgctggaagggaaggaaaaacctgtatgtggaaccacctataaagttctaaaggaaattgttgagcgtgtttttcagtcaaactactttgacagcacccacaaccaccagaatgggctgtgtgaggaagaagaggcagcctcagcacctgcagttgaagaccaggtacctgaagctgaacctgagccagcagaagagtacactgagcaaagtgaagttgaatcaacagagtatgtaaatagacagttcatggcagaaacacagttcaccagtggtgaaaaggagcaggtagatgagtggacagttgaaacggttgaggtggtaaattcactccagcagcaacctcaggctgcatccccttcagtaccagagccccactctttgactccagtggctcaggcagatccccttgtgagaagacagcgagtacaagaccttatggcacaaatgcagggtccctataatttcatactaagggctcccggagggttaagggctcccggagggttaagggctcccggagggttaagggctcccag

SEQ ID NO: 372990 - DNA, 1425 bp, Homo sapiens
cgggcagcccgagcggccgcgaaggcccccgctctccgcttctcccgcccctcgcgacccagagggctgctggctggctaagtccctcccgctcccggctctcgcctcactaggagcggctctcggtgcagcgggacagggcgaagcggcctgcgcccacggagcgcgcgacactgcccggaagggaccgccacccttgccccctcagctgcccactcgtgatttccagcggcctccgcgcgcgcacgatgccctcggccaccagccacagcgggagcggcagcaagtcgtccggaccgccaccgccgtcgggttcctccgggagtgaggcggccgcgggagccggggccgccgcgccggcttctcagcaccccgcaaccggcaccggcgctgtccagaccgaggccatgaagcagattctcggggtgatcgacaagaaacttcggaacctggagaagaaaaaggtgccaggagttggcggggaagggaggggtggctgcggccgggctctgcggcccctccgaccctggtcgctggagccttcgcttcttttcgtctcgggagcgttactaggtcccctcctcccaccccctggcccacacgccccgtctccacgttcagcgggagcttcgtgcccagaaaacgggctcttggaagaggcacttgtcacctgactcggacgcggcactgtaccccaggcctctttattactcttccgctgtgggtccggctttttggcctttaggagtgggacatgtgagggtgggggcctgtcgtcaggacttcactgtatggtgcccttctttccgtctctgaggcccgatttctctgacgagggcccaaaatgaagaggtccctgcgcggggggctccgggttcaaccgaccgcctcgtggagttggggcggcctgcgtcctgcagccttggggtctgtccgctcggttaccatgcactcgagacctgtcgagcgtcccctcttcttccgtaggagagaagtgtgtttagaatcttaaggtagaactgcctttccggcaggcccattttgaatgggtcttcgatttgctacccccgcgcccatgcgatgggctcccctgcgtttccctctttgtttcaattgtttaggtgtccccccgagcctcaggctcagctcaatcgcgagatgattttctgcagcgactttttgttcctaggggactgtgaaggggcgggggactgccacgatttagattcgttgggggctgggtcctggggagactggagaggatggctgggactcggggcacatggagagagcgtctaacatggcggcggctgcggggagagggaagcgctttactggagctgcattgtgagcacaaagcgaaagcagagggggagggcagagaccaggcagccgccccgactggcctccttaggcccccctcta

SEQ ID NO: 372991 - DNA, 434 bp, Homo sapiens
cagagatctgtcaggtgtgcccacacaacagaagcacttgtaaactaattaagcacggtcactgaatccttttttcaccagccttctaaagatgttgtcttaaaaacataagaaagaaaatccatttttttaaagcaatgaaatgttctaattaggtttgaggacatttgaaggagcgattgttttttccccaaaattttggagcagaggggacgttttacatcatcctaacttcatgttcctctgtcattttattttatttatttatttttaattccaaaggagaaagttgaatcaggaaaatttgtcttaaaatatactgcttagtttagagacggacaaactaatgtatttttgtaaatcatgggtggcggatgtcaaaatctctcattaattaccctgtttttttctttaaggaaattgattcatgaata

SEQ ID NO: 372992 - DNA, 367 bp, Homo sapiens
tttgatcactaggcattgtttggttgacctttcaaacctgacccaggatggcccacagcttcttgctgagacattagacattttcttgttgaatttttccctcaaggtagatcttccaagcatccatgttgacatagaatgttctagtttccaatttacactagcttacacccatgatgagattgaaaaccgtaacacatcatctttctttttctataccatttacttagcttgaaatgcttccaactttctctccctcaactaaccgaacctccttctcccttattccttgtgtgcgtttctactcctagaccaatggctctcaaccaggttggtcattggattcatctggctcacttccttaaag

SEQ ID NO: 372993 - DNA, 1188 bp, Homo sapiens
  misc_feature (1157)..(1157): n is a, c, g, or t
gccgccgccgccgcttcagtggccgcagtggccgcaaggacccggacctcagggaggcctccgcacgaagtcggaccgtcctgcgcgccgcctaagtccaggcttgcccgtctgctgccaggcaacaacgcccctagtctctccgttcgggaagacgcgtggccctgcctgccacccaccggaagtgagggcaaatggcaacagcggctctggaattctatacaggcattgctgaggacacctaagatgacgcaatctccgcgcgggtagggcggggctccgcaaggacctcatgccttagagatcgcctgaagagcggaagccttctgtcgagaagcagctacccaagctccaggagcttccgaagaaacaggaccagagagggaaggtgacctgaaagtcacagaataattttttagagctgaacaagaatccaagcctgcaactgcagagacgagagatctttctgctgtctatactcttggaaagcacatcctaagatctttgcagattatcctgtggaaggaaaatgcctaaagtcaaaagaagccggaaagcacccccagatggctgggagttgattgagccaacactggatgaattagatcaaaagatgagagaagctgaaacagaaccgcatgagggaaagaggaaagtggaatctctgtggcccatcttcaggatccaccaccagaaaacccgctacatcttcgacctcttttacaagcggaaagccatcagcagagaactctatgaatattgtattaaagaaggctatgcagacaaaaacctgattgcaaaatggaaaaagcaaggatatgagaacttgtgctgcctgcggtgcattcagacacgggacaccaacttcgggacgaactgcatctgccgcgtgcccaaaagcaagctggaagtgggccgcatcatcgagtgcacacactgtggctgtcgtggctgctctggctgaggctggcgcgctccaccctggactctggacttcgcaggttcctgcctgtcacgccacccccttcctgggagcagcgagcagtgccccaggcccgagttggagcacggtctctatggggaaggcttcgctgtctatcagctgtgatttgtaaaaataaaatctttaaatctctcgaaaaaaaaaacaaacacanaaaacaccaagggaaaaaaacgggggggaaa

SEQ ID NO: 372994 - DNA, 1680 bp, Homo sapiens
gccgccgccgccgcttcagtggccgcagtggccgcaaggacccggacctcagggaggcctccgcacgaagtcggaccgtcctgcgcgccgcctaagtccaggcttgcccgtctgctgccaggcaacaacgcccctagtctctccgttcgggaagacgcgtggccctgcctgccacccaccggaagtgagggcaaatggcaacagcggctctggaattctatacaggcattgctgaggacacctaagatgacgcaatctccgcgcgggtagggcggggctccgcaaggacctcatgccttagagatcgcctgaagagcggaagccttctgtcgagaagcagctacccaagctccaggagcttccggtatgtgttttccctctgttctcgattaccttggcaacggctgaggcgggagaccggtggtctgcaccgtcctggagggagatatgagtggctggactctcagccagccactgggatgtgttcgggctttggaccttgaggccggagagagctcccgagaggaggcggcgccacgttcgttcttctgaggggacggtagatttgggggttttcctctaggattctcgcgccgtttcctctgaagaaacaggaccagagagggaaggtgacctgaaagtcacagaataattttttagagctgaacaagaatccaagcctgcaactgcagagacgagagatctttctgctgtctatactcttggaaagcacatcctaagatctttgcagattatcctgtggaaggaaaatgcctaaagtcaaaagaagccggaaagcacccccagatggctgggagttgattgagccaacactggatgaattagatcaaaagatgagagaagctgaaacagaaccgcatgagggaaagaggaaagtggaatctctgtggcccatcttcaggatccaccaccagaaaacccgctacatcttcgacctcttttacaagcggaaagccatcagcagagaactctatgaatattgtattaaagaaggctatgcagacaaaaacctgattgcaaaatggaaaaagcaaggatatgagaacttgtgctgcctgcggtgcattcagacacgggacaccaacttcgggacgaactgcatctgccgcgtgcccaaaagcaagctggaagtggtaatgtctgacactcaagcttggtgttgttttcagctcaaaattctgccttagtcgactgcaagggatcttatgttatttggttgggctggaatgtcgttttgtccctggatgtcctgctggctctccctcgtgggagtgggtccctgtattcaggaatccatgtgaggcagcgtgtggctgtgtgttagttaggtctggggtcaatctcaactccacttttgggcaaattactgaacccctttcctcacttaggaaatggtggtggggagccctaatcccaaggtggtggcagggtgacatcagggaaggacaaccagtgagttcctgtccctttcagtcctcacagtgatactttaacattaccatcactatctttcccgcccccccaagacggagtcttgctttgtcgcccaggctggagtgcagtgatgccatcttggctcactgcaacctccacctcccgggttcaagcggttctcctgcctcatcctcctgagtagctgggactacaggcatgcaccac

SEQ ID NO: 372995 - DNA, 1003 bp, Homo sapiens
  misc_feature (915)..(915): n is a, c, g, or t
  misc_feature (922)..(922): n is a, c, g, or t
gccgccgccgccgcttcagtggccgcagtggccgcaaggacccggacctcagggaggcctccgcacgaagtcggaccgtcctgcgcgccgcctaagtccaggcttgcccgtctgctgccaggcaacaacgcccctagtctctccgttcgggaagacgcgtggccctgcctgccacccaccggaagtgagggcaaatggcaacagcggctctggaattctatacaggcattgctgaggacacctaagatgacgcaatctccgcgcgggtagggcggggctccgcaaggacctcatgccttagagatcgcctgaagagcggaagccttctgtcgagaagcagctacccaagctccaggagcttccgaagaaacaggaccagagagggaaggtgacctgaaagtcacagaataattttttagagctgaacaagaatccaagcctgcaactgcagagacgagagatctttctgctgtctatactcttggaaagcacatcctaagatctttgcagattatcctgtggaaggaaaatgcctaaagtcaaaagaagccggaaagcacccccagatggctgggagttgattgagccaacactggatgaattagatcaaaagatgagagaagctgaaacagaaccgcatgagggaaagaggaaagtggaatctctgtggcccatcttcaggatccaccaccagaaaacccgctacatcttcgacctcttttacaagcggaaagccatcagcagagaactctatgaatattgtattaaagaaggctatgcagacaaaaacctgattgcaaaatggaaaaagcaaggatatgagaacttgtgctgcctgcggtgcattcagacacgggacaccaacttcgggacgaactgcatctgccgcgtgcccaaaagcaagctggaagtggnccgcatnatcgagtgcacactgtcgtttgagcggttgctttggttggatctgatcttttcactttggctttgtactctgcattcttct

SEQ ID NO: 372996 - DNA, 780 bp, Homo sapiens
ctatgaagaaactttaccactcaggctggaggtgccagacatgcgactatatataaatagagctgaacaagaatccaagcctgcaactgcagagacgagagatctttctgctgtctatactcttggaaagcacatcctaagatctttgcagattatcctgtggaaggaaaatgcctaaagtcaaaagaagccggaaagcacccccagatggctgggagttgattgagccaacactggatgaattagatcaaaagatgagagaagctgaaacagaaccgcatgagggaaagaggaaagtggaatctctgtggcccatcttcaggatccaccaccagaaaacccgctacatcttcgacctcttttacaagcggaaagccatcagcagagaactctatgaatattgtattaaagaaggctatgcagacaaaaacctgattgcaaaatggaaaaagcaaggatatgagaacttgtgctgcctgcggtgcattcagacacgggacaccaacttcgggacgaactgcatctgccgcgtgcccaaaagcaagctggaagtgggccgcatcatcgagtgcacacactgtggctgtcgtggctgctctggctgaggctggcgcgctccaccctggactctggacttcgcaggttcctgcctgtcacgccacccccttcctgggagcagcgagcagtgccccaggcccgagttggagcacggtctctatggggaaggcttcgctgtctatcagctgtgatttgtaaaaataaaatctttaaatctctcga

SEQ ID NO: 372997 - DNA, 1808 bp, Homo sapiens
gccgccgccgccgcttcagtggccgcagtggccgcaaggacccggacctcagggaggcctccgcacgaagtcggaccgtcctgcgcgccgcctaagtccaggcttgcccgtctgctgccaggcaacaacgcccctagtctctccgttcgggaagacgcgtggccctgcctgccacccaccggaagtgagggcaaatggcaacagcggctctggaattctatacaggcattgctgaggacacctaagatgacgcaatctccgcgcgggtagggcggggctccgcaaggacctcatgccttagagatcgcctgaagagcggaagccttctgtcgagaagcagctacccaagctccaggagcttccggtatgtgttttccctctgttctcgattaccttggcaacggctgaggcgggagaccggtggtctgcaccgtcctggagggagatatgagtggctggactctcagccagccactgggatgtgttcgggctttggaccttgaggccggagagagctcccgagaggaggcggcgccacgttcgttcttctgaggggacggtagatttgggggttttcctctaggattctcgcgccgtttcctctgaagaaacaggaccagagagggaaggtgacctgaaagtcacagaataattttttagagctgaacaagaatccaagcctgcaactgcagagacgagagatctttctgctgtctatactcttggaaagcacatcctaagatctttgcagattatcctgtggaaggaaaatgcctaaagtcaaaagaagccggaaagcacccccagatggctgggagttgattgagccaacactggatgaattagatcaaaagatgagagaagctgaaacagaaccgcatgagggaaagaggaaagtggaatctctgtggcccatcttcaggatccaccaccagaaaacccgctacatcttcgacctcttttacaagcggaaagccatcagcagagaactctatgaatattgtattaaagaaggctatgcagacaaaaacctgattgcaaaatggaaaaagcaaggatatgagaacttgtgctgcctgcggtgcattcagacacgggacaccaacttcgggacgaactgcatctgccgcgtgcccaaaagcaagctggaagtgggccgcatcatcgagtgcacacactgtggctgtcgtggctgctctggctgaggctggcgcgctccaccctggactctggacttcgcaggttcctgcctgtcacgccacccccttcctgggagcagcgagcagtgccccaggcccgagttggagcacggtctctatggggaaggcttcgctgtctatcagctgtgatttgtaaaaataaaatctttaaatctctcgagccccacgtctcttctttcagagcatcggcctatggaacccggcggggcggcccaggccccagggaccagatgccccagcccccttgtggtgtgtgaggtgacacacaaaggtagctggagctggaagtcccgtgaaggtgacacgcaaaggtggctggagctgcacttggacctgctgggagcacaggcaccttgggcctagtgtgtgtcctcaccaacacctgtgacacgctgcggctgttcctcagggcctggctcttcccccaggcaggaggtgacaccagctcacttgtcctggggctcccacagagcactgggggccgagcacattgttccagctgtgctcccatcacctgcccccaagggcacatccgtcatcagcctccttgccggtgtcctggtccccctggggcttggtccggaactt

SEQ ID NO: 372998 - DNA, 1211 bp, Homo sapiens
gccgccgccgccgcttcagtggccgcagtggccgcaaggacccggacctcagggaggcctccgcacgaagtcggaccgtcctgcgcgccgcctaagtccaggcttgcccgtctgctgccaggcaacaacgcccctagtctctccgttcgggaagacgcgtggccctgcctgccacccaccggaagtgagggcaaatggcaacagcggctctggaattctatacaggcattgctgaggacacctaagatgacgcaatctccgcgcgggtagggcggggctccgcaaggacctcatgccttagagatcgcctgaagagcggaagccttctgtcgagaagcagctacccaagctccaggagcttccggtatgtgttttccctctgttctcgattaccttggcaacggctgaggcgggagaccggtggtctgcaccgtcctggagggagatatgagtggctggactctcagccagccactgggatgtgttcgggctttggaccttgaggccggagagagctcccgagaggaggcggcgccacgttcgttcttctgaggggacggtagatttgggggttttcctctaggattctcgcgccgtttcctctgaagaaacaggaccagagagggaaggtgacctgaaagtcacagaataattttttagagctgaacaagaatccaagcctgcaactgcagagacgagagatctttctgctgtctatactcttggaaagcacatcctaagatctttgcagattatcctgtggaaggaaaatgcctaaagtcaaaagaagccggaaagcacccccagatggctgggagttgattgagccaacactggatgaattagatcaaaagatgagagaagctgaaacagaaccgcatgagggaaagaggaaagtggaatctctgtggcccatcttcaggatccaccaccagaaaacccgctacatcttcgacctcttttacaagcggaaagccatcagcagagaactctatgaatattgtattaaagaaggctatgcagacaaaaacctgattgcaaaatggaaaaagcaaggatatgagaacttgtgctgcctgcggtgcattcagacacgggacaccaacttcgggaacaaaattgaattttgccggggtgccccaaaaagcaaagcctgggaaagttggggcccgctattatatggaggtggcccccaccccttgtgggtttgt

SEQ ID NO: 372999 - DNA, 1497 bp, Homo sapiens
gccgccgccgccgcttcagtggccgcagtggccgcaaggacccggacctcagggaggcctccgcacgaagtcggaccgtcctgcgcgccgcctaagtccaggcttgcccgtctgctgccaggcaacaacgcccctagtctctccgttcgggaagacgcgtggccctgcctgccacccaccggaagtgagggcaaatggcaacagcggctctggaattctatacaggcattgctgaggacacctaagatgacgcaatctccgcgcgggtagggcggggctccgcaaggacctcatgccttagagatcgcctgaagagcggaagccttctgtcgagaagcagctacccaagctccaggagcttccggtatgtgttttccctctgttctcgattaccttggcaacggctgaggcgggagaccggtggtctgcaccgtcctggagggagatatgagtggctggactctcagccagccactgggatgtgttcgggctttggaccttgaggccggagagagctcccgagaggaggcggcgccacgttcgttcttctgaggggacggtagatttgggggttttcctctaggattctcgcgccgtttcctctgaagaaacaggaccagagagggaaggtgacctgaaagtcacagaataattttttagagctgaacaagaatccaagcctgcaactgcagagacgagagatctttctgctgtctatactcttggaaagcacatcctaagatctttgcagattatcctgtggaaggaaaatgcctaaagtcaaaagaagccggaaagcacccccagatggctgggagttgattgagccaacactggatgaattagatcaaaagatgagagaagctgaaacagaaccgcatgagggaaagaggaaagtggaatctctgtggcccatcttcaggatccaccaccagaaaacccgctacatcttcgacctcttttacaagcggaaagccatcagcagaggtaattagtcagtctctcttggactttgaagctcgcgtcacttttggagttactgaactaaccacaatccttattctcgcaacctgtgcaagtcatggtttttcttaccacgaaaattagggggagccaacgttggctgagttttgtgtgtgtgtttgttttttgtttgtttgttttgagatggagtctcactctgtcacccaggctggagtgcagtggcgcaatcttggctcactgcaagctccacttcctgggttcaagcgattctcctgtctcagctcccaagtagctgggattacaggcacctgccaccacacctggccaatttttgtatttttagtaaagatggggtttcaccatattggtcaggctgatcttgaactcctgacctcaggtgattcacccgactcggtctcccaaagtgctggaattataggcgtggtccaccgctcttggctttttttttttttttttttttgaaacagggtcttgctctgttccacaggctgg

SEQ ID NO: 373000 - DNA, 1243 bp, Homo sapiens
gccgccgccgccgcttcagtggccgcagtggccgcaaggacccggacctcagggaggcctccgcacgaagtcggaccgtcctgcgcgccgcctaagtccaggcttgcccgtctgctgccaggcaacaacgcccctagtctctccgttcgggaagacgcgtggccctgcctgccacccaccggaagtgagggcaaatggcaacagcggctctggaattctatacaggcattgctgaggacacctaagatgacgcaatctccgcgcgggtagggcggggctccgcaaggacctcatgccttagagatcgcctgaagagcggaagccttctgtcgagaagcagctacccaagctccaggagcttccggtatgtgttttccctctgttctcgattaccttggcaacggctgaggcgggagaccggtggtctgcaccgtcctggagggagatatgagtggctggactctcagccagccactgggatgtgttcgggctttggaccttgaggccggagagagctcccgagaggaggcggcgccacgttcgttcttctgaggggacggtagatttgggggttttcctctaggattctcgcgccgtttcctctgaagaaacaggaccagagagggaaggtgacctgaaagtcacagaataattttttagagctgaacaagaatccaagcctgcaactgcagagacgagagatctttctgctgtctatactcttggaaagcacatcctaagatctttgcagattatcctgtggaaggaaaatgcctaaagtcaaaagaagccggaaagcacccccagatggctgggagttgattgagccaacactggatgaattagatcaaaagatgagagaagctgaaacagaaccgcatgagggaaagaggaaagtggaatcaagagtcatgactcttacagtgggtaggattactcccttttttgttgtcattaaggaaaccttttgtcaattttggcttttgttgccatttcttttggtgttttagtcatgaagtctttgcccatgcttatgtcctcaatggtattgcctaggttttcttctaggatttttctggttttaggtctcacgtttaaatctttaatgcatcttgagttaatttttgtataaggtgtcagcaaggggtctagtttcggttttctgcactatgaccagccagagtgcacaggcgacccgcaagcttcttcctgtgcctgtggaatctagctaccgtcctagtcc

SEQ ID NO: 373001 - DNA, 1139 bp, Homo sapiens
gccgccgccgccgcttcagtggccgcagtggccgcaaggacccggacctcagggaggcctccgcacgaagtcggaccgtcctgcgcgccgcctaagtccaggcttgcccgtctgctgccaggcaacaacgcccctagtctctccgttcgggaagacgcgtggccctgcctgccacccaccggaagtgagggcaaatggcaacagcggctctggaattctatacaggcattgctgaggacacctaagatgacgcaatctccgcgcgggtagggcggggctccgcaaggacctcatgccttagagatcgcctgaagagcggaagccttctgtcgagaagcagctacccaagctccaggagcttccgaagaaacaggaccagagagggaaggtgacctgaaagtcacagaataattttttagagctgaacaagaatccaagcctgcaactgcagagacgagagatctttctgctgtctatactcttggaaagcacatcctaagatctttgcagattatcctgtggaaggaaaatgcctaaagtcaaaagaagccggaaagcacccccagatggctgggagttgattgagccaacactggatgaattagatcaaaagatgagagaagctgaaacagaaccgcatgagggaaagaggaaagtggaatctctgtggcccatcttcaggatccaccaccagaaaacccgctacatcttcgacctcttttacaagcggaaagccatcagcagagaactctatgaatattgtattaaagaaggctatgcagacaaaaacctgattgcaaaatggaaaaagcaaggatatgagaacttgtgctgcctgcggtgcattcagacacgggacaccaacttcgggacgaactgcatctgccgcgtgcccaaaagcaagctggaagtgggccgcatcatcgagtgcacacactgtggctgtcgtggctgctctggctgaggctggcgcgctccaccctggactctggacttcgcaggttcctgcctgtcacgccacccccttcctgggagcagcgagcagtgccccaggcccgagttggagcacggtctctatggggaaggcttcgctgtctatcagctgtgatttgtaaaaataaaatctttaaatctctcga

SEQ ID NO: 373002 - DNA, 1380 bp, Homo sapiens
gccgccgccgccgcttcagtggccgcagtggccgcaaggacccggacctcagggaggcctccgcacgaagtcggaccgtcctgcgcgccgcctaagtccaggcttgcccgtctgctgccaggcaacaacgcccctagtctctccgttcgggaagacgcgtggccctgcctgccacccaccggaagtgagggcaaatggcaacagcggctctggaattctatacaggcattgctgaggacacctaagatgacgcaatctccgcgcgggtagggcggggctccgcaaggacctcatgccttagagatcgcctgaagagcggaagccttctgtcgagaagcagctacccaagctccaggagcttccggtatgtgttttccctctgttctcgattaccttggcaacggctgaggcgggagaccggtggtctgcaccgtcctggagggagatatgagtggctggactctcagccagccactgggatgtgttcgggctttggaccttgaggccggagagagctcccgagaggaggcggcgccacgttcgttcttctgaggggacggtagatttgggggttttcctctaggattctcgcgccgtttcctctgaagaaacaggaccagagagggaaggtgacctgaaagtcacagaataattttttagagctgaacaagaatccaagcctgcaactgcagagacgagagatctttctgctgtctatactcttggaaagcacatcctaagatctttgcagattatcctgtggaaggaaaatgcctaaagtcaaaagaagccggaaagcacccccagatggctgggagttgattgagccaacactggatgaattagatcaaaagatgagagaagctgaaacagaaccgcatgagggaaagaggaaagtggaatctctgtggcccatcttcaggatccaccaccagaaaacccgctacatcttcgacctcttttacaagcggaaagccatcagcagagaactctatgaatattgtattaaagaaggctatgcagacaaaaacctgattgcaaaatggaaaaagcaaggatatgagaacttgtgctgcctgcggtgcattcagacacgggacaccaacttcgggacgaactgcatctgccgcgtgcccaaaagcaagctggaagtgggccgcatcatcgagtgcacacactgtggctgtcgtggctgctctggctgaggctggcgcgctccaccctggactctggacttcgcaggttcctgcctgtcacgccacccccttcctgggagcagcgagcagtgccccaggcccgagttggagcacggtctctatggggaaggcttcgctgtctatcagctgtgatttgtaaaaataaaatctttaaatctctcga

SEQ ID NO: 373003 - DNA, 1429 bp, Homo sapiens
  misc_feature (1398)..(1398): n is a, c, g, or t
gccgccgccgccgcttcagtggccgcagtggccgcaaggacccggacctcagggaggcctccgcacgaagtcggaccgtcctgcgcgccgcctaagtccaggcttgcccgtctgctgccaggcaacaacgcccctagtctctccgttcgggaagacgcgtggccctgcctgccacccaccggaagtgagggcaaatggcaacagcggctctggaattctatacaggcattgctgaggacacctaagatgacgcaatctccgcgcgggtagggcggggctccgcaaggacctcatgccttagagatcgcctgaagagcggaagccttctgtcgagaagcagctacccaagctccaggagcttccggtatgtgttttccctctgttctcgattaccttggcaacggctgaggcgggagaccggtggtctgcaccgtcctggagggagatatgagtggctggactctcagccagccactgggatgtgttcgggctttggaccttgaggccggagagagctcccgagaggaggcggcgccacgttcgttcttctgaggggacggtagatttgggggttttcctctaggattctcgcgccgtttcctctgaagaaacaggaccagagagggaaggtgacctgaaagtcacagaataattttttagagctgaacaagaatccaagcctgcaactgcagagacgagagatctttctgctgtctatactcttggaaagcacatcctaagatctttgcagattatcctgtggaaggaaaatgcctaaagtcaaaagaagccggaaagcacccccagatggctgggagttgattgagccaacactggatgaattagatcaaaagatgagagaagctgaaacagaaccgcatgagggaaagaggaaagtggaatctctgtggcccatcttcaggatccaccaccagaaaacccgctacatcttcgacctcttttacaagcggaaagccatcagcagagaactctatgaatattgtattaaagaaggctatgcagacaaaaacctgattgcaaaatggaaaaagcaaggatatgagaacttgtgctgcctgcggtgcattcagacacgggacaccaacttcgggacgaactgcatctgccgcgtgcccaaaagcaagctggaagtgggccgcatcatcgagtgcacacactgtggctgtcgtggctgctctggctgaggctggcgcgctccaccctggactctggacttcgcaggttcctgcctgtcacgccacccccttcctgggagcagcgagcagtgccccaggcccgagttggagcacggtctctatggggaaggcttcgctgtctatcagctgtgatttgtaaaaataaaatctttaaatctctcgaaaaaaaaaacaaacacanaaaacaccaagggaaaaaaacgggggggaaa

SEQ ID NO: 373004 - DNA, 604 bp, Homo sapiens
gggtttctccatgttggccaggctggtctcgaactcctggcctcaagtgatccacccacctcggcctcccaaagtgatgggattacagctgaaacagaaccgcatgagggaaagaggaaagtggaatctctgtggcccatcttcaggatccaccaccagaaaacccgctacatcttcgacctcttttacaagcggaaagccatcagcagagaactctatgaatattgtattaaagaaggctatgcagacaaaaacctgattgcaaaatggaaaaagcaaggatatgagaacttgtgctgcctgcggtgcattcagacacgggacaccaacttcgggacgaactgcatctgccgcgtgcccaaaagcaagctggaagtgggccgcatcatcgagtgcacacactgtggctgtcgtggctgctctggctgaggctggcgcgctccaccctggactctggacttcgcaggttcctgcctgtcacgccacccccttcctgggagcagcgagcagtgccccaggcccgagttggagcacggtctctatggggaaggcttcgctgtctatcagctgtgatttgtaaaaataaaatctttaaatctctcga

SEQ ID NO: 373005 - DNA, 2811 bp, Homo sapiens
  misc_feature (722)..(722): n is a, c, g, or t
  misc_feature (1587)..(1587): n is a, c, g, or t
  misc_feature (1790)..(1790): n is a, c, g, or t
  misc_feature (2317)..(2317): n is a, c, g, or t
  misc_feature (2805)..(2805): n is a, c, g, or t
  misc_feature (2807)..(2807): n is a, c, g, or t
  misc_feature (2809)..(2810): n is a, c, g, or t
acaataactagaaagaattggatttctctttctactctggcaggaccaaaaaaaaaattttgtaacaaaccagtaggttaatgtggttttgttttgtttcggttttggtcagcttcatttagcctatgatgggtcatggctttgaaacttttgtctagcacttagtcaggctgatgaggcaggatgacttataaaggtgggtgtaagaagagcccttggattacagagaactgtagtaggtaggagagatgctagacaattcactacttaatcgtcagtcttcattaatccctggggggagtagcctctatgtttcaggcagctctggacagttagtgtttgtgcacatacccagtgatttgttgatgagactctgtgggcaacaaccacagtcattgtatatgcaaccttgtgcctactggcctaatttgcttgttacctgaaactgtgtcgaaactaaagtttccagaaattgagtcgaaatgtttacaaaatgtgacatgacagtgctctctggcctgaatgtgcatttacttgccttagtttattctttatcttagtaatttacttcgtatggtttggtctctgataactttcacagattctggttaacacgagttactaaaatttgtgaaataatagtatcacattgtgtttcttggtacacatttgaagtcagtcaaaacaatgtttgagaatgtgtctggctctttaatgccctntgcagcagaggactttgtaaaggatttcatttcaatcctaaatgacctgtgagaatctggtctcaggtaaaaatctagttacattttgagccactacctaatttaattatctttggatatacttgtttgcataaacatttaatatctgattgcataggtaatatgacattaccctctctatcccaattcctaccctctctcttgacacccagaagtttctgcagttggatttcctgtttcattgcaaggcagtattggagcctgcattcctagcagctgagaatagaaataacaaataattattattaatttaataattgttaatagtgtaaatagttcattgttcctacagactgcattttgagaactggtattcctaatgtatttcatatattaaaaatgaagtcaagcgttttagatttaggcaggtagcacttagagaaaggatctcacaatctctgctcctctttgcacaagtctagcaaaagtgaaactatgtttatagcttcagctttgatacaaacacttttctcaaacagattctagacccatgggaaaaggcttctttccttgtgctccttgagaacactgtgtaaagaacgtactaatgaaagaatctaaggtcaagaagaatgaatgcacctttaaaatgacaagttttatcttgttactctcctgctaaaaacagtctgttgcattctatgagatggtatggatggtgtccagatgcctcactaggccacactcagggtccttgaatagctgcagtttgccaggcttttctgcattgtcgtggtggtccttcccttgttgctgctgcctgagagatactgcctggttcttacagacacagattatgtcatcnttgcagccttcacccaaagttgctccctccttctagggcattttgttttcctacttaataccaagtgtcagcatgttagtaataaacaggtgtctctaccattagtcaaaggtgggagttaagcctttcatctttgtagctttctccagtacctaaccatgatttacttcatgggaagtccctcaaagtactattaattatcntgtgttctcctgccttgcctcttaacaaaaattctgctgttcctgattatttccattttaccagtgttttgttccttttctatccaggcagcataattcgttgtatgaggcgcctggaagaattgcttcgacaaatgtgtcaagcagcaaaagccattggaaacactgagctggaaaataaatttgcagaaggaaggtcagtatcaaatggataagctgtttctaatttagacaaatttggtgaagcaaatcttgagccctggaccacaacctaggaggacgttttgagatgttcttcactgcattgtcatggagagctatctactagtgtttctataaaatttagtgtgttgggggaaaagttgagattttatatatacatgcatttacgtatattaattgtacgctaactacatgccaggcattgttttaagcactaggggatatagtgaacaaaaagacacccctgccttcatggagtttacattctagtgtggggagatagacaataagtcaacaattaaatntatcagatggtgataagtctgtaagataaaaacaaagcagaaaagacaatagaattggcagatggatatgatggtctagggcctccacagggaaggtggcagttaaggcctttggtgtatgcttgatgtacgtgaacaccagcaagaggccagtgtggctggagcagaatgggcagtgagtagaggagtaggggttgaagtgagaaaggaaatgattccatagttcccagccccaggcttctcaactctgcagtgactggaggtgtggagtttgggagtgacctgccccaacttggactttacaaggtaattgttgctcttacattcagggcaagtctgtagagtagcacagtagaagtggggagaacagatcaagaaaggatggctaaaccaaggtggtagtaatggagtggtggtgggggggcaaggggcataagcttcagtcctgtctactgactcttgaccaagaaaaaggactaagttaatcnangnnt

SEQ ID NO: 373006 - DNA, 4083 bp, Homo sapiens
agggagatttgctctcactgctcccaaaaatggcggacgcattcggagatgagctgttcagcgtgttcgagggcgactcgaccactgcggcgggaaccaaaaaagacaaggaaaaggacaaggggaaatggaaggggcctccagggtctgcagacaaggcagggaaacgttttgatggtaaattacaatcagaatcaactaataatggaaaaaataagagagatgtagatttcgaaggtacagatgaacccatttttggaaagaagcccaggatagaagagtcaataactgaagacttaagtttggcagacctgatgcccagagtcaaggtacaatcagttgaaactgttgaagggtgtacacatgaggttgcacttcctgcagaagaggattatttaccacttaaaccacgagttggaaaagctgctaaggaatacccgttcattcttgatgcttttcaaagagaggccattcagtgtgttgacaataatcagtctgttctagtatctgcacatacctcagcgggaaaaacagtatgcgccgagtatgccattgcattggccttaagggaaaagcagcgtgtaatatttaccagcccaattaaggctctgagtaaccaaaaataccgtgaaatgtatgaagaatttcaagatgttggtttgatgactggtgatgttactattaatcctacggcatcttgtcttgttatgaccacagagattttgagaagtatgctttacagaggttccgaagttatgagagaagttgcttgggttatatttgatgaaattcattatatgagagattcagaacgtggtgtagtatgggaagaaactattattttgcttcctgataacgtccactatgtctttctttcggctactattccaaatgcccgacagtttgctgaatggatttgccatttacataaacagccttgtcatgttatttacacagattatcggcccactccattgcaacactacatttttccagcagggggagatggcctgcatcttgtggttgatgaaaatggtgacttcagagaagataattttaatactgcaatgcaagtgcttcgagatgcaggtgatttggccaaaggagaccagaaagggcggaaaggaggaacaaaaggaccatcaaatgttttcaaaattgtgaagatgattatggaaagaaatttccaacctgtgattattttcagttttagtaagaaagattgtgaagcctatgcacttcaaatgaccaaattagatttcaacacagatgaagaaaagaagatggttgaagaagtattcagtaatgcaattgattgcttatccgatgaagataaaaaactccctcaggtagaacatgtacttcctcttttgaagaggggaattggtattcaccatggtggtttacttcctattttgaaagaaactatagaaattctcttttctgaaggattgataaaggccttatttgccacggagacctttgctatgggaattaacatgccagctagaactgttttatttacaaatgcccgcaaatttgatgggaaggatttccgatggatttcttctggtgaatacattcagatgtctggtcgtgctggaaggagaggaatggatgatagaggaattgtaattcttatggtagatgaaaagatgagcccaacaattggaaaacaattacttaagggctccgctgatcctctaaatagtgctttccatttgacctacaacatggttttgaacttactacgtgtagaagaaattaatcctgagtacatgttggaaaaatccttctaccagtttcagcattatagagcaattccaggagtagtagagaaggtaaagaattcagaagaacagtataataaaatagtaattcccaatgaagaaagtgtggttatctattataagattagacagcagcttgccaaattgggtaaagaaattgaagaatatattcacaaaccaaaatactgcttaccttttctacaaccaggtcgtttggtaaaggtaaagaatgaaggagatgactttggctggggagtagtggtgaatttctcaaaaaagtcaaatgttaagcctaactctggtgaactggatcctttgtatgtagtagaagtacttctgcgctgtagcaaagagagcttgaaaaattcagctacagaagctgcaaaaccagctaaacctgatgagaaaggagagatgcaggttgtcccagttttggtgcatctcctgtctgctatcagcagtgttaggctttacattcctaaagaccttcggccggtggacaatagacagagtgttttaaaatcaatacaggaagttcagaaacgttttcctgacggcatccccttattagaccctattgatgatatgggcattcaagatcaagggctgaaaaaagtcattcagaaagtagaagcttttgagcatcgaatgtattctcatccacttcacaatgatccaaatttggaaactgtgtatacgctttgtgaaaaaaaagcacagattgcaatagatattaaatctgcaaagcgagaactgaagaaagcaagaacagtcctacaaatggatgaactcaaatgtcgcaaacgtgttttaagaaggttgggatttgctacttcttctgatgtaatagagatgaaaggacgagtggcttgtgagataagcagtgctgatgagctccttctaactgagatgatgtttaatggccttttcaatgacctttctgcagaacaggcaacagcattattaagctgctttgtgtttcaagagaattctagtgagatgcccaaattaacagaacaattagcaggaccacttcgtcaaatgcaggaatgtgctaaaagaattgcaaaagtttcagcagaagccaaattggaaattgatgaggaaacttatctaagctcatttaaacctcacttaatggatgtagtatatacctgggcaactggagctacatttgcccatatctgcaaaatgacagatgtctttgaaggcagcataattcgttgtatgaggcgcctggaagaattgcttcgacaaatgtgtcaagcagcaaaagccattggaaacactgagctggaaaataaatttgcagaaggaatcaccaaaatcaagagagatattgtgtttgctgccagcctctacttgtagagtcagctaaaggaatgtgagattttaaattattgaccacctgtttgattacagttgactacaaatgcctgcaagtgtggatttggttctcccatacattttaatatgtattatatttaaatcaaacatcattcatagaaagcatattacatacatgtttatacataagcattacatttttttaataaaaatgtatacaggtggggcactgttttggtggaaggcttggagtttttttaatgagtttagagctattagataaccactgagttaaaggtaactatgtacacacaaagtgtgcatccaagaggcatagcagcagcagaagtctttaaaggcttgtacaccaggaagaaagatgcatcctcttgccttgtggcaatcattttcctttagaaaacaggccagcttcacctgggcaccctgctgcctttcaaggctggtgattgctcggatagtgattcccagttgttggtgtttcatgcagagttgtatgagagtcctcctcttttctttctttaaaagaagttctttctttgaagaaatccgatacatatacagcctacagtgcaaaatatttaatggtataatttagatcaagttaaaaactacatacaaagttgtgatcaacagcatcctaagataaatataaacaaaaggatatactttgaggtgtacagattaagcatataaaaaattagagactaactgggattttttaaagattattccaaattaagagttgctttgttatgccttcagcaaatagcttcattttgccaatactgaataaaagagttatttctacatgtgaattagttttttcaagtcataatcccctaaaaaaactatttctagccagagcctttcacaataaaaatactaagattttacaaaactactaagttttagaaagagcaaccta

SEQ ID NO: 373007 - DNA, 3907 bp, Homo sapiens
agggagatttgctctcactgctcccaaaaatggcggacgcattcggagatgagctgttcagcgtgttcgagggcgactcgaccactgcggcgggaaccaaaaaagacaaggaaaaggacaaggggaaatggaaggggcctccagggtctgcagacaaggcagggaaacgttttgatggtaaattacaatcagaatcaactaataatggaaaaaataagagagatgtagatttcgaaggtacagatgaacccatttttggaaagaagcccaggatagaagagtcaataactgaagacttaagtttggcagacctgatgcccagagtcaaggtacaatcagttgaaactgttgaagggtgtacacatgaggttgcacttcctgcagaagaggattatttaccacttaaaccacgagttggaaaagctgctaaggaatacccgttcattcttgatgcttttcaaagagaggccattcagtgtgttgacaataatcagtctgttctagtatctgcacatacctcagcgggaaaaacagtatgcgccgagtatgccattgcattggccttaagggaaaagcagcgtgtaatatttaccagcccaattaaggctctgagtaaccaaaaataccgtgaaatgtatgaagaatttcaagatgttggtttgatgactggtgatgttactattaatcctacggcatcttgtcttgttatgaccacagagattttgagaagtatgctttacagaggttccgaagttatgagagaagttgcttgggttatatttgatgaaattcattatatgagagattcagaacgtggtgtagtatgggaagaaactattattttgcttcctgataacgtccactatgtctttctttcggctactattccaaatgcccgacagtttgctgaatggatttgccatttacataaacagccttgtcatgttatttacacagattatcggcccactccattgcaacactacatttttccagcagggggagatggcctgcatcttgtggttgatgaaaatggtgacttcagagaagataattttaatactgcaatgcaagtgcttcgagatgcaggtgatttggccaaaggagaccagaaagggcggaaaggaggaacaaaaggaccatcaaatgttttcaaaattgtgaagatgattatggaaagaaatttccaacctgtgattattttcagttttagtaagaaagattgtgaagcctatgcacttcaaatgaccaaattagatttcaacacagatgaagaaaagaagatggttgaagaagtattcagtaatgcaattgattgcttatccgatgaagataaaaaactccctcaggtagaacatgtacttcctcttttgaagaggggaattggtattcaccatggtggtttacttcctattttgaaagaaactatagaaattctcttttctgaaggattgataaaggccttatttgccacggagacctttgctatgggaattaacatgccagctagaactgttttatttacaaatgcccgcaaatttgatgggaaggatttccgatggatttcttctggtgaatacattcagatgtctggtcgtgctggaaggagaggaatggatgatagaggaattgtaattcttatggtagatgaaaagatgagcccaacaattggaaaacaattacttaagggctccgctgatcctctaaatagtgctttccatttgacctacaacatggttttgaacttactacgtgtagaagaaattaatcctgagtacatgttggaaaaatccttctaccagtttcagcattatagagcaattccaggagtagtagagaaggtaaagaattcagaagaacagtataataaaatagtaattcccaatgaagaaagtgtggttatctattataagattagacagcagcttgccaaattgggtaaagaaattgaagaatatattcacaaaccaaaatactgcttaccttttctacaaccaggtcgtttggtaaaggtaaagaatgaaggagatgactttggctggggagtagtggtgaatttctcaaaaaagtcaaatgttaagcctaactctggtgaactggatcctttgtatgtagtagaagtacttctgcgctgtagcaaagagagcttgaaaaattcagctacagaagctgcaaaaccagctaaacctgatgagaaaggagagatgcaggttgtcccagttttggtgcatctcctgtctgctatcagcagtgttaggctttacattcctaaagaccttcggccggtggacaatagacagagtgttttaaaatcaatacaggaagttcagaaacgttttcctgacggcatccccttattagaccctattgatgatatgggcattcaagatcaagggctgaaaaaagtcattcagaaagtagaagcttttgagcatcgaatgtattctcatccacttcacaatgatccaaatttggaaactgtgtatacgctttgtgaaaaaaaagcacagattgcaatagatattaaatctgcaaagcgagaactgaagaaagcaagaacagtcctacaaatggatgaactcaaatgtcgcaaacgtgttttaagaaggttgggatttgctacttcttctgatgtaatagagatgaaaggacgagtggcttgtgagataagcagtgctgatgagctccttctaactgagatgatgtttaatggccttttcaatgacctttctgcagaacaggcaacagcattattaagctgctttgtgtttcaagagaattctagtgagatgcccaaattaacagaacaattagcaggaccacttcgtcaaatgcaggaatgtgctaaaagaattgcaaaagtttcagcagaagccaaattggaaattgatgaggaaacttatctaagctcatttaaacctcacttaatggatgtagtatatacctgggcaactggagctacatttgcccatatctgcaaaatgacagatgtctttgaaggcagcataattcgttgtatgaggcgcctggaagaattgcttcgacaaatgtgtcaagcagcaaaagccattggaaacactgagctggaaaataaatttgcagaaggaatcaccaaaatcaagagagatattgtgtttgctgccagcctctacttgtagagtcagctaaaggaatgtgagattttaaattattgaccacctgtttgattacagttgactacaaatgcctgcaagtgtggatttggttctcccatacattttaatatgtattatatttaaatcaaacatcattcatagaaagcatattacatacatgtttatacataagcattacatttttttaataaaaatgtatacaggtggggcactgttttggtggaaggcttggagtttttttaatgagtttagagctattagataaccactgagttaaaggtaactatgtacacacaaagtgtgcatccaagaggcatagcagcagcagaagtctttaaaggcttgtacaccaggaagaaagatgcatcctcttgccttgtggcaatcattttcctttagaaaacaggccagcttcacctgggcaccctgctgcctttcaaggctggtgattgctcggatagtgattcccagttgttggtgtttcatgcagagttgtatgagagtcctcctcttttctttctttaaaagaagttctttctttgaagaaatccgatacatatacagcaactaatattgcaaccagagctccctgaatgagtccagtcaacacatcgctccagtggtgtttataatcagaaactcgagaaaggcccacataaatggatacggcaacaagaccaaattgcagtgtggggcgtaagagtcttgcccagtctcccttcatcctggcttgaagataaagctaaaagaaa

SEQ ID NO: 373008 - DNA, 3960 bp, Homo sapiens
agggagatttgctctcactgctcccaaaaatggcggacgcattcggagatgagctgttcagcgtgttcgagggcgactcgaccactgcggcgggaaccaaaaaagacaaggaaaaggacaaggggaaatggaaggggcctccagggtctgcagacaaggcagggaaacgttttgatggtaaattacaatcagaatcaactaataatggaaaaaataagagagatgtagatttcgaaggtacagatgaacccatttttggaaagaagcccaggatagaagagtcaataactgaagacttaagtttggcagacctgatgcccagagtcaaggtacaatcagttgaaactgttgaagggtgtacacatgaggttgcacttcctgcagaagaggattatttaccacttaaaccacgagttggaaaagctgctaaggaatacccgttcattcttgatgcttttcaaagagaggccattcagtgtgttgacaataatcagtctgttctagtatctgcacatacctcagcgggaaaaacagtatgcgccgagtatgccattgcattggccttaagggaaaagcagcgtgtaatatttaccagcccaattaaggctctgagtaaccaaaaataccgtgaaatgtatgaagaatttcaagatgttggtttgatgactggtgatgttactattaatcctacggcatcttgtcttgttatgaccacagagattttgagaagtatgctttacagaggttccgaagttatgagagaagttgcttgggttatatttgatgaaattcattatatgagagattcagaacgtggtgtagtatgggaagaaactattattttgcttcctgataacgtccactatgtctttctttcggctactattccaaatgcccgacagtttgctgaatggatttgccatttacataaacagccttgtcatgttatttacacagattatcggcccactccattgcaacactacatttttccagcagggggagatggcctgcatcttgtggttgatgaaaatggtgacttcagagaagataattttaatactgcaatgcaagtgcttcgagatgcaggtgatttggccaaaggagaccagaaagggcggaaaggaggaacaaaaggaccatcaaatgttttcaaaattgtgaagatgattatggaaagaaatttccaacctgtgattattttcagttttagtaagaaagattgtgaagcctatgcacttcaaatgaccaaattagatttcaacacagatgaagaaaagaagatggttgaagaagtattcagtaatgcaattgattgcttatccgatgaagataaaaaactccctcaggtagaacatgtacttcctcttttgaagaggggaattggtattcaccatggtggtttacttcctattttgaaagaaactatagaaattctcttttctgaaggattgataaaggccttatttgccacggagacctttgctatgggaattaacatgccagctagaactgttttatttacaaatgcccgcaaatttgatgggaaggatttccgatggatttcttctggtgaatacattcagatgtctggtcgtgctggaaggagaggaatggatgatagaggaattgtaattcttatggtagatgaaaagatgagcccaacaattggaaaacaattacttaagggctccgctgatcctctaaatagtgctttccatttgacctacaacatggttttgaacttactacgtgtagaagaaattaatcctgagtacatgttggaaaaatccttctaccagtttcagcattatagagcaattccaggagtagtagagaaggtaaagaattcagaagaacagtataataaaatagtaattcccaatgaagaaagtgtggttatctattataagattagacagcagcttgccaaattgggtaaagaaattgaagaatatattcacaaaccaaaatactgcttaccttttctacaaccaggtcgtttggtaaaggtaaagaatgaaggagatgactttggctggggagtagtggtgaatttctcaaaaaagtcaaatgttaagcctaactctggtgaactggatcctttgtatgtagtagaagtacttctgcgctgtagcaaagagagcttgaaaaattcagctacagaagctgcaaaaccagctaaacctgatgagaaaggagagatgcaggttgtcccagttttggtgcatctcctgtctgctatcagcagtgttaggctttacattcctaaagaccttcggccggtggacaatagacagagtgttttaaaatcaatacaggaagttcagaaacgttttcctgacggcatccccttattagaccctattgatgatatgggcattcaagatcaagggctgaaaaaagtcattcagaaagtagaagcttttgagcatcgaatgtattctcatccacttcacaatgatccaaatttggaaactgtgtatacgctttgtgaaaaaaaagcacagattgcaatagatattaaatctgcaaagcgagaactgaagaaagcaagaacagtcctacaaatggatgaactcaaatgtcgcaaacgtgttttaagaaggttgggatttgctacttcttctgatgtaatagagatgaaaggacgagtggcttgtgagataagcagtgctgatgagctccttctaactgagatgatgtttaatggccttttcaatgacctttctgcagaacaggcaacagcattattaagctgctttgtgtttcaagagaattctagtgagatgcccaaattaacagaacaattagcaggaccacttcgtcaaatgcaggaatgtgctaaaagaattgcaaaagtttcagcagaagccaaattggaaattgatgaggaaacttatctaagctcatttaaacctcacttaatggatgtagtatatacctgggcaactggagctacatttgcccatatctgcaaaatgacagatgtctttgaaggcagcataattcgttgtatgaggcgcctggaagaattgcttcgacaaatgtgtcaagcagcaaaagccattggaaacactgagctggaaaataaatttgcagaaggaatcaccaaaatcaagagagatattgtgtttgctgccagcctctacttgtagagtcagctaaaggaatgtgagattttaaattattgaccacctgtttgattacagttgactacaaatgcctgcaagtgtggatttggttctcccatacattttaatatgtattatatttaaatcaaacatcattcatagaaagcatattacatacatgtttatacataagcattacatttttttaataaaaatgtatacaggtggggcactgttttggtggaaggcttggagtttttttaatgagtttagagctattagataaccactgagttaaaggtaactatgtacacacaaagtgtgcatccaagaggcatagcagcagcagaagtctttaaaggcttgtacaccaggaagaaagatgcatcctcttgccttgtggcaatcattttcctttagaaaacaggccagcttcacctgggcaccctgctgcctttcaaggctggtgattgctcggatagtgattcccagttgttggtgtttcatgcagagttgtatgagagtcctcctcttttctttctttaaaagaagttctttctttgaagaaatccgatacatatacagcctacagtgcaaaatatttaatggtataatttagatcaagttaaaaactacatacaaagttgtgatcaacagcatcctaagataaatataaacaaaaggatatactttgaggtgtacagattaagcatataaaaaattagagaccagcccccccccctccacgagcactgcgcgcgaagaagggcgcgtgcacccccgcgcccaagaacttgggtccggtaaggagtgccattagtcttag

SEQ ID NO: 373009 - DNA, 3789 bp, Homo sapiens
agggagatttgctctcactgctcccaaaaatggcggacgcattcggagatgagctgttcagcgtgttcgagggcgactcgaccactgcggcgggaaccaaaaaagacaaggaaaaggacaaggggaaatggaaggggcctccagggtctgcagacaaggcagggaaacgttttgatggtaaattacaatcagaatcaactaataatggaaaaaataagagagatgtagatttcgaaggtacagatgaacccatttttggaaagaagcccaggatagaagagtcaataactgaagacttaagtttggcagacctgatgcccagagtcaaggtacaatcagttgaaactgttgaagggtgtacacatgaggtatgccattgcattggccttaagggaaaagcagcgtgtaatatttaccagcccaattaaggctctgagtaaccaaaaataccgtgaaatgtatgaagaatttcaagatgttggtttgatgactggtgatgttactattaatcctacggcatcttgtcttgttatgaccacagagattttgagaagtatgctttacagaggttccgaagttatgagagaagttgcttgggttatatttgatgaaattcattatatgagagattcagaacgtggtgtagtatgggaagaaactattattttgcttcctgataacgtccactatgtctttctttcggctactattccaaatgcccgacagtttgctgaatggatttgccatttacataaacagccttgtcatgttatttacacagattatcggcccactccattgcaacactacatttttccagcagggggagatggcctgcatcttgtggttgatgaaaatggtgacttcagagaagataattttaatactgcaatgcaagtgcttcgagatgcaggtgatttggccaaaggagaccagaaagggcggaaaggaggaacaaaaggaccatcaaatgttttcaaaattgtgaagatgattatggaaagaaatttccaacctgtgattattttcagttttagtaagaaagattgtgaagcctatgcacttcaaatgaccaaattagatttcaacacagatgaagaaaagaagatggttgaagaagtattcagtaatgcaattgattgcttatccgatgaagataaaaaactccctcaggtagaacatgtacttcctcttttgaagaggggaattggtattcaccatggtggtttacttcctattttgaaagaaactatagaaattctcttttctgaaggattgataaaggccttatttgccacggagacctttgctatgggaattaacatgccagctagaactgttttatttacaaatgcccgcaaatttgatgggaaggatttccgatggatttcttctggtgaatacattcagatgtctggtcgtgctggaaggagaggaatggatgatagaggaattgtaattcttatggtagatgaaaagatgagcccaacaattggaaaacaattacttaagggctccgctgatcctctaaatagtgctttccatttgacctacaacatggttttgaacttactacgtgtagaagaaattaatcctgagtacatgttggaaaaatccttctaccagtttcagcattatagagcaattccaggagtagtagagaaggtaaagaattcagaagaacagtataataaaatagtaattcccaatgaagaaagtgtggttatctattataagattagacagcagcttgccaaattgggtaaagaaattgaagaatatattcacaaaccaaaatactgcttaccttttctacaaccaggtcgtttggtaaaggtaaagaatgaaggagatgactttggctggggagtagtggtgaatttctcaaaaaagtcaaatgttaagcctaactctggtgaactggatcctttgtatgtagtagaagtacttctgcgctgtagcaaagagagcttgaaaaattcagctacagaagctgcaaaaccagctaaacctgatgagaaaggagagatgcaggttgtcccagttttggtgcatctcctgtctgctatcagcagtgttaggctttacattcctaaagaccttcggccggtggacaatagacagagtgttttaaaatcaatacaggaagttcagaaacgttttcctgacggcatccccttattagaccctattgatgatatgggcattcaagatcaagggctgaaaaaagtcattcagaaagtagaagcttttgagcatcgaatgtattctcatccacttcacaatgatccaaatttggaaactgtgtatacgctttgtgaaaaaaaagcacagattgcaatagatattaaatctgcaaagcgagaactgaagaaagcaagaacagtcctacaaatggatgaactcaaatgtcgcaaacgtgttttaagaaggttgggatttgctacttcttctgatgtaatagagatgaaaggacgagtggcttgtgagataagcagtgctgatgagctccttctaactgagatgatgtttaatggccttttcaatgacctttctgcagaacaggcaacagcattattaagctgctttgtgtttcaagagaattctagtgagatgcccaaattaacagaacaattagcaggaccacttcgtcaaatgcaggaatgtgctaaaagaattgcaaaagtttcagcagaagccaaattggaaattgatgaggaaacttatctaagctcatttaaacctcacttaatggatgtagtatatacctgggcaactggagctacatttgcccatatctgcaaaatgacagatgtctttgaaggcagcataattcgttgtatgaggcgcctggaagaattgcttcgacaaatgtgtcaagcagcaaaagccattggaaacactgagctggaaaataaatttgcagaaggaatcaccaaaatcaagagagatattgtgtttgctgccagcctctacttgtagagtcagctaaaggaatgtgagattttaaattattgaccacctgtttgattacagttgactacaaatgcctgcaagtgtggatttggttctcccatacattttaatatgtattatatttaaatcaaacatcattcatagaaagcatattacatacatgtttatacataagcattacatttttttaataaaaatgtatacaggtggggcactgttttggtggaaggcttggagtttttttaatgagtttagagctattagataaccactgagttaaaggtaactatgtacacacaaagtgtgcatccaagaggcatagcagcagcagaagtctttaaaggcttgtacaccaggaagaaagatgcatcctcttgccttgtggcaatcattttcctttagaaaacaggccagcttcacctgggcaccctgctgcctttcaaggctggtgattgctcggatagtgattcccagttgttggtgtttcatgcagagttgtatgagagtcctcctcttttctttctttaaaagaagttctttctttgaagaaatccgatacatatacagcctacagtgcaaaatatttaatggtataatttagatcaagttaaaaactacatacaaagttgtgatcaacagcatcctaagataaatataaacaaaaggatatactttgaggtgtacagattaagcatataaaaaattagagactaactgggattttttaaagattattccaaattaagagttgctttgttatgccttcagcaaatagcttcattttgccaatactgaataaaagagttatttcta

SEQ ID NO: 373010 - DNA, 3852 bp, Homo sapiens
agggagatttgctctcactgctcccaaaaatggcggacgcattcggagatgagctgttcagcgtgttcgagggcgactcgaccactgcggcgggaaccaaaaaagacaaggaaaaggacaaggggaaatggaaggggcctccagggtctgcagacaaggcagggaaacgttttgatggtaaattacaatcagaatcaactaataatggaaaaaataagagagatgtagatttcgaaggtacagatgaacccatttttggaaagaagcccaggatagaagagtcaataactgaagacttaagtttggcagacctgatgcccagagtcaaggtacaatcagttgaaactgttgaagggtgtacacatgaggttgcacttcctgcagaagaggattatttaccacttaaaccacgagttggaaaagctgctaaggaatacccgttcattcttgatgcttttcaaagagaggccattcagtgtgttgacaataatcagtctgttctagtatctgcacatacctcagcgggaaaaacagtatgcgccgagtatgccattgcattggccttaagggaaaagcagcgtgtaatatttaccagcccaattaaggctctgagtaaccaaaaataccgtgaaatgtatgaagaatttcaagatgttggtttgatgactggtgatgttactattaatcctacggcatcttgtcttgttatgaccacagagattttgagaagtatgctttacagaggttccgaagttatgagagaagttgcttgggttatatttgatgaaattcattatatgagagattcagaacgtggtgtagtatgggaagaaactattattttgcttcctgataacgtccactatgtctttctttcggctactattccaaatgcccgacagtttgctgaatggatttgccatttacataaacagccttgtcatgttatttacacagattatcggcccactccattgcaacactacatttttccagcagggggagatggcctgcatcttgtggttgatgaaaatggtgacttcagagaagataattttaatactgcaatgcaagtgcttcgagatgcaggtgatttggccaaaggagaccagaaagggcggaaaggaggaacaaaaggaccatcaaatgttttcaaaattgtgaagatgattatggaaagaaatttccaacctgtgattattttcagttttagtaagaaagattgtgaagcctatgcacttcaaatgaccaaattagatttcaacacagatgaagaaaagaagatggttgaagaagtattcagtaatgcaattgattgcttatccgatgaagataaaaaactccctcaggtagaacatgtacttcctcttttgaagaggggaattggtattcaccatggtggtttacttcctattttgaaagaaactatagaaattctcttttctgaaggattgataaaggccttatttgccacggagacctttgctatgggaattaacatgccagctagaactgttttatttacaaatgcccgcaaatttgatgggaaggatttccgatggatttcttctggtgaatacattcagatgtctggtcgtgctggaaggagaggaatggatgatagaggaattgtaattcttatggtagatgaaaagatgagcccaacaattggaaaacaattacttaagggctccgctgatcctctaaatagtgctttccatttgacctacaacatggttttgaacttactacgtgtagaagaaattaatcctgagtacatgttggaaaaatccttctaccagtttcagcattatagagcaattccaggagtagtagagaaggtaaagaattcagaagaacagtataataaaatagtaattcccaatgaagaaagtgtggttatctattataagattagacagcagcttgccaaattgggtaaagaaattgaagaatatattcacaaaccaaaatactgcttaccttttctacaaccaggtcgtttggtaaaggtaaagaatgaaggagatgactttggctggggagtagtggtgaatttctcaaaaaagtcaaatgttaagcctaactctggtgaactggatcctttgtatgtagtagaagtacttctgcgctgtagcaaagagagcttgaaaaattcagctacagaagctgcaaaaccagctaaacctgatgagaaaggagagatgcaggttgtcccagttttggtgcatctcctgtctgctatcagcagtgttaggctttacattcctaaagaccttcggccggtggacaatagacagagtgttttaaaatcaatacaggaagttcagaaacgttttcctgacggcatccccttattagaccctattgatgatatgggcattcaagatcaagggctgaaaaaagtcattcagaaagtagaagcttttgagcatcgaatgtattctcatccacttcacaatgatccaaatttggaaactgtgtatacgctttgtgaaaaaaaagcacagattgcaatagatattaaatctgcaaagcgagaactgaagaaagcaagaacagtcctacaaatggatgaactcaaatgtcgcaaacgtgttttaagaaggttgggatttgctacttcttctgatgtaatagagatgaaaggacgagtggcttgtgagataagcagtgctgatgagctccttctaactgagatgatgtttaatggccttttcaatgacctttctgcagaacaggcaacagcattattaagctgctttgtgtttcaagagaattctagtgagatgcccaaattaacagaacaattagcaggaccacttcgtcaaatgcaggaatgtgctaaaagaattgcaaaagtttcagcagaagccaaattggaaattgatgaggaaacttatctaagctcatttaaacctcacttaatggatgtagtatatacctgggcaactggagctacatttgcccatatctgcaaaatgacagatgtctttgaaggcagcataattcgttgtatgaggcgcctggaagaattgcttcgacaaatgtgtcaagcagcaaaagccattggaaacactgagctggaaaataaatttgcagaaggaatcaccaaaatcaagagagatattgtgtttgctgccagcctctacttgtagagtcagctaaaggaatgtgagattttaaattattgaccacctgtttgattacagttgactacaaatgcctgcaagtgtggatttggttctcccatacattttaatatgtattatatttaaatcaaacatcattcatagaaagcatattacatacatgtttatacataagcattacatttttttaataaaaatgtatacaggtggggcactgttttggtggaaggcttggagtttttttaatgagtttagagctattagataaccactgagttaaaggtaactatgtacacacaaagtgtgcatccaagaggcatagcagcagcagaagtctttaaaggcttgtacaccaggaagaaagatgcatcctcttgccttgtggcaatcattttcctttagaaaacaggccagcttcacctgggcaccctgctgcctttcaaggctggtgattgctcggatagtgattcccagttgttggtgtttcatgcagagttgtaaggatccatgcaggtctggtcttgaactcctggcctcaagcaattctcctgcttcaccctactgagtagctgggattaaaggtgggaatcatcacatgcagcatcaaaattcaggattttgacaggatcccctgaatataaacctatcccatttcaattcatttcttgtcctcgtacttccctggtgtttcagtctgcat

SEQ ID NO: 373011 - DNA, 3924 bp, Homo sapiens
agggagatttgctctcactgctcccaaaaatggcggacgcattcggagatgagctgttcagcgtgttcgagggcgactcgaccactgcggcgggaaccaaaaaagacaaggaaaaggacaaggggaaatggaaggggcctccagggtctgcagacaaggcagggaaacgttttgatggtaaattacaatcagaatcaactaataatggaaaaaataagagagatgtagatttcgaaggtacagatgaacccatttttggaaagaagcccaggatagaagagtcaataactgaagacttaagtttggcagacctgatgcccagagtcaaggtacaatcagttgaaactgttgaagggtgtacacatgaggttgcacttcctgcagaagaggattatttaccacttaaaccacgagttggaaaagctgctaaggaatacccgttcattcttgatgcttttcaaagagaggccattcagtgtgttgacaataatcagtctgttctagtatctgcacatacctcagcgggaaaaacagtatgcgccgagtatgccattgcattggccttaagggaaaagcagcgtgtaatatttaccagcccaattaaggctctgagtaaccaaaaataccgtgaaatgtatgaagaatttcaagatgttggtttgatgactggtgatgttactattaatcctacggcatcttgtcttgttatgaccacagagattttgagaagtatgctttacagaggttccgaagttatgagagaagttgcttgggttatatttgatgaaattcattatatgagagattcagaacgtggtgtagtatgggaagaaactattattttgcttcctgataacgtccactatgtctttctttcggctactattccaaatgcccgacagtttgctgaatggatttgccatttacataaacagccttgtcatgttatttacacagattatcggcccactccattgcaacactacatttttccagcagggggagatggcctgcatcttgtggttgatgaaaatggtgacttcagagaagataattttaatactgcaatgcaagtgcttcgagatgcaggtgatttggccaaaggagaccagaaagggcggaaaggaggaacaaaaggaccatcaaatgttttcaaaattgtgaagatgattatggaaagaaatttccaacctgtgattattttcagttttagtaagaaagattgtgaagcctatgcacttcaaatgaccaaattagatttcaacacagatgaagaaaagaagatggttgaagaagtattcagtaatgcaattgattgcttatccgatgaagataaaaaactccctcagtcaccatggtggtttacttcctattttgaaagaaactatagaaattctcttttctgaaggattgataaaggccttatttgccacggagacctttgctatgggaattaacatgccagctagaactgttttatttacaaatgcccgcaaatttgatgggaaggatttccgatggatttcttctggtgaatacattcagatgtctggtcgtgctggaaggagaggaatggatgatagaggaattgtaattcttatggtagatgaaaagatgagcccaacaattggaaaacaattacttaagggctccgctgatcctctaaatagtgctttccatttgacctacaacatggttttgaacttactacgtgtagaagaaattaatcctgagtacatgttggaaaaatccttctaccagtttcagcattatagagcaattccaggagtagtagagaaggtaaagaattcagaagaacagtataataaaatagtaattcccaatgaagaaagtgtggttatctattataagattagacagcagcttgccaaattgggtaaagaaattgaagaatatattcacaaaccaaaatactgcttaccttttctacaaccaggtcgtttggtaaaggtaaagaatgaaggagatgactttggctggggagtagtggtgaatttctcaaaaaagtcaaatgttaagcctaactctggtgaactggatcctttgtatgtagtagaagtacttctgcgctgtagcaaagagagcttgaaaaattcagctacagaagctgcaaaaccagctaaacctgatgagaaaggagagatgcaggttgtcccagttttggtgcatctcctgtctgctatcagcagtgttaggctttacattcctaaagaccttcggccggtggacaatagacagagtgttttaaaatcaatacaggaagttcagaaacgttttcctgacggcatccccttattagaccctattgatgatatgggcattcaagatcaagggctgaaaaaagtcattcagaaagtagaagcttttgagcatcgaatgtattctcatccacttcacaatgatccaaatttggaaactgtgtatacgctttgtgaaaaaaaagcacagattgcaatagatattaaatctgcaaagcgagaactgaagaaagcaagaacagtcctacaaatggatgaactcaaatgtcgcaaacgtgttttaagaaggttgggatttgctacttcttctgatgtaatagagatgaaaggacgagtggcttgtgagataagcagtgctgatgagctccttctaactgagatgatgtttaatggccttttcaatgacctttctgcagaacaggcaacagcattattaagctgctttgtgtttcaagagaattctagtgagatgcccaaattaacagaacaattagcaggaccacttcgtcaaatgcaggaatgtgctaaaagaattgcaaaagtttcagcagaagccaaattggaaattgatgaggaaacttatctaagctcatttaaacctcacttaatggatgtagtatatacctgggcaactggagctacatttgcccatatctgcaaaatgacagatgtctttgaaggcagcataattcgttgtatgaggcgcctggaagaattgcttcgacaaatgtgtcaagcagcaaaagccattggaaacactgagctggaaaataaatttgcagaaggaatcaccaaaatcaagagagatattgtgtttgctgccagcctctacttgtagagtcagctaaaggaatgtgagattttaaattattgaccacctgtttgattacagttgactacaaatgcctgcaagtgtggatttggttctcccatacattttaatatgtattatatttaaatcaaacatcattcatagaaagcatattacatacatgtttatacataagcattacatttttttaataaaaatgtatacaggtggggcactgttttggtggaaggcttggagtttttttaatgagtttagagctattagataaccactgagttaaaggtaactatgtacacacaaagtgtgcatccaagaggcatagcagcagcagaagtctttaaaggcttgtacaccaggaagaaagatgcatcctcttgccttgtggcaatcattttcctttagaaaacaggccagcttcacctgggcaccctgctgcctttcaaggctggtgattgctcggatagtgattcccagttgttggtgtttcatgcagagttgtatgagagtcctcctcttttctttctttaaaagaagttctttctttgaagaaatccgatacatatacagcctacagtgcaaaatatttaatggtataatttagatcaagttaaaaactacatacaaagttgtgatcaacagcatcctaagataaatataaacaaaaggatatactttgaggtgtacagattaagcatataaaaaattagagactaactgggattttttaaagattattccaaattaagagttgctttgttatgccttcagcaaatagcttcattttgccaatactgaataaaagagttatttcta

SEQ ID NO: 373012 - DNA, 3801 bp, Homo sapiens
agggagatttgctctcactgctcccaaaaatggcggacgcattcggagatgagctgttcagcgtgttcgagggcgactcgaccactgcggcgggaaccaaaaaagacaaggaaaaggacaaggggaaatggaaggggcctccagggtctgcagacaaggcagggaaacgttttgatggtaaattacaatcagaatcaactaataatggaaaaaataagagagatgtagatttcgaaggtacagatgaacccatttttggaaagaagcccaggatagaagagtcaataactgaagacttaagtttggcagacctgatgcccagagtcaaggtacaatcagttgaaactgttgaagggtgtacacatgaggttgcacttcctgcagaagaggattatttaccacttaaaccacgagttggaaaagctgctaaggaatacccgttcattcttgatgcttttcaaagagaggccattcagtgtgttgacaataatcagtctgttctagtatctgcacatacctcagcgggaaaaacagtatgcgccgagtatgccattgcattggccttaagggaaaagcagcgtgtaatatttaccagcccaattaaggctctgagtaaccaaaaataccgtgaaatgtatgaagaatttcaagatgttggtttgatgactggtgatgttactattaatcctacggcatcttgtcttgttatgaccacagagattttgagaagtatgctttacagaggttccgaagttatgagagaagttgcttgggttatatttgatgaaattcattatatgagagattcagaacgtggtgtagtatgggaagaaactattattttgcttcctgataacgtccactatgtctttctttcggctactattccaaatgcccgacagtttgctgaatggatttgccatttacataaacagccttgtcatgttatttacacagattatcggcccactccattgcaacactacatttttccagcagggggagatggcctgcatcttgtggttgatgaaaatggtgacttcagagaagataattttaatactgcaatgcaagtgcttcgagatgcaggtgatttggccaaaggagaccagaaagggcggaaaggaggaacaaaaggaccatcaaatgttttcaaaattgtgaagatgattatggaaagaaatttccaacctgtgattattttcagttttagtaagaaagattgtgaagcctatgcacttcaaatgaccaaattagatttcaacacagatgaagaaaagaagatggttgaagaagtattcagtaatgcaattgattgcttatccgatgaagataaaaaactccctcaggtagaacatgtacttcctcttttgaagaggggaattggtattcaccatggtggtttacttcctattttgaaagaaactatagaaattctcttttctgaaggattgataaaggccttatttgccacggagacctttgctatgggaattaacatgccagctagaactgttttatttacaaatgcccgcaaatttgatgggaaggatttccgatggatttcttctggtgaatacattcagatgtctggtcgtgctggaaggagaggaatggatgatagaggaattgtaattcttatggtagatgaaaagatgagcccaacaattggaaaacaattacttaagggctccgctgatcctctaaatagtgctttccatttgacctacaacatggttttgaacttactacgtgtagaagaaattaatcctgagtacatgttggaaaaatccttctaccagtttcagcattatagagcaattccaggagtagtagagaaggtaaagaattcagaagaacagtataataaaatagtaattcccaatgaagaaagtgtggttatctattataagattagacagcagcttgccaaattgggtaaagaaattgaagaatatattcacaaaccaaaatactgcttaccttttctacaaccaggtcgtttggtaaaggtaaagaatgaaggagatgactttggctggggagtagtggtgaatttctcaaaaaagtcaaatgttaagcctaactctggtgaactggatcctttgtatgtagtagaagtacttctgcgctgtagcaaagagagcttgaaaaattcagctacagaagctgcaaaaccagctaaacctgatgagaaaggagagatgcaggttgtcccagttttggtgcatctcctgtctgctatcagcagtgttaggctttacattcctaaagaccttcggccggtggacaatagacagagtgttttaaaatcaatacaggaagttcagaaacgttttcctgacggcatccccttattagaccctattgatgatatgggcattcaagatcaagggctgaaaaaagtcattcagaaagtagaagcttttgagcatcgaatgtattctcatccacttcacaatgatccaaatttggaaactgtgtatacgctttgtgaaaaaaaagcacagtgctgatgagctccttctaactgagatgatgtttaatggccttttcaatgacctttctgcagaacaggcaacagcattattaagctgctttgtgtttcaagagaattctagtgagatgcccaaattaacagaacaattagcaggaccacttcgtcaaatgcaggaatgtgctaaaagaattgcaaaagtttcagcagaagccaaattggaaattgatgaggaaacttatctaagctcatttaaacctcacttaatggatgtagtatatacctgggcaactggagctacatttgcccatatctgcaaaatgacagatgtctttgaaggcagcataattcgttgtatgaggcgcctggaagaattgcttcgacaaatgtgtcaagcagcaaaagccattggaaacactgagctggaaaataaatttgcagaaggaatcaccaaaatcaagagagatattgtgtttgctgccagcctctacttgtagagtcagctaaaggaatgtgagattttaaattattgaccacctgtttgattacagttgactacaaatgcctgcaagtgtggatttggttctcccatacattttaatatgtattatatttaaatcaaacatcattcatagaaagcatattacatacatgtttatacataagcattacatttttttaataaaaatgtatacaggtggggcactgttttggtggaaggcttggagtttttttaatgagtttagagctattagataaccactgagttaaaggtaactatgtacacacaaagtgtgcatccaagaggcatagcagcagcagaagtctttaaaggcttgtacaccaggaagaaagatgcatcctcttgccttgtggcaatcattttcctttagaaaacaggccagcttcacctgggcaccctgctgcctttcaaggctggtgattgctcggatagtgattcccagttgttggtgtttcatgcagagttgtatgagagtcctcctcttttctttctttaaaagaagttctttctttgaagaaatccgatacatatacagcctacagtgcaaaatatttaatggtataatttagatcaagttaaaaactacatacaaagttgtgatcaacagcatcctaagataaatataaacaaaaggatatactttgaggtgtacagattaagcatataaaaaattagagactaactgggattttttaaagattattccaaattaagagttgctttgttatgccttcagcaaatagcttcattttgccaatactgaataaaagagttatttcta

SEQ ID NO: 373013 - DNA, 4606 bp, Homo sapiens
  misc_feature (3440)..(3440): n is a, c, g, or t
agggagatttgctctcactgctcccaaaaatggcggacgcattcggagatgagctgttcagcgtgttcgagggcgactcgaccactgcggcgggaaccaaaaaagacaaggaaaaggacaaggggaaatggaaggggcctccagggtctgcagacaaggcagggaaacgttttgatggtaaattacaatcagaatcaactaataatggaaaaaataagagagatgtagatttcgaaggtacagatgaacccatttttggaaagaagcccaggatagaagagtcaataactgaagacttaagtttggcagacctgatgcccagagtcaaggtacaatcagttgaaactgttgaagggtgtacacatgaggttgcacttcctgcagaagaggattatttaccacttaaaccacgagttggaaaagctgctaaggaatacccgttcattcttgatgcttttcaaagagaggccattcagtgtgttgacaataatcagtctgttctagtatctgcacatacctcagcgggaaaaacagtatgcgccgagtatgccattgcattggccttaagggaaaagcagcgtgtaatatttaccagcccaattaaggctctgagtaaccaaaaataccgtgaaatgtatgaagaatttcaagatgttggtttgatgactggtgatgttactattaatcctacggcatcttgtcttgttatgaccacagagattttgagaagtatgctttacagaggttccgaagttatgagagaagttgcttgggttatatttgatgaaattcattatatgagagattcagaacgtggtgtagtatgggaagaaactattattttgcttcctgataacgtccactatgtctttctttcggctactattccaaatgcccgacagtttgctgaatggatttgccatttacataaacagccttgtcatgttatttacacagattatcggcccactccattgcaacactacatttttccagcagggggagatggcctgcatcttgtggttgatgaaaatggtgacttcagagaagataattttaatactgcaatgcaagtgcttcgagatgcaggtgatttggccaaaggagaccagaaagggcggaaaggaggaacaaaaggaccatcaaatgttttcaaaattgtgaagatgattatggaaagaaatttccaacctgtgattattttcagttttagtaagaaagattgtgaagcctatgcacttcaaatgaccaaattagatttcaacacagatgaagaaaagaagatggttgaagaagtattcagtaatgcaattgattgcttatccgatgaagataaaaaactccctcaggtagaacatgtacttcctcttttgaagaggggaattggtattcaccatggtggtttacttcctattttgaaagaaactatagaaattctcttttctgaaggattgataaaggccttatttgccacggagacctttgctatgggaattaacatgccagctagaactgttttatttacaaatgcccgcaaatttgatgggaaggatttccgatggatttcttctggtgaatacattcagatgtctggtcgtgctggaaggagaggaatggatgatagaggaattgtaattcttatggtagatgaaaagatgagcccaacaattggaaaacaattacttaagggctccgctgatcctctaaatagtgctttccatttgacctacaacatggttttgaacttactacgtgtagaagaaattaatcctgagtacatgttggaaaaatccttctaccagtttcagcattatagagcaattccaggagtagtagagaaggtaaagaattcagaagaacagtataataaaatagtaattcccaatgaagaaagtgtggttatctattataagattagacagcagcttgccaaattgggtaaagaaattgaagaatatattcacaaaccaaaatactgcttaccttttctacaaccaggtcgtttggtaaaggtaaagaatgaaggagatgactttggctggggagtagtggtgaatttctcaaaaaagtcaaatgttaagcctaactctggtgaactggatcctttgtatgtagtagaagtacttctgcgctgtagcaaagagagcttgaaaaattcagctacagaagctgcaaaaccagctaaacctgatgagaaaggagagatgcaggttgtcccagttttggtgcatctcctgtctgctatcagcagtgttaggctttacattcctaaagaccttcggccggtggacaatagacagagtgttttaaaatcaatacaggaagttcagaaacgttttcctgacggcatccccttattagaccctattgatgatatgggcattcaagatcaagggctgaaaaaagtcattcagaaagtagaagcttttgagcatcgaatgtattctcatccacttcacaatgatccaaatttggaaactgtgtatacgctttgtgaaaaaaaagcacagattgcaatagatattaaatctgcaaagcgagaactgaagaaagcaagaacagtcctacaaatggatgaactcaaatgtcgcaaacgtgttttaagaaggttgggatttgctacttcttctgatgtaatagagatgaaaggacgagtggcttgtgagataagcagtgctgatgagctccttctaactgagatgatgtttaatggccttttcaatgacctttctgcagaacaggcaacagcattattaagctgctttgtgtttcaagagaattctagtgagatgcccaaattaacagaacaattagcaggaccacttcgtcaaatgcaggaatgtgctaaaagaattgcaaaagtttcagcagaagccaaattggaaattgatgaggaaacttatctaagctcatttaaacctcacttaatggatgtagtatatacctgggcaactggagctacatttgcccatatctgcaaaatgacagatgtctttgaaggcagcataattcgttgtatgaggcgcctggaagaattgcttcgacaaatgtgtcaagcagcaaaagccattggaaacactgagctggaaaataaatttgcagaaggaaggtcagtatcaaatggataagctgtttctaatttagacaaatttggtgaagcaaatcttgagccctggaccacaacctaggaggacgttttgagatgttcttcactgcattgtcatggagagctatctactagtgtttctataaaatttagtgtgttgggggaaaagttgagattttatatatacatgcatttacgtatattaattgtacgctaactacatgccaggcattgttttaagcactaggggatatagtgaacaaaaagacacccctgccttcatggagtttacattctagtgtggggagatagacaataagtcaacaattaaatntatcagatggtgataagtctgtaagataaaaacaaagcagaaaagacaatagaattggcagatggatatgatggtctagggcctccacagggaaggtggcagttaaggcctttggtgtatgcttgatgtacgtgaacaccagcaagaggccagtgtggctggagcagaatgggcagtgagtagaggagtaggggttgaagtgagaaaggaaatgattccatagttcccagccccaggcttctcaactctgcagtgactggaggtgtggagtttgggagtgacctgccccaacttggactttacaaggaatcaccaaaatcaagagagatattgtgtttgctgccagcctctacttgtagagtcagctaaaggaatgtgagattttaaattattgaccacctgtttgattacagttgactacaaatgcctgcaagtgtggatttggttctcccatacattttaatatgtattatatttaaatcaaacatcattcatagaaagcatattacatacatgtttatacataagcattacatttttttaataaaaatgtatacaggtggggcactgttttggtggaaggcttggagtttttttaatgagtttagagctattagataaccactgagttaaaggtaactatgtacacacaaagtgtgcatccaagaggcatagcagcagcagaagtctttaaaggcttgtacaccaggaagaaagatgcatcctcttgccttgtggcaatcattttcctttagaaaacaggccagcttcacctgggcaccctgctgcctttcaaggctggtgattgctcggatagtgattcccagttgttggtgtttcatgcagagttgtatgagagtcctcctcttttctttctttaaaagaagttctttctttgaagaaatccgatacatatacagcctacagtgcaaaatatttaatggtataatttagatcaagttaaaaactacatacaaagttgtgatcaacagcatcctaagataaatataaacaaaaggatatactttgaggtgtacagattaagcatataaaaaattagagactaactgggattttttaaagattattccaaattaagagttgctttgttatgccttcagcaaatagcttcattttgccaatactgaataaaagagttatttcta

SEQ ID NO: 373014 - DNA, 3948 bp, Homo sapiens
agggagatttgctctcactgctcccaaaaatggcggacgcattcggagatgagctgttcagcgtgttcgagggcgactcgaccactgcggcgggaaccaaaaaagacaaggaaaaggacaaggggaaatggaaggggcctccagggtctgcagacaaggcagggaaacgttttgatggtaaattacaatcagaatcaactaataatggaaaaaataagagagatgtagatttcgaaggtacagatgaacccatttttggaaagaagcccaggatagaagagtcaataactgaagacttaagtttggcagacctgatgcccagagtcaaggtacaatcagttgaaactgttgaagggtgtacacatgaggttgcacttcctgcagaagaggattatttaccacttaaaccacgagttggaaaagctgctaaggaatacccgttcattcttgatgcttttcaaagagaggccattcagtgtgttgacaataatcagtctgttctagtatctgcacatacctcagcgggaaaaacagtatgcgccgagtatgccattgcattggccttaagggaaaagcagcgtgtaatatttaccagcccaattaaggctctgagtaaccaaaaataccgtgaaatgtatgaagaatttcaagatgttggtttgatgactggtgatgttactattaatcctacggcatcttgtcttgttatgaccacagagattttgagaagtatgctttacagaggttccgaagttatgagagaagttgcttgggttatatttgatgaaattcattatatgagagattcagaacgtggtgtagtatgggaagaaactattattttgcttcctgataacgtccactatgtctttctttcggctactattccaaatgcccgacagtttgctgaatggatttgccatttacataaacagccttgtcatgttatttacacagattatcggcccactccattgcaacactacatttttccagcagggggagatggcctgcatcttgtggttgatgaaaatggtgacttcagagaagataattttaatactgcaatgcaagtgcttcgagatgcaggtgatttggccaaaggagaccagaaagggcggaaaggaggaacaaaaggaccatcaaatgttttcaaaattgtgaagatgattatggaaagaaatttccaacctgtgattattttcagttttagtaagaaagattgtgaagcctatgcacttcaaatgaccaaattagatttcaacacagatgaagaaaagaagatggttgaagaagtattcagtaatgcaattgattgcttatccgatgaagataaaaaactccctcaggtagaacatgtacttcctcttttgaagaggggaattggtattcaccatggtggtttacttcctattttgaaagaaactatagaaattctcttttctgaaggattgataaaggccttatttgccacggagacctttgctatgggaattaacatgccagctagaactgttttatttacaaatgcccgcaaatttgatgggaaggatttccgatggatttcttctggtgaatacattcagatgtctggtcgtgctggaaggagaggaatggatgatagaggaattgtaattcttatggtagatgaaaagatgagcccaacaattggaaaacaattacttaagggctccgctgatcctctaaatagtgctttccatttgacctacaacatggttttgaacttactacgtgtagaagaaattaatcctgagtacatgttggaaaaatccttctaccagtttcagcattatagagcaattccaggagtagtagagaaggtaaagaattcagaagaacagtataataaaatagtaattcccaatgaagaaagtgtggttatctattataagattagacagcagcttgccaaattgggtaaagaaattgaagaatatattcacaaaccaaaatactgcttaccttttctacaaccaggtcgtttggtaaaggtaaagaatgaaggagatgactttggctggggagtagtggtgaatttctcaaaaaagtcaaatgttaagcctaactctggtgaactggatcctttgtatgtagtagaagtacttctgcgctgtagcaaagagagcttgaaaaattcagctacagaagctgcaaaaccagctaaacctgatgagaaaggagagatgcaggttgtcccagttttggtgcatctcctgtctgctatcagcagtgttaggctttacattcctaaagaccttcggccggtggacaatagacagagtgttttaaaatcaatacaggaagttcagaaacgttttcctgacggcatccccttattagaccctattgatgatatgggcattcaagatcaagggctgaaaaaagtcattcagaaagtagaagcttttgagcatcgaatgtattctcatccacttcacaatgatccaaatttggaaactgtgtatacgctttgtgaaaaaaaagcacagattgcaatagatattaaatctgcaaagcgagaactgaagaaagcaagaacagtcctacaaatggatgaactcaaatgtcgcaaacgtgttttaagaaggttgggatttgctacttcttctgatgtaatagagatgaaaggacgagtggcttgtgagataagcagtgctgatgagctccttctaactgagatgatgtttaatggccttttcaatgacctttctgcagaacaggcaacagcattattaagctgctttgtgtttcaagagaattctagtgagatgcccaaattaacagaacaattagcaggaccacttcgtcaaatgcaggaatgtgctaaaagaattgcaaaagtttcagcagaagccaaattggaaattgatgaggaaacttatctaagctcatttaaacctcacttaatggatgtagtatatacctgggcaactggagctacatttgcccatatctgcaaaatgacagatgtctttgaaggcagcataattcgttgtatgaggcgcctggaagaattgcttcgacaaatgtgtcaagcagcaaaagccattggaaacactgagctggaaaataaatttgcagaaggaatcaccaaaatcaagagagatattgtgtttgctgccagcctctacttgtagagtcagctaaaggaatgtgagattttaaattattgagttgactacaaatgcctgcaagtgtggatttggttctcccatacattttaatatgtattatatttaaatcaaacatcattcatagaaagcatattacatacatgtttatacataagcattacatttttttaataaaaatgtatacaggtggggcactgttttggtggaaggcttggagtttttttaatgagtttagagctattagataaccactgagttaaaggtaactatgtacacacaaagtgtgcatccaagaggcatagcagcagcagaagtctttaaaggcttgtacaccaggaagaaagatgcatcctcttgccttgtggcaatcattttcctttagaaaacaggccagcttcacctgggcaccctgctgcctttcaaggctggtgattgctcggatagtgattcccagttgttggtgtttcatgcagagttgtatgagagtcctcctcttttctttctttaaaagaagttctttctttgaagaaatccgatacatatacagcctacagtgcaaaatatttaatggtataatttagatcaagttaaaaactacatacaaagttgtgatcaacagcatcctaagataaatataaacaaaaggatatactttgaggtgtacagattaagcatataaaaaattagagactaactgggattttttaaagattattccaaattaagagttgctttgttatgccttcagcaaatagcttcattttgccaatactgaataaaagagttatttcta

SEQ ID NO: 373015 - DNA, 1606 bp, Homo sapiens
tcagctgcgtgctgcggttatctcggtcgcgttcgcgctccttgccttgtgttggcatcagtcaggctgaaagtcatcagagtagagcttgagctcgatgtatctctcctccatgtcaattgaactgtgtatacgcttgtgaaaagcacagattgcaatagatattaaatctgcaaagcgagaactgaagaaagcaagaacagtcctacaaatggatgaactcaaatgtcgcaaacgtgttttaagaaggttgggatttgctacttcttctgatgtaatagagatgaaaggacgagtggcttgtgagataagcagtgctgatgagctccttctaactgagatgatgtttaatggccttttcaatgacctttctgcagaacaggcaacagcattattaagctgctttgtgtttcaagagaattctagtgagatgcccaaattaacagaacaattagcaggaccacttcgtcaaatgcaggaatgtgctaaaagaattgcaaaagtttcagcagaagccaaattggaaattgatgaggaaacttatctaagctcatttaaacctcacttaatggatgtagtatatacctgggcaactggagctacatttgcccatatctgcaaaatgacagatgtctttgaaggcagcataattcgttgtatgaggcgcctggaagaattgcttcgacaaatgtgtcaagcagcaaaagccattggaaacactgagctggaaaataaatttgcagaaggaatcaccaaaatcaagagagatattgtgtttgctgccagcctctacttgtagagtcagctaaaggaatgtgagattttaaattattgaccacctgtttgattacagttgactacaaatgcctgcaagtgtggatttggttctcccatacattttaatatgtattatatttaaatcaaacatcattcatagaaagcatattacatacatgtttatacataagcattacatttttttaataaaaatgtatacaggtggggcactgttttggtggaaggcttggagtttttttaatgagtttagagctattagataaccactgagttaaaggtaactatgtacacacaaagtgtgcatccaagaggcatagcagcagcagaagtctttaaaggcttgtacaccaggaagaaagatgcatcctcttgccttgtggcaatcattttcctttagaaaacaggccagcttcacctgggcaccctgctgcctttcaaggctggtgattgctcggatagtgattcccagttgttggtgtttcatgcagagttgtatgagagtcctcctcttttctttctttaaaagaagttctttctttgaagaaatccgatacatatacagcctacagtgcaaaatatttaatggtataatttagatcaagttaaaaactacatacaaagttgtgatcaacagcatcctaagataaatataaacaaaaggatatactttgaggtgtacagattaagcatataaaaaattagagactaactgggattttttaaagattattccaaattaagagttgctttgttatgccttcagcaaatagcttcattttgccaatactgaataaaagagttatttcta

SEQ ID NO: 373016 - DNA, 2842 bp, Homo sapiens
  misc_feature (722)..(722): n is a, c, g, or t
  misc_feature (1587)..(1587): n is a, c, g, or t
  misc_feature (1790)..(1790): n is a, c, g, or t
acaataactagaaagaattggatttctctttctactctggcaggaccaaaaaaaaaattttgtaacaaaccagtaggttaatgtggttttgttttgtttcggttttggtcagcttcatttagcctatgatgggtcatggctttgaaacttttgtctagcacttagtcaggctgatgaggcaggatgacttataaaggtgggtgtaagaagagcccttggattacagagaactgtagtaggtaggagagatgctagacaattcactacttaatcgtcagtcttcattaatccctggggggagtagcctctatgtttcaggcagctctggacagttagtgtttgtgcacatacccagtgatttgttgatgagactctgtgggcaacaaccacagtcattgtatatgcaaccttgtgcctactggcctaatttgcttgttacctgaaactgtgtcgaaactaaagtttccagaaattgagtcgaaatgtttacaaaatgtgacatgacagtgctctctggcctgaatgtgcatttacttgccttagtttattctttatcttagtaatttacttcgtatggtttggtctctgataactttcacagattctggttaacacgagttactaaaatttgtgaaataatagtatcacattgtgtttcttggtacacatttgaagtcagtcaaaacaatgtttgagaatgtgtctggctctttaatgccctntgcagcagaggactttgtaaaggatttcatttcaatcctaaatgacctgtgagaatctggtctcaggtaaaaatctagttacattttgagccactacctaatttaattatctttggatatacttgtttgcataaacatttaatatctgattgcataggtaatatgacattaccctctctatcccaattcctaccctctctcttgacacccagaagtttctgcagttggatttcctgtttcattgcaaggcagtattggagcctgcattcctagcagctgagaatagaaataacaaataattattattaatttaataattgttaatagtgtaaatagttcattgttcctacagactgcattttgagaactggtattcctaatgtatttcatatattaaaaatgaagtcaagcgttttagatttaggcaggtagcacttagagaaaggatctcacaatctctgctcctctttgcacaagtctagcaaaagtgaaactatgtttatagcttcagctttgatacaaacacttttctcaaacagattctagacccatgggaaaaggcttctttccttgtgctccttgagaacactgtgtaaagaacgtactaatgaaagaatctaaggtcaagaagaatgaatgcacctttaaaatgacaagttttatcttgttactctcctgctaaaaacagtctgttgcattctatgagatggtatggatggtgtccagatgcctcactaggccacactcagggtccttgaatagctgcagtttgccaggcttttctgcattgtcgtggtggtccttcccttgttgctgctgcctgagagatactgcctggttcttacagacacagattatgtcatcnttgcagccttcacccaaagttgctccctccttctagggcattttgttttcctacttaataccaagtgtcagcatgttagtaataaacaggtgtctctaccattagtcaaaggtgggagttaagcctttcatctttgtagctttctccagtacctaaccatgatttacttcatgggaagtccctcaaagtactattaattatcntgtgttctcctgccttgcctcttaacaaaaattctgctgttcctgattatttccattttaccagtgttttgttccttttctatccaggcagcataattcgttgtatgaggcgcctggaagaattgcttcgacaaatgtgtcaagcagcaaaagccattggaaacactgagctggaaaataaatttgcagaaggaatcaccaaaatcaagagagatattgtgtttgctgccagcctctacttgtagagtcagctaaaggaatgtgagattttaaattattgaccacctgtttgattacagttgactacaaatgcctgcaagtgtggatttggttctcccatacattttaatatgtattatatttaaatcaaacatcattcatagaaagcatattacatacatgtttatacataagcattacatttttttaataaaaatgtatacaggtggggcactgttttggtggaaggcttggagtttttttaatgagtttagagctattagataaccactgagttaaaggtaactatgtacacacaaagtgtgcatccaagaggcatagcagcagcagaagtctttaaaggcttgtacaccaggaagaaagatgcatcctcttgccttgtggcaatcattttcctttagaaaacaggccagcttcacctgggcaccctgctgcctttcaaggctggtgattgctcggatagtgattcccagttgttggtgtttcatgcagagttgtatgagagtcctcctcttttctttctttaaaagaagttctttctttgaagaaatccgatacatatacagcctacagtgcaaaatatttaatggtataatttagatcaagttaaaaactacatacaaagttgtgatcaacagcatcctaagataaatataaacaaaaggatatactttgaggtgtacagattaagcatataaaaaattagagactaactgggattttttaaagattattccaaattaagagttgctttgttatgccttcagcaaatagcttcattttgccaatactgaataaaagagttatttcta

SEQ ID NO: 373017 - DNA, 738 bp, Homo sapiens
tgatgagccggtccagcggtctacatacattttaatatgtattatatttaaatcaaacatcattcatagaaagcatattacatacatgtttatacataagcattacatttttttaataaaaatgtatacaggtggggcactgttttggtggaaggcttggagtttttttaatgagtttagagctattagataaccactgagttaaaggtaactatgtacacacaaagtgtgcatccaagaggcatagcagcagcagaagtctttaaaggcttgtacaccaggaagaaagatgcatcctcttgccttgtggcaatcattttcctttagaaaacaggccagcttcacctgggcaccctgctgcctttcaaggctggtgattgctcggatagtgattcccagttgttggtgtttcatgcagagttgtatgagagtcctcctcttttctttctttaaaagaagttctttctttgaagaaatccgatacatatacagcctacagtgcaaaatatttaatggtataatttagatcaagttaaaaactacatacaaagttgtgatcaacagcatcctaagataaatataaacaaaaggatatactttgaggtgtacagattaagcatataaaaaattagagactaactgggattttttaaagattattccaaattaagagttgctttgttatgccttcagcaaatagcttcattttgccaatactgaataaaagagttatttcta

SEQ ID NO: 373018 - DNA, 2082 bp, Homo sapiens
agggagatttgctctcactgctcccaaaaatggcggacgcattcggagatgagctgttcagcgtgttcgagggcgactcgaccactgcggcgggaaccaaaaaagacaaggaaaaggacaaggggaaatggaaggggcctccagggtctgcagacaaggcagggaaacgttttgatggtaaattacaatcagaatcaactaataatggaaaaaataagagagatgtagatttcgaaggtacagatgaacccatttttggaaagaagcccaggatagaagagtcaataactgaagacttaagtttggcagacctgatgcccagagtcaaggtacaatcagttgaaactgttgaagggtgtacacatgaggttgcacttcctgcagaagaggattatttaccacttaaaccacgagttggaaaagctgctaaggaatacccgttcattcttgatgcttttcaaagagaggccattcagtgtgttgacaataatcagtctgttctagtatctgcacatacctcagcgggaaaaacagtatgcgccgagtatgccattgcattggccttaagggaaaagcagcgtgtaatatttaccagcccaattaaggctctgagtaaccaaaaataccgtgaaatgtatgaagaatttcaagatgttggtttgatgactggtgatgttactattaatcctacggcatcttgtcttgttatgaccacagagattttgagaagtatgctttacagaggttccgaagttatgagagaagttgcttgggttatatttgatgaaattcattatatgagagattcagaacgtggtgtagtatgggaagaaactattattttgcttcctgataacgtccactatgtctttctttcggctactattccaaatgcccgacagtttgctgaatggatttgccatttacataaacagccttgtcatgttatttacacagattatcggcccactccattgcaacactacatttttccagcagggggagatggcctgcatcttgtggttgatgaaaatggtgacttcagagaagataattttaatactgcaatgcaagtgcttcgagatgcaggtgatttggccaaaggagaccagaaagggcggaaaggaggaacaaaaggaccatcaaatgttttcaaaattgtgaagatgattatggaaagaaatttccaacctgtgattattttcagttttagtaagaaagattgtgaagcctatgcacttcaaatgaccaaattagatttcaacacagatgaagaaaagaagatggttgaagaagtattcagtaatgcaattgattgcttatccgatgaagataaaaaactccctcaggtagaacatgtacttcctcttttgaagaggggaattggtattcaccatggtggtttacttcctattttgaaagaaactatagaaattctcttttctgaaggattgataaaggccttatttgccacggagacctttgctatgggaattaacatgccagctagaactgttttatttacaaatgcccgcaaatttgatgggaaggatttccgatgggtaagtaaagcaattcatatatcaaaataatttttgtctttgttatactatagataactggcttacatagtctttgagattttaagtcccacctacttaagaacttgaacctgagctaatacagtttcatcaaggttaaaccttggcttttggccatttgtggtggcttaggcttataatcacagcactttgggaggccaaggtgggaggatgatttaaggccaggagtttgagaccagcctgggcaacatagcgagaccccatctctacaaaaaatgcaaaaatcacctgggagtggtgatgtgcacctgtagtcgcagctacttgagaggctgaggtggaagaatcacttgagcccaggaggtcaaggctccagtgagctgtgattgcaccactgtactcgagccttgaggacagagtgagaccctgtctctgaataaattaattaattgaacaaacctccgttcccttaaatttttatcctaactccttcactcctacctctccttcaaaaaaaaaa

SEQ ID NO: 373019 - DNA, 1598 bp, Homo sapiens
  misc_feature (1364)..(1365): n is a, c, g, or t
  misc_feature (1374)..(1374): n is a, c, g, or t
  misc_feature (1382)..(1382): n is a, c, g, or t
  misc_feature (1408)..(1408): n is a, c, g, or t
  misc_feature (1421)..(1421): n is a, c, g, or t
  misc_feature (1433)..(1433): n is a, c, g, or t
  misc_feature (1598)..(1598): n is a, c, g, or t
agggagatttgctctcactgctcccaaaaatggcggacgcattcggagatgagctgttcagcgtgttcgagggcgactcgaccactgcggcgggaaccaaaaaagacaaggaaaaggacaaggggaaatggaaggggcctccagggtctgcagacaaggcagggaaacgttttgatggtaaattacaatcagaatcaactaataatggaaaaaataagagagatgtagatttcgaaggtacagatgaacccatttttggaaagaagcccaggatagaagagtcaataactgaagacttaagtttggcagacctgatgcccagagtcaaggtacaatcagttgaaactgttgaagggtgtacacatgaggttgcacttcctgcagaagaggattatttaccacttaaaccacgagttggaaaagctgctaaggaatacccgttcattcttgatgcttttcaaagagaggccattcagtgtgttgacaataatcagtctgttctagtatctgcacatacctcagcgggaaaaacagtatgcgccgagtatgccattgcattggccttaagggaaaagcagcgtgtaatatttaccagcccaattaaggctctgagtaaccaaaaataccgtgaaatgtatgaagaatttcaagatgttggtttgatgactggtgatgttactattaatcctacggcatcttgtcttgttatgaccacagagattttgagaagtatgctttacagaggttccgaagttatgagagaagttgcttgggttatatttgatgaaattcattatatgagagattcagaacgtggtgtagtatgggaagaaactattattttgcttcctgataacgtccactatgtctttctttcggctactattccaaatgcccgacagtttgctgaatggatttgccatttacataaacagccttgtcatgttatttacacagattatcggcccactccattgcaacactacatttttccagcagggggagatggcctgcatcttgtggttgatgaaaatggtgacttcagagaagataattttaatactgcaatgcaagtgcttcgagatgcaggtgatttggccaaaggagaccagaaagggcggaaaggaggaacaaaaggaccatcaaatgttttcaaaattgtgaagatgattatggaaagaaatttccaacctgtgattattttcagttttagtaagaaagattgtgaagcctatgcacttcaaatgaccaaattagatttcaacacagatgaagaaaagaagatggttgaagaagtattcagtaatgcaattgattgcttatccgatgaagataaaaaactccctcagtcaccatggtggttnnacttctatnttgaaagnactatagaaatctctttctgaggatngataaggctattngcacgagacttngtatggaatacatgcagtagactgttaatacaatgccgcatttgatgaggatttcgatgatctctgtgatcatcaatgctgcgtctgaggaagatgatgatgagatgatctatgaatgaagtagcacatggaacatctaggctcgtgacttatagcgtcattgcn

SEQ ID NO: 373020 - DNA, 340 bp, Homo sapiens
cccaggatagaagagtcaataactgaagacttaaggtaatatttccaaagtcctaaatgttagtaactcataattcaggtggttacatgaggttttaaaaattgtctccatgttgctacttagatatatgcccgtattagagaaatgaagatattctttctatttttacacaggcatgtaaatgtagaacacttacctaagtttggggagttggaaagcaatatggaaaatactcatcttttaatactttagaatccagttttgagaaaaaagtcttaaaacctgattaaaaaaaatacgttttctttatttgtaatgcctcaggaggaggataactgga

SEQ ID NO: 373021 - DNA, 527 bp, Homo sapiens
agttaactacctcaacataatgggaaagattggccgtttaatcacttagcaatggaacaggcactgtgcctacttaggagcagaatgtccacattgcagacataatacctaggaagaaaaagggacctcctggaatactggcttggaaacctaaagaataaagtgatatgggagatcataagtaaggaattttaactcttttatctttaaaggaatgtgctaaaagaattgcaaaagtttcagcagaagccaaattggaaattgatgaggaaacttatctaagctcatttaaacctcacttaatggatgtagtatatacctgggcaactggagctacatttgcccatatctgcaaaatgacagatgtctttgaaggtatggttaaattttacacatatatatttacagtataagaaatacagttaggatggtattgttttaattaaacaagtataatatgtatttttaatatttggtaactaaatgaaatcttctccctattatatagattaaaaaatattctccac

SEQ ID NO: 373022 - DNA, 3965 bp, Homo sapiens
agggagatttgctctcactgctcccaaaaatggcggacgcattcggagatgagctgttcagcgtgttcgagggcgactcgaccactgcggcgggaaccaaaaaagacaaggaaaaggacaaggggaaatggaaggggcctccagggtctgcagacaaggcagggaaacgttttgatggtaaattacaatcagaatcaactaataatggaaaaaataagagagatgtagatttcgaaggtacagatgaacccatttttggaaagaagcccaggatagaagagtcaataactgaagacttaagtttggcagacctgatgcccagagtcaaggtacaatcagttgaaactgttgaagggtgtacacatgaggttgcacttcctgcagaagaggattatttaccacttaaaccacgagttggaaaagctgctaaggaatacccgttcattcttgatgcttttcaaagagaggccattcagtgtgttgacaataatcagtctgttctagtatctgcacatacctcagcgggaaaaacagtatgcgccgagtatgccattgcattggccttaagggaaaagcagcgtgtaatatttaccagcccaattaaggctctgagtaaccaaaaataccgtgaaatgtatgaagaatttcaagatgttggtttgatgactggtgatgttactattaatcctacggcatcttgtcttgttatgaccacagagattttgagaagtatgctttacagaggttccgaagttatgagagaagttgcttgggttatatttgatgaaattcattatatgagagattcagaacgtggtgtagtatgggaagaaactattattttgcttcctgataacgtccactatgtctttctttcggctactattccaaatgcccgacagtttgctgaatggatttgccatttacataaacagccttgtcatgttatttacacagattatcggcccactccattgcaacactacatttttccagcagggggagatggcctgcatcttgtggttgatgaaaatggtgacttcagagaagataattttaatactgcaatgcaagtgcttcgagatgcaggtgatttggccaaaggagaccagaaagggcggaaaggaggaacaaaaggaccatcaaatgttttcaaaattgtgaagatgattatggaaagaaatttccaacctgtgattattttcagttttagtaagaaagattgtgaagcctatgcacttcaaatgaccaaattagatttcaacacagatgaagaaaagaagatggttgaagaagtattcagtaatgcaattgattgcttatccgatgaagataaaaaactccctcaggtagaacatgtacttcctcttttgaagaggggaattggtattcaccatggtggtttacttcctattttgaaagaaactatagaaattctcttttctgaaggattgataaaggccttatttgccacggagacctttgctatgggaattaacatgccagctagaactgttttatttacaaatgcccgcaaatttgatgggaaggatttccgatggatttcttctggtgaatacattcagatgtctggtcgtgctggaaggagaggaatggatgatagaggaattgtaattcttatggtagatgaaaagatgagcccaacaattggaaaacaattacttaagggctccgctgatcctctaaatagtgctttccatttgacctacaacatggttttgaacttactacgtgtagaagaaattaatcctgagtacatgttggaaaaatccttctaccagtttcagcattatagagcaattccaggagtagtagagaaggtaaagaattcagaagaacagtataataaaatagtaattcccaatgaagaaagtgtggttatctattataagattagacagcagcttgccaaattgggtaaagaaattgaagaatatattcacaaaccaaaatactgcttaccttttctacaaccaggtcgtttggtaaaggtaaagaatgaaggagatgactttggctggggagtagtggtgaatttctcaaaaaagtcaaatgttaagcctaactctggtgaactggatcctttgtatgtagtagaagtacttctgcgctgtagcaaagagagcttgaaaaattcagctacagaagctgcaaaaccagctaaacctgatgagaaaggagagatgcaggttgtcccagttttggtgcatctcctgtctgctatcagcagtgttaggctttacattcctaaagaccttcggccggtggacaatagacagagtgttttaaaatcaatacaggaagttcagaaacgttttcctgacggcatccccttattagaccctattgatgatatgggcattcaagatcaagggctgaaaaaagtcattcagaaagtagaagcttttgagcatcgaatgtattctcatccacttcacaatgatccaaatttggaaactgtgtatacgctttgtgaaaaaaaagcacagattgcaatagatattaaatctgcaaagcgagaactgaagaaagcaagaacagtcctacaaatggatgaactcaaatgtcgcaaacgtgttttaagaaggttgggatttgctacttcttctgatgtaatagagatgaaaggacgagtggcttgtgagataagcagtgctgatgagctccttctaactgagatgatgtttaatggccttttcaatgacctttctgcagaacaggcaacagcattattaagctgctttgtgtttcaagagaattctagtgagatgcccaaattaacagaacaattagcaggaccacttcgtcaaatgcaggaatgtgctaaaagaattgcaaaagtttcagcagaagccaaattggaaattgatgaggaaacttatctaagctcatttaaacctcacttaatggatgtagtatatacctgggcaactggagctacatttgcccatatctgcaaaatgacagatgtctttgaaggcagcataattcgttgtatgaggcgcctggaagaattgcttcgacaaatgtgtcaagcagcaaaagccattggaaacactgagctggaaaataaatttgcagaaggaatcaccaaaatcaagagagatattgtgtttgctgccagcctctacttgtagagtcagctaaaggaatgtgagattttaaattattgaccacctgtttgattacagttgactacaaatgcctgcaagtgtggatttggttctcccatacattttaatatgtattatatttaaatcaaacatcattcatagaaagcatattacatacatgtttatacataagcattacatttttttaataaaaatgtatacaggtggggcactgttttggtggaaggcttggagtttttttaatgagtttagagctattagataaccactgagttaaaggtaactatgtacacacaaagtgtgcatccaagaggcatagcagcagcagaagtctttaaaggcttgtacaccaggaagaaagatgcatcctcttgccttgtggcaatcattttcctttagaaaacaggccagcttcacctgggcaccctgctgcctttcaaggctggtgattgctcggatagtgattcccagttgttggtgtttcatgcagagttgtatgagagtcctcctcttttctttctttaaaagaagttctttctttgaagaaatccgatacatatacagcctacagtgcaaaatatttaatggtataatttagatcaagttaaaaactacatacaaagttgtgatcaacagcatcctaagataaatataaacaaaaggatatactttgaggtgtacagattaagcatataaaaaattagagactaactgggattttttaaagattattccaaattaagagttgctttgttatgccttcagcaaatagcttcattttgccaatactgaataaaagagttatttcta

SEQ ID NO: 373023 - DNA, 3943 bp, Homo sapiens
agggagatttgctctcactgctcccaaaaatggcggacgcattcggagatgagctgttcagcgtgttcgagggcgactcgaccactgcggcgggaaccaaaaaagacaaggaaaaggacaaggggaaatggaaggggcctccagggtctgcagacaaggcagggaaacgttttgatggtaaattacaatcagaatcaactaataatggaaaaaataagagagatgtagatttcgaaggtacagatgaacccatttttggaaagaagcccaggatagaagagtcaataactgaagacttaagtttggcagacctgatgcccagagtcaaggtacaatcagttgaaactgttgaagggtgtacacatgaggttgcacttcctgcagaagaggattatttaccacttaaaccacgagttggaaaagctgctaaggaatacccgttcattcttgatgcttttcaaagagaggccattcagtgtgttgacaataatcagtctgttctagtatctgcacatacctcagcgggaaaaacagtatgcgccgagtatgccattgcattggccttaagggaaaagcagcgtgtaatatttaccagcccaattaaggctctgagtaaccaaaaataccgtgaaatgtatgaagaatttcaagatgttggtttgatgactggtgatgttactattaatcctacggcatcttgtcttgttatgaccacagagattttgagaagtatgctttacagaggttccgaagttatgagagaagttgcttgggttatatttgatgaaattcattatatgagagattcagaacgtggtgtagtatgggaagaaactattattttgcttcctgataacgtccactatgtctttctttcggctactattccaaatgcccgacagtttgctgaatggatttgccatttacataaacagattatcggcccactccattgcaacactacatttttccagcagggggagatggcctgcatcttgtggttgatgaaaatggtgacttcagagaagataattttaatactgcaatgcaagtgcttcgagatgcaggtgatttggccaaaggagaccagaaagggcggaaaggaggaacaaaaggaccatcaaatgttttcaaaattgtgaagatgattatggaaagaaatttccaacctgtgattattttcagttttagtaagaaagattgtgaagcctatgcacttcaaatgaccaaattagatttcaacacagatgaagaaaagaagatggttgaagaagtattcagtaatgcaattgattgcttatccgatgaagataaaaaactccctcaggtagaacatgtacttcctcttttgaagaggggaattggtattcaccatggtggtttacttcctattttgaaagaaactatagaaattctcttttctgaaggattgataaaggccttatttgccacggagacctttgctatgggaattaacatgccagctagaactgttttatttacaaatgcccgcaaatttgatgggaaggatttccgatggatttcttctggtgaatacattcagatgtctggtcgtgctggaaggagaggaatggatgatagaggaattgtaattcttatggtagatgaaaagatgagcccaacaattggaaaacaattacttaagggctccgctgatcctctaaatagtgctttccatttgacctacaacatggttttgaacttactacgtgtagaagaaattaatcctgagtacatgttggaaaaatccttctaccagtttcagcattatagagcaattccaggagtagtagagaaggtaaagaattcagaagaacagtataataaaatagtaattcccaatgaagaaagtgtggttatctattataagattagacagcagcttgccaaattgggtaaagaaattgaagaatatattcacaaaccaaaatactgcttaccttttctacaaccaggtcgtttggtaaaggtaaagaatgaaggagatgactttggctggggagtagtggtgaatttctcaaaaaagtcaaatgttaagcctaactctggtgaactggatcctttgtatgtagtagaagtacttctgcgctgtagcaaagagagcttgaaaaattcagctacagaagctgcaaaaccagctaaacctgatgagaaaggagagatgcaggttgtcccagttttggtgcatctcctgtctgctatcagcagtgttaggctttacattcctaaagaccttcggccggtggacaatagacagagtgttttaaaatcaatacaggaagttcagaaacgttttcctgacggcatccccttattagaccctattgatgatatgggcattcaagatcaagggctgaaaaaagtcattcagaaagtagaagcttttgagcatcgaatgtattctcatccacttcacaatgatccaaatttggaaactgtgtatacgctttgtgaaaaaaaagcacagattgcaatagatattaaatctgcaaagcgagaactgaagaaagcaagaacagtcctacaaatggatgaactcaaatgtcgcaaacgtgttttaagaaggttgggatttgctacttcttctgatgtaatagagatgaaaggacgagtggcttgtgagataagcagtgctgatgagctccttctaactgagatgatgtttaatggccttttcaatgacctttctgcagaacaggcaacagcattattaagctgctttgtgtttcaagagaattctagtgagatgcccaaattaacagaacaattagcaggaccacttcgtcaaatgcaggaatgtgctaaaagaattgcaaaagtttcagcagaagccaaattggaaattgatgaggaaacttatctaagctcatttaaacctcacttaatggatgtagtatatacctgggcaactggagctacatttgcccatatctgcaaaatgacagatgtctttgaaggcagcataattcgttgtatgaggcgcctggaagaattgcttcgacaaatgtgtcaagcagcaaaagccattggaaacactgagctggaaaataaatttgcagaaggaatcaccaaaatcaagagagatattgtgtttgctgccagcctctacttgtagagtcagctaaaggaatgtgagattttaaattattgaccacctgtttgattacagttgactacaaatgcctgcaagtgtggatttggttctcccatacattttaatatgtattatatttaaatcaaacatcattcatagaaagcatattacatacatgtttatacataagcattacatttttttaataaaaatgtatacaggtggggcactgttttggtggaaggcttggagtttttttaatgagtttagagctattagataaccactgagttaaaggtaactatgtacacacaaagtgtgcatccaagaggcatagcagcagcagaagtctttaaaggcttgtacaccaggaagaaagatgcatcctcttgccttgtggcaatcattttcctttagaaaacaggccagcttcacctgggcaccctgctgcctttcaaggctggtgattgctcggatagtgattcccagttgttggtgtttcatgcagagttgtatgagagtcctcctcttttctttctttaaaagaagttctttctttgaagaaatccgatacatatacagcctacagtgcaaaatatttaatggtataatttagatcaagttaaaaactacatacaaagttgtgatcaacagcatcctaagataaatataaacaaaaggatatactttgaggtgtacagattaagcatataaaaaattagagactaactgggattttttaaagattattccaaattaagagttgctttgttatgccttcagcaaatagcttcattttgccaatactgaataaaagagttatttcta

SEQ ID NO: 373024 - DNA, 3714 bp, Homo sapiens
agggagatttgctctcactgctcccaaaaatggcggacgcattcggagatgagctgttcagcgtgttcgagggcgactcgaccactgcggcgggaaccaaaaaagacaaggaaaaggacaaggggaaatggaaggggcctccagggtctgcagacaaggcagggaaacgttttgatggtaaattacaatcagaatcaactaataatggaaaaaataagagagatgtagatttcgaaggtacagatgaacccatttttggaaagaagcccaggatagaagagtcaataactgaagacttaagtttggcagacctgatgcccagagtcaaggtacaatcagttgaaactgttgaagggtgtacacatgaggttgcacttcctgcagaagaggattatttaccacttaaaccacgagttggaaaagctgctaaggaatacccgttcattcttgatgcttttcaaagagaggccattcagtgtgttgacaataatcagtctgttctagtatctgcacatacctcagcgggaaaaacagtatgcgccgagtatgccattgcattggccttaagggaaaagcagcgtgtaatatttaccagcccaattaaggctctgagtaaccaaaaataccgtgaaatgtatgaagaatttcaagatgttggtttgatgactggtgatgttactattaatcctacggcatcttgtcttgttatgaccacagagattttgagaagtatgctttacagaggttccgaagttatgagagaagttgcttgggttatatttgatgaaattcattatatgagagattcagaacgtggtgtagtatgggaagaaactattattttgcttcctgataacgtccactatgtctttctttcggctactattccaaatgcccgacagtttgctgaatggatttgccatttacataaacagccttgtcatgttatttacacagattatcggcccactccattgcaacactacatttttccagcagggggagatggcctgcatcttgtggttgatgaaaatggtgacttcagagaagataattttaatactgcaatgcaagtgcttcgagatgcaggtgatttggccaaaggagaccagaaagggcggaaaggaggaacaaaaggaccatcaaatgttttcaaaattgtgaagatgattatggaaagaaatttccaacctgtgattattttcagttttagtaagaaagattgtgaagcctatgcacttcaaatgaccaaattagatttcaacacagatgaagaaaagaagatggttgaagaagtattcagtaatgcaattgattgcttatccgatgaagataaaaaactccctcaggtagaacatgtacttcctcttttgaagaggggaattggtattcaccatggtggtttacttcctattttgaaagaaactatagaaattctcttttctgaaggattgataaaggccttatttgccacggagacctttgctatgggaattaacatgccagctagaactgttttatttacaaatgcccgcaaatttgatgggaaggatttccgatggatttcttctggtgaatacattcagatgtctggtcgtgctggaaggagaggaatggatgatagaggaattgtaattcttatggtagatgaaaagatgagcccaacaattggaaaacaattacttaagggctccgctgatcctctaaatagtgctttccatttgacctacaacatggttttgaacttactacgtgtagaagaaattaatcctgagtacatgttggaaaaatccttctaccagtttcagcattatagagcaattccaggagtagtagagaaggtaaagaattcagaagaacagtataataaaatagtaattcccaatgaagaaagtgtggttatctattataagattagacagcagcttgccaaattgggtaaagaaattgaagaatatattcacaaaccaaaatactgcttaccttttctacaaccaggtcgtttggtaaaggtaaagaatgaaggagatgactttggctggggagtagtggtgaatttctcaaaaaagtcaaatgttaagcctaactctggtgaactggatcctttgtatgtagtagaagtacttctgcgctgtagcaaagagagcttgaaaaattcagctacagaagctgcaaaaccagctaaacctgatgagaaaggagagatgcaggttgtcccagttttggtgcatctcctgtctgctatcagcagtgttaggctttacattcctaaagaccttcggccggtggacaatagacagagtgttttaaaatcaatacaggaagttcagaaacgttttcctgacggcatccccttattagaccctattgatgatatgggcattcaagatcaagggctgaaaaaagtcattcagaaagtagaagcttttgagcatcgaatgtattctcatccacttcacaatgatccaaatttggaaactgtgtatacgctttgtgaaaaaaaagcacagattgcaatagatattaaatctgcaaagcgagaactgaagaaagcaagaacagtcctacaaatggatgaactcaaatgtcgcaaacgtgttttaagaaggttgggatttgctacttcttctgatgtaatagagatgaaaggacgagtggcttgtgagataagcagtgctgatgagctccttctaactgagatgatgtttaatggccttttcaatgacctttctgcagaacaggcaacagcattattaagctgctttgtgtttcaagagaattctagtgagatgcccaaattaacagaacaattagcaggaccacttcgtcaaatgcaggaatgtgctaaaagaattgcaaaagtttcagcagaagccaaattggaaattgatgaggaaacttatctaagctcatttaaacctcacttaatggatgtagtatatacctgggcaactggagctacatttgcccatatctgcaaaatgacagatgtctttgaaggcagcataattcgttgtatgaggcgcctggaagaattgcttcgacaaatgtgtcaagcagcaaaagccattggaaacactgagctggaaaataaatttgcagaaggaatcaccaaaatcaagagagatattgtgtttgctgccagcctctacttgtagagtcagctaaaggaatgtgagattttaaattattgaccacctgtttgattacagttgactacaaatgcctgcaagtgtggatttggttctcccatacattttaatatgtattatatttaaatcaaacatcattcatagaaagcatattacatacatgtttatacataagcattacatttttttaataaaaatgtatacaggtggggcactgttttggtggaaggcttggagtttttttaatgagtttagagctattagataaccactgagttaaaggtaactatgtacacacaaagtgtgcatccaagaggcatagcagcagcagaagtctttaaaggcttgtacaccaggaagaaagatgcatcctcttgccttgtggcaatcattttcctttagaaaacaggccagcttcacctgggcaccctgctgcctttcaaggctggttgcaatattagttgctgtatatgtatcggatttcttcaaagaaagaacttcttttaaagaaagaaaagaggaggactctcatacaactcggcatgaacacctacaactggat

SEQ ID NO: 373025 - DNA, 2914 bp, Homo sapiens
cattctcattaataaaacagacttggtcccagaagaagatgtaaagaaattaagaacgacacttagatccataaatggactaggacaaatcttagaaacacaaagatcaagtttgcagaaaaaacttcagcatgtgccaggaacacaacctcaccttgatcataagaaagattgtgaagcctatgcacttcaaatgaccaaattagatttcaacacagatgaagaaaagaagatggttgaagaagtattcagtaatgcaattgattgcttatccgatgaagataaaaaactccctcaggtagaacatgtacttcctcttttgaagaggggaattggtattcaccatggtggtttacttcctattttgaaagaaactatagaaattctcttttctgaaggattgataaaggccttatttgccacggagacctttgctatgggaattaacatgccagctagaactgttttatttacaaatgcccgcaaatttgatgggaaggatttccgatggatttcttctggtgaatacattcagatgtctggtcgtgctggaaggagaggaatggatgatagaggaattgtaattcttatggtagatgaaaagatgagcccaacaattggaaaacaattacttaagggctccgctgatcctctaaatagtgctttccatttgacctacaacatggttttgaacttactacgtgtagaagaaattaatcctgagtacatgttggaaaaatccttctaccagtttcagcattatagagcaattccaggagtagtagagaaggtaaagaattcagaagaacagtataataaaatagtaattcccaatgaagaaagtgtggttatctattataagattagacagcagcttgccaaattgggtaaagaaattgaagaatatattcacaaaccaaaatactgcttaccttttctacaaccaggtcgtttggtaaaggtaaagaatgaaggagatgactttggctggggagtagtggtgaatttctcaaaaaagtcaaatgttaagcctaactctggtgaactggatcctttgtatgtagtagaagtacttctgcgctgtagcaaagagagcttgaaaaattcagctacagaagctgcaaaaccagctaaacctgatgagaaaggagagatgcaggttgtcccagttttggtgcatctcctgtctgctatcagcagtgttaggctttacattcctaaagaccttcggccggtggacaatagacagagtgttttaaaatcaatacaggaagttcagaaacgttttcctgacggcatccccttattagaccctattgatgatatgggcattcaagatcaagggctgaaaaaagtcattcagaaagtagaagcttttgagcatcgaatgtattctcatccacttcacaatgatccaaatttggaaactgtgtatacgctttgtgaaaaaaaagcacagattgcaatagatattaaatctgcaaagcgagaactgaagaaagcaagaacagtcctacaaatggatgaactcaaatgtcgcaaacgtgttttaagaaggttgggatttgctacttcttctgatgtaatagagatgaaaggacgagtggcttgtgagataagcagtgctgatgagctccttctaactgagatgatgtttaatggccttttcaatgacctttctgcagaacaggcaacagcattattaagctgctttgtgtttcaagagaattctagtgagatgcccaaattaacagaacaattagcaggaccacttcgtcaaatgcaggaatgtgctaaaagaattgcaaaagtttcagcagaagccaaattggaaattgatgaggaaacttatctaagctcatttaaacctcacttaatggatgtagtatatacctgggcaactggagctacatttgcccatatctgcaaaatgacagatgtctttgaaggcagcataattcgttgtatgaggcgcctggaagaattgcttcgacaaatgtgtcaagcagcaaaagccattggaaacactgagctggaaaataaatttgcagaaggaatcaccaaaatcaagagagatattgtgtttgctgccagcctctacttgtagagtcagctaaaggaatgtgagattttaaattattgaccacctgtttgattacagttgactacaaatgcctgcaagtgtggatttggttctcccatacattttaatatgtattatatttaaatcaaacatcattcatagaaagcatattacatacatgtttatacataagcattacatttttttaataaaaatgtatacaggtggggcactgttttggtggaaggcttggagtttttttaatgagtttagagctattagataaccactgagttaaaggtaactatgtacacacaaagtgtgcatccaagaggcatagcagcagcagaagtctttaaaggcttgtacaccaggaagaaagatgcatcctcttgccttgtggcaatcattttcctttagaaaacaggccagcttcacctgggcaccctgctgcctttcaaggctggtgattgctcggatagtgattcccagttgttggtgtttcatgcagagttgtatgagagtcctcctcttttctttctttaaaagaagttctttctttgaagaaatccgatacatatacagcctacagtgcaaaatatttaatggtataatttagatcaagttaaaaactacatacaaagttgtgatcaacagcatcctaagataaatataaacaaaaggatatactttgaggtgtacagattaagcatataaaaaattagagactaactgggattttttaaagattattccaaattaagagttgctttgttatgccttcagcaaatagcttcattttgccaatactgaataaaagagttatttcta

SEQ ID NO: 373026 - DNA, 1628 bp, Homo sapiens
gaatgtatctaagaagctccagtttccccagtctccccagcactgaagctttaacccagaagtatactgtaagatgttctttaaaaatattttttgtttgatttcatgaataaatctccttgtacattgttcactttattattgaactttctttatactttcatgtgctttagattgcaatagatattaaatctgcaaagcgagaactgaagaaagcaagaacagtcctacaaatggatgaactcaaatgtcgcaaacgtgttttaagaaggttgggatttgctacttcttctgatgtaatagagatgaaaggacgagtggcttgtgagataagcagtgctgatgagctccttctaactgagatgatgtttaatggccttttcaatgacctttctgcagaacaggcaacagcattattaagctgctttgtgtttcaagagaattctagtgagatgcccaaattaacagaacaattagcaggaccacttcgtcaaatgcaggaatgtgctaaaagaattgcaaaagtttcagcagaagccaaattggaaattgatgaggaaacttatctaagctcatttaaacctcacttaatggatgtagtatatacctgggcaactggagctacatttgcccatatctgcaaaatgacagatgtctttgaaggcagcataattcgttgtatgaggcgcctggaagaattgcttcgacaaatgtgtcaagcagcaaaagccattggaaacactgagctggaaaataaatttgcagaaggaatcaccaaaatcaagagagatattgtgtttgctgccagcctctacttgtagagtcagctaaaggaatgtgagattttaaattattgaccacctgtttgattacagttgactacaaatgcctgcaagtgtggatttggttctcccatacattttaatatgtattatatttaaatcaaacatcattcatagaaagcatattacatacatgtttatacataagcattacatttttttaataaaaatgtatacaggtggggcactgttttggtggaaggcttggagtttttttaatgagtttagagctattagataaccactgagttaaaggtaactatgtacacacaaagtgtgcatccaagaggcatagcagcagcagaagtctttaaaggcttgtacaccaggaagaaagatgcatcctcttgccttgtggcaatcattttcctttagaaaacaggccagcttcacctgggcaccctgctgcctttcaaggctggtgattgctcggatagtgattcccagttgttggtgtttcatgcagagttgtatgagagtcctcctcttttctttctttaaaagaagttctttctttgaagaaatccgatacatatacagcctacagtgcaaaatatttaatggtataatttagatcaagttaaaaactacatacaaagttgtgatcaacagcatcctaagataaatataaacaaaaggatatactttgaggtgtacagattaagcatataaaaaattagagactaactgggattttttaaagattattccaaattaagagttgctttgttatgccttcagcaaatagcttcattttgccaatactgaataaaagagttatttcta

SEQ ID NO: 373027 - DNA, 3008 bp, Homo sapiens
agggagatttgctctcactgctcccaaaaatggcggacgcattcggagatgagctgttcagcgtgttcgagggcgactcgaccactgcggcgggaaccaaaaaagacaaggaaaaggacaaggggaaatggaaggggcctccagggtctgcagacaaggcagggaaacgttttgatggtaaattacaatcagaatcaactaataatggaaaaaataagagagatgtagatttcgaaggtacagatgaacccatttttggaaagaagcccaggatagaagagtcaataactgaagacttaagtttggcagacctgatgcccagagtcaaggtacaatcagttgaaactgttgaagggtgtacacatgaggttgcacttcctgcagaagaggattatttaccacttaaaccacgagttggaaaagctgctaaggaatacccgttcattcttgatgcttttcaaagagaggccattcagtgtgttgacaataatcagtctgttctagtatctgcacatacctcagcgggaaaaacagtatgcgccgagtatgccattgcattggccttaagggaaaagcagcgtgtaatatttaccagcccaattaaggctctgagtaaccaaaaataccgtgaaatgtatgaagaatttcaagatgttggtttgatgactggtgatgttactattaatcctacggcatcttgtcttgttatgaccacagagattttgagaagtatgctttacagaggttccgaagttatgagagaagttgcttgggttatatttgatgaaattcattatatgagagattcagaacgtggtgtagtatgggaagaaactattattttgcttcctgataacgtccactatgtctttctttcggctactattccaaatgcccgacagtttgctgaatggatttgccatttacataaacagccttgtcatgttatttacacagattatcggcccactccattgcaacactacatttttccagcagggggagatggcctgcatcttgtggttgatgaaaatggtgacttcagagaagataattttaatactgcaatgcaagtgcttcgagatgcaggtgatttggccaaaggagaccagaaagggcggaaaggaggaacaaaaggaccatcaaatgttttcaaaattgtgaagatgattatggaaagaaatttccaacctgtgattattttcagttttagtaagaaagattgtgaagcctatgcacttcaaatgaccaaattagatttcaacacagatgaagaaaagaagatggttgaagaagtattcagtaatgcaattgattgcttatccgatgaagataaaaaactccctcaggtagaacatgtacttcctcttttgaagaggggaattggtattcaccatggtggtttacttcctattttgaaagaaactatagaaattctcttttctgaaggattgataaaggccttatttgccacggagacctttgctatgggaattaacatgccagctagaactgttttatttacaaatgcccgcaaatttgatgggaaggatttccgatggatttcttctggtgaatacattcagatgtctggtcgtgctggaaggagaggaatggatgatagaggaattgtaattcttatggtagatgaaaagatgagcccaacaattggaaaacaattacttaagggctccgctgatcctctaaatagtgctttccatttgacctacaacatggttttgaacttactacgtgtagaagaaattaatcctgagtacatgttggaaaaatccttctaccagtttcagcattatagagcaattccaggagtagtagagaaggtaaagaattcagaagaacagtataataaaatagtaattcccaatgaagaaagtgtggttatctattataagattagacagcagcttgccaaattgggtaaagaaattgaagaatatattcacaaaccaaaatactgcttaccttttctacaaccaggtcgtttggtaaaggtaaagaatgaaggagatgactttggctggggagtagtggtgaatttctcaaaaaagtcaaatgttaagcctaactctggtgaactggatcctttgtatgtagtagaagtacttctgcgctgtagcaaagagagcttgaaaaattcagctacagaagctgcaaaaccagctaaacctgatgagaaaggagagatgcaggttgtcccagttttggtgcatctcctgtctgctatcagcagtgttaggctttacattcctaaagaccttcggccggtggacaatagacagagtgttttaaaatcaatacaggaagttcagaaacgttttcctgacggcatccccttattagaccctattgatgatatgggcattcaagatcaagggctgaaaaaagtcattcagaaagtagaagcttttgagcatcgaatgtattctcatccacttcacaatgatccaaatttggaaactgtgtatacgctttgtgaaaaaaaagcacagacaggtatggcagaaatttggtttttatagtagaattctatatgtttcactgaataaatatgtgtttgtcattttcttatcctgttggtttaattggctaaaacaggaaaatgtgagctatcttttaaataaactgtcagctctgaacctgtcagctctcatcagcaagacaagataaagttcattttgctatagtttgatatttcacataggatgttctgttttttcttcttttttaaatttgagatataatttacacagcatagcattcacccttttaaaatgtccaactcactggtttttagtgtattcacagatacttgcaaccatcaccactatgtaacttcagaacattcttctcaccctctgaaggaactttatacccattagcagccactctctgtttctcccatcctccagcccttggcaatcacaaatctttctatctgtatggttttgcctattctggatatttcttataaatagaatcatgtaata

SEQ ID NO: 373028 - DNA, 521 bp, Homo sapiens
ttgagatttctccctcaaggcctgttgccttgttattatgattaggaagaaactttctcttctcatttaaaattttccactttaggattagatagcttagggttgtgttttaacgaactcatgttgtatgatccttactgaagcccttttgtgtggagatcattctttcatttgaagtgtatgtatgtctgtttgagtatgtacactatacacatacacatacatgcacacatatgtaattttacattgtatatatacatatatatgtatatatacacatgcatgctatttttttaaacaaaaatgtggcaggatatcttctagggaccagagaaggaaggagaatctagagcagaggtatatgcttgctactcaagacagtgaagaggttgatgaaaagacatcactgatataaagttttcttaatgacaaaggatacagaaaattctgtaaatagttacagaaagcagaatataattgtatttggaaataatcattatgaataaaatgagaaaatcaaa

SEQ ID NO: 373029 - DNA, 746 bp, Homo sapiens
agcttggaaatctgtacacagtttactgtgaaccaagtgaagcaggtaccaacgcccatattcagtatatccagtgcggtaccatatgtggctttacacacacacacacacgctaccacagaaaaaggggtggaatgatccagccagaaccgtgccggtgagaagtacgtcgtggagttctcgctcacccctgctctgtggtttcagggtgtgaaggagctgtgtctgctgctgcttaaccagtccctcctgcttccatctctgaaacttctcctcgagagccgagatgagcatctgcacgagatggcactggagcaaatcacggcagtcactacggtgaatgattccaattgtgaccaagaacttctttccctgctcctggatgccaagctgctggtgaagtgtgtctccactcccttctatccacgtattgttgaccacctcttggctagcctccagcaagggcgctgggatgcagaggagctgggcagacacctgcgggaggccggccatgaagccgaagccgggtctctccttctggccgtgagggggactcaccaggccttcagaaccttcagtacagccctccgcgcagcacagcactgggtgtgagggccacctgtggccctgctccttagcagaaaaagcatctggagttgaatgctgttcccagaagcaacatgtgtatctgccgattgttctccatgggttccaacaaattgcaaataaaactgtatggaaacgat

SEQ ID NO: 373030 - DNA, 4496 bp, Homo sapiens
gaacatggcggcccccgagtcagggccggctttgagtccaggcactgcagaggcctagaggcaaccaaaaacatggtgcatcctttatcatcacgaaagcaattcgagatcgtttattatttttacgccaatacatctggtacagcccggcaccttttttgctccctgatggactggttcgcttggttaataaacagataaactggcatttggtacttgcaagcaatagcactagagtgcatctatacctgtgaacgaaatgatcaactctgtctttgctatgacctactagaatgtctgccagaaagaggatatggtgataagacagaggcaaccacaaagcttcatgacatggtagaccaactggaacaaattctcagtgtgtcagagcttttggaaaaacatggactcgagaaaccaatttcatttgttaaaaacactcaatctagctcagaagaggcacgcaagctgatggttagattgacgaggcacactggccggaagcagcctcctgtcagtgagtctcattggagaacgttgctgcaagacatgttaactatgcagcagaatgtatacacatgtctagattctgatgcctgctatgagatatttacagaaagccttctgtgctctagtcgccttgaaaacatccacctggctggacagatgatgcactgcagtgcttgttcagaaaatcctccagctggtatagcccataaagggaaaccccactacagggtcagctacgaaaagagtattgacttggttttggctgccagcagagagtacttcaattcttctaccaacctcactgatagctgcatggatctagccaggtgctgcttacaactgataacagacagaccccctgccattcaagaggagctagatcttatccaagccgttggatgtcttgaagaatttggggtaaagatcctgcctttgcaagtgcgattgtgccctgatcggatcagtctcatcaaggagtgtatttcccagtcccccacatgctataaacaatccaccaagcttctgggccttgctgagctgctgagggttgcaggtgagaacccagaagaaaggcggggacaggttctaatccttttagtggagcaggcacttcgcttccatgactacaaagcagccagtatgcattgtcaggagctgatggccacaggttatcctaaaagttgggatgtttgtagccagttaggacaatcagaaggttaccaggacttggccactcgtcaagagctcatggcttttgctttgacacattgccctcctagcagcattgaacttcttttggcagctagcagctctctgcagacagaaattctttatcaaagagtgaatttccagatccatcatgaaggaggggaaaatatcagtgcttcaccattaactagtaaagcagtacaagaggatgaagtaggtgttccaggtagcaattcagctgacctattgcgctggaccactgctaccaccatgaaagtcctttccaacaccacaaccaccaccaaagcggtgctgcaggccgtcagtgatgggcagtggtggaagaagtctttaacttaccttcgaccccttcaggggcaaaaatgtggtggtgcatatcaaatcggaactacagccaatgaagatctagagaaacaagggtgtcatcctttttatgaatctgtcatctcaaatccttttgtcgctgagtctgaagggacctatgacacctatcagcatgttccagtggaaagctttgcagaagtattgctgagaactggaaaattggcagaggctaaaaataaaggagaagtatttccaacaactgaagttctcttgcaactagcaagtgaagccttgccaaatgacatgaccttggctcttgcttaccttcttgccttaccacaagtgttagatgctaaccggtgctttgaaaagcagtccccctctgcattatctctccagctggcagcgtattactatagcctccagatctatgcccgattggccccatgtttcagggacaagtgccatcctctttacagggctgatcccaaagaactaatcaagatggtcaccaggcatgtgactcgacatgagcacgaagcctggcctgaagaccttatttcactgaccaagcagttacactgctacaatgaacgtctcctggatttcactcaggcgcagatccttcagggccttcggaagggtgtggacgtgcagcggtttactgcagatgaccagtataaaagggaaactatccttggtctggcagaaactctagaggaaagcgtctacagcattgctatttctctggcacaacgttacagtgtctcccgctgggaagtttttatgacccatttggagttcctcttcacggacagtggtttgtccacactagaaattgaaaatagagcccaagaccttcatctctttgagactttgaagactgatccagaagcctttcaccagcacatggtcaagtatatttaccctactattggtggctttgatcacgaaaggctgcagtattatttcactcttctggaaaactgtggctgtgcagatttggggaactgtgccattaaaccagaaacccacattcgactgctgaagaagtttaaggttgttgcatcaggtcttaattacaaaaagctgacagatgaaaacatgagtcctcttgaagcattggagccagttctttcaagtcaaaatatcttgtctatttccaaacttgttcccaaaatccctgaaaaggatggacagatgctttccccaagctctctgtacaccatctggttacagaagttgttctggactggagaccctcatctcattaaacaagtcccaggctcttcaccggagtggcttcatgcctatgatgtctgcatgaagtactttgatcgtctccacccaggtgacctcatcactgtggtagatgcagttacattttctccaaaagctgtgaccaagctgtctgtggaagcccgtaaagagatgactagaaaggctattaagacagtcaaacattttattgagaagccaaggaaaagaaactcagaagacgaagctcaagaagctaaggattctaaagttacctatgcagatactttgaatcatctggagaaatcacttgcccacctggaaaccctgagccacagcttcatcctttctctgaagaatagtgagcaggaaacactgcaaaaatacagtcacctctatgatctgtcccgatcagaaaaagagaaacttcatgatgaagctgtggctatttgtttagatggtcagcctctagcaatgattcagcagctgctagaggtggcagttggccctcttgacatctcacccaaggatatagtgcagagtgcaatcatgaaaataatttctgcattgagtggtggcagtgctgaccttggtgggccaagggacccactgaaggtcctggaaggtgttgttgcagcagtccacgccagtgtggacaagggtgaggagctggtttcacctgaggacctgctggagtggctgcggcctttctgtgctgatgacgcctggccggtgcggccccgcattcacgtgctgcagattttggggcaatcatttcacctgactgaggaggacagcaagctcctcgtgttctttagaactgaagccattctcaaagcctcctggccccagagacaggtagacatagctgacattgagaatgaagagaaccgctactgtctattcatggaactcctggaatctagtcaccacgaggctgaatttcagcacttggttttacttttgcaagcttggccacctatgaaaagtgaatatgtcataaccaataatccatgggtgagactagctacagtgatgctaaccagatgtacgatggagaacaaggaaggattggggaatgaagttttgaaaatgtgtcgctctttgtataacaccaagcagatgctgcctgcagagggtgtgaaggagctgtgtctgctgctgcttaaccagtccctcctgcttccatctctgaaacttctcctcgagagccgagatgagcatctgcacgagatggcactggagcaaatcacggcagtcactacggtgaatgattccaattgtgaccaagaacttctttccctgctcctggatgccaagctgctggtgaagtgtgtctccactcccttctatccacgtattgttgaccacctcttggctagcctccagcaagggcgctgggatgcagaggagctgggcagacacctgcgggaggccggccatgaagccgaagccgggtctctccttctggccgtgagggggactcaccaggccttcagaaccttcagtacagccctccgcgcagcacagcactgggtgtgagggccacctgtggccctgctccttagcagaaaaagcatctggagttgaatgctgttcccagaagcaacatgtgtatctgccgattgttctccatgggttccaacaaattgcaaataaaactgtatggaaacgat

SEQ ID NO: 373031 - DNA, 637 bp, Homo sapiens
tagtgatgattgcagtggggttcttgtgtcttcttatgttaagaggagccccgtctgtcatcccaatctgtgacctacctcagaggtgctcgtgacccacacacgcttttaaacccaggccagggcatgaatgatgatgaaggcagcccagtggagagcgagggatccaagggggaggcgaacaaagcaaacaccccctcacgctgtgcctgtcttatttcttgaaggtgaatgattccaattgtgaccaagaacttctttccctgctcctggatgccaagctgctggtgaagtgtgtctccactcccttctatccacgtattgttgaccacctcttggctagcctccagcaagggcgctgggatgcagaggagctgggcagacacctgcgggaggccggccatgaagccgaagccgggtctctccttctggccgtgagggggactcaccaggccttcagaaccttcagtacagccctccgcgcagcacagcactgggtgtgagggccacctgtggccctgctccttagcagaaaaagcatctggagttgaatgctgttcccagaagcaacatgtgtatctgccgattgttctccatgggttccaacaaattgcaaataaaactgtatggaaacgat

SEQ ID NO: 373032 - DNA, 464 bp, Homo sapiens
tacaataacaaccggcccgcatcacaccaacccctacaacgtcaacgactccaggtgaatgattccaattgtgaccaagaacttctttccctgctcctggatgccaagctgctggtgaagtgtgtctccactcccttctatccacgtattgttgaccacctcttggctagcctccagcaagggcgctgggatgcagaggagctgggcagacacctgcgggaggccggccatgaagccgaagccgggtctctccttctggccgtgagggggactcaccaggccttcagaaccttcagtacagccctccgcgcagcacagcactgggtgtgagggccacctgtggccctgctccttagcagaaaaagcatctggagttgaatgctgttcccagaagcaacatgtgtatctgccgattgttctccatgggttccaacaaattgcaaataaaactgtatggaaacgat

SEQ ID NO: 373033 - DNA, 732 bp, Homo sapiens
catctgaacagagatatgatgctgaattctttaagaaattcagaaatcagaatattgttctctcagcaagaacttatgctcaggaaagtaatgtacaagccctggaaattctgtttacttaccatggttccgacctgcttcctcatcgccttgcaattctgtccaactttccagagaccacttctccacatgaatattctgttttgctgcccgaagcttgttttaacggtgactccctgatgatcattccttggcatgaacataaacaccgagctaaagattggtgcgaggagttggcttgcagaatggttgttgagccgaatctccaagatgaaagtgaattcttgtatgctgcacagcctgagttactaaggttcaggatgacccagcttacggtggagaaggttatggactggtatcagaccagagcagaggaaatagagcattatgctcggcaggtggactgtgcattgtcacttattcgacttgggatggagcggaatattcctggtttgctggttctctgtgacaatttggttactctggaaacattggtttatgaagccaggtgtgatgtaactctaaccctgaaagaactccagcagatgaaagacattgaaaaactaagattactgatgaatagtgtaggttttattttaacttcctttttaaatattttaaagcattttctatgcactttgatacatatgtgtctcaaaccaaagatgaaat

SEQ ID NO: 373034 - DNA, 5131 bp, Homo sapiens
catctgaacagagatatgatgctgaattctttaagaaattcagaaatcagaatattgttctctcagcaagaacttatgctcaggaaagtaatgtacaagccctggaaattctgtttacttaccatggttccgacctgcttcctcatcgccttgcaattctgtccaactttccagagaccacttctccacatgaatattctgttttgctgcccgaagcttgttttaacggtgactccctgatgatcattccttggcatgaacataaacaccgagctaaagattggtgcgaggagttggcttgcagaatggttgttgagccgaatctccaagatgaaagtgaattcttgtatgctgcacagcctgagttactaaggttcaggatgacccagcttacggtggagaaggttatggactggtatcagaccagagcagaggaaatagagcattatgctcggcaggtggactgtgcattgtcacttattcgacttgggatggagcggaatattcctggtttgctggttctctgtgacaatttggttactctggaaacattggtttatgaagccaggtgtgatgtaactctaaccctgaaagaactccagcagatgaaagacattgaaaaactaagattactgatgaatagttgttctgaggataaatatgtgacaagtgcctaccagtggatggttccctttcttcatcgttgtgagaaacagtcgcctggtgtggctaatgagctattaaaagaatatttagtaactttagctaaaggggacttaaaatttcccctgaagatatttcagcattccaaaccagatctgcagcaaaaaattattcctgatcaggaccaactgatggcaatagcactagagtgcatctatacctgtgaacgaaatgatcaactctgtctttgctatgacctactagaatgtctgccagaaagaggatatggtgataagacagaggcaaccacaaagcttcatgacatggtagaccaactggaacaaattctcagtgtgtcagagcttttggaaaaacatggactcgagaaaccaatttcatttgttaaaaacactcaatctagctcagaagaggcacgcaagctgatggttagattgacgaggcacactggccggaagcagcctcctgtcagtgagtctcattggagaacgttgctgcaagacatgttaactatgcagcagaatgtatacacatgtctagattctgatgcctgctatgagatatttacagaaagccttctgtgctctagtcgccttgaaaacatccacctggctggacagatgatgcactgcagtgcttgttcagaaaatcctccagctggtatagcccataaagggaaaccccactacagggtcagctacgaaaagagtattgacttggttttggctgccagcagagagtacttcaattcttctaccaacctcactgatagctgcatggatctagccaggtgctgcttacaactgataacagacagaccccctgccattcaagaggagctagatcttatccaagccgttggatgtcttgaagaatttggggtaaagatcctgcctttgcaagtgcgattgtgccctgatcggatcagtctcatcaaggagtgtatttcccagtcccccacatgctataaacaatccaccaagcttctgggccttgctgagctgctgagggttgcaggtgagaacccagaagaaaggcggggacaggttctaatccttttagtggagcaggcacttcgcttccatgactacaaagcagccagtatgcattgtcaggagctgatggccacaggttatcctaaaagttgggatgtttgtagccagttaggacaatcagaaggttaccaggacttggccactcgtcaagagctcatggcttttgctttgacacattgccctcctagcagcattgaacttcttttggcagctagcagctctctgcagacagaaattctttatcaaagagtgaatttccagatccatcatgaaggaggggaaaatatcagtgcttcaccattaactagtaaagcagtacaagaggatgaagtaggtgttccaggtagcaattcagctgacctattgcgctggaccactgctaccaccatgaaagtcctttccaacaccacaaccaccaccaaagcggtgctgcaggccgtcagtgatgggcagtggtggaagaagtctttaacttaccttcgaccccttcaggggcaaaaatgtggtggtgcatatcaaatcggaactacagccaatgaagatctagagaaacaagggtgtcatcctttttatgaatctgtcatctcaaatccttttgtcgctgagtctgaagggacctatgacacctatcagcatgttccagtggaaagctttgcagaagtattgctgagaactggaaaattggcagaggctaaaaataaaggagaagtatttccaacaactgaagttctcttgcaactagcaagtgaagccttgccaaatgacatgaccttggctcttgcttaccttcttgccttaccacaagtgttagatgctaaccggtgctttgaaaagcagtccccctctgcattatctctccagctggcagcgtattactatagcctccagatctatgcccgattggccccatgtttcagggacaagtgccatcctctttacagggctgatcccaaagaactaatcaagatggtcaccaggcatgtgactcgacatgagcacgaagcctggcctgaagaccttatttcactgaccaagcagttacactgctacaatgaacgtctcctggatttcactcaggcgcagatccttcagggccttcggaagggtgtggacgtgcagcggtttactgcagatgaccagtataaaagggaaactatccttggtctggcagaaactctagaggaaagcgtctacagcattgctatttctctggcacaacgttacagtgtctcccgctgggaagtttttatgacccatttggagttcctcttcacggacagtggtttgtccacactagaaattgaaaatagagcccaagaccttcatctctttgagactttgaagactgatccagaagcctttcaccagcacatggtcaagtatatttaccctactattggtggctttgatcacgaaaggctgcagtattatttcactcttctggaaaactgtggctgtgcagatttggggaactgtgccattaaaccagaaacccacattcgactgctgaagaagtttaaggttgttgcatcaggtcttaattacaaaaagctgacagatgaaaacatgagtcctcttgaagcattggagccagttctttcaagtcaaaatatcttgtctatttccaaacttgttcccaaaatccctgaaaaggatggacagatgctttccccaagctctctgtacaccatctggttacagaagttgttctggactggagaccctcatctcattaaacaagtcccaggctcttcaccggagtggcttcatgcctatgatgtctgcatgaagtactttgatcgtctccacccaggtgacctcatcactgtggtagatgcagttacattttctccaaaagctgtgaccaagctgtctgtggaagcccgtaaagagatgactagaaaggctattaagacagtcaaacattttattgagaagccaaggaaaagaaactcagaagacgaagctcaagaagctaaggattctaaagttacctatgcagatactttgaatcatctggagaaatcacttgcccacctggaaaccctgagccacagcttcatcctttctctgaagaatagtgagcaggaaacactgcaaaaatacagtcacctctatgatctgtcccgatcagaaaaagagaaacttcatgatgaagctgtggctatttgtttagatggtcagcctctagcaatgattcagcagctgctagaggtggcagttggccctcttgacatctcacccaaggatatagtgcagagtgcaatcatgaaaataatttctgcattgagtggtggcagtgctgaccttggtgggccaagggacccactgaaggtcctggaaggtgttgttgcagcagtccacgccagtgtggacaagggtgaggagctggtttcacctgaggacctgctggagtggctgcggcctttctgtgctgatgacgcctggccggtgcggccccgcattcacgtgctgcagattttggggcaatcatttcacctgactgaggaggacagcaagctcctcgtgttctttagaactgaagccattctcaaagcctcctggccccagagacaggtagacatagctgacattgagaatgaagagaaccgctactgtctattcatggaactcctggaatctagtcaccacgaggctgaatttcagcacttggttttacttttgcaagcttggccacctatgaaaagtgaatatgtcataaccaataatccatgggtgagactagctacagtgatgctaaccagatgtacgatggagaacaaggaaggattggggaatgaagttttgaaaatgtgtcgctctttgtataacaccaagcagatgctgcctgcagagggtgtgaaggagctgtgtctgctgctgcttaaccagtccctcctgcttccatctctgaaacttctcctcgagagccgagatgagcatctgcacgagatggcactggagcaaatcacggcagtcactacggtgaatgattccaattgtgaccaagaacttctttccctgctcctggatgccaagctgctggtgaagtgtgtctccactcccttctatccacgtattgttgaccacctcttggctagcctccagcaagggcgctgggatgcagaggagctgggcagacacctgcgggaggccggccatgaagccgaagccgggtctctccttctggccgtgagggggactcaccaggccttcagaaccttcagtacagccctccgcgcagcacagcactgggtgtgagggccacctgtggccctgctccttagcagaaaaagcatctggagttgaatgctgttcccagaagcaacatgtgtatctgccgattgttctccatgggttccaacaaattgcaaataaaactgtatggaaacgat

SEQ ID NO: 373035 - DNA, 2090 bp, Homo sapiens
tcaaacttataacgccaatccaaagatttctacagtcgcctgaatcatgaaccagtaccttatgtgtttcaaaatacaccaaaactaccccctcgtttttccaaacagtttaatttcgcaatttgttggaaccatggaacacaatcggcagatacacatgttgcttctgggaacagcattcaactccagatgctttttctgctgaagaagtttaaggttgttgcatcaggtcttaattacaaaaagctgacagatgaaaacatgagtcctcttgaagcattggagccagttctttcaagtcaaaatatcttgtctatttccaaacttgttcccaaaatccctgaaaaggatggacagatgctttccccaagctctctgtacaccatctggttacagaagttgttctggactggagaccctcatctcattaaacaagtcccaggctcttcaccggagtggcttcatgcctatgatgtctgcatgaagtactttgatcgtctccacccaggtgacctcatcactgtggtagatgcagttacattttctccaaaagctgtgaccaagctgtctgtggaagcccgtaaagagatgactagaaaggctattaagacagtcaaacattttattgagaagccaaggaaaagaaactcagaagacgaagctcaagaagctaaggattctaaagttacctatgcagatactttgaatcatctggagaaatcacttgcccacctggaaaccctgagccacagcttcatcctttctctgaagaatagtgagcaggaaacactgcaaaaatacagtcacctctatgatctgtcccgatcagaaaaagagaaacttcatgatgaagctgtggctatttgtttagatggtcagcctctagcaatgattcagcagctgctagaggtggcagttggccctcttgacatctcacccaaggatatagtgcagagtgcaatcatgaaaataatttctgcattgagtggtggcagtgctgaccttggtgggccaagggacccactgaaggtcctggaaggtgttgttgcagcagtccacgccagtgtggacaagggtgaggagctggtttcacctgaggacctgctggagtggctgcggcctttctgtgctgatgacgcctggccggtgcggccccgcattcacgtgctgcagattttggggcaatcatttcacctgactgaggaggacagcaagctcctcgtgttctttagaactgaagccattctcaaagcctcctggccccagagacaggtagacatagctgacattgagaatgaagagaaccgctactgtctattcatggaactcctggaatctagtcaccacgaggctgaatttcagcacttggttttacttttgcaagcttggccacctatgaaaagtgaatatgtcataaccaataatccatgggtgagactagctacagtgatgctaaccagatgtacgatggagaacaaggaaggattggggaatgaagttttgaaaatgtgtcgctctttgtataacaccaagcagatgctgcctgcagagggtgtgaaggagctgtgtctgctgctgcttaaccagtccctcctgcttccatctctgaaacttctcctcgagagccgagatgagcatctgcacgagatggcactggagcaaatcacggcagtcactacggtgaatgattccaattgtgaccaagaacttctttccctgctcctggatgccaagctgctggtgaagtgtgtctccactcccttctatccacgtattgttgaccacctcttggctagcctccagcaagggcgctgggatgcagaggagctgggcagacacctgcgggaggccggccatgaagccgaagccgggtctctccttctggccgtgagggggactcaccaggccttcagaaccttcagtacagccctccgcgcagcacagcactgggtgtgagggccacctgtggccctgctccttagcagaaaaagcatctggagttgaatgctgttcccagaagcaacatgtgtatctgccgattgttctccatgggttccaacaaattgcaaataaaactgtatggaaacgat

SEQ ID NO: 373036 - DNA, 5308 bp, Homo sapiens
catctgaacagagatatgatgctgaattctttaagaaattcagaaatcagaatattgttctctcagcaagaacttatgctcaggaaagtaatgtacaagccctggaaattctgtttacttaccatggttccgacctgcttcctcatcgccttgcaattctgtccaactttccagagaccacttctccacatgaatattctgttttgctgcccgaagcttgttttaacggtgactccctgatgatcattccttggcatgaacataaacaccgagctaaagattggtgcgaggagttggcttgcagaatggttgttgagccgaatctccaagatgaaagtgaattcttgtatgctgcacagcctgagttactaaggttcaggatgacccagcttacggtggagaaggttatggactggtatcagaccagagcagaggaaatagagcattatgctcggcaggtggactgtgcattgtcacttattcgacttgggatggagcggaatattcctggtttgctggttctctgtgacaatttggttactctggaaacattggtttatgaagccaggtgtgatgtaactctaaccctgaaagaactccagcagatgaaagacattgaaaaactaagattactgatgaatagttgttctgaggataaatatgtgacaagtgcctaccagtggatggttccctttcttcatcgttgtgagaaacagtcgcctggtgtggctaatgagctattaaaagaatatttagtaactttagctaaaggggacttaaaatttcccctgaagatatttcagcattccaaaccagatctgcagcaaaaaattattcctgatcaggaccaactgatggcaatagcactagagtgcatctatacctgtgaacgaaatgatcaactctgtctttgctatgacctactagaatgtctgccagaaagaggatatggtgataagacagaggcaaccacaaagcttcatgacatggtagaccaactggaacaaattctcagtgtgtcagagcttttggaaaaacatggactcgagaaaccaatttcatttgttaaaaacactcaatctagctcagaagaggcacgcaagctgatggttagattgacgaggcacactggccggaagcagcctcctgtcagtgagtctcattggagaacgttgctgcaagacatgttaactatgcagcagaatgtatacacatgtctagattctgatgcctgctatgagatatttacagaaagccttctgtgctctagtcgccttgaaaacatccacctggctggacagatgatgcactgcagtgcttgttcagaaaatcctccagctggtatagcccataaagggaaaccccactacagggtcagctacgaaaagagtattgacttggttttggctgccagcagagagtacttcaattcttctaccaacctcactgatagctgcatggatctagccaggtgctgcttacaactgataacagacagaccccctgccattcaagaggagctagatcttatccaagccgttggatgtcttgaagaatttggggtaaagatcctgcctttgcaagtgcgattgtgccctgatcggatcagtctcatcaaggagtgtatttcccagtcccccacatgctataaacaatccaccaagcttctgggccttgctgagctgctgagggttgcaggtgagaacccagaagaaaggcggggacaggttctaatccttttagtggagcaggcacttcgcttccatgactacaaagcagccagtatgcattgtcaggagctgatggccacaggttatcctaaaagttgggatgtttgtagccagttaggacaatcagaaggttaccaggacttggccactcgtcaagagctcatggcttttgctttgacacattgccctcctagcagcattgaacttcttttggcagctagcagctctctgcagacagaaattctttatcaaagagtgaatttccagatccatcatgaaggaggggaaaatatcagtgcttcaccattaactagtaaagcagtacaagaggatgaagtaggtgttccaggtagcaattcagctgacctattgcgctggaccactgctaccaccatgaaagtcctttccaacaccacaaccaccaccaaagcggtgctgcaggccgtcagtgatgggcagtggtggaagaagtctttaacttaccttcgaccccttcaggggcaaaaatgtggtggtgcatatcaaatcggaactacagccaatgaagatctagagaaacaagggtgtcatcctttttatgaatctgtcatctcaaatccttttgtcgctgagtctgaagggacctatgacacctatcagcatgttccagtggaaagctttgcagaagtattgctgagaactggaaaattggcagaggctaaaaataaaggagaagtatttccaacaactgaagttctcttgcaactagcaagtgaagccttgccaaatgacatgaccttggctcttgcttaccttcttgccttaccacaagtgttagatgctaaccggtgctttgaaaagcagtccccctctgcattatctctccagctggcagcgtattactatagcctccagatctatgcccgattggccccatgtttcagggacaagtgccatcctctttacagggctgatcccaaagaactaatcaagatggtcaccaggcatgtgactcgacatgagcacgaagcctggcctgaagaccttatttcactgaccaagcagttacactgctacaatgaacgtctcctggatttcactcaggcgcagatccttcagggccttcggaagggtgtggacgtgcagcggtttactgcagatgaccagtataaaagggaaactatccttggtctggcagaaactctagaggaaagcgtctacagcattgctatttctctggcacaacgttacagtgtctcccgctgggaagtttttatgacccatttggagttcctcttcacggacagtggtttgtccacactagaaattgaaaatagagcccaagaccttcatctctttgagactttgaagactgatccagaagcctttcaccagcacatggtcaagtatatttaccctactattggtggctttgatcacgaaaggctgcagtattatttcactcttctggaaaactgtggctgtgcagatttggggaactgtgccattaaaccagaaacccacattcgactgctgaagaagtttaaggttgttgcatcaggtcttaattacaaaaagctgacagatgaaaacatgagtcctcttgaagcattggagccagttctttcaagtcaaaatatcttgtctatttccaaacttgttcccaaaatccctgaaaaggatggacagatgctttccccaagctctctgtacaccatctggttacagaagttgttctggactggagaccctcatctcattaaacaagtcccaggctcttcaccggagtggcttcatgcctatgatgtctgcatgaagtactttgatcgtctccacccaggtgacctcatcactgtggtagatgcagttacattttctccaaaagctgtgaccaagctgtctgtggaagcccgtaaagagatgactagaaaggctattaagacagtcaaacattttattgagaagccaaggaaaagaaactcagaagacgaagctcaagaagctaaggattctaaagttacctatgcagatactttgaatcatctggagaaatcacttgcccacctggaaaccctgagccacagcttcatcctttctctgaagaatagtgagcaggaaacactgcaaaaatacagtcacctctatgatctgtcccgatcagaaaaagagaaacttcatgatgaagctgtggctatttgtttagatggtcagcctctagcaatgattcagcagctgctagaggtggcagttggccctcttgacatctcacccaaggatatagtgcagagtgcaatcatgaaaataatttctgcattgagtggtggcagtgctgaccttggtgggccaagggacccactgaaggtcctggaaggtgttgttgcagcagtccacgccagtgtggacaagggtgaggagctggtttcacctgaggacctgctggagtggctgcggcctttctgtgctgatgacgcctggccggtgcggccccgcattcacgtgctgcagattttggggcaatcatttcacctgactgaggaggacagcaagctcctcgtgttctttagaactgaagccattctcaaagcctcctggccccagagacaggtagacatagctgacattgagaatgaagagaaccgctactgtctattcatggaactcctggaatctagtcaccacgaggctgaatttcagcacttggttttacttttgcaagcttggccacctatgaaaagtgaatatgtcataaccaataatccatgggtgagactagctacagtgatgctaaccagatgtacgatggagaacaaggaaggattggggaatgaagttttgaaaatgtgtcgctctttgtataacaccaagcagatgctgcctgcagagggtgtgaaggagctgtgtctgctgctgcttaaccagtccctcctgcttccatctctgaaacttctcctcgagagccgagatgagcatctgcacgagatggcactggagcaaatcacggcagtcactacggtgaatgattccaattgtgaccaagaacttctttccctgctcctggatgccaagctgctggtgaagtgtgtctccactcccttctatccacgtattgttgaccacctcttggctagcctccagcaagggcgctgggatgcagaggagctgggcagacacctgcgggaggccggccatgaagccgaagccgggtctctccttctggccgtgagggggactcaccaggccttcagaaccttcagtacagccctccgcgcagcacagcactgggtgtgagggccacctgtggccctgctccttagcagaaaaagcatctggagttgaatgctgttcccagaagcaacatgtgtatctgccgattgttctccatgggttccaacaaattgcaaataaaactgtatggaaacgataaaaaaaatcgccttcctggcttcacggggagctctgcggcccttccttaagggaggtaattatgatcctcgttactgaccgtggctcggccgtgggctgtggcgacggttaactcattaaggcggatcggtgttcccatacatgtgatacccggatgaactgtaataggccgtcag

SEQ ID NO: 373037 - DNA, 869 bp, Homo sapiens
  misc_feature (39)..(39): n is a, c, g, or t
atgaaaggcagagggtccagtttgtcagcatttaagagnacatctaggtatgtagacatagctgacattgagaatgaagagaaccgctactgtctattcatggaactcctggaatctagtcaccacgaggctgaatttcagcacttggttttacttttgcaagcttggccacctatgaaaagtgaatatgtcataaccaataatccatgggtgagactagctacagtgatgctaaccagatgtacgatggagaacaaggaaggattggggaatgaagttttgaaaatgtgtcgctctttgtataacaccaagcagatgctgcctgcagagggtgtgaaggagctgtgtctgctgctgcttaaccagtccctcctgcttccatctctgaaacttctcctcgagagccgagatgagcatctgcacgagatggcactggagcaaatcacggcagtcactacggtgaatgattccaattgtgaccaagaacttctttccctgctcctggatgccaagctgctggtgaagtgtgtctccactcccttctatccacgtattgttgaccacctcttggctagcctccagcaagggcgctgggatgcagaggagctgggcagacacctgcgggaggccggccatgaagccgaagccgggtctctccttctggccgtgagggggactcaccaggccttcagaaccttcagtacagccctccgcgcagcacagcactgggtgtgagggccacctgtggccctgctccttagcagaaaaagcatctggagttgaatgctgttcccagaagcaacatgtgtatctgccgattgttctccatgggttccaacaaattgcaaataaaactgtatggaaacgat

SEQ ID NO: 373038 - DNA, 4821 bp, Homo sapiens
catctgaacagagatatgatgctgaattctttaagaaattcagaaatcagaatattgttctctcagcaagaacttatgctcaggaaagtaatgtacaagccctggaaattctgtttacttaccatggttccgacctgcttcctcatcgccttgcaattctgtccaactttccagagaccacttctccacatgaatattctgttttgctgcccgaagcttgttttaacggtgactccctgatgatcattccttggcatgaacataaacaccgagctaaagattggtgcgaggagttggcttgcagaatggttgttgagccgaatctccaagatgaaagtgaattcttgtatgctgcacagcctgagttactaaggttcaggatgacccagcttacggtggagaaggttatggactggtatcagaccagagcagaggaaatagagcattatgctcggcaggtggactgtgcattgtcacttattcgacttgggatggagcggaatattcctggtttgctggttctctgtgacaatttggttactctggaaacattggtttatgaagccaggtgtgatgtaactctaaccctgaaagaactccagcagatgaaagacattgaaaaactaagattactgatgaatagttgttctgaggataaatatgtgacaagtgcctaccagtggatggttccctttcttcatcgttgtgagaaacagtcgcctggtgtggctaatgagctattaaaagaatatttagtaactttagctaaaggggacttaaaatttcccctgaagatatttcagcattccaaaccagatctgcagcaaaaaattattcctgatcaggaccaactgatggcaatagcactagagtgcatctatacctgtgaacgaaatgatcaactctgtctttgctatgacctactagaatgtctgccagaaagaggatatggtgataagacagaggcaaccacaaagcttcatgacatggtagaccaactggaacaaattctcagtgtgtcagagcttttggaaaaacatggactcgagaaaccaatttcatttgttaaaaacactcaatctagctcagaagaggcacgcaagctgatggttagattgacgaggcacactggccggaagcagcctcctgtcagtgagtctcattggagaacgttgctgcaagacatgttaactatgcagcagaatgtatacacatgtctagattctgatgcctgctatgagatatttacagaaagccttctgtgctctagtcgccttgaaaacatccacctggctggacagatgatgcactgcagtgcttgttcagaaaatcctccagctggtatagcccataaagggaaaccccactacagggtcagctacgaaaagagtattgacttggttttggctgccagcagagagtacttcaattcttctaccaacctcactgatagctgcatggatctagccaggtgctgcttacaactgataacagacagaccccctgccattcaagaggagctagatcttatccaagccgttggatgtcttgaagaatttggggtaaagatcctgcctttgcaagtgcgattgtgccctgatcggatcagtctcatcaaggagtgtatttcccagtcccccacatgctataaacaatccaccaagcttctgggccttgctgagctgctgagggttgcaggtgagaacccagaagaaaggcggggacaggttctaatccttttagtggagcaggcacttcgcttccatgactacaaagcagccagtatgcattgtcaggagctgatggccacaggttatcctaaaagttgggatgtttgtagccagttaggacaatcagaaggttaccaggacttggccactcgtcaagagctcatggcttttgctttgacacattgccctcctagcagcattgaacttcttttggcagctagcagctctctgcagacagaaattctttatcaaagagtgaatttccagatccatcatgaaggaggggaaaatatcagtgcttcaccattaactagtaaagcagtacaagaggatgaagtaggtgttccaggtagcaattcagctgacctattgcgctggaccactgctaccaccatgaaagtcctttccaacaccacaaccaccaccaaagcggtgctgcaggccgtcagtgatgggcagtggtggaagaagtctttaacttaccttcgaccccttcaggggcaaaaatgtggtggtgcatatcaaatcggaactacagccaatgaagatctagagaaacaagggtgtcatcctttttatgaatctgtcatctcaaatccttttgtcgctgagtctgaagggacctatgacacctatcagcatgttccagtggaaagctttgcagaagtattgctgagaactggaaaattggcagaggctaaaaataaaggagaagtatttccaacaactgaagttctcttgcaactagcaagtgaagccttgccaaatgacatgaccttggctcttgcttaccttcttgccttaccacaagtgttagatgctaaccggtgctttgaaaagcagtccccctctgcattatctctccagctggcagcgtattactatagcctccagatctatgcccgattggccccatgtttcagggacaagtgccatcctctttacagggctgatcccaaagaactaatcaagatggtcaccaggcatgtgactcgacatgagcacgaagcctggcctgaagaccttatttcactgaccaagcagttacactgctacaatgaacgtctcctggatttcactcaggcgcagatccttcagggccttcggaagggtgtggacgtgcagcggtttactgcagatgaccagtataaaagggaaactatccttggtctggcagaaactctagaggaaagcgtctacagcattgctatttctctggcacaacgttacagtgtctcccgctgggaagtttttatgacccatttggagttcctcttcacggacagtggtttgtccacactagaaattgaaaatagagcccaagaccttcatctctttgagactttgaagactgatccagaagcctttcaccagcacatggtcaagtatatttaccctactattggtggctttgatcacgaaaggctgcagtattatttcactcttctggaaaactgtggctgtgcagatttggggaactgtgccattaaaccagaaacccacattcgactgctgaagaagtttaaggttgttgcatcaggtcttaattacaaaaagctgacagatgaaaacatgagtcctcttgaagcattggagccagttctttcaagtcaaaatatcttgtctatttccaaacttgttcccaaaatccctgaaaaggatggacagatgctttccccaagctctctgtacaccatctggttacagaagttgttctggactggagaccctcatctcattaaacaagtcccaggctcttcaccggagtggcttcatgcctatgatgtctgcatgaagtactttgatcgtctccacccaggtgacctcatcactgtggtagatgcagttacattttctccaaaagctgtgaccaagctgtctgtggaagcccgtaaagagatgactagaaaggctattaagacagtcaaacattttattgagaagccaaggaaaagaaactcagaagacgaagctcaagaagctaaggattctaaagttacctatgcagatactttgaatcatctggagaaatcacttgcccacctggaaaccctgagccacagcttcatcctttctctgaagaatagtgagcaggaaacactgcaaaaatacagtcacctctatgatctgtcccgatcagaaaaagagaaacttcatgatgaagctgtggctatttgtttagatggtcagcctctagcaatgattcagcagctgctagaggtggcagttggccctcttgacatctcacccaaggatatagtgcagagtgcaatcatgaaaataatttctgcattgagtggtggcagtgctgaccttggtgggccaagggacccactgaaggtcctggaaggtgttgttgcagcagtccacgccagtgtggacaagggtgaggagctggtttcacctgaggacctgctggagtggctgcggcctttctgtgctgatgacgcctggccggtgcggccccgcattcacgtgctgcagattttggggcaatcatttcacctgactgaggaggacagcaagctcctcgtgttctttagaactgaagccattctcaaagcctcctggccccagagacaggtagacatagctgacattgagaatgaagagaaccgctactgtctattcatggaactcctggaatctagtcaccacgaggctgaatttcagcacttggttttacttttgcaagcttggccacctatgaaaagtgaatatgtcataaccaataatccatgggtgagactagctacagtgatgctaaccagatgtacgatggagaacaaggaaggattggggaatgaagttttgaaaatgtgtcgctctttgtataacaccaagcagatgctgcctgcagagggtgtgaaggagctgtgtctgctgctgcttaaccagtccctcctgcttccatctctgaaacttctcctcgagagccgagatgagcatctgcacgagatggcactggagcaaatcacggcagtcactacggtgaatgattccaattgtgaccaagaacttctttccctgctcctggattgccgaaagcttggccttggggttgggcaaaagggttgggttgggtcttccc

SEQ ID NO: 373039 - DNA, 4930 bp, Homo sapiens
catctgaacagagatatgatgctgaattctttaagaaattcagaaatcagaatattgttctctcagcaagaacttatgctcaggaaagtaatgtacaagccctggaaattctgtttacttaccatggttccgacctgcttcctcatcgccttgcaattctgtccaactttccagagaccacttctccacatgaatattctgttttgctgcccgaagcttgttttaacggtgactccctgatgatcattccttggcatgaacataaacaccgagctaaagattggtgcgaggagttggcttgcagaatggttgttgagccgaatctccaagatgaaagtgaattcttgtatgctgcacagcctgagttactaaggttcaggatgacccagcttacggtggagaaggttatggactggtatcagaccagagcagaggaaatagagcattatgctcggcaggtggactgtgcattgtcacttattcgacttgggatggagcggaatattcctggtttgctggttctctgtgacaatttggttactctggaaacattggtttatgaagccaggtgtgatgtaactctaaccctgaaagaactccagcagatgaaagacattgaaaaactaagattactgatgaatagttgttctgaggataaatatgtgacaagtgcctaccagtggatggttccctttcttcatcgttgtgagaaacagtcgcctggtgtggctaatgagctattaaaagaatatttagtaactttagctaaaggggacttaaaatttcccctgaagatatttcagcattccaaaccagatctgcagcaaaaaattattcctgatcaggaccaactgatggcaatagcactagagtgcatctatacctgtgaacgaaatgatcaactctgtctttgctatgacctactagaatgtctgccagaaagaggatatggtgataagacagaggcaaccacaaagcttcatgacatggtagaccaactggaacaaattctcagtgtgtcagagcttttggaaaaacatggactcgagaaaccaatttcatttgttaaaaacactcaatctagctcagaagaggcacgcaagctgatggttagattgacgaggcacactggccggaagcagcctcctgtcagtgagtctcattggagaacgttgctgcaagacatgttaactatgcagcagaatgtatacacatgtctagattctgatgcctgctatgagatatttacagaaagccttctgtgctctagtcgccttgaaaacatccacctggctggacagatgatgcactgcagtgcttgttcagaaaatcctccagctggtatagcccataaagggaaaccccactacagggtcagctacgaaaagagtattgacttggttttggctgccagcagagagtacttcaattcttctaccaacctcactgatagctgcatggatctagccaggtgctgcttacaactgataacagacagaccccctgccattcaagaggagctagatcttatccaagccgttggatgtcttgaagaatttggggtaaagatcctgcctttgcaagtgcgattgtgccctgatcggatcagtctcatcaaggagtgtatttcccagtcccccacatgctataaacaatccaccaagcttctgggccttgctgagctgctgagggttgcaggtgagaacccagaagaaaggcggggacaggttctaatccttttagtggagcaggcacttcgcttccatgactacaaagcagccagtatgcattgtcaggagctgatggccacaggttatcctaaaagttgggatgtttgtagccagttaggacaatcagaaggttaccaggacttggccactcgtcaagagctcatggcttttgctttgacacattgccctcctagcagcattgaacttcttttggcagctagcagctctctgcagacagaaattctttatcaaagagtgaatttccagatccatcatgaaggaggggaaaatatcagtgcttcaccattaactagtaaagcagtacaagaggatgaagtaggtgttccaggtagcaattcagctgacctattgcgctggaccactgctaccaccatgaaagtcctttccaacaccacaaccaccaccaaagcggtgctgcaggccgtcagtgatgggcagtggtggaagaagtctttaacttaccttcgaccccttcaggggcaaaaatgtggtggtgcatatcaaatcggaactacagccaatgaagatctagagaaacaagggtgtcatcctttttatgaatctgtcatctcaaatccttttgtcgctgagtctgaagggacctatgacacctatcagcatgttccagtggaaagctttgcagaagtattgctgagaactggaaaattggcagaggctaaaaataaaggagaagtatttccaacaactgaagttctcttgcaactagcaagtgaagccttgccaaatgacatgaccttggctcttgcttaccttcttgccttaccacaagtgttagatgctaaccggtgctttgaaaagcagtccccctctgcattatctctccagctggcagcgtattactatagcctccagatctatgcccgattggccccatgtttcagggacaagtgccatcctctttacagggctgatcccaaagaactaatcaagatggtcaccaggcatgtgactcgacatgagcacgaagcctggcctgaagaccttatttcactgaccaagcagttacactgctacaatgaacgtctcctggatttcactcaggcgcagatccttcagggccttcggaagggtgtggacgtgcagcggtttactgcagatgaccagtataaaagggaaactatccttggtctggcagaaactctagaggaaagcgtctacagcattgctatttctctggcacaacgttacagtgtctcccgctgggaagtttttatgacccatttggagttcctcttcacggacagtggtttgtccacactagaaattgaaaatagagcccaagaccttcatctctttgagactttgaagactgatccagaagcctttcaccagcacatggtcaagtatatttaccctactattggtggctttgatcacgaaaggctgcagtattatttcactcttctggaaaactgtggctgtgcagatttggggaactgtgccattaaaccagaaacccacattcgactgctgaagaagtttaaggttgttgcatcaggtcttaattacaaaaagctgacagatgaaaacatgagtcctcttgaagcattggagccagttctttcaagtcaaaatatcttgtctatttccaaacttgttcccaaaatccctgaaaaggatggacagatgctttccccaagctctctgtacaccatctggttacagaagttgttctggactggagaccctcatctcattaaacaagtcccaggctcttcaccggagtggcttcatgcctatgatgtctgcatgaagtactttgatcgtctccacccaggtgacctcatcactgtggtagatgcagttacattttctccaaaagctgtgaccaagctgtctgtggaagcccgtaaagagatgactagaaaggctattaagacagtcaaacattttattgagaagccaaggaaaagaaactcagaagacgaagctcaagaagctaaggattctaaagttacctatgcagatactttgaatcatctggagaaatcacttgcccacctggaaaccctgagccacagcttcatcctttctctgaagaatagtgagcaggaaacactgcaaaaatacagtcacctctatgatctgtcccgatcagaaaaagagaaacttcatgatgaagctgtggctatttgtttagatggtcagcctctagcaatgattcagcagctgctagaggtggcagttggccctcttgacatctcacccaaggatatagtgcagagtgcaatcatgaaaataatttctgcattgagtggtggcagtgctgaccttggtgggccaagggacccactgaaggtcctggaaggtgttgttgcagcagtccacgccagtgtggacaagggtgaggagctggtttcacctgaggacctgctggagtggctgcggcctttctgtgctgatgacgcctggccggtgcggccccgcattcacgtgctgcagattttggggcaatcatttcacctgactgaggaggacagcaagctcctcgtgttctttagaactgaagccattctcaaagcctcctggccccagagacaggtagacatagctgacattgagaatgaagagaaccgctactgtctattcatggaactcctggaatctagtcaccacgaggctgaatttcagcacttggttttacttttgcaagcttggccacctatgaaaagtgaatatgtcataaccaataatccatgggtgagactagctacagtgatgctaaccagatgtacgatggagaacaaggaaggattggggaatgaagttttgaaaatgtgtcgctctttgtataacaccaagcagatgctgcctgcagagggtgtgaaggagctgtgtctgctgctgcttaaccagtccctcctgcttccatctctgaaacttctcctcgagagccgagatgagcatctgcacgagatggcactggagcaaatcacggcagtcactacggatatcttctagggaccagagaaggaaggagaatctagagcagaggtatatgcttgctactcaagacagtgaagaggttgatgaaaagacatcactgatataaagttttcttaatgacaaaggatacagaaaattctgtaaatagttacagaaagcagaatataattgtatttggaaataatcattatgaataaaatgagaaaatcaaa

SEQ ID NO: 373040 - DNA, 1613 bp, Homo sapiens
catctgaacagagatatgatgctgaattctttaagaaattcagaaatcagaatattgttctctcagcaagaacttatgctcaggaaagtaatgtacaagccctggaaattctgtttacttaccatggttccgacctgcttcctcatcgccttgcaattctgtccaactttccagagaccacttctccacatgaatattctgttttgctgcccgaagcttgttttaacggtgactccctgatgatcattccttggcatgaacataaacaccgagctaaagattggtgcgaggagttggcttgcagaatggttgttgagccgaatctccaagatgaaagtgaattcttgtatgctgcacagcctgagttactaaggttcaggatgacccagcttacggtggagaaggttatggactggtatcagaccagagcagaggaaatagagcattatgctcggcaggtggactgtgcattgtcacttattcgacttgggatggagcggaatattcctggtttgctggttctctgtgacaatttggttactctggaaacattggtttatgaagccaggtgtgatgtaactctaaccctgaaagaactccagcagatgaaagacattgaaaaactaagattactgatgaatagttgttctgaggataaatatgtgacaagtgcctaccagtggatggttccctttcttcatcgttgtgagaaacagtcgcctggtgtggctaatgagctattaaaagaatatttagtaactttagctaaaggggacttaaaatttcccctgaagatatttcagcattccaaaccagatctgcagcaaaaaattattcctgatcaggaccaactgatggcaatagcactagagtgcatctatacctgtgaacgaaatgatcaactctgtctttgctatgacctactagaatgtctgccagaaagaggatatggtgataagacagaggcaaccacaaagcttcatgacatggtagaccaactggaacaaattctcagtgtgtcagagcttttggaaaaacatggactcgagaaaccaatttcatttgttaaaaacactcaatctagctcagaagaggcacgcaagctgatggttagattgacgaggcacactggccggaagcagcctcctgtcagtgagtctcattggagaacgttgctgcaagacatgttaactatgcagcagaatgtatacacatgtctagattctgatgcctgctatgagatatttacagaaagccttctgtgctctagtcgccttgaaaacatccacctggctggacagatgatgcactgcagtgcttgttcagaaaatcctccagctggtatagcccataaagggaaaccccactacagggtcagctacgaaaagagtattgacttggttttggctgccagcagagagtacttcaattcttctaccaacctcactgatagctgcatggatctagccaggtgctgcttacaactgataacagacagaccccctgccattcaagaggagctagatcttatccaagccgttggatgtcttgaagaatttggggtaaagatcctgcctttgcaaggtgagttttctacttactgttgcattgtt

SEQ ID NO: 373041 - DNA, 2838 bp, Homo sapiens
ccaacggagactgcggtatccgcggctggagacccagcggcgagtagccttttgctcccggacggacttgagaggcttaaaggatggcctcgtcagatctggaacaattatgctctcatgttaatgaaaagatggcaatattaagaaaaccttatcattaagaaactgtgttctcttgcaactagcaagtgaagccttgccaaatgacatgaccttggctcttgcttaccttcttgccttaccacaagtgttagatgctaaccggtgctttgaaaagcagtccccctctgcattatctctccagctggcagcgtattactatagcctccagatctatgcccgattggccccatgtttcagggacaagtgccatcctctttacagggctgatcccaaagaactaatcaagatggtcaccaggcatgtgactcgacatgagcacgaagcctggcctgaagaccttatttcactgaccaagcagttacactgctacaatgaacgtctcctggatttcactcaggcgcagatccttcagggccttcggaagggtgtggacgtgcagcggtttactgcagatgaccagtataaaagggaaactatccttggtctggcagaaactctagaggaaagcgtctacagcattgctatttctctggcacaacgttacagtgtctcccgctgggaagtttttatgacccatttggagttcctcttcacggacagtggtttgtccacactagaaattgaaaatagagcccaagaccttcatctctttgagactttgaagactgatccagaagcctttcaccagcacatggtcaagtatatttaccctactattggtggctttgatcacgaaaggctgcagtattatttcactcttctggaaaactgtggctgtgcagatttggggaactgtgccattaaaccagaaacccacattcgactgctgaagaagtttaaggttgttgcatcaggtcttaattacaaaaagctgacagatgaaaacatgagtcctcttgaagcattggagccagttctttcaagtcaaaatatcttgtctatttccaaacttgttcccaaaatccctgaaaaggatggacagatgctttccccaagctctctgtacaccatctggttacagaagttgttctggactggagaccctcatctcattaaacaagtcccaggctcttcaccggagtggcttcatgcctatgatgtctgcatgaagtactttgatcgtctccacccaggtgacctcatcactgtggtagatgcagttacattttctccaaaagctgtgaccaagctgtctgtggaagcccgtaaagagatgactagaaaggctattaagacagtcaaacattttattgagaagccaaggaaaagaaactcagaagacgaagctcaagaagctaaggattctaaagttacctatgcagatactttgaatcatctggagaaatcacttgcccacctggaaaccctgagccacagcttcatcctttctctgaagaatagtgagcaggaaacactgcaaaaatacagtcacctctatgatctgtcccgatcagaaaaagagaaacttcatgatgaagctgtggctatttgtttagatggtcagcctctagcaatgattcagcagctgctagaggtggcagttggccctcttgacatctcacccaaggatatagtgcagagtgcaatcatgaaaataatttctgcattgagtggtggcagtgctgaccttggtgggccaagggacccactgaaggtcctggaaggtgttgttgcagcagtccacgccagtgtggacaagggtgaggagctggtttcacctgaggacctgctggagtggctgcggcctttctgtgctgatgacgcctggccggtgcggccccgcattcacgtgctgcagattttggggcaatcatttcacctgactgaggaggacagcaagctcctcgtgttctttagaactgaagccattctcaaagcctcctggccccagagacaggtagacatagctgacattgagaatgaagagaaccgctactgtctattcatggaactcctggaatctagtcaccacgaggctgaatttcagcacttggttttacttttgcaagcttggccacctatgaaaagtgaatatgtcataaccaataatccatgggtgagactagctacagtgatgctaaccagatgtacgatggagaacaaggaaggattggggaatgaagttttgaaaatgtgtcgctctttgtataacaccaagcagatgctgcctgcagagggtgtgaaggagctgtgtctgctgctgcttaaccagtccctcctgcttccatctctgaaacttctcctcgagagccgagatgagcatctgcacgagatggcactggagcaaatcacggcagtcactacggtgaatgattccaattgtgaccaagaacttctttccctgctcctggatgccaagctgctggtgaagtgtgtctccactcccttctatccacgtattgttgaccacctcttggctagcctccagcaagggcgctgggatgcagaggagctgggcagacacctgcgggaggccggccatgaagccgaagccgggtctctccttctggccgtgagggggactcaccaggccttcagaaccttcagtacagccctccgcgcagcacagcactgggtgtgagggccacctgtggccctgctccttagcagaaaaagcatctggagttgaatgctgttcccagaagcaacatgtgtatctgccgattgttctccatgggttccaacaaattgcaaataaaactgtatggaaacgat

SEQ ID NO: 373042 - DNA, 2196 bp, Homo sapiens
agttgaagagttagtgtgagagtggttaatagagagagagggagcatctaacccctattagttattaatcccccaggatttaagtttgtccacactagaaattgaaaatagagcccaagaccttcatctctttgagactttgaagactgatccagaagcctttcaccagcacatggtcaagtatatttaccctactattggtggctttgatcacgaaaggctgcagtattatttcactcttctggaaaactgtggctgtgcagatttggggaactgtgccattaaaccagaaacccacattcgactgctgaagaagtttaaggttgttgcatcaggtcttaattacaaaaagctgacagatgaaaacatgagtcctcttgaagcattggagccagttctttcaagtcaaaatatcttgtctatttccaaacttgttcccaaaatccctgaaaaggatggacagatgctttccccaagctctctgtacaccatctggttacagaagttgttctggactggagaccctcatctcattaaacaagtcccaggctcttcaccggagtggcttcatgcctatgatgtctgcatgaagtactttgatcgtctccacccaggtgacctcatcactgtggtagatgcagttacattttctccaaaagctgtgaccaagctgtctgtggaagcccgtaaagagatgactagaaaggctattaagacagtcaaacattttattgagaagccaaggaaaagaaactcagaagacgaagctcaagaagctaaggattctaaagttacctatgcagatactttgaatcatctggagaaatcacttgcccacctggaaaccctgagccacagcttcatcctttctctgaagaatagtgagcaggaaacactgcaaaaatacagtcacctctatgatctgtcccgatcagaaaaagagaaacttcatgatgaagctgtggctatttgtttagatggtcagcctctagcaatgattcagcagctgctagaggtggcagttggccctcttgacatctcacccaaggatatagtgcagagtgcaatcatgaaaataatttctgcattgagtggtggcagtgctgaccttggtgggccaagggacccactgaaggtcctggaaggtgttgttgcagcagtccacgccagtgtggacaagggtgaggagctggtttcacctgaggacctgctggagtggctgcggcctttctgtgctgatgacgcctggccggtgcggccccgcattcacgtgctgcagattttggggcaatcatttcacctgactgaggaggacagcaagctcctcgtgttctttagaactgaagccattctcaaagcctcctggccccagagacaggtagacatagctgacattgagaatgaagagaaccgctactgtctattcatggaactcctggaatctagtcaccacgaggctgaatttcagcacttggttttacttttgcaagcttggccacctatgaaaagtgaatatgtcataaccaataatccatgggtgagactagctacagtgatgctaaccagatgtacgatggagaacaaggaaggattggggaatgaagttttgaaaatgtgtcgctctttgtataacaccaagcagatgctgcctgcagagggtgtgaaggagctgtgtctgctgctgcttaaccagtccctcctgcttccatctctgaaacttctcctcgagagccgagatgagcatctgcacgagatggcactggagcaaatcacggcagtcactacggtgaatgattccaattgtgaccaagaacttctttccctgctcctggatgccaagctgctggtgaagtgtgtctccactcccttctatccacgtattgttgaccacctcttggctagcctccagcaagggcgctgggatgcagaggagctgggcagacacctgcgggaggccggccatgaagccgaagccgggtctctccttctggccgtgagggggactcaccaggccttcagaaccttcagtacagccctccgcgcagcacagcactgggtgtgagggccacctgtggccctgctccttagcagaaaaagcatctggagttgaatgctgttcccagaagcaacatgtgtatctgccgattgttctccatgggttccaacaaattgcaaataaaactgtatggaaacgat

SEQ ID NO: 373043 - DNA, 913 bp, Homo sapiens
  misc_feature (27)..(27): n is a, c, g, or t
caaacaacacacgaacaaaaccgaganaacaacaacaccccatatcacaccaatacacgcctccaagatttagaacgaaccacctcgaatctgtggtagacatagctgacattgagaatgaagagaaccgctactgtctattcatggaactcctggaatctagtcaccacgaggctgaatttcagcacttggttttacttttgcaagcttggccacctatgaaaagtgaatatgtcataaccaataatccatgggtgagactagctacagtgatgctaaccagatgtacgatggagaacaaggaaggattggggaatgaagttttgaaaatgtgtcgctctttgtataacaccaagcagatgctgcctgcagagggtgtgaaggagctgtgtctgctgctgcttaaccagtccctcctgcttccatctctgaaacttctcctcgagagccgagatgagcatctgcacgagatggcactggagcaaatcacggcagtcactacggtgaatgattccaattgtgaccaagaacttctttccctgctcctggatgccaagctgctggtgaagtgtgtctccactcccttctatccacgtattgttgaccacctcttggctagcctccagcaagggcgctgggatgcagaggagctgggcagacacctgcgggaggccggccatgaagccgaagccgggtctctccttctggccgtgagggggactcaccaggccttcagaaccttcagtacagccctccgcgcagcacagcactgggtgtgagggccacctgtggccctgctccttagcagaaaaagcatctggagttgaatgctgttcccagaagcaacatgtgtatctgccgattgttctccatgggttccaacaaattgcaaataaaactgtatggaaacgat

SEQ ID NO: 373044 - DNA, 900 bp, Homo sapiens
acacccacttgtccagccagggaccacgaccctgatttttataacacaaacccccccctagcttattgtaccatgtaaggacgtagacatagctgacattgagaatgaagagaaccgctactgtctattcatggaactcctggaatctagtcaccacgaggctgaatttcagcacttggttttacttttgcaagcttggccacctatgaaaagtgaatatgtcataaccaataatccatgggtgagactagctacagtgatgctaaccagatgtacgatggagaacaaggaaggattggggaatgaagttttgaaaatgtgtcgctctttgtataacaccaagcagatgctgcctgcagagggtgtgaaggagctgtgtctgctgctgcttaaccagtccctcctgcttccatctctgaaacttctcctcgagagccgagatgagcatctgcacgagatggcactggagcaaatcacggcagtcactacggtgaatgattccaattgtgaccaagaacttctttccctgctcctggatgccaagctgctggtgaagtgtgtctccactcccttctatccacgtattgttgaccacctcttggctagcctccagcaagggcgctgggatgcagaggagctgggcagacacctgcgggaggccggccatgaagccgaagccgggtctctccttctggccgtgagggggactcaccaggccttcagaaccttcagtacagccctccgcgcagcacagcactgggtgtgagggccacctgtggccctgctccttagcagaaaaagcatctggagttgaatgctgttcccagaagcaacatgtgtatctgccgattgttctccatgggttccaacaaattgcaaataaaactgtatggaaacgat

SEQ ID NO: 373045 - DNA, 916 bp, Homo sapiens
ccggcatccggtcagagccgcccggctgtaatcggacgaccccccgcccccgcgcgcccgcgttcgcgcaccaaaggtccgttcgccccgcgcctgacgtagacatagctgacattgagaatgaagagaaccgctactgtctattcatggaactcctggaatctagtcaccacgaggctgaatttcagcacttggttttacttttgcaagcttggccacctatgaaaagtgaatatgtcataaccaataatccatgggtgagactagctacagtgatgctaaccagatgtacgatggagaacaaggaaggattggggaatgaagttttgaaaatgtgtcgctctttgtataacaccaagcagatgctgcctgcagagggtgtgaaggagctgtgtctgctgctgcttaaccagtccctcctgcttccatctctgaaacttctcctcgagagccgagatgagcatctgcacgagatggcactggagcaaatcacggcagtcactacggtgaatgattccaattgtgaccaagaacttctttccctgctcctggatgccaagctgctggtgaagtgtgtctccactcccttctatccacgtattgttgaccacctcttggctagcctccagcaagggcgctgggatgcagaggagctgggcagacacctgcgggaggccggccatgaagccgaagccgggtctctccttctggccgtgagggggactcaccaggccttcagaaccttcagtacagccctccgcgcagcacagcactgggtgtgagggccacctgtggccctgctccttagcagaaaaagcatctggagttgaatgctgttcccagaagcaacatgtgtatctgccgattgttctccatgggttccaacaaattgcaaataaaactgtatggaaacgat

SEQ ID NO: 373046 - DNA, 5002 bp, Homo sapiens
catctgaacagagatatgatgctgaattctttaagaaattcagaaatcagaatattgttctctcagcaagaacttatgctcaggaaagtaatgtacaagccctggaaattctgtttacttaccatggttccgacctgcttcctcatcgccttgcaattctgtccaactttccagagaccacttctccacatgaatattctgttttgctgcccgaagcttgttttaacggtgactccctgatgatcattccttggcatgaacataaacaccgagctaaagattggtgcgaggagttggcttgcagaatggttgttgagccgaatctccaagatgaaagtgaattcttgtatgctgcacagcctgagttactaaggttcaggatgacccagcttacggtggagaaggttatggactggtatcagaccagagcagaggaaatagagcattatgctcggcaggtggactgtgcattgtcacttattcgacttgggatggagcggaatattcctggtttgctggttctctgtgacaatttggttactctggaaacattggtttatgaagccaggtgtgatgtaactctaaccctgaaagaactccagcagatgaaagacattgaaaaactaagattactgatgaatagttgttctgaggataaatatgtgacaagtgcctaccagtggatggttccctttcttcatcgttgtgagaaacagtcgcctggtgtggctaatgagctattaaaagaatatttagtaactttagctaaaggggacttaaaatttcccctgaagatatttcagcattccaaaccagatctgcagcaaaaaattattcctgatcaggaccaactgatggcaatagcactagagtgcatctatacctgtgaacgaaatgatcaactctgtctttgctatgacctactagaatgtctgccagaaagaggatatggtgataagacagaggcaaccacaaagcttcatgacatggtagaccaactggaacaaattctcagtgtgtcagagcttttggaaaaacatggactcgagaaaccaatttcatttgttaaaaacactcaatctagctcagaagaggcacgcaagctgatggttagattgacgaggcacactggccggaagcagcctcctgtcagtgagtctcattggagaacgttgctgcaagacatgttaactatgcagcagaatgtatacacatgtctagattctgatgcctgctatgagatatttacagaaagccttctgtgctctagtcgccttgaaaacatccacctggctggacagatgatgcactgcagtgcttgttcagaaaatcctccagctggtatagcccataaagggaaaccccactacagggtcagctacgaaaagagtattgacttggttttggctgccagcagagagtacttcaattcttctaccaacctcactgatagctgcatggatctagccaggtgctgcttacaactgataacagacagaccccctgccattcaagaggagctagatcttatccaagccgttggatgtcttgaagaatttggggtaaagatcctgcctttgcaagtgcgattgtgccctgatcggatcagtctcatcaaggagtgtatttcccagtcccccacatgctataaacaatccaccaagcttctgggccttgctgagctgctgagggttgcaggtgagaacccagaagaaaggcggggacaggttctaatccttttagtggagcaggcacttcgcttccatgactacaaagcagccagtatgcattgtcaggagctgatggccacaggttatcctaaaagttgggatgtttgtagccagttaggacaatcagaaggttaccaggacttggccactcgtcaagagctcatggcttttgctttgacacattgccctcctagcagcattgaacttcttttggcagctagcagctctctgcagacagaaattctttatcaaagagtgaatttccagatccatcatgaaggaggggaaaatatcagtgcttcaccattaactagtaaagcagtacaagaggatgaagtaggtgttccaggtagcaattcagctgacctattgcgctggaccactgctaccaccatgaaagtcctttccaacaccacaaccaccaccaaagcggtgctgcaggccgtcagtgatgggcagtggtggaagaagtctttaacttaccttcgaccccttcaggggcaaaaatgtggtggtgcatatcaaatcggaactacagccaatgaagatctagagaaacaagggtgtcatcctttttatgaatctgtcatctcaaatccttttgtcgctgagtctgaagggacctatgacacctatcagcatgttccagtggaaagctttgcagaagtattgctgagaactggaaaattggcagaggctaaaaataaaggagaagtatttccaacaactgaagttctcttgcaactagcaagtgaagccttgccaaatgacatgaccttggctcttgcttaccttcttgccttaccacaagtgttagatgctaaccggtgctttgaaaagcagtccccctctgcattatctctccagctggcagcgtattactatagcctccagatctatgcccgattggccccatgtttcagggacaagtgccatcctctttacagggctgatcccaaagaactaatcaagatggtcaccaggcatgtgactcgacatgagcacgaagcctggcctgaagaccttatttcactgaccaagcagttacactgctacaatgaacgtctcctggatttcactcaggcgcagatccttcagggccttcggaagggtgtggacgtgcagcggtttactgcagatgaccagtataaaagggaaactatccttggtctggcagaaactctagaggaaagcgtctacagcattgctatttctctggcacaacgttacagtgtctcccgctgggaagtttttatgacccatttggagttcctcttcacggacagtggtttgtccacactagaaattgaaaatagagcccaagaccttcatctctttgagactttgaagactgatccagaagcctttcaccagcacatggtcaagtatatttaccctactattggtggctttgatcacgaaaggctgcagtattatttcactcttctggaaaactgtggctgtgcagatttggggaactgtgccattaaaccagaaacccacattcgactgctgaagaagtttaaggttgttgcatcaggtcttaattacaaaaagctgacagatgaaaacatgagtcctcttgaagcattggagccagttctttcaagtcaaaatatcttgtctatttccaaacttgttcccaaaatccctgaaaaggatggacagatgctttccccaagctctctgtacaccatctggttacagaagttgttctggactggagaccctcatctcattaaacaagtcccaggctcttcaccggagtggcttcatgcctatgatgtctgcatgaagtactttgatcgtctccacccaggtgacctcatcactgtggtagatgcagttacattttctccaaaagctgtgaccaagctgtctgtggaagcccgtaaagagatgactagaaaggctattaagacagtcaaacattttattgagaagccaaggaaaagaaactcagaagacgaagctcaagaagctaaggattctaaagttacctatgcagatactttgaatcatctggagaaatcacttgcccacctggaaaccctgagccacagcttcatcctttctctgaagaatagtgagcaggaaacactgcaaaaatacagtcacctctatgatctgtcccgatcagaaaaagagaaacttcatgatgaagctgtggctatttgtttagatggtcagcctctagcaatgattcagcagctgctagaggtggcagttggccctcttgacatctcacccaaggatatagtgcagagtgcaatcatgaaaataatttctgcattgagtggtggcagtgctgaccttggtgggccaagggacccactgaaggtcctggaaggtgttgttgcagcagtccacgccagtgtggacaagggtgaggagctggtttcacctgaggacctgctggagtggctgcggcctttctgtgctgatgacgcctggccggtgcggccccgcattcacgtgctgcagattttggggcaatcatttcacctgactgaggaggacagcaagctcctcgtgttctttagaactgaagccattctcaaagcctcctggccccagagacaggtagacatagctgacattgagaatgaagagaaccgctactgtctattcatggaactcctggaatctagtcaccacgaggctgaatttcagcacttggttttacttttgcaagcttggccacctatgaaaagtgaatatgtcataaccaataatccatgggtgagactagctacagtgatgctaaccagatgtacgatggagaacaaggaaggattggggaatgaagttttgaaaatgtgtcgctctttgtataacaccaagcagatgctgcctgcagaggtgaatgattccaattgtgaccaagaacttctttccctgctcctggatgccaagctgctggtgaagtgtgtctccactcccttctatccacgtattgttgaccacctcttggctagcctccagcaagggcgctgggatgcagaggagctgggcagacacctgcgggaggccggccatgaagccgaagccgggtctctccttctggccgtgagggggactcaccaggccttcagaaccttcagtacagccctccgcgcagcacagcactgggtgtgagggccacctgtggccctgctccttagcagaaaaagcatctggagttgaatgctgttcccagaagcaacatgtgtatctgccgattgttctccatgggttccaacaaattgcaaataaaactgtatggaaacgat

SEQ ID NO: 373047 - DNA, 2313 bp, Homo sapiens
catactagtctgaagcaggttaagctgtgcctcggtgatagaacctgaaagccagtgttttgtggggtttttgggtttttgtgcttttcttttgttttttcaagaaatactttattttactaattatgaaaaggaagccaaaagtgccacatgtcacgggacagtcccagtgaacgcttgtcctagttggagcactttttattaacattagcagtgtgtacttccaaagttaagtcagtatattcaaaccttccctcaatataccctggtggctgggagcaggcagatacacttcccatggcctgggacatggcccagtgtggcccggtctccctgaaggtgctccttgctcatctcttggcttcctgtcgtctgtcacacagccctgggggcatggatctggctgatgctgaggcccatggccatgagccaggaagggggaggcagggtcaggaaagggtagaggcacacctctcagtacgctgaataccactgccagtctccctggcacccaccagaactggtccattgtcatcagagagtaaagtttgtactgggagttactgacaaacagttgctaatacaaaaagtcccatgtgaaattttctttgtttcaggccgagggggcccaggacctgctcagagagtgcccaaatctgggcgttccagctccttagacggagagcaccacgatggataccacagagaccctgaactcttttctgggcacctgaatcccaggaaccctcaatgaggtcttcaagatgaagagactgctgccagctaccagcctggctggccctgtcctgtccaccctcattgccccaactcccatgttgttttgtgaagataaaagctgggatctttttcttttttttaagtctcacaagacatggggcatctccacaaatttaagttcctgtccatttggaaatttgtttctatgtgtacagtttgtcagagaaaaacaaagtttttgtatgaatacagaatgtgatttacgcaagaattgacagaaaactagttgtgaagtgcttgccttaaggaaacctttggtttccatcgcatcccatctgccaaggaatgcacggttgttgctgatgttcatgagcatattaaccactaggttatctaaattaatctcagctgtgaactttgtgtttttcaacacattctgtcacaccatttttgtgacagaaaaatacttgaaaattattctaatgtagtttgtagtaggttcaaatttttattcagacatgctctgacagatggaaaattgtactctgaagagaaaatgcaatcttctggatgtccaacgagggagcttccccttggaagcatctcctaagaatcacagtttaggtttgaatcgccttgttatgatgaggagaggaacttgatgttagtcagaaataaagtcacatgccctttagataacttgaaatcacacatggagttgataaggaatggaccaaaataggtcctcaaacaattttgcaacacttaattaagttttcctctcttcctcttccatactatgtggaaataccagtgttacggcagggcgtacttctaactcacagtaagccagatagatcttgtccatggcaaattccttgtttaaaataaacataccatttagcccagtttggattggaagccaaaaattcagtttgttatataccccatgatactttctatactgacctttattttggttttacatggaagcttttattaaaaggactgtcctatggccaccttaacatttcattacattggcagcttcagttttggcatcagtcaaatttatttggcaaatttagtggtgctggaagtttctttttttcttttccttttttgacagagtcttgctctgtcacccagccaggagtgcagtggtgcaatcacggctcacttcagctttgaccctgcctcagcctccctagtagctaggactacaggcatatgccaccatgcccagctaattttttgtgtgtgtgttttttgtagagatggagtttcaccactttgtctatgctggtttcaaactcctgggctcaagcggtccacctgctgtggcctcccaaagtgctgggattgcagatctgagccacagtacctggccgctggtgctggaagtttcaatggttgcttagaaaaggcatactgatatagtttaacaggatatgaaaatttaactggttctctatgaatgtaaaaaacagcaaaagctaattgatttctgtggagtgagaaaatgtcagccatatacactgcttttcagtgttagaatcgtcgacgcagactatt

SEQ ID NO: 373048 - DNA, 7588 bp, Homo sapiens
tcccgccagtgcgtgatgacccggagagcgtgcgttcggtggcccataggggaagatggcggctgctcctttggaggagcgggattgagaggatcggggtggggagaccaaacaagagagacatttctggctctgaaggcgaacgcttcgctggccatttaggagctctgctcaaagccagacgtatcctagaaggaaaacatcaccatggctacagaaattggttctcctcctcgttttttccatatgccaaggttccagcaccaggcacctcgacagctgttttataagcgacctgattttgcacaacagcaagcaatgcaacagcttacttttgatggaaaacgaatgagaaaagctgtgaaccgaaaaaccatagactacaatccatctgtaattaagtatttggagaacagaatatggcaaagagaccagagagatatgcgggcaattcagcctgatgcaggttattacaatgatctggtcccacctataggaatgttgaataatcctatgaatgcagtaacaacaaaatttgttcggacatcaacaaataaagtaaagtgtcctgtatttgttgttaggtggactccagaaggaagacgcttggtcactggagcttctagtggggagtttaccctgtggaatggactcactttcaattttgaaacaatattacaggctcacgacagcccagtgagggccatgacgtggtcacataatgacatgtggatgttgacagcagaccacggaggatatgtgaaatattggcagtcgaacatgaacaacgtcaagatgttccaggcacataaggaggcgattagagaggccaggtttatacacaatataccattttctgtagtccctattgtcatggttaaattattctctaagtgtattctgggtgcagagatgcatgggctctgtcagtttctgggaaactttctgcaccctataaacacaatatttttctttgttttcacacattcaccattttgctggcacctttctgaagtagtgttgtcccggtatcagcctttgcaatatgttagagatgtactgtctgccgcattttgcactggttttctcttttcatttatgattaataatgtgtatacgttattcctttttattatctactgtgtaagacaagaatatttcattccaaataaagaattcagtctttaattatgcaactgaataaaatctaaagcctacagaaaacaacttcagaattcacacaaagtggaaaaaggcttaagtgaagacctggttggcttggttatgccacgacttccaaaggaaagtataggactaaaaccctcacagataactggatgtggcaaacattaacggagtaatgaatgggttcttcaagctttgcagctgtaagcagatcattgtcaagaagactctaggacttttcttctgattcactgttgataacatcacttatgcaaatgtatacaataagtggagtttaaaatattttcagtgagttgtatatttttacacatcagtgaggtatgtatagtaaaactgggggaaaaagttccaaatacaagcctgaagaattgctgcagcctcagaataaagctaagcagcattctttaaggttgtgccacccatgtgtgggaggaggttgacatctttatggaaacatcatccactgtagtcatttgttcatactttcagaatcttaacagaaattgttggatgaacatgcttctgctttgtagattttgccttagtgtcatgcccatacattgagtttacacagctggtccttcataggattccaaagttcaagggagtttttagagttagttgagaaacttgatgatctttcactgctgggaaaaactgactccttcttgcagcagattctttggctttacacacaagtctgaatgtccttattttaaagttttcctcaaaggtgcaacattcatggaatagcttgccaggaagatgtgaaacttttctacagacctttgaaatggatgagaaacattgtatgtagggatgtttagcaatcagtcttttaatagacagcccacattgtttcagcttatttcatgaagtgtctgaggcagaagctgatgataattttgggagcagtattcgtgtgtgatttaaaagactgcaggaatactgcaaaaatagaatccatttattttcaccacttaaggcagcttcatgtgatttcctcgtatcatagaaaatagagaaggaacatggatagcattagcactaataatacacacttgaagttctcagaatactgatgattgaaaactcaaacaactgctctgttgaagtcttcttttgatgagatgcctatgttagctgacgacattcactttaagggcttcttcactggattcttccctctcctgtttataatgcagcacagtgtttttatttttccctgtctgagaagcacagattatctgttaaatgctgacttctttcccctgctgtgtgtcttcatgtaacagtttctcacccacggataataaatttgctacatgctctgatgacggcactgttagaatctgggactttcttcgttgccatgaggaaagaattctccgagggcatggtgctgatgtgaaatgtgtagactggcatccaaccaaagggttagttgtttcaggaagtaaagatagtcaacagccaatcaagttctgggatcccaagactgggcagagtcttgcaacacttcatgcccataaaaacacagtaatggaagtgaaattaaacctcaatggcaattggctactcacagcatcacgtgatcatctctgtaaactttttgatatcagaaacctaaaagaagagcttcaagtcttccgaggtcataagaaagaagccacagctgtggcctggcatcctgttcatgaaggactttttgccagtggagggtctgatggttctttgttattctggcatgttggggtagagaaggaagtgggtgggatggagatggctcacgaagggatgatctggagtctggcttggcatcctcttgggcatattctctgctcaggctcaaatgaccatactagcaaattctggactcgaaaccgaccaggtgataaaatgcgagatcgatataatctaaaccttttacctggaatgtctgaagatggagtagaatatgatgacctcgaacctaatagcctggcagtaattccaggaatgggaataccagaacaactaaaattagctatggaacaagaacagatggggaaagatgaatcaaatgaaattgaaatgacaattccaggtttagattggggaatggaggaagtgatgcaaaaggatcagaaaaaagtacctcagaagaaagttccttatgcaaaacccattcctgctcagttccagcaggcttggatgcaaaataaagttccaattcctgctccaaatgaggtgctgaatgacagaaaagaagacattaaattggaagagaagaaaaaaacacaagcagaaattgagcaagaaatggctacattacaatatactaacccacaacttctggagcaacttaaaattgaaagacttgcacagaaacaagttgagcaaattcagcctcctccctcatctggcacccctctcctcggaccccagccttttccaggacaaggtccaatgtctcagattcctcaaggttttcaacagccccatccatctcagcagatgccaatgaacatggctcaaatggggcctccaggtccacagggacagtttaggcctcctggaccccagggacaaatgggaccacaaggtcctccactgcatcagggaggtggggggccacaaggattcatgggaccacaggggccccagggcccgccccaggggttgccacggcctcaggacatgcatgggccccaaggaatgcagaggcatcctggacctcatggccctttgggacctcaagggccacctggaccacaaggtagttctggtcctcaaggtcatatgggtcctcagggtccacctggcccacagggtcacataggcccccaaggcccgcctggccctcagggtcacttgggcccacaggggcctccgggtactcaaggtatgcagggaccacctggtcccagaggaatgcaagggcctcctcatcctcatgggatccaaggcggaccagggtctcaagggatccaaggtcctgtgtctcagggacctctgatgggattgaatccaagaggaatgcaggggcctccaggcccccgggagaaccagggtcctgctccccaagggatgattatgggccacccgcctcaagagatgagaggacctcaccctccaggtggactactgggacacggccctcaggaaatgagaggtcctcaggagatccgaggcatgcaggggcctccaccccaaggatcaatgctgggacctccccaggaattgcgagggcctccaggctcacaaagtcagcaggggccgccccagggctctttaggacctccaccccagggtggcatgcaaggaccccccggacctcagggacagcagaacccagcaagagggccacatccatctcaagggccaataccattccagcaacagaaaacgcctctgctaggtgatgggccccgggcccccttcaaccaggaaggacagagcacaggccccccacccctgataccaggcctagggcagcagggagcacaaggtcgcattccccctctgaaccccggacaaggacctggccccaacaaaggtgactcccgcggccctccaaaccatcacatgggcccgatgtcagagaggcggcatgagcagagcggcgggcctgagcatgggcccgagagggggcctttccggggtggccaggactgcaggggtccccctgataggcgtggccctcacccagacttccccgatgacttcagcagaccagatgacttccaccctgacaagcgctttggccaccggttacgtgaatttgaggggcgaggaggacctttaccgcaagaagagaagtggaggcgagggggccctgggcctccgtttccccctgatcacagggaattcagcgagggggatggccggggtgcagcccgaggccctccgggggcatgggaaggccgcaggcccggagatgaacgtttcccccgggatcccgaggacccacgttttcgagggcgcagagaagaaagtttcagaagaggagccccgccgaggcatgagggccgtgctccccccagaggaagggatggttttcctggtcctgaagactttggtccagaggagaattttgatgcttctgaggaagcggcccgaggacgagatctcagaggtcgaggtcggggtaccccacgaggaggaaggaagggtttacttcccactcctgacgagttccctcgctttgaaggagggcggaagccagattcctgggatggaaacagagagcctgggccaggtcatgaacattttcgtgatactccccgccctgatcatccccctcacgacggtcattccccagccagcagagaacgctcctcttctctccaaggcatggacatggcatccctacctccccgaaagcgcccctggcatgatggcccaggcacttctgagcacagagagatggaggccccaggaggcccttctgaagaccgaggaggcaaaggccgagggggcccaggacctgctcagagagtgcccaaatctgggcgttccagctccttagacggagagcaccacgatggataccacagagatgaaccttttgggggccctccaggcagtggcaccccttctcgagggggccggagtggcagtaactggggtagagggagtaacatgaactctggcccgccgaggcgaggagcttcacggggtggtggaaggggtcggtagaagctggaactgagtaccctgaggcctctctggacagtatgtaagaacttcttgtggactcaccaagagaaacaaaaggaagcctgcaccattgtagccctgaactcttttctgggcacctgaatcccaggaaccctcaatgaggtcttcaagatgaagagactgctgccagctaccagcctggctggccctgtcctgtccaccctcattgccccaactcccatgttgttttgtgaagataaaagctgggatctttttcttttttttaagtctcacaagacatggggcatctccacaaatttaagttcctgtccatttggaaatttgtttctatgtgtacagtttgtcagagaaaaacaaagtttttgtatgaatacagaatgtgatttacgcaagaattgacagaaaactagttgtgaagtgcttgccttaaggaaacctttggtttccatcgcatcccatctgccaaggaatgcacggttgttgctgatgttcatgagcatattaaccactaggttatctaaattaatctcagctgtgaactttgtgtttttcaacacattctgtcacaccatttttgtgacagaaaaatacttgaaaattattctaatgtagtttgtagtaggttcaaatttttattcagacatgctctgacagatggaaaattgtactctgaagagaaaatgcaatcttctggatgtccaacgagggagcttccccttggaagcatctcctaagaatcacagtttaggtttgaatcgccttgttatgatgaggagaggaacttgatgttagtcagaaataaagtcacatgccctttagataacttgaaatcacacatggagttgataaggaatggaccaaaataggtcctcaaacaattttgcaacacttaattaagttttcctctcttcctcttccatactatgtggaaataccagtgttacggcagggcgtacttctaactcacagtaagccagatagatcttgtccatggcaaattccttgtttaaaataaacataccatttagcccagtttggattggaagccaaaaattcagtttgttatataccccatgatactttctatactgacctttattttggttttacatggaagcttttattaaaaggactgtcctatggccaccttaacatttcattacattggcagcttcagttttggcatcagtcaaatttatttggcaaatttagtggtgctggaagtttctttttttcttttccttttttgacagagtcttgctctgtcacccagccaggagtgcagtggtgcaatcacggctcacttcagctttgaccctgcctcagcctccctagtagctaggactacaggcatatgccaccatgcccagctaattttttgtgtgtgtgttttttgtagagatggagtttcaccactttgtctatgctggtttcaaactcctgggctcaagcggtccacctgctgtggcctcccaaagtgctgggattgcagatctgagccacagtacctggccgctggtgctggaagtttcaatggttgcttagaaaaggcatactgatatagtttaacaggatatgaaaatttaactggttctctatgaatgtaaaaaacagcaaaagctaattgatttctgtggagtgagaaaatgtcagccatatacactgcttttcagtgttagaatcgtcgacgcagactatt

SEQ ID NO: 373049 - DNA, 6288 bp, Homo sapiens
tcccgccagtgcgtgatgacccggagagcgtgcgttcggtggcccataggggaagatggcggctgctcctttggaggagcgggattgagaggatcggggtggggagaccaaacaagagagacatttctggctctgaaggcgaacgcttcgctggccatttaggagctctgctcaaagccagacgtatcctagaaggaaaacatcaccatggctacagaaattggttctcctcctcgttttttccatatgccaaggttccagcaccaggcacctcgacagctgttttataagcgacctgattttgcacaacagcaagcaatgcaacagcttacttttgatggaaaacgaatgagaaaagctgtgaaccgaaaaaccatagactacaatccatctgtaattaagtatttggagaacagaatatggcaaagagaccagagagatatgcgggcaattcagcctgatgcaggttattacaatgatctggtcccacctataggaatgttgaataatcctatgaatgcagtaacaacaaaatttgttcggacatcaacaaataaagtaaagtgtcctgtatttgttgttaggtggactccagaaggaagacgcttggtcactggagcttctagtggggagtttaccctgtggaatggactcactttcaattttgaaacaatattacaggctcacgacagcccagtgagggccatgacgtggtcacataatgacatgtggatgttgacagcagaccacggaggatatgtgaaatattggcagtcgaacatgaacaacgtcaagatgttccaggcacataaggaggcgattagagaggccaggtttatacacaatataccattttctgtagtccctattgtcatggttaaattattctctaagtgtattctgggtgcagagatgcatgggctctgtcagtttctgggaaactttctgcaccctataaacacaatatttttctttgttttcacacattcaccattttgctggcacctttctgaagtagtgttgtcccggtatcagcctttgcaatatgttagagatgtactgtctgccgcattttgcactggttttctcttttcatttatgattaataatgtgtatacgttattcctttttattatctactgtgtaagacaagaatatttcattccaaataaagaattcagtctttaattatgcaactgaataaaatctaaagcctacagaaaacaacttcagaattcacacaaagtggaaaaaggcttaagtgaagacctggttggcttggttatgccacgacttccaaaggaaagtataggactaaaaccctcacagataactggatgtggcaaacattaacggagtaatgaatgggttcttcaagctttgcagctgtaagcagatcattgtcaagaagactctaggacttttcttctgattcactgttgataacatcacttatgcaaatgtatacaataagtggagtttaaaatattttcagtgagttgtatatttttacacatcagtgaggtatgtatagtaaaactgggggaaaaagttccaaatacaagcctgaagaattgctgcagcctcagaataaagctaagcagcattctttaaggttgtgccacccatgtgtgggaggaggttgacatctttatggaaacatcatccactgtagtcatttgttcatactttcagaatcttaacagaaattgttggatgaacatgcttctgctttgtagattttgccttagtgtcatgcccatacattgagtttacacagctggtccttcataggattccaaagttcaagggagtttttagagttagttgagaaacttgatgatctttcactgctgggaaaaactgactccttcttgcagcagattctttggctttacacacaagtctgaatgtccttattttaaagttttcctcaaaggtgcaacattcatggaatagcttgccaggaagatgtgaaacttttctacagacctttgaaatggatgagaaacattgtatgtagggatgtttagcaatcagtcttttaatagacagcccacattgtttcagcttatttcatgaagtgtctgaggcagaagctgatgataattttgggagcagtattcgtgtgtgatttaaaagactgcaggaatactgcaaaaatagaatccatttattttcaccacttaaggcagcttcatgtgatttcctcgtatcatagaaaatagagaaggaacatggatagcattagcactaataatacacacttgaagttctcagaatactgatgattgaaaactcaaacaactgctctgttgaagtcttcttttgatgagatgcctatgttagctgacgacattcactttaagggcttcttcactggattcttccctctcctgtttataatgcagcacagtgtttttatttttccctgtctgagaagcacagattatctgttaaatgctgacttctttcccctgctgtgtgtcttcatgtaacagtttctcacccacggataataaatttgctacatgctctgatgacggcactgttagaatctgggactttcttcgttgccatgaggaaagaattctccgagggcatggtgctgatgtgaaatgtgtagactggcatccaaccaaagggttagttgtttcaggaagtaaagatagtcaacagccaatcaagttctgggatcccaagactgggcagagtcttgcaacacttcatgcccataaaaacacagtaatggaagtgaaattaaacctcaatggcaattggctactcacagcatcacgtgatcatctctgtaaactttttgatatcagaaacctaaaagaagagcttcaagtcttccgaggtcataagaaagaagccacagctgtggcctggcatcctgttcatgaaggactttttgccagtggagggtctgatggttctttgttattctggcatgttggggtagagaaggaagtgggtgggatggagatggctcacgaagggatgatctggagtctggcttggcatcctcttgggcatattctctgctcaggctcaaatgaccatactagcaaattctggactcgaaaccgaccaggtgataaaatgcgagatcgatataatctaaaccttttacctggaatgtctgaagatggagtagaatatgatgacctcgaacctaatagcctggcagtaattccaggaatgggaataccagaacaactaaaattagctatggaacaagaacagatggggaaagatgaatcaaatgaaattgaaatgacaattccaggtttagattggggaatggaggaagtgatgcaaaaggatcagaaaaaagtacctcagaagaaagttccttatgcaaaacccattcctgctcagttccagcaggcttggatgcaaaataaagttccaattcctgctccaaatgaggtgctgaatgacagaaaagaagacattaaattggaagagaagaaaaaaacacaagcagaaattgagcaagaaatggctacattacaatatactaacccacaacttctggagcaacttaaaattgaaagacttgcacagaaacaagttgagcaaattcagcctcctccctcatctggcacccctctcctcggaccccagccttttccaggacaaggtccaatgtctcagattcctcaaggttttcaacagccccatccatctcagcagatgccaatgaacatggctcaaatggggcctccaggtccacagggacagtttaggcctcctggaccccagggacaaatgggaccacaaggtcctccactgcatcagggaggtggggggccacaaggattcatgggaccacaggggccccagggcccgccccaggggttgccacggcctcaggacatgcatgggccccaaggaatgcagaggcatcctggacctcatggccctttgggacctcaagggccacctggaccacaaggtagttctggtcctcaaggtcatatgggtcctcagggtccacctggcccacagggtcacataggcccccaaggcccgcctggccctcagggtcacttgggcccacaggggcctccgggtactcaaggtatgcagggaccacctggtcccagaggaatgcaagggcctcctcatcctcatgggatccaaggcggaccagggtctcaagggatccaaggtcctgtgtctcagggacctctgatgggattgaatccaagaggaatgcaggggcctccaggcccccgggagaaccagggtcctgctccccaagggatgattatgggccacccgcctcaagagatgagaggacctcaccctccaggtggactactgggacacggccctcaggaaatgagaggtcctcaggagatccgaggcatgcaggggcctccaccccaaggatcaatgctgggacctccccaggaattgcgagggcctccaggctcacaaagtcagcaggggccgccccagggctctttaggacctccaccccagggtggcatgcaaggaccccccggacctcagggacagcagaacccagcaagagggccacatccatctcaagggccaataccattccagcaacagaaaacgcctctgctaggtgatgggccccgggcccccttcaaccaggaaggacagagcacaggccccccacccctgataccaggcctagggcagcagggagcacaaggtcgcattccccctctgaaccccggacaaggacctggccccaacaaaggtgactcccgcggccctccaaaccatcacatgggcccgatgtcagagaggcggcatgagcagagcggcgggcctgagcatgggcccgagagggggcctttccggggtggccaggactgcaggggtccccctgataggcgtggccctcacccagacttccccgatgacttcagcagaccagatgacttccaccctgacaagcgctttggccaccggttacgtgaatttgaggggcgaggaggacctttaccgcaagaagagaagtggaggcgagggggccctgggcctccgtttccccctgatcacagggaattcagcgagggggatggccggggtgcagcccgaggccctccgggggcatgggaaggccgcaggcccggagatgaacgtttcccccgggatcccgaggacccacgttttcgagggcgcagagaagaaagtttcagaagaggagccccgccgaggcatgagggccgtgctccccccagaggaagggatggttttcctggtcctgaagactttggtccagaggagaattttgatgcttctgaggaagcggcccgaggacgagatctcagaggtcgaggtcggggtaccccacgaggaggaaggaagggtttacttcccactcctgacgagttccctcgctttgaaggagggcggaagccagattcctgggatggaaacagagagcctgggccaggtcatgaacattttcgtgatactccccgccctgatcatccccctcacgacggtcattccccagccagcagagaacgctcctcttctctccaaggcatggacatggcatccctacctccccgaaagcgcccctggcatgatggcccaggcacttctgagcacagagagatggaggccccaggaggcccttctgaagaccgaggaggcaaaggccgagggggcccaggacctgctcagagagtgcccaaatctgggcgttccagctccttagacggagagcaccacgatggataccacagagatgaaccttttgggggccctccaggcagtggcaccccttctcgagggggccggagtggcagtaactggggtagagggagtaacatgaactctggcccgccgaggcgaggagcttcacggggtggtggaaggggtcggtagaagctggaactgagtaccctgaggcctctctggacagtatgtaagaacttcttgtggactcaccaagagaaacaaaaggaagcctgcaccattgtagccctgaactcttttctgggcacctgaatcccaggaaccctcaatgaggtcttcaagatgaagagactgctgccagctaccagcctggctggccctgtcctgtccaccctcattgccccaactcccatgttgttttgtgaagataaaagctgggatctttttcttttttttaagtctcacaagacatggggcatctccacaaatttaagttcctgtccatttggaaatttgtttctatgtgtacagtttgtcagagaaaaacaaagtttttgtatgaatacagaatgtgatttacgcaagaattga

SEQ ID NO: 373050 - DNA, 7209 bp, Homo sapiens
tcccgccagtgcgtgatgacccggagagcgtgcgttcggtggcccataggggaagatggcggctgctcctttggaggagcgggattgagaggatcggggtggggagaccaaacaagagagacatttctggctctgaaggcgaacgcttcgctggccatttaggagctctgctcaaagccagacgtatcctagaaggaaaacatcaccatggctacagaaattggttctcctcctcgttttttccatatgccaaggttccagcaccaggcacctcgacagctgttttataagcgacctgattttgcacaacagcaagcaatgcaacagcttacttttgatggaaaacgaatgagaaaagctgtgaaccgaaaaaccatagactacaatccatctgtaattaagtatttggagaacagaatatggcaaagagaccagagagatatgcgggcaattcagcctgatgcaggttattacaatgatctggtcccacctataggaatgttgaataatcctatgaatgcagtaacaacaaaatttgttcggacatcaacaaataaagtaaagtgtcctgtatttgttgttaggtggactccagaaggaagacgcttggtcactggagcttctagtggggagtttaccctgtggaatggactcactttcaattttgaaacaatattacaggctcacgacagcccagtgagggccatgacgtggtcacataatgacatgtggatgttgacagcagaccacggaggatatgtgaaatattggcagtcgaacatgaacaacgtcaagatgttccaggcacataaggaggcgattagagaggccaggtttatacacaatataccattttctgtagtccctattgtcatggttaaattattctctaagtgtattctgggtgcagagatgcatgggctctgtcagtttctgggaaactttctgcaccctataaacacaatatttttctttgttttcacacattcaccattttgctggcacctttctgaagtagtgttgtcccggtatcagcctttgcaatatgttagagatgtactgtctgccgcattttgcactggttttctcttttcatttatgattaataatgtgtatacgttattcctttttattatctactgtgtaagacaagaatatttcattccaaataaagaattcagtctttaattatgcaactgaataaaatctaaagcctacagaaaacaacttcagaattcacacaaagtggaaaaaggcttaagtgaagacctggttggcttggttatgccacgacttccaaaggaaagtataggactaaaaccctcacagataactggatgtggcaaacattaacggagtaatgaatgggttcttcaagctttgcagctgtaagcagatcattgtcaagaagactctaggacttttcttctgattcactgttgataacatcacttatgcaaatgtatacaataagtggagtttaaaatattttcagtgagttgtatatttttacacatcagtgaggtatgtatagtaaaactgggggaaaaagttccaaatacaagcctgaagaattgctgcagcctcagaataaagctaagcagcattctttaaggttgtgccacccatgtgtgggaggaggttgacatctttatggaaacatcatccactgtagtcatttgttcatactttcagaatcttaacagaaattgttggatgaacatgcttctgctttgtagattttgccttagtgtcatgcccatacattgagtttacacagctggtccttcataggattccaaagttcaagggagtttttagagttagttgagaaacttgatgatctttcactgctgggaaaaactgactccttcttgcagcagattctttggctttacacacaagtctgaatgtccttattttaaagttttcctcaaaggtgcaacattcatggaatagcttgccaggaagatgtgaaacttttctacagacctttgaaatggatgagaaacattgtatgtagggatgtttagcaatcagtcttttaatagacagcccacattgtttcagcttatttcatgaagtgtctgaggcagaagctgatgataattttgggagcagtattcgtgtgtgatttaaaagactgcaggaatactgcaaaaatagaatccatttattttcaccacttaaggcagcttcatgtgatttcctcgtatcatagaaaatagagaaggaacatggatagcattagcactaataatacacacttgaagttctcagaatactgatgattgaaaactcaaacaactgctctgttgaagtcttcttttgatgagatgcctatgttagctgacgacattcactttaagggcttcttcactggattcttccctctcctgtttataatgcagcacagtgtttttatttttccctgtctgagaagcacagattatctgttaaatgctgacttctttcccctgctgtgtgtcttcatgtaacagtttctcacccacggataataaatttgctacatgctctgatgacggcactgttagaatctgggactttcttcgttgccatgaggaaagaattctccgagggcatggtgctgatgtgaaatgtgtagactggcatccaaccaaagggttagttgtttcaggaagtaaagatagtcaacagccaatcaagttctgggatcccaagactgggcagagtcttgcaacacttcatgcccataaaaacacagtaatggaagtgaaattaaacctcaatggcaattggctactcacagcatcacgtgatcatctctgtaaactttttgatatcagaaacctaaaagaagagcttcaagtcttccgaggtcataagaaagaagccacagctgtggcctggcatcctgttcatgaaggactttttgccagtggagggtctgatggttctttgttattctggcatgttggggtagagaaggaagtgggtgggatggagatggctcacgaagggatgatctggagtctggcttggcatcctcttgggcatattctctgctcaggctcaaatgaccatactagcaaattctggactcgaaaccgaccaggtgataaaatgcgagatcgatataatctaaaccttttacctggaatgtctgaagatggagtagaatatgatgacctcgaacctaatagcctggcagtaattccaggaatgggaataccagaacaactaaaattagctatggaacaagaacagatggggaaagatgaatcaaatgaaattgaaatgacaattccaggtttagattggggaatggaggaagtgatgcaaaaggatcagaaaaaagtacctcagaagaaagttccttatgcaaaacccattcctgctcagttccagcaggcttggatgcaaaataaagttccaattcctgctccaaatgaggtgctgaatgacagaaaagaagacattaaattggaagagaagaaaaaaacacaagcagaaattgagcaagaaatggctacattacaatatactaacccacaacttctggagcaacttaaaattgaaagacttgcacagaaacaagttgagcaaattcagcctcctccctcatctggcacccctctcctcggaccccagccttttccaggacaaggtccaatgtctcagattcctcaaggttttcaacagccccatccatctcagcagatgccaatgaacatggctcaaatggggcctccaggtccacagggacagtttaggcctcctggaccccagggacaaatgggaccacaaggtcctccactgcatcagggaggtggggggccacaaggattcatgggaccacaggggccccagggcccgccccaggggttgccacggcctcaggacatgcatgggccccaaggaatgcagaggcatcctggacctcatggccctttgggacctcaagggccacctggaccacaaggtagttctggtcctcaaggtcatatgggtcctcagggtccacctggcccacagggtcacataggcccccaaggcccgcctggccctcagggtcacttgggcccacaggggcctccgggtactcaaggtatgcagggaccacctggtcccagaggaatgcaagggcctcctcatcctcatgggatccaaggcggaccagggtctcaagggatccaaggtcctgtgtctcagggacctctgatgggattgaatccaagaggaatgcaggggcctccaggcccccgggagaaccagggtcctgctccccaagggatgattatgggccacccgcctcaagagatgagaggacctcaccctccaggtggactactgggacacggccctcaggaaatgagaggtcctcaggagatccgaggcatgcaggggcctccaccccaaggatcaatgctgggacctccccaggaattgcgagggcctccaggctcacaaagtcagcaggggccgccccagggctctttaggacctccaccccagggtggcatgcaaggaccccccggacctcagggacagcagaacccagcaagagggccacatccatctcaagggccaataccattccagcaacagaaaacgcctctgctaggtgatgggccccgggcccccttcaaccaggaaggacagagcacaggccccccacccctgataccagggaattcagcgagggggatggccggggtgcagcccgaggccctccgggggcatgggaaggccgcaggcccggagatgaacgtttcccccgggatcccgaggacccacgttttcgagggcgcagagaagaaagtttcagaagaggagccccgccgaggcatgagggccgtgctccccccagaggaagggatggttttcctggtcctgaagactttggtccagaggagaattttgatgcttctgaggaagcggcccgaggacgagatctcagaggtcgaggtcggggtaccccacgaggaggaaggaagggtttacttcccactcctgacgagttccctcgctttgaaggagggcggaagccagattcctgggatggaaacagagagcctgggccaggtcatgaacattttcgtgatactccccgccctgatcatccccctcacgacggtcattccccagccagcagagaacgctcctcttctctccaaggcatggacatggcatccctacctccccgaaagcgcccctggcatgatggcccaggcacttctgagcacagagagatggaggccccaggaggcccttctgaagaccgaggaggcaaaggccgagggggcccaggacctgctcagagagtgcccaaatctgggcgttccagctccttagacggagagcaccacgatggataccacagagatgaaccttttgggggccctccaggcagtggcaccccttctcgagggggccggagtggcagtaactggggtagagggagtaacatgaactctggcccgccgaggcgaggagcttcacggggtggtggaaggggtcggtagaagctggaactgagtaccctgaggcctctctggacagtatgtaagaacttcttgtggactcaccaagagaaacaaaaggaagcctgcaccattgtagccctgaactcttttctgggcacctgaatcccaggaaccctcaatgaggtcttcaagatgaagagactgctgccagctaccagcctggctggccctgtcctgtccaccctcattgccccaactcccatgttgttttgtgaagataaaagctgggatctttttcttttttttaagtctcacaagacatggggcatctccacaaatttaagttcctgtccatttggaaatttgtttctatgtgtacagtttgtcagagaaaaacaaagtttttgtatgaatacagaatgtgatttacgcaagaattgacagaaaactagttgtgaagtgcttgccttaaggaaacctttggtttccatcgcatcccatctgccaaggaatgcacggttgttgctgatgttcatgagcatattaaccactaggttatctaaattaatctcagctgtgaactttgtgtttttcaacacattctgtcacaccatttttgtgacagaaaaatacttgaaaattattctaatgtagtttgtagtaggttcaaatttttattcagacatgctctgacagatggaaaattgtactctgaagagaaaatgcaatcttctggatgtccaacgagggagcttccccttggaagcatctcctaagaatcacagtttaggtttgaatcgccttgttatgatgaggagaggaacttgatgttagtcagaaataaagtcacatgccctttagataacttgaaatcacacatggagttgataaggaatggaccaaaataggtcctcaaacaattttgcaacacttaattaagttttcctctcttcctcttccatactatgtggaaataccagtgttacggcagggcgtacttctaactcacagtaagccagatagatcttgtccatggcaaattccttgtttaaaataaacataccatttagcccagtttggattggaagccaaaaattcagtttgttatataccccatgatactttctatactgacctttattttggttttacatggaagcttttattaaaaggactgtcctatggccaccttaacatttcattacattggcagcttcagttttggcatcagtcaaatttatttggcaaatttagtggtgctggaagtttctttttttcttttccttttttgacagagtcttgctctgtcacccagccaggagtgcagtggtgcaatcacggctcacttcagctttgaccctgcctcagcctccctagtagctaggactacaggcatatgccaccatgcccagctaattttttgtgtgtgtgttttttgtagagatggagtttcaccactttgtctatgctggtttcaaactcctgggctcaagcggtccacctgctgtggcctcccaaagtgctgggattgcagatctgagccacagtacctggccgctggtgctggaagtttcaatggttgcttagaaaaggcatactgatatagtttaacaggatatgaaaatttaactggttctctatgaatgtaaaaaacagcaaaagctaattgatttctgtggagtgagaaaatgtcagccatatacactgcttttcagtgttagaatcgtcgacgcagactatt

SEQ ID NO: 373051 - DNA, 3157 bp, Homo sapiens
tcccgccagtgcgtgatgacccggagagcgtgcgttcggtggcccataggggaagatggcggctgctcctttggaggagcgggattgagaggatcggggtggggagaccaaacaagagagacatttctggctctgaaggcgaacgcttcgctggccatttaggagctctgctcaaagccagacgtatcctagaaggaaaacatcaccatggctacagaaattggttctcctcctcgttttttccatatgccaaggttccagcaccaggcacctcgacagctgttttataagcgacctgattttgcacaacagcaagcaatgcaacagcttacttttgatggaaaacgaatgagaaaagctgtgaaccgaaaaaccatagactacaatccatctgtaattaagtatttggagaacagaatatggcaaagagaccagagagatatgcgggcaattcagcctgatgcaggttattacaatgatctggtcccacctataggaatgttgaataatcctatgaatgcagtaacaacaaaatttgttcggacatcaacaaataaagtaaagtgtcctgtatttgttgttaggtggactccagaaggaagacgcttggtcactggagcttctagtggggagtttaccctgtggaatggactcactttcaattttgaaacaatattacaggctcacgacagcccagtgagggccatgacgtggtcacataatgacatgtggatgttgacagcagaccacggaggatatgtgaaatattggcagtcgaacatgaacaacgtcaagatgttccaggcacataaggaggcgattagagaggccaggtttatacacaatataccattttctgtagtccctattgtcatggttaaattattctctaagtgtattctgggtgcagagatgcatgggctctgtcagtttctgggaaactttctgcaccctataaacacaatatttttctttgttttcacacattcaccattttgctggcacctttctgaagtagtgttgtcccggtatcagcctttgcaatatgttagagatgtactgtctgccgcattttgcactggttttctcttttcatttatgattaataatgtgtatacgttattcctttttattatctactgtgtaagacaagaatatttcattccaaataaagaattcagtctttaattatgcaactgaataaaatctaaagcctacagaaaacaacttcagaattcacacaaagtggaaaaaggcttaagtgaagacctggttggcttggttatgccacgacttccaaaggaaagtataggactaaaaccctcacagataactggatgtggcaaacattaacggagtaatgaatgggttcttcaagctttgcagctgtaagcagatcattgtcaagaagactctaggacttttcttctgattcactgttgataacatcacttatgcaaatgtatacaataagtggagtttaaaatattttcagtgagttgtatatttttacacatcagtgaggtatgtatagtaaaactgggggaaaaagttccaaatacaagcctgaagaattgctgcagcctcagaataaagctaagcagcattctttaaggttgtgccacccatgtgtgggaggaggttgacatctttatggaaacatcatccactgtagtcatttgttcatactttcagaatcttaacagaaattgttggatgaacatgcttctgctttgtagattttgccttagtgtcatgcccatacattgagtttacacagctggtccttcataggattccaaagttcaagggagtttttagagttagttgagaaacttgatgatctttcactgctgggaaaaactgactccttcttgcagcagattctttggctttacacacaagtctgaatgtccttattttaaagttttcctcaaaggtgcaacattcatggaatagcttgccaggaagatgtgaaacttttctacagacctttgaaatggatgagaaacattgtatgtagggatgtttagcaatcagtcttttaatagacagcccacattgtttcagcttatttcatgaagtgtctgaggcagaagctgatgataattttgggagcagtattcgtgtgtgatttaaaagactgcaggaatactgcaaaaatagaatccatttattttcaccacttaaggcagcttcatgtgatttcctcgtatcatagaaaatagagaaggaacatggatagcattagcactaataatacacacttgaagttctcagaatactgatgattgaaaactcaaacaactgctctgttgaagtcttcttttgatgagatgcctatgttagctgacgacattcactttaagggcttcttcactggattcttccctctcctgtttataatgcagcacagtgtttttatttttccctgtctgagaagcacagattatctgttaaatgctgacttctttcccctgctgtgtgtcttcatgtaacagtttctcacccacggataataaatttgctacatgctctgatgacggcactgttagaatctgggactttcttcgttgccatgaggaaagaattctccgaggtacgtgtactaacagtactgattggaatatttaaatagggaagacatttgtggttaaatcatcacaaaaccacaatactggcttacacctccattcaattttttttacatatacacaccgtctcaggctcttcaaaaaaacccagcactttctctgactcacagtcattttgtaggtttttactaccagtgttatctttgaatttttcagctgtaaattaaatacaagagtgcctcccccttacttgcttatctgtatgcatcttttagggctgtattccttttccttccttgtagccagggtacttgttcccaacatattgacactgtggtttgatttagatagccgtcattctcctggcagtccttttacaatatgaattaaccgacaagatagaggtatcaaagctacacttcttagtgttactatttttgaaagcagttggtttttcagtacaccacatttgtactacatggccggcttgttactaagttcgggtggcattgctgcttgtttacttttgttgattttataattaataaacctctatgaaatta

SEQ ID NO: 373052 - DNA, 3114 bp, Homo sapiens
tcccgccagtgcgtgatgacccggagagcgtgcgttcggtggcccataggggaagatggcggctgctcctttggaggagcgggattgagaggatcggggtggggagaccaaacaagagagacatttctggctctgaaggcgaacgcttcgctggccatttaggagctctgctcaaagccagacgtatcctagaaggaaaacatcaccatggctacagaaattggttctcctcctcgttttttccatatgccaaggttccagcaccaggcacctcgacagctgttttataagcgacctgattttgcacaacagcaagcaatgcaacagcttacttttgatggaaaacgaatgagaaaagctgtgaaccgaaaaaccatagactacaatccatctgtaattaagtatttggagaacagaatatggcaaagagaccagagagatatgcgggcaattcagcctgatgcaggttattacaatgatctggtcccacctataggaatgttgaataatcctatgaatgcagtaacaacaaaatttgttcggacatcaacaaataaagtaaagtgtcctgtatttgttgttaggtggactccagaaggaagacgcttggtcactggagcttctagtggggagtttaccctgtggaatggactcactttcaattttgaaacaatattacaggctcacgacagcccagtgagggccatgacgtggtcacataatgacatgtggatgttgacagcagaccacggaggatatgtgaaatattggcagtcgaacatgaacaacgtcaagatgttccaggcacataaggaggcgattagagaggccaggtttatacacaatataccattttctgtagtccctattgtcatggttaaattattctctaagtgtattctgggtgcagagatgcatgggctctgtcagtttctgggaaactttctgcaccctataaacacaatatttttctttgttttcacacattcaccattttgctggcacctttctgaagtagtgttgtcccggtatcagcctttgcaatatgttagagatgtactgtctgccgcattttgcactggttttctcttttcatttatgattaataatgtgtatacgttattcctttttattatctactgtgtaagacaagaatatttcattccaaataaagaattcagtctttaattatgcaactgaataaaatctaaagcctacagaaaacaacttcagaattcacacaaagtggaaaaaggcttaagtgaagacctggttggcttggttatgccacgacttccaaaggaaagtataggactaaaaccctcacagataactggatgtggcaaacattaacggagtaatgaatgggttcttcaagctttgcagctgtaagcagatcattgtcaagaagactctaggacttttcttctgattcactgttgataacatcacttatgcaaatgtatacaataagtggagtttaaaatattttcagtgagttgtatatttttacacatcagtgaggtatgtatagtaaaactgggggaaaaagttccaaatacaagcctgaagaattgctgcagcctcagaataaagctaagcagcattctttaaggttgtgccacccatgtgtgggaggaggttgacatctttatggaaacatcatccactgtagtcatttgttcatactttcagaatcttaacagaaattgttggatgaacatgcttctgctttgtagattttgccttagtgtcatgcccatacattgagtttacacagctggtccttcataggattccaaagttcaagggagtttttagagttagttgagaaacttgatgatctttcactgctgggaaaaactgactccttcttgcagcagattctttggctttacacacaagtctgaatgtccttattttaaagttttcctcaaaggtgcaacattcatggaatagcttgccaggaagatgtgaaacttttctacagacctttgaaatggatgagaaacattgtatgtagggatgtttagcaatcagtcttttaatagacagcccacattgtttcagcttatttcatgaagtgtctgaggcagaagctgatgataattttgggagcagtattcgtgtgtgatttaaaagactgcaggaatactgcaaaaatagaatccatttattttcaccacttaaggcagcttcatgtgatttcctcgtatcatagaaaatagagaaggaacatggatagcattagcactaataatacacacttgaagttctcagaatactgatgattgaaaactcaaacaactgctctgttgaagtcttcttttgatgagatgcctatgttagctgacgacattcactttaagggcttcttcactggattcttccctctcctgtttataatgcagcacagtgtttttatttttccctgtctgagaagcacagattatctgttaaatgctgacttctttcccctgctgtgtgtcttcatgtaacagtttctcacccacggataataaatttgctacatgctctgatgacggcactgttagaatctgggactttcttcgttgccatgaggaaagaattctccgagggcatggtgctgatgtgaaatgtgtagactggcatccaaccaaagggttagttgtttcaggaagtaaagatagtcaacagccaatcaagttctgggatcccaagactgggcagagtcttgcaacacttcatgcccataaaaacacagtaatggaagtgaaattaaacctcaatggcaattggctactcacagcatcacgtgatcatctctgtaaactttttgatatcagaaacctaaaagaagagcttcaagtcttccgaggtcataagaaagaagccacagctgtggcctggcatcctgttcatgaaggactttttgccagtggagggtctgatggttctttgttattctggcatgttgggtatgtaagatttatgtgaaaaagtagtgtattttgtgaagagagcacgtgaatgtgtgcagacatgatagttttgtagcttttctaagtgttcatatatcctatatcagagactgcttgcagttttcagttctgtaaatccagcttggaatag

SEQ ID NO: 373053 - DNA, 7518 bp, Homo sapiens
tcccgccagtgcgtgatgacccggagagcgtgcgttcggtggcccataggggaagatggcggctgctcctttggaggagcgggattgagaggatcggggtggggagaccaaacaagagagacatttctggctctgaaggcgaacgcttcgctggccatttaggagctctgctcaaagccagacggttccagcaccaggcacctcgacagctgttttataagcgacctgattttgcacaacagcaagcaatgcaacagcttacttttgatggaaaacgaatgagaaaagctgtgaaccgaaaaaccatagactacaatccatctgtaattaagtatttggagaacagaatatggcaaagagaccagagagatatgcgggcaattcagcctgatgcaggttattacaatgatctggtcccacctataggaatgttgaataatcctatgaatgcagtaacaacaaaatttgttcggacatcaacaaataaagtaaagtgtcctgtatttgttgttaggtggactccagaaggaagacgcttggtcactggagcttctagtggggagtttaccctgtggaatggactcactttcaattttgaaacaatattacaggctcacgacagcccagtgagggccatgacgtggtcacataatgacatgtggatgttgacagcagaccacggaggatatgtgaaatattggcagtcgaacatgaacaacgtcaagatgttccaggcacataaggaggcgattagagaggccaggtttatacacaatataccattttctgtagtccctattgtcatggttaaattattctctaagtgtattctgggtgcagagatgcatgggctctgtcagtttctgggaaactttctgcaccctataaacacaatatttttctttgttttcacacattcaccattttgctggcacctttctgaagtagtgttgtcccggtatcagcctttgcaatatgttagagatgtactgtctgccgcattttgcactggttttctcttttcatttatgattaataatgtgtatacgttattcctttttattatctactgtgtaagacaagaatatttcattccaaataaagaattcagtctttaattatgcaactgaataaaatctaaagcctacagaaaacaacttcagaattcacacaaagtggaaaaaggcttaagtgaagacctggttggcttggttatgccacgacttccaaaggaaagtataggactaaaaccctcacagataactggatgtggcaaacattaacggagtaatgaatgggttcttcaagctttgcagctgtaagcagatcattgtcaagaagactctaggacttttcttctgattcactgttgataacatcacttatgcaaatgtatacaataagtggagtttaaaatattttcagtgagttgtatatttttacacatcagtgaggtatgtatagtaaaactgggggaaaaagttccaaatacaagcctgaagaattgctgcagcctcagaataaagctaagcagcattctttaaggttgtgccacccatgtgtgggaggaggttgacatctttatggaaacatcatccactgtagtcatttgttcatactttcagaatcttaacagaaattgttggatgaacatgcttctgctttgtagattttgccttagtgtcatgcccatacattgagtttacacagctggtccttcataggattccaaagttcaagggagtttttagagttagttgagaaacttgatgatctttcactgctgggaaaaactgactccttcttgcagcagattctttggctttacacacaagtctgaatgtccttattttaaagttttcctcaaaggtgcaacattcatggaatagcttgccaggaagatgtgaaacttttctacagacctttgaaatggatgagaaacattgtatgtagggatgtttagcaatcagtcttttaatagacagcccacattgtttcagcttatttcatgaagtgtctgaggcagaagctgatgataattttgggagcagtattcgtgtgtgatttaaaagactgcaggaatactgcaaaaatagaatccatttattttcaccacttaaggcagcttcatgtgatttcctcgtatcatagaaaatagagaaggaacatggatagcattagcactaataatacacacttgaagttctcagaatactgatgattgaaaactcaaacaactgctctgttgaagtcttcttttgatgagatgcctatgttagctgacgacattcactttaagggcttcttcactggattcttccctctcctgtttataatgcagcacagtgtttttatttttccctgtctgagaagcacagattatctgttaaatgctgacttctttcccctgctgtgtgtcttcatgtaacagtttctcacccacggataataaatttgctacatgctctgatgacggcactgttagaatctgggactttcttcgttgccatgaggaaagaattctccgagggcatggtgctgatgtgaaatgtgtagactggcatccaaccaaagggttagttgtttcaggaagtaaagatagtcaacagccaatcaagttctgggatcccaagactgggcagagtcttgcaacacttcatgcccataaaaacacagtaatggaagtgaaattaaacctcaatggcaattggctactcacagcatcacgtgatcatctctgtaaactttttgatatcagaaacctaaaagaagagcttcaagtcttccgaggtcataagaaagaagccacagctgtggcctggcatcctgttcatgaaggactttttgccagtggagggtctgatggttctttgttattctggcatgttggggtagagaaggaagtgggtgggatggagatggctcacgaagggatgatctggagtctggcttggcatcctcttgggcatattctctgctcaggctcaaatgaccatactagcaaattctggactcgaaaccgaccaggtgataaaatgcgagatcgatataatctaaaccttttacctggaatgtctgaagatggagtagaatatgatgacctcgaacctaatagcctggcagtaattccaggaatgggaataccagaacaactaaaattagctatggaacaagaacagatggggaaagatgaatcaaatgaaattgaaatgacaattccaggtttagattggggaatggaggaagtgatgcaaaaggatcagaaaaaagtacctcagaagaaagttccttatgcaaaacccattcctgctcagttccagcaggcttggatgcaaaataaagttccaattcctgctccaaatgaggtgctgaatgacagaaaagaagacattaaattggaagagaagaaaaaaacacaagcagaaattgagcaagaaatggctacattacaatatactaacccacaacttctggagcaacttaaaattgaaagacttgcacagaaacaagttgagcaaattcagcctcctccctcatctggcacccctctcctcggaccccagccttttccaggacaaggtccaatgtctcagattcctcaaggttttcaacagccccatccatctcagcagatgccaatgaacatggctcaaatggggcctccaggtccacagggacagtttaggcctcctggaccccagggacaaatgggaccacaaggtcctccactgcatcagggaggtggggggccacaaggattcatgggaccacaggggccccagggcccgccccaggggttgccacggcctcaggacatgcatgggccccaaggaatgcagaggcatcctggacctcatggccctttgggacctcaagggccacctggaccacaaggtagttctggtcctcaaggtcatatgggtcctcagggtccacctggcccacagggtcacataggcccccaaggcccgcctggccctcagggtcacttgggcccacaggggcctccgggtactcaaggtatgcagggaccacctggtcccagaggaatgcaagggcctcctcatcctcatgggatccaaggcggaccagggtctcaagggatccaaggtcctgtgtctcagggacctctgatgggattgaatccaagaggaatgcaggggcctccaggcccccgggagaaccagggtcctgctccccaagggatgattatgggccacccgcctcaagagatgagaggacctcaccctccaggtggactactgggacacggccctcaggaaatgagaggtcctcaggagatccgaggcatgcaggggcctccaccccaaggatcaatgctgggacctccccaggaattgcgagggcctccaggctcacaaagtcagcaggggccgccccagggctctttaggacctccaccccagggtggcatgcaaggaccccccggacctcagggacagcagaacccagcaagagggccacatccatctcaagggccaataccattccagcaacagaaaacgcctctgctaggtgatgggccccgggcccccttcaaccaggaaggacagagcacaggccccccacccctgataccaggcctagggcagcagggagcacaaggtcgcattccccctctgaaccccggacaaggacctggccccaacaaaggtgactcccgcggccctccaaaccatcacatgggcccgatgtcagagaggcggcatgagcagagcggcgggcctgagcatgggcccgagagggggcctttccggggtggccaggactgcaggggtccccctgataggcgtggccctcacccagacttccccgatgacttcagcagaccagatgacttccaccctgacaagcgctttggccaccggttacgtgaatttgaggggcgaggaggacctttaccgcaagaagagaagtggaggcgagggggccctgggcctccgtttccccctgatcacagggaattcagcgagggggatggccggggtgcagcccgaggccctccgggggcatgggaaggccgcaggcccggagatgaacgtttcccccgggatcccgaggacccacgttttcgagggcgcagagaagaaagtttcagaagaggagccccgccgaggcatgagggccgtgctccccccagaggaagggatggttttcctggtcctgaagactttggtccagaggagaattttgatgcttctgaggaagcggcccgaggacgagatctcagaggtcgaggtcggggtaccccacgaggaggaaggaagggtttacttcccactcctgacgagttccctcgctttgaaggagggcggaagccagattcctgggatggaaacagagagcctgggccaggtcatgaacattttcgtgatactccccgccctgatcatccccctcacgacggtcattccccagccagcagagaacgctcctcttctctccaaggcatggacatggcatccctacctccccgaaagcgcccctggcatgatggcccaggcacttctgagcacagagagatggaggccccaggaggcccttctgaagaccgaggaggcaaaggccgagggggcccaggacctgctcagagagtgcccaaatctgggcgttccagctccttagacggagagcaccacgatggataccacagagatgaaccttttgggggccctccaggcagtggcaccccttctcgagggggccggagtggcagtaactggggtagagggagtaacatgaactctggcccgccgaggcgaggagcttcacggggtggtggaaggggtcggtagaagctggaactgagtaccctgaggcctctctggacagtatgtaagaacttcttgtggactcaccaagagaaacaaaaggaagcctgcaccattgtagccctgaactcttttctgggcacctgaatcccaggaaccctcaatgaggtcttcaagatgaagagactgctgccagctaccagcctggctggccctgtcctgtccaccctcattgccccaactcccatgttgttttgtgaagataaaagctgggatctttttcttttttttaagtctcacaagacatggggcatctccacaaatttaagttcctgtccatttggaaatttgtttctatgtgtacagtttgtcagagaaaaacaaagtttttgtatgaatacagaatgtgatttacgcaagaattgacagaaaactagttgtgaagtgcttgccttaaggaaacctttggtttccatcgcatcccatctgccaaggaatgcacggttgttgctgatgttcatgagcatattaaccactaggttatctaaattaatctcagctgtgaactttgtgtttttcaacacattctgtcacaccatttttgtgacagaaaaatacttgaaaattattctaatgtagtttgtagtaggttcaaatttttattcagacatgctctgacagatggaaaattgtactctgaagagaaaatgcaatcttctggatgtccaacgagggagcttccccttggaagcatctcctaagaatcacagtttaggtttgaatcgccttgttatgatgaggagaggaacttgatgttagtcagaaataaagtcacatgccctttagataacttgaaatcacacatggagttgataaggaatggaccaaaataggtcctcaaacaattttgcaacacttaattaagttttcctctcttcctcttccatactatgtggaaataccagtgttacggcagggcgtacttctaactcacagtaagccagatagatcttgtccatggcaaattccttgtttaaaataaacataccatttagcccagtttggattggaagccaaaaattcagtttgttatataccccatgatactttctatactgacctttattttggttttacatggaagcttttattaaaaggactgtcctatggccaccttaacatttcattacattggcagcttcagttttggcatcagtcaaatttatttggcaaatttagtggtgctggaagtttctttttttcttttccttttttgacagagtcttgctctgtcacccagccaggagtgcagtggtgcaatcacggctcacttcagctttgaccctgcctcagcctccctagtagctaggactacaggcatatgccaccatgcccagctaattttttgtgtgtgtgttttttgtagagatggagtttcaccactttgtctatgctggtttcaaactcctgggctcaagcggtccacctgctgtggcctcccaaagtgctgggattgcagatctgagccacagtacctggccgctggtgctggaagtttcaatggttgcttagaaaaggcatactgatatagtttaacaggatatgaaaatttaactggttctctatgaatgtaaaaaacagcaaaagctaattgatttctgtggagtgagaaaatgtcagccatatacactgcttttcagtgttagaatcgtcgacgcagactatt

SEQ ID NO: 373054 - DNA, 2819 bp, Homo sapiens
ggtcaagactggctgagttcagatcaccagcacttactctgtgtccttgaataaatgatgtcagcaatctgggcctcagtgttctcatcagtggaactgctgataataccagcttcatatggtggctgtgaaaatgaaatgaatgaaatgaagtaatacttgtatatacctaaaagcctaaaagaagcttaaagtaactccacactctggtgtgtttccttctggtctgtttttgcctctgatagtattaataggattatataatgtatcctttcaaaaatatatagttttattttgttttcctcccaattaacattgtatcatgctttctcatatcatatgcttctttgaaacatgaacttagagtggcaaggtgttctctgagatggacattctgctgttttctctttacagtttcagaagaggagccccgccgaggcatgagggccgtgctccccccagaggaagggatggttttcctggtcctgaagactttggtccagaggagaattttgatgcttctgaggaagcggcccgaggacgagatctcagaggtcgaggtcggggtaccccacgaggaggaaggaagggtttacttcccactcctgacgagttccctcgctttgaaggagggcggaagccagattcctgggatggaaacagagagcctgggccaggtcatgaacattttcgtgatactccccgccctgatcatccccctcacgacggtcattccccagccagcagagaacgctcctcttctctccaaggcatggacatggcatccctacctccccgaaagcgcccctggcatgatggcccaggcacttctgagcacagagagatggaggccccaggaggcccttctgaagaccgaggaggcaaaggccgagggggcccaggacctgctcagagagtgcccaaatctgggcgttccagctccttagacggagagcaccacgatggataccacagagatgaaccttttgggggccctccaggcagtggcaccccttctcgagggggccggagtggcagtaactggggtagagggagtaacatgaactctggcccgccgaggcgaggagcttcacggggtggtggaaggggtcggtagaagctggaactgagtaccctgaggcctctctggacagtatgtaagaacttcttgtggactcaccaagagaaacaaaaggaagcctgcaccattgtagccctgaactcttttctgggcacctgaatcccaggaaccctcaatgaggtcttcaagatgaagagactgctgccagctaccagcctggctggccctgtcctgtccaccctcattgccccaactcccatgttgttttgtgaagataaaagctgggatctttttcttttttttaagtctcacaagacatggggcatctccacaaatttaagttcctgtccatttggaaatttgtttctatgtgtacagtttgtcagagaaaaacaaagtttttgtatgaatacagaatgtgatttacgcaagaattgacagaaaactagttgtgaagtgcttgccttaaggaaacctttggtttccatcgcatcccatctgccaaggaatgcacggttgttgctgatgttcatgagcatattaaccactaggttatctaaattaatctcagctgtgaactttgtgtttttcaacacattctgtcacaccatttttgtgacagaaaaatacttgaaaattattctaatgtagtttgtagtaggttcaaatttttattcagacatgctctgacagatggaaaattgtactctgaagagaaaatgcaatcttctggatgtccaacgagggagcttccccttggaagcatctcctaagaatcacagtttaggtttgaatcgccttgttatgatgaggagaggaacttgatgttagtcagaaataaagtcacatgccctttagataacttgaaatcacacatggagttgataaggaatggaccaaaataggtcctcaaacaattttgcaacacttaattaagttttcctctcttcctcttccatactatgtggaaataccagtgttacggcagggcgtacttctaactcacagtaagccagatagatcttgtccatggcaaattccttgtttaaaataaacataccatttagcccagtttggattggaagccaaaaattcagtttgttatataccccatgatactttctatactgacctttattttggttttacatggaagcttttattaaaaggactgtcctatggccaccttaacatttcattacattggcagcttcagttttggcatcagtcaaatttatttggcaaatttagtggtgctggaagtttctttttttcttttccttttttgacagagtcttgctctgtcacccagccaggagtgcagtggtgcaatcacggctcacttcagctttgaccctgcctcagcctccctagtagctaggactacaggcatatgccaccatgcccagctaattttttgtgtgtgtgttttttgtagagatggagtttcaccactttgtctatgctggtttcaaactcctgggctcaagcggtccacctgctgtggcctcccaaagtgctgggattgcagatctgagccacagtacctggccgctggtgctggaagtttcaatggttgcttagaaaaggcatactgatatagtttaacaggatatgaaaatttaactggttctctatgaatgtaaaaaacagcaaaagctaattgatttctgtggagtgagaaaatgtcagccatatacactgcttttcagtgttagaatcgtcgacgcagactatt

SEQ ID NO: 373055 - DNA, 1325 bp, Homo sapiens
tcccgccagtgcgtgatgacccggagagcgtgcgttcggtggcccataggggaagatggcggctgctcctttggaggagcgggattgagaggatcggggtggggagaccaaacaagagagacatttctggctctgaaggcgaacgcttcgctggccatttaggagctctgctcaaagccagacgtatcctagaaggaaaacatcaccatggctacagaaattggttctcctcctcgttttttccatatgccaaggttccagcaccaggcacctcgacagctgttttataagcgacctgattttgcacaacagcaagcaatgcaacagcttacttttgatggaaaacgaatgagaaaagctgtgaaccgaaaaaccatagactacaatccatctgtaattaagtatttggagaacagaatatggcaaagagaccagagagatatgcgggcaattcagcctgatgcaggttattacaatgatctggtcccacctataggaatgttgaataatcctatgaatgcagtaacaacaaaatttgttcggacatcaacaaataaagtaaagtgtcctgtatttgttgttaggtggactccagaaggaagacgcttggtcactggagcttctagtggggagtttaccctgtggaatggactcactttcaattttgaaacaatattacaggctcacgacagcccagtgagggccatgacgtggtcacataatgacatgtggatgttgacagcagaccacggaggatatgtgaaatattggcagtcgaacatgaacaacgtcaagatgttccaggcacataaggaggcgattagagaggccaggtttatacacaatataccattttctgtagtccctattgtcatggttaaattattctctaagtgtattctgggtgcagagatgcatgggctctgtcagtttctgggaaactttctgcaccctataaacacaatatttttctttgttttcacacattcaccattttgctggcacctttctgaagtagtgttgtcccggtatcagcctttgcaatatgttagagatgtactgtctgccgcattttgcactggttttctcttttcatttatgattaataatgtgtatacgttattcctttttattatctactgtgtaagacaagaatatttcattccaaataaagaattcagtctttaattatgaaaaaaaaaaaaaaaaaaaaaaaaaaaaaaaaccccatttttttttttggggcgccgggggggggcggggtgttgggcccaacggggggtcccaggggcccgggggaatgtgggaaggggggtggggccccg

SEQ ID NO: 373056 - DNA, 2549 bp, Homo sapiens
catactagtctgaagcaggttaagctgtgcctcggtgatagaacctgaaagccagtgttttgtggggtttttgggtttttgtgcttttcttttgttttttcaagaaatactttattttactaattatgaaaaggaagccaaaagtgccacatgtcacgggacagtcccagtgaacgcttgtcctagttggagcactttttattaacattagcagtgtgtacttccaaagttaagtcagtatattcaaaccttccctcaatataccctggtggctgggagcaggcagatacacttcccatggcctgggacatggcccagtgtggcccggtctccctgaaggtgctccttgctcatctcttggcttcctgtcgtctgtcacacagccctgggggcatggatctggctgatgctgaggcccatggccatgagccaggaagggggaggcagggtcaggaaagggtagaggcacacctctcagtacgctgaataccactgccagtctccctggcacccaccagaactggtccattgtcatcagagagtaaagtttgtactgggagttactgacaaacagttgctaatacaaaaagtcccatgtgaaattttctttgtttcaggccgagggggcccaggacctgctcagagagtgcccaaatctgggcgttccagctccttagacggagagcaccacgatggataccacagagatgaaccttttgggggccctccaggcagtggcaccccttctcgagggggccggagtggcagtaactggggtagagggagtaacatgaactctggcccgccgaggcgaggagcttcacggggtggtggaaggggtcggtagaagctggaactgagtaccctgaggcctctctggacagtatgtaagaacttcttgtggactcaccaagagaaacaaaaggaagcctgcaccattgtagccctgaactcttttctgggcacctgaatcccaggaaccctcaatgaggtcttcaagatgaagagactgctgccagctaccagcctggctggccctgtcctgtccaccctcattgccccaactcccatgttgttttgtgaagataaaagctgggatctttttcttttttttaagtctcacaagacatggggcatctccacaaatttaagttcctgtccatttggaaatttgtttctatgtgtacagtttgtcagagaaaaacaaagtttttgtatgaatacagaatgtgatttacgcaagaattgacagaaaactagttgtgaagtgcttgccttaaggaaacctttggtttccatcgcatcccatctgccaaggaatgcacggttgttgctgatgttcatgagcatattaaccactaggttatctaaattaatctcagctgtgaactttgtgtttttcaacacattctgtcacaccatttttgtgacagaaaaatacttgaaaattattctaatgtagtttgtagtaggttcaaatttttattcagacatgctctgacagatggaaaattgtactctgaagagaaaatgcaatcttctggatgtccaacgagggagcttccccttggaagcatctcctaagaatcacagtttaggtttgaatcgccttgttatgatgaggagaggaacttgatgttagtcagaaataaagtcacatgccctttagataacttgaaatcacacatggagttgataaggaatggaccaaaataggtcctcaaacaattttgcaacacttaattaagttttcctctcttcctcttccatactatgtggaaataccagtgttacggcagggcgtacttctaactcacagtaagccagatagatcttgtccatggcaaattccttgtttaaaataaacataccatttagcccagtttggattggaagccaaaaattcagtttgttatataccccatgatactttctatactgacctttattttggttttacatggaagcttttattaaaaggactgtcctatggccaccttaacatttcattacattggcagcttcagttttggcatcagtcaaatttatttggcaaatttagtggtgctggaagtttctttttttcttttccttttttgacagagtcttgctctgtcacccagccaggagtgcagtggtgcaatcacggctcacttcagctttgaccctgcctcagcctccctagtagctaggactacaggcatatgccaccatgcccagctaattttttgtgtgtgtgttttttgtagagatggagtttcaccactttgtctatgctggtttcaaactcctgggctcaagcggtccacctgctgtggcctcccaaagtgctgggattgcagatctgagccacagtacctggccgctggtgctggaagtttcaatggttgcttagaaaaggcatactgatatagtttaacaggatatgaaaatttaactggttctctatgaatgtaaaaaacagcaaaagctaattgatttctgtggagtgagaaaatgtcagccatatacactgcttttcagtgttagaatcgtcgacgcagactatt

SEQ ID NO: 373057 - DNA, 531 bp, Homo sapiens
cagtaatggaagtgaaattaaacctcaatggcaattggctactcacagcatcacgtgatcatctctgtaaactttttgatatcagaaacctaaaagaagagcttcaagtcttccgaggtcataagaaagaagccacaggtcagtggctgtgatatgcttctcattgaccactgttacctgtaacattctcagatcctgataattgtgtcttttcccatgtttttgttctgcagctgtggcctggcatcctgttcatgaaggactttttgccagtggagggtctgatggttctttgttattctggcatgttgggtatgtaagatttatgtgaaaaagtagtgtattttgtgaagagagcacgtgaatgtgtgcagacatgatagttttgtagcttttctaagtgttcatatatcctatatcagagactgcttgcagttttcagttctgtaaatccagcttggaatagaaaatgtacctctgtttgtggatatggaagtcattaaggaggaataaaatagattttctagtttc

SEQ ID NO: 373058 - DNA, 4620 bp, Homo sapiens
tcccgccagtgcgtgatgacccggagagcgtgcgttcggtggcccataggggaagatggcggctgctcctttggaggagcgggattgagaggatcggggtggggagaccaaacaagagagacatttctggctctgaaggcgaacgcttcgctggccatttaggagctctgctcaaagccagacgtatcctagaaggaaaacatcaccatggctacagaaattggttctcctcctcgttttttccatatgccaaggttccagcaccaggcacctcgacagctgttttataagcgacctgattttgcacaacagcaagcaatgcaacagcttacttttgatggaaaacgaatgagaaaagctgtgaaccgaaaaaccatagactacaatccatctgtaattaagtatttggagaacagaatatggcaaagagaccagagagatatgcgggcaattcagcctgatgcaggttattacaatgatctggtcccacctataggaatgttgaataatcctatgaatgcagtaacaacaaaatttgttcggacatcaacaaataaagtaaagtgtcctgtatttgttgttaggtggactccagaaggaagacgcttggtcactggagcttctagtggggagtttaccctgtggaatggactcactttcaattttgaaacaatattacaggctcacgacagcccagtgagggccatgacgtggtcacataatgacatgtggatgttgacagcagaccacggaggatatgtgaaatattggcagtcgaacatgaacaacgtcaagatgttccaggcacataaggaggcgattagagaggccagtttctcacccacggataataaatttgctacatgctctgatgacggcactgttagaatctgggactttcttcgttgccatgaggaaagaattctccgagggcatggtgctgatgtgaaatgtgtagactggcatccaaccaaagggttagttgtttcaggaagtaaagatagtcaacagccaatcaagttctgggatcccaagactgggcagagtcttgcaacacttcatgcccataaaaacacagtaatggaagtgaaattaaacctcaatggcaattggctactcacagcatcacgtgatcatctctgtaaactttttgatatcagaaacctaaaagaagagcttcaagtcttccgaggtcataagaaagaagccacagctgtggcctggcatcctgttcatgaaggactttttgccagtggagggtctgatggttctttgttattctggcatgttggggtagagaaggaagtgggtgggatggagatggctcacgaagggatgatctggagtctggcttggcatcctcttgggcatattctctgctcaggctcaaatgaccatactagcaaattctggactcgaaaccgaccaggtgataaaatgcgagatcgatataatctaaaccttttacctggaatgtctgaagatggagtagaatatgatgacctcgaacctaatagcctggcagtaattccaggaatgggaataccagaacaactaaaattagctatggaacaagaacagatggggaaagatgaatcaaatgaaattgaaatgacaattccaggtttagattggggaatggaggaagtgatgcaaaaggatcagaaaaaagtacctcagaagaaagttccttatgcaaaacccattcctgctcagttccagcaggcttggatgcaaaataaagttccaattcctgctccaaatgaggtgctgaatgacagaaaagaagacattaaattggaagagaagaaaaaaacacaagcagaaattgagcaagaaatggctacattacaatatactaacccacaacttctggagcaacttaaaattgaaagacttgcacagaaacaagttgagcaaattcagcctcctccctcatctggcacccctctcctcggaccccagccttttccaggacaaggtccaatgtctcagattcctcaaggttttcaacagccccatccatctcagcagatgccaatgaacatggctcaaatggggcctccaggtccacagggacagtttaggcctcctggaccccagggacaaatgggaccacaaggtcctccactgcatcagggaggtggggggccacaaggattcatgggaccacaggggccccagggcccgccccaggggttgccacggcctcaggacatgcatgggccccaaggaatgcagaggcatcctggacctcatggccctttgggacctcaagggccacctggaccacaaggtagttctggtcctcaaggtcatatgggtcctcagggtccacctggcccacagggtcacataggcccccaaggcccgcctggccctcagggtcacttgggcccacaggggcctccgggtactcaaggtatgcagggaccacctggtcccagaggaatgcaagggcctcctcatcctcatgggatccaaggcggaccagggtctcaagggatccaaggtcctgtgtctcagggacctctgatgggattgaatccaagaggaatgcaggggcctccaggcccccgggagaaccagggtcctgctccccaagggatgattatgggccacccgcctcaagagatgagaggacctcaccctccaggtggactactgggacacggccctcaggaaatgagaggtcctcaggagatccgaggcatgcaggggcctccaccccaaggatcaatgctgggacctccccaggaattgcgagggcctccaggctcacaaagtcagcaggggccgccccagggctctttaggacctccaccccagggtggcatgcaaggaccccccggacctcagggacagcagaacccagcaagagggccacatccatctcaagggccaataccattccagcaacagaaaacgcctctgctaggtgatgggccccgggcccccttcaaccaggaaggacagagcacaggccccccacccctgataccaggcctagggcagcagggagcacaaggtcgcattccccctctgaaccccggacaaggacctggccccaacaaaggtgactcccgcggccctccaaaccatcacatgggcccgatgtcagagaggcggcatgagcagagcggcgggcctgagcatgggcccgagagggggcctttccggggtggccaggactgcaggggtccccctgataggcgtggccctcacccagacttccccgatgacttcagcagaccagatgacttccaccctgacaagcgctttggccaccggttacgtgaatttgaggggcgaggaggacctttaccgcaagaagagaagtggaggcgagggggccctgggcctccgtttccccctgatcacagggaattcagcgagggggatggccggggtgcagcccgaggccctccgggggcatgggaaggccgcaggcccggagatgaacgtttcccccgggatcccgaggacccacgttttcgagggcgcagagaagaaagtttcagaagaggagccccgccgaggcatgagggccgtgctccccccagaggaagggatggttttcctggtcctgaagactttggtccagaggagaattttgatgcttctgaggaagcggcccgaggacgagatctcagaggtcgaggtcggggtaccccacgaggaggaaggaagggtttacttcccactcctgacgagttccctcgctttgaaggagggcggaagccagattcctgggatggaaacagagagcctgggccaggtcatgaacattttcgtgatactccccgccctgatcatccccctcacgacggtcattccccagccagcagagaacgctcctcttctctccaaggcatggacatggcatccctacctccccgaaagcgcccctggcatgatggcccaggcacttctgagcacagagagatggaggccccaggaggcccttctgaagaccgaggaggcaaaggccgagggggcccaggacctgctcagagagtgcccaaatctgggcgttccagctccttagacggagagcaccacgatggataccacagagatgaaccttttgggggccctccaggcagtggcaccccttctcgagggggccggagtggcagtaactggggtagagggagtaacatgaactctggcccgccgaggcgaggagcttcacggggtggtggaaggggtcggtagaagctggaactgagtaccctgaggcctctctggacagtatgtaagaacttcttgtggactcaccaagagaaacaaaaggaagcctgcaccattgtagccctgaactcttttctgggcacctgaatcccaggaaccctcaatgaggtcttcaagatgaagagactgctgccagctaccagcctggctggccctgtcctgtccaccctcattgccccaactcccatgttgttttgtgaagataaaagctgggatctttttcttttttttaagtctcacaagacatggggcatctccacaaatttaagttcctgtccatttggaaatttgtttctatgtgtacagtttgtcagagaaaaacaaagtttttgtatgaatacagaatgtgatttacgcaagaattga

SEQ ID NO: 373059 - DNA, 1193 bp, Homo sapiens
tcccgccagtgcgtgatgacccggagagcgtgcgttcggtggcccataggggaagatggcggctgctcctttggaggagcgggattgagaggatcggggtggggagaccaaacaagagagacatttctggctctgaaggcgaacgcttcgctggccatttaggagctctgctcaaagccagacgtatcctagaaggaaaacatcaccatggctacagaaattggttctcctcctcgttttttccatatgccaaggttccagcaccaggcacctcgacagctgttttataagcgacctgattttgcacaacagcaagcaatgcaacagcttacttttgatggaaaacgaatgagaaaagctgtgaaccgaaaaaccatagactacaatccatctgtaattaagtatttggagaacagaatatggcaaagagaccagagagatatgcgggcaattcagcctgatgcaggttattacaatgatctggtcccacctataggaatgttgaataatcctatgaatgcagtaacaacaaaatttgttcggacatcaacaaataaagtaaagtgtcctgtatttgttgttaggtggactccagaaggaagacgcttggtcactggagcttctagtggggagtttaccctgtggaatggactcactttcaattttgaaacaatattacaggctcacgacagcccagtgagggccatgacgtggtcacataatgacatgtggatgttgacagcagaccacggaggatatgtgaaatattggcagtcgaacatgaacaacgtcaagatgttccaggcacataaggaggcgattagagaggccaggtttatacacaatataccattttctgtagtccctattgtcatggttaaattattctctaagtgtattctgggtgcagagatgcatgggctctgtcagtttctgggaaactttctgcaccctataaacacaatatttttctttgttttcacacattcaccattttgctggcacctttctgaagtagtgttgtcccggtatcagcctttgcaatatgttagagatgtactgtctgccgcattttgcactggttttctcttttcatttatgattaataatgtgtatacgttattcctttttattatctactgtgtaagacaagaatatttcattccaaataaagaattcagtctttaattatg

SEQ ID NO: 373060 - DNA, 735 bp, Homo sapiens
tcccgccagtgcgtgatgacccggagagcgtgcgttcggtggcccataggggaagatggcggctgctcctttggaggagcgggattgagaggatcggggtggggagaccaaacaagagagacatttctggctctgaaggcgaacgcttcgctggccatttaggagctctgctcaaagccagacgcctgccgagtgcctgccattgcaggcacgcgccgccacgcctgactggttttggtggagacggggtttcgctgtgttggccgggccggtctccagcccctaaccgcgagtgatcccgccaacctcagcctcccgaggtgccgggattgcagacggagtctcgttcactcagtgctcaatggtgcccaggctggagtgcagtggcgtgatctcggctcactacaacctacacctcccagccgcctgccttggcctcccaaagtgccgagattgcagcctctgcccggccgccaccccgtctgggaagtgaggagcgtctctgcctggccgcccatcgtctgggatgtgaggagcccctctgcctggctgcccagtctggaaagtgaggagcgtctccgcccggccgccatcccatctaggaagtgaggagcgcctcttcccagccgccatcacatctaggaagtgaggagcgtctctgcccggccgcccatcgtctgagatgtggggagcgcctctgccccgccgccccatctgggatgtgaggagtgcctc

SEQ ID NO: 373061 - DNA, 7149 bp, Homo sapiens
tcccgccagtgcgtgatgacccggagagcgtgcgttcggtggcccataggggaagatggcggctgctcctttggaggagcgggattgagaggatcggggtggggagaccaaacaagagagacatttctggctctgaaggcgaacgcttcgctggccatttaggagctctgctcaaagccagacgtatcctagaaggaaaacatcaccatggctacagaaattggttctcctcctcgttttttccatatgccaaggttccagcaccaggcacctcgacagctgttttataagcgacctgattttgcacaacagcaagcaatgcaacagcttacttttgatggaaaacgaatgagaaaagctgtgaaccgaaaaaccatagactacaatccatctgtaattaagtatttggagaacagaatatggcaaagagaccagagagatatgcgggcaattcagcctgatgcaggttattacaatgatctggtcccacctataggaatgttgaataatcctatgaatgcagtaacaacaaaatttgttcggacatcaacaaataaagtaaagtgtcctgtatttgttgttaggtggactccagaaggaagacgcttggtcactggagcttctagtggggagtttaccctgtggaatggactcactttcaattttgaaacaatattacaggctcacgacagcccagtgagggccatgacgtggtcacataatgacatgtggatgttgacagcagaccacggaggatatgtgaaatattggcagtcgaacatgaacaacgtcaagatgttccaggcacataaggaggcgattagagaggccaggtttatacacaatataccattttctgtagtccctattgtcatggttaaattattctctaagtgtattctgggtgcagagatgcatgggctctgtcagtttctgggaaactttctgcaccctataaacacaatatttttctttgttttcacacattcaccattttgctggcacctttctgaagtagtgttgtcccggtatcagcctttgcaatatgttagagatgtactgtctgccgcattttgcactggttttctcttttcatttatgattaataatgtgtatacgttattcctttttattatctactgtgtaagacaagaatatttcattccaaataaagaattcagtctttaattatgcaactgaataaaatctaaagcctacagaaaacaacttcagaattcacacaaagtggaaaaaggcttaagtgaagacctggttggcttggttatgccacgacttccaaaggaaagtataggactaaaaccctcacagataactggatgtggcaaacattaacggagtaatgaatgggttcttcaagctttgcagctgtaagcagatcattgtcaagaagactctaggacttttcttctgattcactgttgataacatcacttatgcaaatgtatacaataagtggagtttaaaatattttcagtgagttgtatatttttacacatcagtgaggtatgtatagtaaaactgggggaaaaagttccaaatacaagcctgaagaattgctgcagcctcagaataaagctaagcagcattctttaaggttgtgccacccatgtgtgggaggaggttgacatctttatggaaacatcatccactgtagtcatttgttcatactttcagaatcttaacagaaattgttggatgaacatgcttctgctttgtagattttgccttagtgtcatgcccatacattgagtttacacagctggtccttcataggattccaaagttcaagggagtttttagagttagttgagaaacttgatgatctttcactgctgggaaaaactgactccttcttgcagcagattctttggctttacacacaagtctgaatgtccttattttaaagttttcctcaaaggtgcaacattcatggaatagcttgccaggaagatgtgaaacttttctacagacctttgaaatggatgagaaacattgtatgtagggatgtttagcaatcagtcttttaatagacagcccacattgtttcagcttatttcatgaagtgtctgaggcagaagctgatgataattttgggagcagtattcgtgtgtgatttaaaagactgcaggaatactgcaaaaatagaatccatttattttcaccacttaaggcagcttcatgtgatttcctcgtatcatagaaaatagagaaggaacatggatagcattagcactaataatacacacttgaagttctcagaatactgatgattgaaaactcaaacaactgctctgttgaagtcttcttttgatgagatgcctatgttagctgacgacattcactttaagggcttcttcactggattcttccctctcctgtttataatgcagcacagtgtttttatttttccctgtctgagaagcacagattatctgttaaatgctgacttctttcccctgctgtgtgtcttcatgtaacagtttctcacccacggataataaatttgctacatgctctgatgacggcactgttagaatctgggactttcttcgttgccatgaggaaagaattctccgagggcatggtgctgatgtgaaatgtgtagactggcatccaaccaaagggttagttgtttcaggaagtaaagatagtcaacagccaatcaagttctgggatcccaagactgggcagagtcttgcaacacttcatgcccataaaaacacagtaatggaagtgaaattaaacctcaatggcaattggctactcacagcatcacgtgatcatctctgtaaactttttgatatcagaaacctaaaagaagagcttcaagtcttccgaggtcataagaaagaagccacagctgtggcctggcatcctgttcatgaaggactttttgccagtggagggtctgatggttctttgttattctggcatgttggggtagagaaggaagtgggtgggatggagatggctcacgaagggatgatctggagtctggcttggcatcctcttgggcatattctctgctcaggctcaaatgaccatactagcaaattctggactcgaaaccgaccaggtgataaaatgcgagatcgatataatctaaaccttttacctggaatgtctgaagatggagtagaatatgatgacctcgaacctaatagcctggcagtaattccaggaatgggaataccagaacaactaaaattagctatggaacaagaacagatggggaaagatgaatcaaatgaaattgaaatgacaattccaggtttagattggggaatggaggaagtgatgcaaaaggatcagaaaaaagtacctcagaagaaagttccttatgcaaaacccattcctgctcagttccagcaggcttggatgcaaaataaagttccaattcctgctccaaatgaggtgctgaatgacagaaaagaagacattaaattggaagagaagaaaaaaacacaagcagaaattgagcaagaaatggctacattacaatatactaacccacaacttctggagcaacttaaaattgaaagacttgcacagaaacaagttgagcaaattcagcctcctccctcatctggcacccctctcctcggaccccagccttttccaggacaaggtccaatgtctcagattcctcaaggttttcaacagccccatccatctcagcagatgccaatgaacatggctcaaatggggcctccaggtccacagggacagtttaggcctcctggaccccagggacaaatgggaccacaaggtcctccactgcatcagggaggtggggggccacaaggattcatgggaccacaggggccccagggcccgccccaggggttgccacggcctcaggacatgcatgggccccaaggaatgcagaggcatcctggacctcatggccctttgggacctcaagggccacctggaccacaaggtagttctggtcctcaaggtcatatgggtcctcagggtccacctggcccacagggtcacataggcccccaaggcccgcctggccctcagggtcacttgggcccacaggggcctccgggtactcaaggtatgcagggaccacctggtcccagaggaatgcaagggcctcctcatcctcatgggatccaaggcggaccagggtctcaagggatccaaggtcctgtgtctcagggacctctgatgggattgaatccaagaggaatgcaggggcctccaggcccccgggagaaccagggtcctgctccccaagggatgattatgggccacccgcctcaagagatgagaggacctcaccctccaggtggactactgggacacggccctcaggaaatgagaggtcctcaggagatccgaggcatgcaggggcctccaccccaaggatcaatgctgggacctccccaggaattgcgagggcctccaggctcacaaagtcagcaggggccgccccagggctctttaggacctccaccccagggtggcatgcaaggaccccccggacctcagggacagcagaacccagcaagagggccacatccatctcaagggccaataccattccagcaacagaaaacgcctctgctaggtgatgggccccgggcccccttcaaccaggaaggacagagcacaggccccccacccctgataccaggcctagggcagcagggagcacaaggtcgcattccccctctgaaccccggacaaggacctggccccaacaaagtttcagaagaggagccccgccgaggcatgagggccgtgctccccccagaggaagggatggttttcctggtcctgaagactttggtccagaggagaattttgatgcttctgaggaagcggcccgaggacgagatctcagaggtcgaggtcggggtaccccacgaggaggaaggaagggtttacttcccactcctgacgagttccctcgctttgaaggagggcggaagccagattcctgggatggaaacagagagcctgggccaggtcatgaacattttcgtgatactccccgccctgatcatccccctcacgacggtcattccccagccagcagagaacgctcctcttctctccaaggcatggacatggcatccctacctccccgaaagcgcccctggcatgatggcccaggcacttctgagcacagagagatggaggccccaggaggcccttctgaagaccgaggaggcaaaggccgagggggcccaggacctgctcagagagtgcccaaatctgggcgttccagctccttagacggagagcaccacgatggataccacagagatgaaccttttgggggccctccaggcagtggcaccccttctcgagggggccggagtggcagtaactggggtagagggagtaacatgaactctggcccgccgaggcgaggagcttcacggggtggtggaaggggtcggtagaagctggaactgagtaccctgaggcctctctggacagtatgtaagaacttcttgtggactcaccaagagaaacaaaaggaagcctgcaccattgtagccctgaactcttttctgggcacctgaatcccaggaaccctcaatgaggtcttcaagatgaagagactgctgccagctaccagcctggctggccctgtcctgtccaccctcattgccccaactcccatgttgttttgtgaagataaaagctgggatctttttcttttttttaagtctcacaagacatggggcatctccacaaatttaagttcctgtccatttggaaatttgtttctatgtgtacagtttgtcagagaaaaacaaagtttttgtatgaatacagaatgtgatttacgcaagaattgacagaaaactagttgtgaagtgcttgccttaaggaaacctttggtttccatcgcatcccatctgccaaggaatgcacggttgttgctgatgttcatgagcatattaaccactaggttatctaaattaatctcagctgtgaactttgtgtttttcaacacattctgtcacaccatttttgtgacagaaaaatacttgaaaattattctaatgtagtttgtagtaggttcaaatttttattcagacatgctctgacagatggaaaattgtactctgaagagaaaatgcaatcttctggatgtccaacgagggagcttccccttggaagcatctcctaagaatcacagtttaggtttgaatcgccttgttatgatgaggagaggaacttgatgttagtcagaaataaagtcacatgccctttagataacttgaaatcacacatggagttgataaggaatggaccaaaataggtcctcaaacaattttgcaacacttaattaagttttcctctcttcctcttccatactatgtggaaataccagtgttacggcagggcgtacttctaactcacagtaagccagatagatcttgtccatggcaaattccttgtttaaaataaacataccatttagcccagtttggattggaagccaaaaattcagtttgttatataccccatgatactttctatactgacctttattttggttttacatggaagcttttattaaaaggactgtcctatggccaccttaacatttcattacattggcagcttcagttttggcatcagtcaaatttatttggcaaatttagtggtgctggaagtttctttttttcttttccttttttgacagagtcttgctctgtcacccagccaggagtgcagtggtgcaatcacggctcacttcagctttgaccctgcctcagcctccctagtagctaggactacaggcatatgccaccatgcccagctaattttttgtgtgtgtgttttttgtagagatggagtttcaccactttgtctatgctggtttcaaactcctgggctcaagcggtccacctgctgtggcctcccaaagtgctgggattgcagatctgagccacagtacctggccgctggtgctggaagtttcaatggttgcttagaaaaggcatactgatatagtttaacaggatatgaaaatttaactggttctctatgaatgtaaaaaacagcaaaagctaattgatttctgtggagtgagaaaatgtcagccatatacactgcttttcagtgttagaatcgtcgacgcagactatt

SEQ ID NO: 373062 - DNA, 7548 bp, Homo sapiens
tcccgccagtgcgtgatgacccggagagcgtgcgttcggtggcccataggggaagatggcggctgctcctttggaggagcgggattgagaggatcggggtggggagaccaaacaagagagacatttctggctctgaaggcgaacgcttcgctggccatttaggagctctgctcaaagccagacgtatcctagaaggaaaacatcaccatggctacagaaattggttctcctcctcgttttttccatatgccaaggttccagcaccaggcacctcgacagctgttttataagcgacctgattttgcacaacagcaagcaatgcaacagcttacttttgatggaaaacgaatgagaaaagctgtgaaccgaaaaacagaatatggcaaagagaccagagagatatgcgggcaattcagcctgatgcaggttattacaatgatctggtcccacctataggaatgttgaataatcctatgaatgcagtaacaacaaaatttgttcggacatcaacaaataaagtaaagtgtcctgtatttgttgttaggtggactccagaaggaagacgcttggtcactggagcttctagtggggagtttaccctgtggaatggactcactttcaattttgaaacaatattacaggctcacgacagcccagtgagggccatgacgtggtcacataatgacatgtggatgttgacagcagaccacggaggatatgtgaaatattggcagtcgaacatgaacaacgtcaagatgttccaggcacataaggaggcgattagagaggccaggtttatacacaatataccattttctgtagtccctattgtcatggttaaattattctctaagtgtattctgggtgcagagatgcatgggctctgtcagtttctgggaaactttctgcaccctataaacacaatatttttctttgttttcacacattcaccattttgctggcacctttctgaagtagtgttgtcccggtatcagcctttgcaatatgttagagatgtactgtctgccgcattttgcactggttttctcttttcatttatgattaataatgtgtatacgttattcctttttattatctactgtgtaagacaagaatatttcattccaaataaagaattcagtctttaattatgcaactgaataaaatctaaagcctacagaaaacaacttcagaattcacacaaagtggaaaaaggcttaagtgaagacctggttggcttggttatgccacgacttccaaaggaaagtataggactaaaaccctcacagataactggatgtggcaaacattaacggagtaatgaatgggttcttcaagctttgcagctgtaagcagatcattgtcaagaagactctaggacttttcttctgattcactgttgataacatcacttatgcaaatgtatacaataagtggagtttaaaatattttcagtgagttgtatatttttacacatcagtgaggtatgtatagtaaaactgggggaaaaagttccaaatacaagcctgaagaattgctgcagcctcagaataaagctaagcagcattctttaaggttgtgccacccatgtgtgggaggaggttgacatctttatggaaacatcatccactgtagtcatttgttcatactttcagaatcttaacagaaattgttggatgaacatgcttctgctttgtagattttgccttagtgtcatgcccatacattgagtttacacagctggtccttcataggattccaaagttcaagggagtttttagagttagttgagaaacttgatgatctttcactgctgggaaaaactgactccttcttgcagcagattctttggctttacacacaagtctgaatgtccttattttaaagttttcctcaaaggtgcaacattcatggaatagcttgccaggaagatgtgaaacttttctacagacctttgaaatggatgagaaacattgtatgtagggatgtttagcaatcagtcttttaatagacagcccacattgtttcagcttatttcatgaagtgtctgaggcagaagctgatgataattttgggagcagtattcgtgtgtgatttaaaagactgcaggaatactgcaaaaatagaatccatttattttcaccacttaaggcagcttcatgtgatttcctcgtatcatagaaaatagagaaggaacatggatagcattagcactaataatacacacttgaagttctcagaatactgatgattgaaaactcaaacaactgctctgttgaagtcttcttttgatgagatgcctatgttagctgacgacattcactttaagggcttcttcactggattcttccctctcctgtttataatgcagcacagtgtttttatttttccctgtctgagaagcacagattatctgttaaatgctgacttctttcccctgctgtgtgtcttcatgtaacagtttctcacccacggataataaatttgctacatgctctgatgacggcactgttagaatctgggactttcttcgttgccatgaggaaagaattctccgagggcatggtgctgatgtgaaatgtgtagactggcatccaaccaaagggttagttgtttcaggaagtaaagatagtcaacagccaatcaagttctgggatcccaagactgggcagagtcttgcaacacttcatgcccataaaaacacagtaatggaagtgaaattaaacctcaatggcaattggctactcacagcatcacgtgatcatctctgtaaactttttgatatcagaaacctaaaagaagagcttcaagtcttccgaggtcataagaaagaagccacagctgtggcctggcatcctgttcatgaaggactttttgccagtggagggtctgatggttctttgttattctggcatgttggggtagagaaggaagtgggtgggatggagatggctcacgaagggatgatctggagtctggcttggcatcctcttgggcatattctctgctcaggctcaaatgaccatactagcaaattctggactcgaaaccgaccaggtgataaaatgcgagatcgatataatctaaaccttttacctggaatgtctgaagatggagtagaatatgatgacctcgaacctaatagcctggcagtaattccaggaatgggaataccagaacaactaaaattagctatggaacaagaacagatggggaaagatgaatcaaatgaaattgaaatgacaattccaggtttagattggggaatggaggaagtgatgcaaaaggatcagaaaaaagtacctcagaagaaagttccttatgcaaaacccattcctgctcagttccagcaggcttggatgcaaaataaagttccaattcctgctccaaatgaggtgctgaatgacagaaaagaagacattaaattggaagagaagaaaaaaacacaagcagaaattgagcaagaaatggctacattacaatatactaacccacaacttctggagcaacttaaaattgaaagacttgcacagaaacaagttgagcaaattcagcctcctccctcatctggcacccctctcctcggaccccagccttttccaggacaaggtccaatgtctcagattcctcaaggttttcaacagccccatccatctcagcagatgccaatgaacatggctcaaatggggcctccaggtccacagggacagtttaggcctcctggaccccagggacaaatgggaccacaaggtcctccactgcatcagggaggtggggggccacaaggattcatgggaccacaggggccccagggcccgccccaggggttgccacggcctcaggacatgcatgggccccaaggaatgcagaggcatcctggacctcatggccctttgggacctcaagggccacctggaccacaaggtagttctggtcctcaaggtcatatgggtcctcagggtccacctggcccacagggtcacataggcccccaaggcccgcctggccctcagggtcacttgggcccacaggggcctccgggtactcaaggtatgcagggaccacctggtcccagaggaatgcaagggcctcctcatcctcatgggatccaaggcggaccagggtctcaagggatccaaggtcctgtgtctcagggacctctgatgggattgaatccaagaggaatgcaggggcctccaggcccccgggagaaccagggtcctgctccccaagggatgattatgggccacccgcctcaagagatgagaggacctcaccctccaggtggactactgggacacggccctcaggaaatgagaggtcctcaggagatccgaggcatgcaggggcctccaccccaaggatcaatgctgggacctccccaggaattgcgagggcctccaggctcacaaagtcagcaggggccgccccagggctctttaggacctccaccccagggtggcatgcaaggaccccccggacctcagggacagcagaacccagcaagagggccacatccatctcaagggccaataccattccagcaacagaaaacgcctctgctaggtgatgggccccgggcccccttcaaccaggaaggacagagcacaggccccccacccctgataccaggcctagggcagcagggagcacaaggtcgcattccccctctgaaccccggacaaggacctggccccaacaaaggtgactcccgcggccctccaaaccatcacatgggcccgatgtcagagaggcggcatgagcagagcggcgggcctgagcatgggcccgagagggggcctttccggggtggccaggactgcaggggtccccctgataggcgtggccctcacccagacttccccgatgacttcagcagaccagatgacttccaccctgacaagcgctttggccaccggttacgtgaatttgaggggcgaggaggacctttaccgcaagaagagaagtggaggcgagggggccctgggcctccgtttccccctgatcacagggaattcagcgagggggatggccggggtgcagcccgaggccctccgggggcatgggaaggccgcaggcccggagatgaacgtttcccccgggatcccgaggacccacgttttcgagggcgcagagaagaaagtttcagaagaggagccccgccgaggcatgagggccgtgctccccccagaggaagggatggttttcctggtcctgaagactttggtccagaggagaattttgatgcttctgaggaagcggcccgaggacgagatctcagaggtcgaggtcggggtaccccacgaggaggaaggaagggtttacttcccactcctgacgagttccctcgctttgaaggagggcggaagccagattcctgggatggaaacagagagcctgggccaggtcatgaacattttcgtgatactccccgccctgatcatccccctcacgacggtcattccccagccagcagagaacgctcctcttctctccaaggcatggacatggcatccctacctccccgaaagcgcccctggcatgatggcccaggcacttctgagcacagagagatggaggccccaggaggcccttctgaagaccgaggaggcaaaggccgagggggcccaggacctgctcagagagtgcccaaatctgggcgttccagctccttagacggagagcaccacgatggataccacagagatgaaccttttgggggccctccaggcagtggcaccccttctcgagggggccggagtggcagtaactggggtagagggagtaacatgaactctggcccgccgaggcgaggagcttcacggggtggtggaaggggtcggtagaagctggaactgagtaccctgaggcctctctggacagtatgtaagaacttcttgtggactcaccaagagaaacaaaaggaagcctgcaccattgtagccctgaactcttttctgggcacctgaatcccaggaaccctcaatgaggtcttcaagatgaagagactgctgccagctaccagcctggctggccctgtcctgtccaccctcattgccccaactcccatgttgttttgtgaagataaaagctgggatctttttcttttttttaagtctcacaagacatggggcatctccacaaatttaagttcctgtccatttggaaatttgtttctatgtgtacagtttgtcagagaaaaacaaagtttttgtatgaatacagaatgtgatttacgcaagaattgacagaaaactagttgtgaagtgcttgccttaaggaaacctttggtttccatcgcatcccatctgccaaggaatgcacggttgttgctgatgttcatgagcatattaaccactaggttatctaaattaatctcagctgtgaactttgtgtttttcaacacattctgtcacaccatttttgtgacagaaaaatacttgaaaattattctaatgtagtttgtagtaggttcaaatttttattcagacatgctctgacagatggaaaattgtactctgaagagaaaatgcaatcttctggatgtccaacgagggagcttccccttggaagcatctcctaagaatcacagtttaggtttgaatcgccttgttatgatgaggagaggaacttgatgttagtcagaaataaagtcacatgccctttagataacttgaaatcacacatggagttgataaggaatggaccaaaataggtcctcaaacaattttgcaacacttaattaagttttcctctcttcctcttccatactatgtggaaataccagtgttacggcagggcgtacttctaactcacagtaagccagatagatcttgtccatggcaaattccttgtttaaaataaacataccatttagcccagtttggattggaagccaaaaattcagtttgttatataccccatgatactttctatactgacctttattttggttttacatggaagcttttattaaaaggactgtcctatggccaccttaacatttcattacattggcagcttcagttttggcatcagtcaaatttatttggcaaatttagtggtgctggaagtttctttttttcttttccttttttgacagagtcttgctctgtcacccagccaggagtgcagtggtgcaatcacggctcacttcagctttgaccctgcctcagcctccctagtagctaggactacaggcatatgccaccatgcccagctaattttttgtgtgtgtgttttttgtagagatggagtttcaccactttgtctatgctggtttcaaactcctgggctcaagcggtccacctgctgtggcctcccaaagtgctgggattgcagatctgagccacagtacctggccgctggtgctggaagtttcaatggttgcttagaaaaggcatactgatatagtttaacaggatatgaaaatttaactggttctctatgaatgtaaaaaacagcaaaagctaattgatttctgtggagtgagaaaatgtcagccatatacactgcttttcagtgttagaatcgtcgacgcagactatt

SEQ ID NO: 373063 - DNA, 4750 bp, Homo sapiens
agagtccaagtccaggctttggtagcttcattttaagagtaacagaaaatgtcttttttgagggggagggagaagctgggtaacttttgtgaacaaatcttctctctttggtgctgttgcagggtagagaaggaagtgggtgggatggagatggctcacgaagggatgatctggagtctggcttggcatcctcttgggcatattctctgctcaggctcaaatgaccatactagcaaattctggactcgaaaccgaccaggtgataaaatgcgagatcgatataatctaaaccttttacctggaatgtctgaagatggagtagaatatgatgacctcgaacctaatagcctggcagtaattccaggaatgggaataccagaacaactaaaattagctatggaacaagaacagatggggaaagatgaatcaaatgaaattgaaatgacaattccaggtttagattggggaatggaggaagtgatgcaaaaggatcagaaaaaagtacctcagaagaaagttccttatgcaaaacccattcctgctcagttccagcaggcttggatgcaaaataaagttccaattcctgctccaaatgaggtgctgaatgacagaaaagaagacattaaattggaagagaagaaaaaaacacaagcagaaattgagcaagaaatggctacattacaatatactaacccacaacttctggagcaacttaaaattgaaagacttgcacagaaacaagttgagcaaattcagcctcctccctcatctggcacccctctcctcggaccccagccttttccaggacaaggtccaatgtctcagattcctcaaggttttcaacagccccatccatctcagcagatgccaatgaacatggctcaaatggggcctccaggtccacagggacagtttaggcctcctggaccccagggacaaatgggaccacaaggtcctccactgcatcagggaggtggggggccacaaggattcatgggaccacaggggccccagggcccgccccaggggttgccacggcctcaggacatgcatgggccccaaggaatgcagaggcatcctggacctcatggccctttgggacctcaagggccacctggaccacaaggtagttctggtcctcaaggtcatatgggtcctcagggtccacctggcccacagggtcacataggcccccaaggcccgcctggccctcagggtcacttgggcccacaggggcctccgggtactcaaggtatgcagggaccacctggtcccagaggaatgcaagggcctcctcatcctcatgggatccaaggcggaccagggtctcaagggatccaaggtcctgtgtctcagggacctctgatgggattgaatccaagaggaatgcaggggcctccaggcccccgggagaaccagggtcctgctccccaagggatgattatgggccacccgcctcaagagatgagaggacctcaccctccaggtggactactgggacacggccctcaggaaatgagaggtcctcaggagatccgaggcatgcaggggcctccaccccaaggatcaatgctgggacctccccaggaattgcgagggcctccaggctcacaaagtcagcaggggccgccccagggctctttaggacctccaccccagggtggcatgcaaggaccccccggacctcagggacagcagaacccagcaagagggccacatccatctcaagggccaataccattccagcaacagaaaacgcctctgctaggtgatgggccccgggcccccttcaaccaggaaggacagagcacaggccccccacccctgataccaggcctagggcagcagggagcacaaggtcgcattccccctctgaaccccggacaaggacctggccccaacaaaggtgactcccgcggccctccaaaccatcacatgggcccgatgtcagagaggcggcatgagcagagcggcgggcctgagcatgggcccgagagggggcctttccggggtggccaggactgcaggggtccccctgataggcgtggccctcacccagacttccccgatgacttcagcagaccagatgacttccaccctgacaagcgctttggccaccggttacgtgaatttgaggggcgaggaggacctttaccgcaagaagagaagtggaggcgagggggccctgggcctccgtttccccctgatcacagggaattcagcgagggggatggccggggtgcagcccgaggccctccgggggcatgggaaggccgcaggcccggagatgaacgtttcccccgggatcccgaggacccacgttttcgagggcgcagagaagaaagtttcagaagaggagccccgccgaggcatgagggccgtgctccccccagaggaagggatggttttcctggtcctgaagactttggtccagaggagaattttgatgcttctgaggaagcggcccgaggacgagatctcagaggtcgaggtcggggtaccccacgaggaggaaggaagggtttacttcccactcctgacgagttccctcgctttgaaggagggcggaagccagattcctgggatggaaacagagagcctgggccaggtcatgaacattttcgtgatactccccgccctgatcatccccctcacgacggtcattccccagccagcagagaacgctcctcttctctccaaggcatggacatggcatccctacctccccgaaagcgcccctggcatgatggcccaggcacttctgagcacagagagatggaggccccaggaggcccttctgaagaccgaggaggcaaaggccgagggggcccaggacctgctcagagagtgcccaaatctgggcgttccagctccttagacggagagcaccacgatggataccacagagatgaaccttttgggggccctccaggcagtggcaccccttctcgagggggccggagtggcagtaactggggtagagggagtaacatgaactctggcccgccgaggcgaggagcttcacggggtggtggaaggggtcggtagaagctggaactgagtaccctgaggcctctctggacagtatgtaagaacttcttgtggactcaccaagagaaacaaaaggaagcctgcaccattgtagccctgaactcttttctgggcacctgaatcccaggaaccctcaatgaggtcttcaagatgaagagactgctgccagctaccagcctggctggccctgtcctgtccaccctcattgccccaactcccatgttgttttgtgaagataaaagctgggatctttttcttttttttaagtctcacaagacatggggcatctccacaaatttaagttcctgtccatttggaaatttgtttctatgtgtacagtttgtcagagaaaaacaaagtttttgtatgaatacagaatgtgatttacgcaagaattgacagaaaactagttgtgaagtgcttgccttaaggaaacctttggtttccatcgcatcccatctgccaaggaatgcacggttgttgctgatgttcatgagcatattaaccactaggttatctaaattaatctcagctgtgaactttgtgtttttcaacacattctgtcacaccatttttgtgacagaaaaatacttgaaaattattctaatgtagtttgtagtaggttcaaatttttattcagacatgctctgacagatggaaaattgtactctgaagagaaaatgcaatcttctggatgtccaacgagggagcttccccttggaagcatctcctaagaatcacagtttaggtttgaatcgccttgttatgatgaggagaggaacttgatgttagtcagaaataaagtcacatgccctttagataacttgaaatcacacatggagttgataaggaatggaccaaaataggtcctcaaacaattttgcaacacttaattaagttttcctctcttcctcttccatactatgtggaaataccagtgttacggcagggcgtacttctaactcacagtaagccagatagatcttgtccatggcaaattccttgtttaaaataaacataccatttagcccagtttggattggaagccaaaaattcagtttgttatataccccatgatactttctatactgacctttattttggttttacatggaagcttttattaaaaggactgtcctatggccaccttaacatttcattacattggcagcttcagttttggcatcagtcaaatttatttggcaaatttagtggtgctggaagtttctttttttcttttccttttttgacagagtcttgctctgtcacccagccaggagtgcagtggtgcaatcacggctcacttcagctttgaccctgcctcagcctccctagtagctaggactacaggcatatgccaccatgcccagctaattttttgtgtgtgtgttttttgtagagatggagtttcaccactttgtctatgctggtttcaaactcctgggctcaagcggtccacctgctgtggcctcccaaagtgctgggattgcagatctgagccacagtacctggccgctggtgctggaagtttcaatggttgcttagaaaaggcatactgatatagtttaacaggatatgaaaatttaactggttctctatgaatgtaaaaaacagcaaaagctaattgatttctgtggagtgagaaaatgtcagccatatacactgcttttcagtgttagaatcgtcgacgcagactatt

SEQ ID NO: 373064 - DNA, 1175 bp, Homo sapiens
tcccgccagtgcgtgatgacccggagagcgtgcgttcggtggcccataggggaagatggcggctgctcctttggaggagcgggattgagaggatcggggtggggagaccaaacaagagagacatttctggctctgaaggcgaacgcttcgctggccatttaggagctctgctcaaagccagacgtatcctagaaggaaaacatcaccatggctacagaaattggttctcctcctcgttttttccatatgccaaggttccagcaccaggcacctcgacagctgttttataagcgacctgattttgcacaacagcaagcaatgcaacagcttacttttgatggaaaacgaatgagaaaagctgtgaaccgaaaaaccatagactacaatccatctgtaattaagtatttggagaacagaatatggcaaagagaccagagagatatgcgggcaattcagcctgatgcaggttattacaatgatctggtcccacctataggaatgttgaataatcctatgaatgcagtaacaacaaaatttgttcggacatcaacaaataaagtaaagtgtcctgtatttgttgttaggtggactccagaaggaagacgcttggtcactggagcttctagtggggagtttaccctgtggaatggactcactttcaattttgaaacaatattacaggctcacgacagcccagtgagggccatgacgtggtcacataatgacatgtggatgttgacagcagaccacggaggatatgtgaaatattggcagtcgaacatgaacaacgtcaagatgttccaggcacataaggaggcgattagagaggccagtttctcacccacggataataaatttgctacatgctctgatgacggcactgttagaatctgggactttcttcgttgccatgaggaaagaattctccgaggcatggctgatgtgaactgtgttcaacggctcccaccaagggttattgttcagaagtaagaatcacagccatcagttcgggtccccatggccgagtttggaacttttgccataaacacgatggaggagataccccccgggtcggttacactcaggatcctggatggttgaaccagaaacgttccggaaaaacgtgtgcgttcaagagccgggagaatatcatgacgcaacaaacacgctcatac

SEQ ID NO: 373065 - DNA, 5704 bp, Homo sapiens
atttagttgaaaccatgccagagggaaggaacaagagtaaatattcaggtgtatgtgtatgtagaggggaatgaaatgtgcatgtatatataatcatatttttttgctctgcttctgtaggcttttttaaaaaagagaataaggttttcagtctgctgtcagattcttaggatgtttttaagggtattattcattacattacacagtaaactttttatgaagactcttgagggtaatttatttctgatcaaggactcaagagtaattatgatttttcttactggtttgtttttatcttaacgacaatgtgtgtataactacattttatttaagaattgcttgttagagtgtttaaaaccaaattcgttgcccacccatatacagcaaggatgtaggtgtccagggtagccacagtcctcactcctcattgtactcctgtcttcattttccctctatcttttcatctacttcaaatttatcatcattgtagtctgcatcacttataaacctccagaaatgttttgtttttttttttttggaaaaaaggtaaatgtcttatcataagccaccaaaaacctattttaccagcttcttttttcttccctttccagattgagatgctaccagatgggctgtttcagtgcaaaaagctgcagtgtttacttttggggaaaaatagcttgatgaatttgtcccctcatgtgggtgagctgtcaaaccttactcatctggagctcattggtaattacctggaaacacttcctcctgaactagaaggatgtcagtccctaaaacggaactgtctgattgttgaggagaacttgctcaatactcttcctctccctgtaacagaacgtttacagacgtgcttagacaaatgttgacttaaagaaaagagacccgtgtttcaaaatcatttttaaaagtatgctcggccgggcgtggtggctcatgcctataatcccagcactttgggaggccaagatgggcggattgcttgaggtcaggagttcgagaccagtctggccaacctggtgaaaccccatctctgctaaaactacaaaaaaattagccaggcgtggtggcgtgcgcctgtaatcccagctacttgggaggctgacgcaggggaattgcttgaaccagggaggtggaggttgcagtgagccgagattgtgccactgtacaccagcctgggtgacagagcaagactcttatctcaaaaaaaaaaaaaaaatgctccagggctttaaatgagaagtaaaattttctaagttaataaagatgaagaatgggtgactattatgatgaaccataactaaatgtcttattaaagcaactgagtgtctagccctaaattaaccaggtaaaaactgttaacactaacctgaagttttgtgaataactgttctttaacttattgagatgttgcaagaaatgcacatccagggtggactgggagctatgaaatgactaaattcctccttgcagtgtttaccttcaagattgtataggtattctctcctcttcttcccccagtccccattacttatttgcacacttgttttaactgacttcctgttttgatatttatcaccaagaccataaactcatcaatatgaattttcttgatgtatactcacgactgtctttgatttatgttcctaaatttttttagatagggtatgttgtgcttggcagaattcttttttggcttaatttttacttcctttcccagcttgcttgagtcttccttaacctggttttctcttaacaccaatgatgaaccctgagaaaatgcctgcatttggcctttgcctagaacaggagctgagtatttaagatgtattatcctcgggtcatcctgaaaattaatgtattccctaaaatttcttcttgtctatcatcaaggcctttttttatttgttaagaatttttatattaaatgtaaaacatataaatattttctattgtataatcttggattcaacatctgtgaggatcatttttgtaagatacatagaatttgtgcatttctttatgaacttactgttagtgttcttggtttcggctgtttatgactcatgtttatgtacattctgctccaaaatgtttttgtactctgcaactaattacttttggataacaaaagccttgtgtttaatgccctaaagtatttgggggtttccttgtgagagggtggccgaatcatctacctctctcttccatagttgctgtgcaatcgtacgggtaaaattcttaattacttacaaaaactgtgatagaggggagaggtacagatttggtttttaaattgattttaaaatactttatagaaatttagtaagagttaaagcaaaagactttttttccctccatctatgtaatctctagctatgattataatgtaaaacagcctctattcagtgtctaaaatgagttctcaaaacccacaaagaaatagatccatttaactgaaattcatctcatgcctttatctaactcttctggaaaatacattttgctcctttttataaagagctttgtgcttggccttttattatgcatatttttaatgaataaaatcaactgactcatttttgggaaatgtacatctttaatatgtttttccctaagggtctaggcattatgatgccacctcttcattttggatataactatgaagaaatctattaactgcacctacacaaaactggaaaacactataggtaaacagtactgtgtatatggaattgtggtgcgtggtatgtgttttctcttgctttgttccagaaagatgaaagtgagtctttaaagcatagcaaatagagcttcccctcacctgccacacactcctgcactaaagttcaaagaaaagaattattcaaatcaaatgaaatttgaataatattagctatcaggaatataggacaccaaacacactgcctcacacattattgtttattctgaacggaaaggaacagtgtaaaaataaactacttaccaaaacttgcctttagtcagaacattcagctctcagggaagcaggtataactgatgaaacttctaggacttcagaaaacagattctaattatatccatgttttttgttgttattttcattttttaaagtgtgagttgatgtttattttagtgtttcacaatagaattatcatgtatactgattccagtgtggcatgtgattaagttttggacatgaatatgccaaaagtgcttaaatgtttttggccacataactagctagaatttcaaaacaaaattcagatttgctaccattcacctgacgaacttctccatggctcgtcactggtttggttcaactgcagaagtcattggctaaattttccttatcacctacgtaaatttctagaagaatttactagcaggattaataatgaatattataaactgctttccacacactagggtataattattggtgcaatctatgttgttcttgatgccatggttttacatcttttaatttaaaccttatacaccagtgtttaggtcgcttttgagacaaggtagccctgatgcaaggaaaaatgaggctactacttcacataaaaaatagggtgttaataccacctttactgtactgttggagcagatctttattttacaagtgttcatattcacataagagaattttaaatgaagaaaattaagtttgttaaattataattatgagactttcgttggcatttgatttcaagaatacatatgcattttccaaaaaataaatgtggaggttattcagaacaaaattcatagcttacggtagtaatggcatggattaattttatttgcatgcacacacagacacacatacttcatatatgcaaattatagcattagttttgatatatctagtggtttttttttcaaaattgcaggaggttgtagattaaattaagtatgatagcacgttttttaattcattaatcatgaagtgctctgttccctaagttatgacatttagaagaaatcacatgctcaaccttaatctgagaacctaagtgtttttgagcattccagtaaaggagtagtgttcttttcctaacttacatcagggtacatctgtgtggcacacagatactatcttttcattcttcactcccagtcttaatttctttcccctgtatgtcactgtattttatgtcacttcacattgtgttaaacagggtaaatagagatcctcagtatctcagtgctgtggcatagctccaataggtgtgctgtggtgcactgcagtgatgtatttgcataacattgtttgatagtgaaaaattttttttcggttcaagtgttttgtgattaaaattttatgtttaattaaaatattgcataatattgatgggttcaaaaaccattaaaataatcaaacaattattctgtgcccttaacattattttcttgtgttttcaataaaattttcttttcatctttccatcttcacattctcttagcatcatcctatgcacataaggtatgttgttttccttctccactcacctaccgcactaaatttgatcagcaattgtacagtaacagaatatatttgtgccagaagatttgcaatgatatttgagcatgtatttatttaggaggaagccagtgcctgtaattatgtctcattgagtagttttactttgcccatcctgcagtatttagagctgatctgtacccaaagcaggacaatgtaactgtagatctgctttgttttcagtaactgtacattgcatcagaatctgtttatttctatctggaaacagacagaatggtgggggagggaaggagttattttgcatcctagtttgtattatgaagtcatcatatatatatttgaaatagtataagctaattactgttgcagaatgccctcgatataattatttcttttcagctggatgtgaaaagctgaagcagtgaaaacctgcagtcttatttcactggtttccttctgtttcttgtccatcacttctgtatccacagggagctatctactacatacctttggtaacaggctacattctcttcagattttttatatgaataatttcatcagcactaaagcattaacatagaataatgagccaaagtactgagtcgagatggctttcagttgagtttaatttcatatttaacttttgcatttaacttgtataatacactactgctgagaaaaacaattatgaatgccttctgcatgttgtacattatctctaacagagatggtgcaattttaagaatacaaaggggtatagagttagaatggatgtgttcgtgcatatatatgttgtatttaaatattaatgtttacaagaagattttttttaaattcttcaaatacttcacttagtgaaataatgggccaatctggaatagagacattttatttggttagtgcaagagtgaaagctagcatttgttaaccttcacatatttatctgtgtacaattgtttttgcttctggtaatgaattattagaaaatggaagattttgttcaatgtttttggccctcaggtttactgtgtaaatctgcatttttggtggtaaatccctttgccacagattcagtagcttttggtaaacttcactgtttttaaagtaccttttgtgtaaaataaagatccaatttttataacaaatggcaaataaaaacagtaaatgctggaagaa

SEQ ID NO: 373066 - DNA, 3225 bp, Homo sapiens
tggtctgacctcttcctacagcctgtggtggatgctgaggagttccctgaagcaatattcctttgaggcgttaagagaaaaaagcaactacagtgacatccctgatgtcaagaatgactttgccttcatccttcatctggctgatcagtatgatcctctttattccaaacgcttctccatattcctatcagaggtcagtgagaacaaactgaaacagatcaacctcaataatgaatggacagttgagaaactgaaaagtaagcttgtgaaaaatgcccaggacaagatagaactgcatctttttatgctcaacggtcttccagacaatgtctttgagttaactgaaatggaagtgctaagcctggagcttatcccagaggtgaagctgccctctgcagtctcacagctggtcaacctcaaggagcttcgtgtgtaccattcatctctggtcgtagaccatcctgcactggcctttctagaggagaatttaaaaatcctccgcctgaaatttactgaaatgggaaaaatcccacgctgggtatttcacctcaagaatctcaaggaactttatctttcgggctgtgttctccctgaacagttgagtactatgcagttggagggctttcaggacttaaaaaatctaaggaccctgtacttgaagagcagcctctcccggatcccacaagttgttacagacctcctgccttcattgcagaaactgtcccttgataatgagggaagcaaactggttgtgttgaacaacttgaaaaagatggtcaatctgaaaagcctagaactgatcagctgtgacctggaacgcatcccacattccattttcagcctgaataatttgcatgagttagacctaagggaaaataaccttaaaactgtggaagagatcattagctttcagcatcttcagaatctttcctgcttaaagttgtggcacaataacattgcttatattcctgcacagattggggcattatctaacctagagcagctctctttggaccataataatattgagaatctgcccttgcagcttttcctatgcactaaactacattatttggatctaagctataaccacttgaccttcattccagaagaaatccagtatctgagtaatttgcagtactttgctgtgaccaacaacaatattgagatgctaccagatgggctgtttcagtgcaaaaagctgcagtgtttacttttggggaaaaatagcttgatgaatttgtcccctcatgtgggtgagctgtcaaaccttactcatctggagctcattggtaattacctggaaacacttcctcctgaactagaaggatgtcagtccctaaaacggaactgtctgattgttgaggagaacttgctcaatactcttcctctccctgtaacagaacgtttacagacgtgcttagacaaatgttgacttaaagaaaagagacccgtgtttcaaaatcatttttaaaagtatgctcggccgggcgtggtggctcatgcctataatcccagcactttgggaggccaagatgggcggattgcttgaggtcaggagttcgagaccagtctggccaacctggtgaaaccccatctctgctaaaactacaaaaaaattagccaggcgtggtggcgtgcgcctgtaatcccagctacttgggaggctgacgcaggggaattgcttgaaccagggaggtggaggttgcagtgagccgagattgtgccactgtacaccagcctgggtgacagagcaagactcttatctcaaaaaaaaaaaaaaaatgctccagggctttaaatgagaagtaaaattttctaagttaataaagatgaagaatgggtgactattatgatgaaccataactaaatgtcttattaaagcaactgagtgtctagccctaaattaaccaggtaaaaactgttaacactaacctgaagttttgtgaataactgttctttaacttattgagatgttgcaagaaatgcacatccagggtggactgggagctatgaaatgactaaattcctccttgcagtgtttaccttcaagattgtataggtattctctcctcttcttcccccagtccccattacttatttgcacacttgttttaactgacttcctgttttgatatttatcaccaagaccataaactcatcaatatgaattttcttgatgtatactcacgactgtctttgatttatgttcctaaatttttttagatagggtatgttgtgcttggcagaattcttttttggcttaatttttacttcctttcccagcttgcttgagtcttccttaacctggttttctcttaacaccaatgatgaaccctgagaaaatgcctgcatttggcctttgcctagaacaggagctgagtatttaagatgtattatcctcgggtcatcctgaaaattaatgtattccctaaaatttcttcttgtctatcatcaaggcctttttttatttgttaagaatttttatattaaatgtaaaacatataaatattttctattgtataatcttggattcaacatctgtgaggatcatttttgtaagatacatagaatttgtgcatttctttatgaacttactgttagtgttcttggtttcggctgtttatgactcatgtttatgtacattctgctccaaaatgtttttgtactctgcaactaattacttttggataacaaaagccttgtgtttaatgccctaaagtatttgggggtttccttgtgagagggtggccgaatcatctacctctctcttccatagttgctgtgcaatcgtacgggtaaaattcttaattacttacaaaaactgtgatagaggggagaggtacagatttggtttttaaattgattttaaaatactttatagaaatttagtaagagttaaagcaaaagactttttttccctccatctatgtaatctctagctatgattataatgtaaaacagcctctattcagtgtctaaaatgagttctcaaaacccacaaagaaatagatccatttaatttttgagatggagtcccgctctgtcgcccaggctggagtgcagtggcgcgatctcggctcactgcaagctccgcctcctgggttcacgccattctcctgcctcagcctcccgagtagctgggactacaggcgcccgccaacactcctggctaatttttttgtatttttagtagagacggggtttcactgtgttagccaggat

SEQ ID NO: 373067 - DNA, 3217 bp, Homo sapiens
  misc_feature (2930)..(2930): n is a, c, g, or t
tggtctgacctcttcctacagcctgtggtggatgctgaggagttccctgaagcaatattcctttgaggcgttaagagaaaaaagcaactacagtgacatccctgatgtcaagaatgactttgccttcatccttcatctggctgatcagtatgatcctctttattccaaacgcttctccatattcctatcagaggtcagtgagaacaaactgaaacagatcaacctcaataatgaatggacagttgagaaactgaaaagtaagcttgtgaaaaatgcccaggacaagatagaactgcatctttttatgctcaacggtcttccagacaatgtctttgagttaactgaaatggaagtgctaagcctggagcttatcccagaggtgaagctgccctctgcagtctcacagctggtcaacctcaaggagcttcgtgtgtaccattcatctctggtcgtagaccatcctgcactggcctttctagaggagaatttaaaaatcctccgcctgaaatttactgaaatgggaaaaatcccacgctgggtatttcacctcaagaatctcaaggaactttatctttcgggctgtgttctccctgaacagttgagtactatgcagttggagggctttcaggacttaaaaaatctaaggaccctgtacttgaagagcagcctctcccggatcccacaagttgttacagacctcctgccttcattgcagaaactgtcccttgataatgagggaagcaaactggttgtgttgaacaacttgaaaaagatggtcaatctgaaaagcctagaactgatcagctgtgacctggaacgcatcccacattccattttcagcctgaataatttgcatgagttagacctaagggaaaataaccttaaaactgtggaagagatcattagctttcagcatcttcagaatctttcctgcttaaagttgtggcacaataacattgcttatattcctgcacagattggggcattatctaacctagagcagctctctttggaccataataatattgagaatctgcccttgcagcttttcctatgcactaaactacattatttggatctaagctataaccacttgaccttcattccagaagaaatccagtatctgagtaatttgcagtactttgctgtgaccaacaacaatattgagatgctaccagatgggctgtttcagtgcaaaaagctgcagtgtttacttttggggaaaaatagcttgatgaatttgtcccctcatgtgggtgagctgtcaaaccttactcatctggagctcattggtaattacctggaaacacttcctcctgaactagaaggatgtcagtccctaaaacggaactgtctgattgttgaggagaacttgctcaatactcttcctctccctgtaacagaacgtttacagacgtgcttagacaaatgttgacttaaagaaaagagacccgtgtttcaaaatcatttttaaaagtatgctcggccgggcgtggtggctcatgcctataatcccagcactttgggaggccaagatgggcggattgcttgaggtcaggagttcgagaccagtctggccaacctggtgaaaccccatctctgctaaaactacaaaaaaattagccaggcgtggtggcgtgcgcctgtaatcccagctacttgggaggctgacgcaggggaattgcttgaaccagggaggtggaggttgcagtgagccgagattgtgccactgtacaccagcctgggtgacagagcaagactcttatctcaaaaaaaaaaaaaaaatgctccagggctttaaatgagaagtaaaattttctaagttaataaagatgaagaatgggtgactattatgatgaaccataactaaatgtcttattaaagcaactgagtgtctagccctaaattaaccaggtaaaaactgttaacactaacctgaagttttgtgaataactgttctttaacttattgagatgttgcaagaaatgcacatccagggtggactgggagctatgaaatgactaaattcctccttgcagtgtttaccttcaagattgtataggtattctctcctcttcttcccccagtccccattacttatttgcacacttgttttaactgacttcctgttttgatatttatcaccaagaccataaactcatcaatatgaattttcttgatgtatactcacgactgtctttgatttatgttcctaaatttttttagatagggtatgttgtgcttggcagaattcttttttggcttaatttttacttcctttcccagcttgcttgagtcttccttaacctggttttctcttaacaccaatgatgaaccctgagaaaatgcctgcatttggcctttgcctagaacaggagctgagtatttaagatgtattatcctcgggtcatcctgaaaattaatgtattccctaaaatttcttcttgtctatcatcaaggcctttttttatttgttaagaatttttatattaaatgtaaaacatataaatattttctattgtataatcttggattcaacatctgtgaggatcatttttgtaagatacatagaatttgtgcatttctttatgaacttactgttagtgttcttggtttcggctgtttatgactcatgtttatgtacattctgctccaaaatgtttttgtactctgcaactaattacttttggataacaaaagccttgtgtttaatgccctaaagtatttgggggtttccttgtgagagggtggccgaatcatctacctcttttttttctctttttttccatagttgctgtgcaactcgtacgggtcacacaaattctcccttttttaacaaccttttttcaaaccccttttttttttttaaaaacccccccaaaaaaaataaccccaaaactcaacacaacgtgaacacgatgtgttttttngtggggggggggaccttttgctggcggcgcaccacaacacaacacgcgtctttctttccacaccaccccgggcggtcgcccacaaacacaccaccggcggtggcgtaacgccgcgtcggtattatagctgccatgcatctgtcgccgaccaccaccaacaacatgcgcggcggcgtagcccaccaccaacaacacctcgggcggcgcacccagaggcggcacgccatattatttttcttacaccaccacccacccgcccccaccacccgccaacaacagtggcagtc

SEQ ID NO: 373068 - DNA, 6255 bp, Homo sapiens
tggtctgacctcttcctacagcctgtggtggatgctgaggagttccctgaagcaatattcctttgaggcgttaagagaaaaaagcaactacagtgacatccctgatgtcaagaatgactttgccttcatccttcatctggctgatcagtatgatcctctttattccaaacgcttctccatattcctatcagaggtcagtgagaacaaactgaaacagatcaacctcaataatgaatggacagttgagaaactgaaaagtaagcttgtgaaaaatgcccaggacaagatagaactgcatctttttatgctcaacggtcttccagacaatgtctttgagttaactgaaatggaagtgctaagcctggagcttatcccagaggtgaagctgccctctgcagtctcacagctggtcaacctcaaggagcttcgtgtgtaccattcatctctggtcgtagaccatcctgcactggcctttctagaggagaatttaaaaatcctccgcctgaaatttactgaaatgggaaaaatcccacgctgggtatttcacctcaagaatctcaaggaactttatctttcgggctgtgttctccctgaacagttgagtactatgcagttggagggctttcaggacttaaaaaatctaaggaccctgtacttgaagagcagcctctcccggatcccacaagttgttacagacctcctgccttcattgcagaaactgtcccttgataatgagggaagcaaactggttgtgttgaacaacttgaaaaagatggtcaatctgaaaagcctagaactgatcagctgtgacctggaacgcatcccacattccattttcagcctgaataatttgcatgagttagacctaagggaaaataaccttaaaactgtggaagagatcattagctttcagcatcttcagaatctttcctgcttaaagttgtggcacaataacattgcttatattcctgcacagattggggcattatctaacctagagcagctctctttggaccataataatattgagaatctgcccttgcagcttttcctatgcactaaactacattatttggatctaagctataaccacttgaccttcattccagaagaaatccagtatctgagtaatttgcagtactttgctgtgaccaacaacaatattgagatgctaccagatgggctgtttcagtgcaaaaagctgcagtgtttacttttggggaaaaatagcttgatgaatttgtcccctcatgtgggtgagctgtcaaaccttactcatctggagctcattggtaattacctggaaacacttcctcctgaactagaaggatgtcagtccctaaaacggaactgtctgattgttgaggagaacttgctcaatactcttcctctccctgtaacagaacgtttacagacgtgcttagacaaatgttgacttaaagaaaagagacccgtgtttcaaaatcatttttaaaagtatgctcggccgggcgtggtggctcatgcctataatcccagcactttgggaggccaagatgggcggattgcttgaggtcaggagttcgagaccagtctggccaacctggtgaaaccccatctctgctaaaactacaaaaaaattagccaggcgtggtggcgtgcgcctgtaatcccagctacttgggaggctgacgcaggggaattgcttgaaccagggaggtggaggttgcagtgagccgagattgtgccactgtacaccagcctgggtgacagagcaagactcttatctcaaaaaaaaaaaaaaaatgctccagggctttaaatgagaagtaaaattttctaagttaataaagatgaagaatgggtgactattatgatgaaccataactaaatgtcttattaaagcaactgagtgtctagccctaaattaaccaggtaaaaactgttaacactaacctgaagttttgtgaataactgttctttaacttattgagatgttgcaagaaatgcacatccagggtggactgggagctatgaaatgactaaattcctccttgcagtgtttaccttcaagattgtataggtattctctcctcttcttcccccagtccccattacttatttgcacacttgttttaactgacttcctgttttgatatttatcaccaagaccataaactcatcaatatgaattttcttgatgtatactcacgactgtctttgatttatgttcctaaatttttttagatagggtatgttgtgcttggcagaattcttttttggcttaatttttacttcctttcccagcttgcttgagtcttccttaacctggttttctcttaacaccaatgatgaaccctgagaaaatgcctgcatttggcctttgcctagaacaggagctgagtatttaagatgtattatcctcgggtcatcctgaaaattaatgtattccctaaaatttcttcttgtctatcatcaaggcctttttttatttgttaagaatttttatattaaatgtaaaacatataaatattttctattgtataatcttggattcaacatctgtgaggatcatttttgtaagatacatagaatttgtgcatttctttatgaacttactgttagtgttcttggtttcggctgtttatgactcatgtttatgtacattctgctccaaaatgtttttgtactctgcaactaattacttttggataacaaaagccttgtgtttaatgccctaaagtatttgggggtttccttgtgagagggtggccgaatcatctacctctctcttccatagttgctgtgcaatcgtacgggtaaaattcttaattacttacaaaaactgtgatagaggggagaggtacagatttggtttttaaattgattttaaaatactttatagaaatttagtaagagttaaagcaaaagactttttttccctccatctatgtaatctctagctatgattataatgtaaaacagcctctattcagtgtctaaaatgagttctcaaaacccacaaagaaatagatccatttaactgaaattcatctcatgcctttatctaactcttctggaaaatacattttgctcctttttataaagagctttgtgcttggccttttattatgcatatttttaatgaataaaatcaactgactcatttttgggaaatgtacatctttaatatgtttttccctaagggtctaggcattatgatgccacctcttcattttggatataactatgaagaaatctattaactgcacctacacaaaactggaaaacactataggtaaacagtactgtgtatatggaattgtggtgcgtggtatgtgttttctcttgctttgttccagaaagatgaaagtgagtctttaaagcatagcaaatagagcttcccctcacctgccacacactcctgcactaaagttcaaagaaaagaattattcaaatcaaatgaaatttgaataatattagctatcaggaatataggacaccaaacacactgcctcacacattattgtttattctgaacggaaaggaacagtgtaaaaataaactacttaccaaaacttgcctttagtcagaacattcagctctcagggaagcaggtataactgatgaaacttctaggacttcagaaaacagattctaattatatccatgttttttgttgttattttcattttttaaagtgtgagttgatgtttattttagtgtttcacaatagaattatcatgtatactgattccagtgtggcatgtgattaagttttggacatgaatatgccaaaagtgcttaaatgtttttggccacataactagctagaatttcaaaacaaaattcagatttgctaccattcacctgacgaacttctccatggctcgtcactggtttggttcaactgcagaagtcattggctaaattttccttatcacctacgtaaatttctagaagaatttactagcaggattaataatgaatattataaactgctttccacacactagggtataattattggtgcaatctatgttgttcttgatgccatggttttacatcttttaatttaaaccttatacaccagtgtttaggtcgcttttgagacaaggtagccctgatgcaaggaaaaatgaggctactacttcacataaaaaatagggtgttaataccacctttactgtactgttggagcagatctttattttacaagtgttcatattcacataagagaattttaaatgaagaaaattaagtttgttaaattataattatgagactttcgttggcatttgatttcaagaatacatatgcattttccaaaaaataaatgtggaggttattcagaacaaaattcatagcttacggtagtaatggcatggattaattttatttgcatgcacacacagacacacatacttcatatatgcaaattatagcattagttttgatatatctagtggtttttttttcaaaattgcaggaggttgtagattaaattaagtatgatagcacgttttttaattcattaatcatgaagtgctctgttccctaagttatgacatttagaagaaatcacatgctcaaccttaatctgagaacctaagtgtttttgagcattccagtaaaggagtagtgttcttttcctaacttacatcagggtacatctgtgtggcacacagatactatcttttcattcttcactcccagtcttaatttctttcccctgtatgtcactgtattttatgtcacttcacattgtgttaaacagggtaaatagagatcctcagtatctcagtgctgtggcatagctccaataggtgtgctgtggtgcactgcagtgatgtatttgcataacattgtttgatagtgaaaaattttttttcggttcaagtgttttgtgattaaaattttatgtttaattaaaatattgcataatattgatgggttcaaaaaccattaaaataatcaaacaattattctgtgcccttaacattattttcttgtgttttcaataaaattttcttttcatctttccatcttcacattctcttagcatcatcctatgcacataaggtatgttgttttccttctccactcacctaccgcactaaatttgatcagcaattgtacagtaacagaatatatttgtgccagaagatttgcaatgatatttgagcatgtatttatttaggaggaagccagtgcctgtaattatgtctcattgagtagttttactttgcccatcctgcagtatttagagctgatctgtacccaaagcaggacaatgtaactgtagatctgctttgttttcagtaactgtacattgcatcagaatctgtttatttctatctggaaacagacagaatggtgggggagggaaggagttattttgcatcctagtttgtattatgaagtcatcatatatatatttgaaatagtataagctaattactgttgcagaatgccctcgatataattatttcttttcagctggatgtgaaaagctgaagcagtgaaaacctgcagtcttatttcactggtttccttctgtttcttgtccatcacttctgtatccacagggagctatctactacatacctttggtaacaggctacattctcttcagattttttatatgaataatttcatcagcactaaagcattaacatagaataatgagccaaagtactgagtcgagatggctttcagttgagtttaatttcatatttaacttttgcatttaacttgtataatacactactgctgagaaaaacaattatgaatgccttctgcatgttgtacattatctctaacagagatggtgcaattttaagaatacaaaggggtatagagttagaatggatgtgttcgtgcatatatatgttgtatttaaatattaatgtttacaagaagattttttttaaattcttcaaatacttcacttagtgaaataatgggccaatctggaatagagacattttatttggttagtgcaagagtgaaagctagcatttgttaaccttcacatatttatctgtgtacaattgtttttgcttctggtaatgaattattagaaaatggaagattttgttcaatgtttttggccctcaggtttactgtgtaaatctgcatttttggtggtaaatccctttgccacagattcagtagcttttggtaaacttcactgtttttaaagtaccttttgtgtaaaataaagatccaatttttataacaaatggcaaataaaaacagtaaatgctggaagaa

SEQ ID NO: 373069 - DNA, 818 bp, Homo sapiens
gctgacgtggagcgtccgggttagcgggtgcggcgagctgcgggattggggagcaacgggccgggccgggccttcgggcccgaggcggcggcggcggtataaagccggcgactgggagcatgtaatgtcggaatgcggaggccgcggcggcggcagcagcagcagcgaggacgccgaggacgagggagggggcggcggcggccccgcgggctcagactgcctcagctcgagcccgaccctggccacagcgtcctcggcgggccggctccgtcgcgggctgcgtggcgccttcctcatggcgcgccagcggccggagctgctctgcggggccgtggcgctcggctgcgcgctgctcctcgccctcaagttcacctgcagtcgagcaaaagatgtgataataccagcaaagccacctgtcagctttttctccttgaggtctccagtccttgacctcttccaggggcagctggattatgcagagtacgttcgacgggattcagaggtggtactgctcttcttctatgccccttggtgtggacagtccatcgctgccagggcagaaattgagcaagcagcaagtcggctttcagatcaggtgttgtttgtggcaattaactgttggtggaaccaggggaaatgcagaaaacagaaacacttcttttattttcctgtaatatatctgtatcatcggaggtaagaactttttaaatagcgtctctcattccagtttagtttgccagtttataaatgaattttgcattttttctatattaaagtattagatattcactatagaaaattcagataatacagataag

SEQ ID NO: 373070 - DNA, 2228 bp, Homo sapiens
gctgacgtggagcgtccgggttagcgggtgcggcgagctgcgggattggggagcaacgggccgggccgggccttcgggcccgaggcggcggcggcggtataaagccggcgactgggagcatgtaatgtcggaatgcggaggccgcggcggcggcagcagcagcagcgaggacgccgaggacgagggagggggcggcggcggccccgcgggctcagactgcctcagctcgagcccgaccctggccacagcgtcctcggcgggccggctccgtcgcgggctgcgtggcgccttcctcatggcgcgccagcggccggagctgctctgcggggccgtggcgctcggctgcgcgctgctcctcgccctcaagttcacctgcagtcgagcaaaagatgtgataataccagcaaagccacctgtcagctttttctccttgaggtctccagtccttgacctcttccaggggcagctggattatgcagagtacgttcgacgggattcagaggtggtactgctcttcttctatgccccttggtgtggacagtccatcgctgccagggcagaaattgagcaagcagcaagtcggctttcagatcaggtgttgtttgtggcaattaactgttggtggaaccaggggaaatgcagaaaacagaaacacttcttttattttcctgtaatatatctgtatcatcggagttttggaccaatcgaatacaaaggccccatgagtgctgtttacattgagaagtttgtccgccgggtgatgaaaccacttctctacatcccatctcaatcagaattactagattttctctcaaactacgagcctggagtactcgggtactttgagttcagtggctcaccccagcctcctggttatttgaccttcttcacctcagcattacattcattaaagaaagattacctaggaacagtacgatttggggttatcacaaataaacatcttgcgaaactggtatccttagtacactctggaagtgtgtatttacatagacatttcaacacatcacttgtcttccccagggaggtcctgaactacacagctgagaacatctgtaagtgggccttagaaaaccaggagacgctctttcggtggctgcggccacacggaggcaagagtctcctgctgaataacgagctgaagaaaggaccagcgctgtttctgttcataccttttaatcccctggccgaaagtcatcctttaatagacgagatcaccgaagtggccttggagtacaacaactgtcatggggaccaggtggtggagcgtctccttcagcacctgcggcgggtggatgctccagtgctggagtccctggccctggaagtgccggcacagctgccagacccgccaacgatcacagcgtccccctgctgcaacactgtggtgctgccccagtggcactccttctccaggacccacaacgtctgtgaactctgtgtcaaccagacctccgggggcatgaagccgagctcggtcagcgtgccacagtgcagcttttttgaaatggcagcagctctggattctttctacctcaaggagcagaccttttatcatgtggcatcagacagcatagaatgcagcaattttttaacttcctatagccccttcagctactacactgcatgttgcaggaccataagcaggggtgtgtcaggcttcatcgactctgaacaaggtgtctttgaagcccctactgttgcattttcttcccttgagaagaaatgtgaggttgatgccccaagctccgttcctcacattgaggagaacaggtatctctttccagaagtggacatgactagcacaaacttcacaggcctgagctgcagaaccaacaagactctcaacatctaccttttggattcaaatttgttttggttatatgcagagagactgggtgctccgagctccactcaggtgaaagaatttgcggcaattgttgacgtgaaagaagaatctcattacatcttggatccaaagcaagcactgatgaagctcaccctaggtactgcaggcagtttatttccccaagcattgtacattttgcttgacttcatatgggtaaattttattgatggctctcattacatttagttgtggggtgatgtcaccttcgtagctcattttaagtctttagaccaccatcagtcataattttcaaagaagctaattttgtctattaaatggaacagaaacttcctcactctga

SEQ ID NO: 373071 - DNA, 673 bp, Homo sapiens
ctgcccggggcaggcctctagagcagttgcggttagctcccacagtgattgagcacaggctgggtgagttagtacagatgtcattttctgtattagaaaattaatgtcaaatctgctaagaaaataggctgtttttggtctctatccagatttacaacataaagagggtataattttccatcttcagaggggcttgatgtattttgctcaatgatttcctttcttttcccagagctattcagggattaaaatacttggctagatcctgtcaggtgaggagtgaatgactcctcaggtgtcagtgcggcattttctgcaagttcatttttactttcaggacatcacattgccactcagtggaaagcgtccacgtagtagaatgttgtatgtcttggaagtatcagcgcccagctcacacctggtagtacattcatcgagaagggactagcccaatgtggggtgtaaaaaatgcaccaggttcttgaagttatctgagaaggttctttcaagttggtgtttcttgggctgatcatctgccatttctgttctttccctttaccaggattgacgtgtctcagaatgaccttccttgggaatttatggtcgatcgtcttcctactgtcttgttttttccctgcaacaggtaatgccaaatttttgtcactggtgggca

SEQ ID NO: 373072 - DNA, 3124 bp, Homo sapiens
gctgacgtggagcgtccgggttagcgggtgcggcgagctgcgggattggggagcaacgggccgggccgggccttcgggcccgaggcggcggcggcggtataaagccggcgactgggagcatgtaatgtcggaatgcggaggccgcggcggcggcagcagcagcagcgaggacgccgaggacgagggagggggcggcggcggccccgcgggctcagactgcctcagctcgagcccgaccctggccacagcgtcctcggcgggccggctccgtcgcgggctgcgtggcgccttcctcatggcgcgccagcggccggagctgctctgcggggccgtggcgctcggctgcgcgctgctcctcgccctcaagttcacctgcagtcgagcaaaagatgtgataataccagcaaagccacctgtcagctttttctccttgaggtctccagtccttgacctcttccaggggcagctggattatgcagagtacgttcgacgggattcagaggtggtactgctcttcttctatgccccttggtgtggacagtccatcgctgccagggcagaaattgagcaagcagcaagtcggctttcagatcaggtgttgtttgtggcaattaactgttggtggaaccaggggaaatgcagaaaacagaaacacttcttttattttcctgtaatatatctgtatcatcggagttttggaccaatcgaatacaaaggccccatgagtgctgtttacattgagaagtttgtccgccgggtgatgaaaccacttctctacatcccatctcaatcagaattactagattttctctcaaactacgagcctggagtactcgggtactttgagttcagtggctcaccccagcctcctggttatttgaccttcttcacctcagcattacattcattaaagaaagattacctaggaacagtacgatttggggttatcacaaataaacatcttgcgaaactggtatccttagtacactctggaagtgtgtatttacatagacatttcaacacatcacttgtcttccccagggaggtcctgaactacacagctgagaacatctgtaagtgggccttagaaaaccaggagacgctctttcggtggctgcggccacacggaggcaagagtctcctgctgaataacgagctgaagaaaggaccagcgctgtttctgttcataccttttaatcccctggccgaaagtcatcctttaatagacgagatcaccgaagtggccttggagtacaacaactgtcatggggaccaggtggtggagcgtctccttcagcacctgcggcgggtggatgctccagtgctggagtccctggccctggaagtgccggcacagctgccagacccgccaacgatcacagcgtccccctgctgcaacactgtggtgctgccccagtggcactccttctccaggacccacaacgtctgtgaactctgtgtcaaccagacctccgggggcatgaagccgagctcggtcagcgtgccacagtgcagcttttttgaaatggcagcagctctggattctttctacctcaaggagcagaccttttatcatgtggcatcagacagcatagaatgcagcaattttttaacttcctatagccccttcagctactacactgcatgttgcaggaccataagcaggggtgtgtcaggcttcatcgactctgaacaaggtgtctttgaagcccctactgttgcattttcttcccttgagaagaaatgtgaggttgatgccccaagctccgttcctcacattgaggagaacaggtatctctttccagaagtggacatgactagcacaaacttcacaggcctgagctgcagaaccaacaagactctcaacatctaccttttggattcaaatttgttttggttatatgcagagagactgggtgctccgagctccactcaggtgaaagaatttgcggcaattgttgacgtgaaagaagaatctcattacatcttggatccaaagcaagcactgatgaagctcaccctagagtcttttattcaaaacttcagcgttctctatagtcccttgaaaaggcatctcattggaagtggctctgcccagttcccgtctcagcatttaatcactgaagtgacaactgataccttttgggaagtagtccttcaaaaacaggacgttctcctgctctattacgctccgtggtgcggcttctgtccatccctcaatcacatcttcatccagctagctcggaacctgcccatggacacattcactgtggcaaggattgacgtgtctcagaatgaccttccttgggaatttatggtcgatcgtcttcctactgtcttgttttttccctgcaacagaaaggacctaagtgtgaaataccccgaagacgtccccatcacccttccaaacctgttgaggttcattttgcatcactcagaccctgcttccagcccccagaatgtggctaactctcctaccaaggagtgtcttcagagcgaggcagtcttacagcgggggcacatctcccacttggagagagagatccagaaactgagagcagaaataagcagcctccagcgagcacaagtgcaggtggagtcccagctctccagtgcccgcagagatgagcaccggctgcggcagcagcagcgggccctggaagagcagcacagcctgctccacgcacacagtgagcagctgcaggccctctatgagcagaagacacgtgagctgcaggagctggcccgcaagctgcaggagctggccgatgcctcagaaaacctccttaccgagaacacgtggctcaagatcctggtggcgaccatggagaggaaactggagggcagggatggagctgaaagcctggcggcccagagagaggtccaccccaagcagcctgagccctcagccaccccccagctccctggcagctcccctccacctgccaatgtcagcgccacactggtgtctgaaaggaataaggagaacaggacagactaactttttaaatgatatgaagaaatcagaggtgaaaattgtacattgggaatatatttatgcaaattttattgaaatttattgtaaataaagattttctcagtggtctagaaaatcagcttgaat

SEQ ID NO: 373073 - DNA, 3079 bp, Homo sapiens
gctgacgtggagcgtccgggttagcgggtgcggcgagctgcgggattggggagcaacgggccgggccgggccttcgggcccgaggcggcggcggcggtataaagccggcgactgggagcatgtaatgtcggaatgcggaggccgcggcggcggcagcagcagcagcgaggacgccgaggacgagggagggggcggcggcggccccgcgggctcagactgcctcagctcgagcccgaccctggccacagcgtcctcggcgggccggctccgtcgcgggctgcgtggcgccttcctcatggcgcgccagcggccggagctgctctgcggggccgtggcgctcggctgcgcgctgctcctcgccctcaagttcacctgcagtcgagcaaaagatgtgataataccagcaaagccacctgtcagctttttctccttgaggtctccagtccttgacctcttccaggggcagctggattatgcagagtacgttcgacgggattcagaggtggtactgctcttcttctatgccccttggtgtggacagtccatcgctgccagggcagaaattgagcaagcagcaagtcggctttcagatcaggtgttgtttgtggcaattaactgttggtggaaccaggggaaatgcagaaaacagaaacacttcttttattttcctgtaatatatctgtatcatcggagttttggaccaatcgaatacaaaggccccatgagtgctgtttacattgagaagtttgtccgccgggtgatgaaaccacttctctacatcccatctcaatcagaattactagattttctctcaaactacgagcctggagtactcgggtactttgagttcagtggctcaccccagcctcctggttatttgaccttcttcacctcagcattacattcattaaagaaagattacctaggaacagtacgatttggggttatcacaaataaacatcttgcgaaactggtatccttagtacactctggaagtgtgtatttacatagacatttcaacacatcacttgtcttccccagggaggtcctgaactacacagctgagaacatctgtaagtgggccttagaaaaccaggagacgctctttcggtggctgcggccacacggaggcaagagtctcctgctgaataacgagctgaagaaaggaccagcgctgtttctgttcataccttttaatcccctggccgaaagtcatcctttaatagacgagatcaccgaagtggccttggagtacaacaactgtcatggggaccaggtggtggagcgtctccttcagcacctgcggcgggtggatgctccagtgctggagtccctggccctggaagtgccggcacagctgccagacccgccaacgatcacagcgtccccctgctgcaacactgtggtgctgccccagtggcactccttctccaggacccacaacgtctgtgaactctgtgtcaaccagacctccgggggcatgaagccgagctcggtcagcgtgccacagtgcagcttttttgaaatggcagcagctctggattctttctacctcaaggagcagaccttttatcatgtggcatcagacagcatagaatgcagcaattttttaacttcctatagccccttcagctactacactgcatgttgcaggaccataagcaggggtgtgtcaggcttcatcgactctgaacaaggtgtctttgaagcccctactgttgcattttcttcccttgagaagaaatgtgaggttgatgccccaagctccgttcctcacattgaggagaacaggtatctctttccagaagtggacatgactagcacaaacttcacaggcctgagctgcagaaccaacaagactctcaacatctaccttttggattcaaatttgttttggttatatgcagagagactgggtgctccgagctccactcaggtgaaagaatttgcggcaattgttgacgtgaaagaagaatctcattacatcttggatccaaagcaagcactgatgaagctcaccctagagtcttttattcaaaacttcagcgttctctatagtcccttgaaaaggcatctcattggaagtggctctgcccagttcccgtctcagcatttaatcactgaagtgacaactgataccttttgggaagtagtccttcaaaaacaggacgttctcctgctctattacgctccgtggtgcggcttctgtccatccctcaatcacatcttcatccagctagctcggaacctgcccatggacacattcactgtggcaaggattgacgtgtctcagaatgaccttccttgggaatttatggtcgatcgtcttcctactgtcttgttttttccctgcaacaggtaatgccaaatttttgtcactggtgggcagttgggattcttttgtggaggtctgaaaatgaaatgggtttaagatgtaaatcattcattatgttcaaaaaatgttcccttaggaaccaggcgtggtggctcatgcctgtaatcccagcactttgggaggctgaggcaggcagattgcttgagctcaagaggttgagaccagcctggccgacatggtgaaaccccatcagtacaaaaaatacaaaaattagccaggcatggtgacatatgcttgtaatcccagctactctgaggctgaggcacgagaatctcttgaacctgggatgcggaggttgcagtgagccaagatcacaccactgcactccaacctgggtgacagagcgaggctctgcctcaaaaaaaaaaaaaaaaaaaaagtgtccttagggacataaaagggttgtagtgtcaggatgttatgtgtggtatggatcttttaaaggttgtttttcccagtctatctcttacccgagcttgaatgtggccgtgagaattcttagctttcatggcctgtatgaacatatggaggacgcagagactgacaggattcttctgttgccctggctggagtgcagtggtgcaatgtttgtgtggggcaaaacagcagagaatctgtggagccctgcctgccccaagccttccacttgcttgtctctcagttggcctcccagcagctcctcat

SEQ ID NO: 373074 - DNA, 395 bp, Homo sapiens
tatatacacacatatatgtgtacatatacatgcgtacatatatatacgcatacacattgtgaaatgattgccacaatcaagtttattgtacattcttacatcttttcaactttgggttgcagaaaaaaatagaacaaccatttcaatttaaattttagataaacaatgaattttttttctttagtatgggtatctccatgcaatatttgggcatatttaaacctcattgtttatcagatagtcgaaattcaagtgcccatactgtgttttggtttgttttggctaaatctggcaaaatagtttataatttaaaaaatataattagtcagatgctaatcacttattcagagatgacttcaaccacccaggaaactgtccagatttcataatttagc

SEQ ID NO: 373075 - DNA, 484 bp, Homo sapiens
ttttttttttttgaatcagtcaattttattccaattcttcacaatttacactcaatatgttgtttccaaaatgtaagtcaccctttatataatagttttattatttcatctttcttttagagtttttttaaaatcttttccttatgtttcttcagtagaagccagaatcttgagttgcccagttaggagcctctgacctgctattgtcattaagtttcttctcaatattcatgggccaaaatctagcttctaaaaggaaagggcttttgggtcttttcaatcacttgctgataggggtgagaggtacattgttaccataaccacatggacctaatttaggaatcaatcttgggcatccagtcttggcatttctaatcacatttacaatccacctttcagtttcatctggagtcatgttcaatttgtctgccaacatgttaatgctgatacactggtggatgtgacagaaagtctcaaatatgaa

SEQ ID NO: 373076 - DNA, 509 bp, Homo sapiens
tcatcaaactctgtttttagacttttaccttcaaaccacccaagaacattagagcctcataaactataaatgattaattttatgactcactatttaaagcaaatggaaattttaaacttgtttttatcatgagagtccctgtctggcaataattgggcaaagaaggcaagataaaaaacggatttttcttcaggatctgctaagtagaaacaacaacatagaggctgggcgcagtgactcatgcctgtaatcccagcattttgggaggccaaggtgtgtggatcacctgaggtcaggagttcgagaccagcctggccaacatggcaaaacccagtctctactaaaaatacaaaaattagctgggcatggtggggtgtgcctgtagtcccaaccacttgggaggctgaagcaggagaatcacttgaacttgggaggtggtggttgtggtgagctgagatcatgccactgcactccagcctgggcgacagagtgagactatgtctccaaaa

SEQ ID NO: 373077 - DNA, 388 bp, Homo sapiens
gctgtcctctttaaaacagaaagcaaagctgaagacagaatccaaaatcctggctctggtcctagttcagacactagctgtgaaagtcaggtaagtcccttttttctttgggcttccatttctactaatttctagaaaagttatactgttactctgaaagatttttcttatgtttttgttaccaattttcttagtaaatgcattgcatatgttgaatagtattgtcaacatgtgcaatgcatttacttaaaaaaagacgtatctggcctggcacggtggctcacgctggtaatcccagcactttgggaggctgaggctggtggatcatgaagtcaggagatagagaccatcctggctaacacggtgaaacccagtctctactaaaaaa

SEQ ID NO: 373078 - DNA, 220 bp, Homo sapiens
ggcctttaaatgctctcctatccaaatgattttctatcctggaaatgacacagttaactggatgagtggtatacagaccaagtctaatcgagaattctatcgttatgccaactcaaaagtggtttatgtggattctgcagttttacattactgtaataagtaaatgaggacgtcagtactaagtacatcctttcttagccattcagaacctttctaaatg

SEQ ID NO: 373079 - DNA, 719 bp, Homo sapiens
tattgttggataatgttctgacccagatgctgttattcataaatgggagtgttgccttccatatcgattcctgaattgggcctctgtttcctagatgacgtcactgaggtaagggcgggttaaagcctgtcctataccaagcaagttgtgcagccaactgggggactgaatcccagtgtgatgtgatgaagaggtgttgaaggtccaccaccagtgccagtgaagtttgtgccaagaggtctgattttcatctctcccctctaaatggccacggggaccccagtcaatgtttcccattaacatagactgttgtctggccaaggggccaagacactgagtccaaggaggggggtgagaaatatcaaagggagcccattccatataatccatacaatttgagtgatggggctgggagtgattggtgaacacgccagtaacattaataaagctgaggcctaataaatacataatttttccatggtgacttaaccatgcctgagattggactgcaagacagctgcagttgagtgacgtatcctcatggtgatatcataaagggagtccttccaatgggccggtgtaattgatgctattgctctgtgtcagacggagttaggggtcctggtgcccacgctccctgatcataatatatctcaggaggagtgtcgctccagagtaccagtcgtactaccagtgggttaggaacatatgcccaatat

SEQ ID NO: 373080 - DNA, 444 bp, Homo sapiens
tgcctgaccctggcgctccagtagtttctcagcttcttgtgtcgttttcttgatctgtccccatgttatggggttggatgtcattgtgactccggtcggcccttgttctgtctttgcattcagattccgctggctcatggctcgtactggaggtaacaggcccacggttgaataccatggatccctccggtctcccgttccatggtcacacacacctggagggcacccacacggtttgtccatctcctgtaaaaacacaagcataccctcgtccccacgtcagcaaatccaccggacctttccattgtccttcttctggggatttccataacacttttggataaacttgcctcttttcctctagcagttgccagtgtcgttctgctggggtcttgccatccgtaccaggagtcaaacaatttaaagtaaacaaggctaaatgta

SEQ ID NO: 373081 - DNA, 759 bp, Homo sapiens
tagtcagcctctcactctctacccgctgggcggtaccccgcatctcgctctggccgccccagaggttcgcggcttctggacctgctgtgcccctctccagcctggatcaggacggagaacacccccgaaacccacctcaccagcacagccggcggacccttccggaggtggccgcagagactagccaacttgcgcgcccgccgacccggaccacagctcccagcacacctcaagggcccacgcccgccaggactacaattcccggcgtcctccggaagctcaagtgtacccaggcgcggtgcctgctgggaattgtagttgacgttggtcagcacggaggccacaggatcccagcccggcctttgtgggactgaggtggcgctgagtgggagagcagcaggcgatgcgcgaaaggcgggacttggagataaatactgagcacccacaacaggcagccagcaccactgcagattggatactgcaatgatgataagcatggcctgcctttatggaggttctggatgttcctgtggataacctcaaggagcacgggacctgggacatgactgcccccagcattccttctggcggcagacagagtttgtcagttcgccaacatcctgctttcatgagaacagtttgctgtttgctcacagagcctccagtggtatactgagttggtcacgaccctcattccttcggcctccaacatctccccttttgtttttgcattaattgaataaaggtaatttcaggctg

SEQ ID NO: 373082 - DNA, 1135 bp, Homo sapiens
tagtcagcctctcactctctacccgctgggcggtaccccgcatctcgctctggccgccccagaggttcgcggcttctggacctgctgtgcccctctccagcctggatcaggacggagaacacccccgaaacccacctcaccagcacagccggcggacccttccggaggtggccgcagagactagccaacttgcgcgcccgccgacccggaccacagctcccagcacacctcaagggcccacgcccgccaggactacaattcccggcgtcctccggaagctcaagtgtacccaggcgcggtgcctgctgggaattgtagttgacgttggtcagcacggaggccacaggatcccagcccggcctttgtgggactgaggtggcgctgagtgggagagcagcaggcgatgcgcgaaaggcgggacttggaggttctggatgttcctgtggataacctcaaggagcacgggacctgggacatgactgcccccagcattccttctggcggcagacagagtttgtcagttcgccaacatcctgctttcatgagaacagtttgctgtttgctcacagagcctccagtggtatactgagttggtcacgaccctcattccttcggcctccaacatctccccttttgtttttgcattaattgaataaaggtaatttcaggctggacgtcactgaggtaagggcgggttaaagcctgtcctataccaagcaagttgtgcagccaactgggggactgaatcccagtgtgatgtgatgaagaggtgttgaaggtccaccaccagtgccagtgaagtttgtgccaagagattccgctggctcatggctcgtactggaggtaacaggcccacggttgaataccatggatccctccggtctcccgttccatggtcacacacacctggagggcacccacacggtttgtccatctcctgtaaaaacacaagcataccctcgtccccacgtcagcaaatccaccggacctttccattgtccttcttctggggatttccataacacttttggataaacttgcctcttttcctctagcagttgccagtgtcgttctgctggggtcttgccatccgtaccaggagtcaaacaatttaaagtaaacaaggctaaatgta

SEQ ID NO: 373083 - DNA, 1164 bp, Homo sapiens
  misc_feature (778)..(778): n is a, c, g, or t
tagtcagcctctcactctctacccgctgggcggtaccccgcatctcgctctggccgccccagaggttcgcggcttctggacctgctgtgcccctctccagcctggatcaggacggagaacacccccgaaacccacctcaccagcacagccggcggacccttccggaggtggccgcagagactagccaacttgcgcgcccgccgacccggaccacagctcccagcacacctcaagggcccacgcccgccaggactacaattcccggcgtcctccggaagctcaagtgtacccaggcgcggtgcctgctgggaattgtagttgacgttggtcagcacggaggccacaggatcccagcccggcctttgtgggactgaggtggcgctgagtgggagagcagcaggcgatgcgcgaaaggcgggacttggagataaatactgagcacccacaacaggcagccagcaccactgcagattggatactgcaatgatgataagcatggcctgcctttatggaggttctggatgttcctgtggataacctcaaggagcacgggacctgggacatgactgcccccagcattccttctggcggcagacagagtttgtcagttcgccaacatcctgctttcatgagaacagtttgctgtttgctcacagagcctccagtggtatactgagttggtcacgaccctcattccttcggcctccaacatctccccttttgtttttgcattaattgaataaaggtaatttcaggctgaaaaaaaaaaaaaaaaaanaaaaaaaaaaaaaaaggggggggccctttttttttttttgttttttagtaaaaaaaagttttttttgtgggcccggcaaaacacttttttggggcggggaaaacgtttacaatcgacatttttcggggaaaatatattctgcccgacaccacccgcttcttttttctgaggggggaacaagcccccacgcgtggtataacggcgatgcacacggcggcacaaaactatcctaaggtcatcagagacaatcgtcgggcccgggggaacacacgatgcacccctcgggagaacaacagaaaggtggtcctccccacaaattgtgtacaggggcgtgtgaaaacaacagcccgtcgtgggaggaatacagcgggacagataggaacaac

SEQ ID NO: 373084 - DNA, 1248 bp, Homo sapiens
  misc_feature (691)..(691): n is a, c, g, or t
tagtcagcctctcactctctacccgctgggcggtaccccgcatctcgctctggccgccccagaggttcgcggcttctggacctgctgtgcccctctccagcctggatcaggacggagaacacccccgaaacccacctcaccagcacagccggcggacccttccggaggtggccgcagagactagccaacttgcgcgcccgccgacccggaccacagctcccagcacacctcaagggcccacgcccgccaggactacaattcccggcgtcctccggaagctcaagtgtacccaggcgcggtgcctgctgggaattgtagttgacgttggtcagcacggaggccacaggatcccagcccggcctttgtgggactgaggtggcgctgagtgggagagcagcaggcgatgcgcgaaaggcgggacttggaggttctggatgttcctgtggataacctcaaggagcacgggacctgggacatgactgcccccagcattccttctggcggcagacagagtttgtcagttcgccaacatcctgctttcatgagaacagtttgctgtttgctcacagagcctccagtggtatactgagttggtcacgaccctcattccttcggcctccaacatctccccttttgtttttgcattaattgaataaaggtaatttcaggctgaaaaaaaaaaaaaaaaaanaaaaaaaaaaaaaagaaagaaaaaacaaaacaaaaaaaaaaaaaaaaacaaagaggggggcgcgcgccgccaaaaaatatacacccccgccgggggcggccccaaatagcgcgcgaccaccgcaggacgtggtgtgaaaaagaaggggcccccaaattaggagggcgtgtcatataaaacacacagacgacggggacggagagtataaacaagagggataacgggggaaaaaataggacacacgacgacgagcaacttgatgaagagagaaaccacatcacatatcggagagcgggggggagcaacaatctggcggggagccaacacaactctccaccacaacagcgaagatacacacccccaccaaagggggggacaaacaacacaaacacggccagcgagcgggaacataaggagggcggcacaaccacaggccgacaacaactccgcccccccggcgccaaaaaaaaaaggggtgcccaccagaggggacgctgcaccccatcacgcaccgaaattatatcaaccagcggggaacgaacaaaaaaaacacgcgg

SEQ ID NO: 373085 - DNA, 1476 bp, Homo sapiens
tagtcagcctctcactctctacccgctgggcggtaccccgcatctcgctctggccgccccagaggttcgcggcttctggacctgctgtgcccctctccagcctggatcaggacggagaacacccccgaaacccacctcaccagcacagccggcggacccttccggaggtggccgcagagactagccaacttgcgcgcccgccgacccggaccacagctcccagcacacctcaagggcccacgcccgccaggactacaattcccggcgtcctccggaagctcaagtgtacccaggcgcggtgcctgctgggaattgtagttgacgttggtcagcacggaggccacaggatcccagcccggcctttgtgggactgaggtggcgctgagtgggagagcagcaggcgatgcgcgaaaggcgggacttggagataaatactgagcacccacaacaggcagccagcaccactgcagattggatactgcaatgatgataagcatggcctgcctttatggagttcaaggcatgtggtgatcatgctgcctaagagtatctttgtttacctgaggaccttgggccatgccaagtatttgtcaacaatgtgatttatggttctggatgttcctgtggataacctcaaggagcacgggacctgggacatgactgcccccagcattccttctggcggcagacagagtttgtcagttcgccaacatcctgctttcatgagaacagtttgctgtttgctcacagagcctccagtggtatactgagttggtcacgaccctcattccttcggcctccaacatctccccttttgtttttgcattaattgaataaaggtaatttcaggctggacgtcactgaggtaagggcgggttaaagcctgtcctataccaagcaagttgtgcagccaactgggggactgaatcccagtgtgatgtgatgaagaggtgttgaaggtccaccaccagtgccagtgaagtttgtgccaagaggtctgattttcatctctcccctctaaatggccacggggaccccagtcaatgtttcccattaacatagactgttgtctggccaaggggccaagacactgagtccaaggaggggggtgagaaatatcaaagggagcccattccatataatccatacaatttgagtgatggggctgggagtgattggtgaacacgccagtaacattaataaagctgaggcctaataaatacataatttttccatggtgacttaaccatgcctgagattggactgcaagacagctgcagttgagtgacgtatcctcatggtgatatcataaagggagtccttccaatgggccggtgtaattgatgctattgctctgtgtcagacggagttaggggtcctggtgcccacgctccctgatcataatatatctcaggaggagtgtcgctccagagtaccagtcgtactaccagtgggttaggaacatatgcccaatat

SEQ ID NO: 373086 - DNA, 853 bp, Homo sapiens
tagtcagcctctcactctctacccgctgggcggtaccccgcatctcgctctggccgccccagaggttcgcggcttctggacctgctgtgcccctctccagcctggatcaggacggagaacacccccgaaacccacctcaccagcacagccggcggacccttccggaggtggccgcagagactagccaacttgcgcgcccgccgacccggaccacagctcccagcacacctcaagggcccacgcccgccaggactacaattcccggcgtcctccggaagctcaagtgtacccaggcgcggtgcctgctgggaattgtagttgacgttggtcagcacggaggccacaggatcccagcccggcctttgtgggactgaggtggcgctgagtgggagagcagcaggcgatgcgcgaaaggcgggacttggagataaatactgagcacccacaacaggcagccagcaccactgcagattggatactgcaatgatgataagcatggcctgcctttatggagttcaaggcatgtggtgatcatgctgcctaagagtatctttgtttacctgaggaccttgggccatgccaagtatttgtcaacaatgtgatttatggttctggatgttcctgtggataacctcaaggagcacgggacctgggacatgactgcccccagcattccttctggcggcagacagagtttgtcagttcgccaacatcctgctttcatgagaacagtttgctgtttgctcacagagcctccagtggtatactgagttggtcacgaccctcattccttcggcctccaacatctccccttttgtttttgcattaattgaataaaggtaatttcaggctg

SEQ ID NO: 373087 - DNA, 672 bp, Homo sapiens
tagtcagcctctcactctctacccgctgggcggtaccccgcatctcgctctggccgccccagaggttcgcggcttctggacctgctgtgcccctctccagcctggatcaggacggagaacacccccgaaacccacctcaccagcacagccggcggacccttccggaggtggccgcagagactagccaacttgcgcgcccgccgacccggaccacagctcccagcacacctcaagggcccacgcccgccaggactacaattcccggcgtcctccggaagctcaagtgtacccaggcgcggtgcctgctgggaattgtagttgacgttggtcagcacggaggccacaggatcccagcccggcctttgtgggactgaggtggcgctgagtgggagagcagcaggcgatgcgcgaaaggcgggacttggaggttctggatgttcctgtggataacctcaaggagcacgggacctgggacatgactgcccccagcattccttctggcggcagacagagtttgtcagttcgccaacatcctgctttcatgagaacagtttgctgtttgctcacagagcctccagtggtatactgagttggtcacgaccctcattccttcggcctccaacatctccccttttgtttttgcattaattgaataaaggtaatttcaggctg

SEQ ID NO: 373088 - DNA, 1295 bp, Homo sapiens
tagtcagcctctcactctctacccgctgggcggtaccccgcatctcgctctggccgccccagaggttcgcggcttctggacctgctgtgcccctctccagcctggatcaggacggagaacacccccgaaacccacctcaccagcacagccggcggacccttccggaggtggccgcagagactagccaacttgcgcgcccgccgacccggaccacagctcccagcacacctcaagggcccacgcccgccaggactacaattcccggcgtcctccggaagctcaagtgtacccaggcgcggtgcctgctgggaattgtagttgacgttggtcagcacggaggccacaggatcccagcccggcctttgtgggactgaggtggcgctgagtgggagagcagcaggcgatgcgcgaaaggcgggacttggaggttctggatgttcctgtggataacctcaaggagcacgggacctgggacatgactgcccccagcattccttctggcggcagacagagtttgtcagttcgccaacatcctgctttcatgagaacagtttgctgtttgctcacagagcctccagtggtatactgagttggtcacgaccctcattccttcggcctccaacatctccccttttgtttttgcattaattgaataaaggtaatttcaggctggacgtcactgaggtaagggcgggttaaagcctgtcctataccaagcaagttgtgcagccaactgggggactgaatcccagtgtgatgtgatgaagaggtgttgaaggtccaccaccagtgccagtgaagtttgtgccaagaggtctgattttcatctctcccctctaaatggccacggggaccccagtcaatgtttcccattaacatagactgttgtctggccaaggggccaagacactgagtccaaggaggggggtgagaaatatcaaagggagcccattccatataatccatacaatttgagtgatggggctgggagtgattggtgaacacgccagtaacattaataaagctgaggcctaataaatacataatttttccatggtgacttaaccatgcctgagattggactgcaagacagctgcagttgagtgacgtatcctcatggtgatatcataaagggagtccttccaatgggccggtgtaattgatgctattgctctgtgtcagacggagttaggggtcctggtgcccacgctccctgatcataatatatctcaggaggagtgtcgctccagagtaccagtcgtactaccagtgggttaggaacatatgcccaatat

SEQ ID NO: 373089 - DNA, 1485 bp, Homo sapiens
tagtcagcctctcactctctacccgctgggcggtaccccgcatctcgctctggccgccccagaggttcgcggcttctggacctgctgtgcccctctccagcctggatcaggacggagaacacccccgaaacccacctcaccagcacagccggcggacccttccggaggtggccgcagagactagccaacttgcgcgcccgccgacccggaccacagctcccagcacacctcaagggcccacgcccgccaggactacaattcccggcgtcctccggaagctcaagtgtacccaggcgcggtgcctgctgggaattgtagttgacgttggtcagcacggaggccacaggatcccagcccggcctttgtgggactgaggtggcgctgagtgggagagcagcaggcgatgcgcgaaaggcgggacttggagataaatactgagcacccacaacaggcagccagcaccactgcagattggatactgcaatgatgataagcatggcctgcctttatggaggtgatgttattgtgtggggaggcagatggtaaacaaagaagtcatttttctgagaagttggtatttaagctgaggcctgaatagagcgaagaactcagggagagttctggatgttcctgtggataacctcaaggagcacgggacctgggacatgactgcccccagcattccttctggcggcagacagagtttgtcagttcgccaacatcctgctttcatgagaacagtttgctgtttgctcacagagcctccagtggtatactgagttggtcacgaccctcattccttcggcctccaacatctccccttttgtttttgcattaattgaataaaggtaatttcaggctggacgtcactgaggtaagggcgggttaaagcctgtcctataccaagcaagttgtgcagccaactgggggactgaatcccagtgtgatgtgatgaagaggtgttgaaggtccaccaccagtgccagtgaagtttgtgccaagaggtctgattttcatctctcccctctaaatggccacggggaccccagtcaatgtttcccattaacatagactgttgtctggccaaggggccaagacactgagtccaaggaggggggtgagaaatatcaaagggagcccattccatataatccatacaatttgagtgatggggctgggagtgattggtgaacacgccagtaacattaataaagctgaggcctaataaatacataatttttccatggtgacttaaccatgcctgagattggactgcaagacagctgcagttgagtgacgtatcctcatggtgatatcataaagggagtccttccaatgggccggtgtaattgatgctattgctctgtgtcagacggagttaggggtcctggtgcccacgctccctgatcataatatatctcaggaggagtgtcgctccagagtaccagtcgtactaccagtgggttaggaacatatgcccaatat

SEQ ID NO: 373090 - DNA, 892 bp, Homo sapiens
tagtcagcctctcactctctacccgctgggcggtaccccgcatctcgctctggccgccccagaggttcgcggcttctggacctgctgtgcccctctccagcctggatcaggacggagaacacccccgaaacccacctcaccagcacagccggcggacccttccggaggtggccgcagagactagccaacttgcgcgcccgccgacccggaccacagctcccagcacacctcaagggcccacgcccgccaggactacaattcccggcgtcctccggaagctcaagtgtacccaggcgcggtgcctgctgggaattgtagttgacgttggtcagcacggaggccacaggatcccagcccggcctttgtgggactgaggtggcgctgagtgggagagcagcaggcgatgcgcgaaaggcgggacttggagataaatactgagcacccacaacaggcagccagcaccactgcagattggatactgcaatgatgataagcatggcctgcctttatggagaaagccaacaaaatcatttgtgaccctggtttctttcagttcaaggcatgtggtgatcatgctgcctaagagtatctttgtttacctgaggaccttgggccatgccaagtatttgtcaacaatgtgatttatggttctggatgttcctgtggataacctcaaggagcacgggacctgggacatgactgcccccagcattccttctggcggcagacagagtttgtcagttcgccaacatcctgctttcatgagaacagtttgctgtttgctcacagagcctccagtggtatactgagttggtcacgaccctcattccttcggcctccaacatctccccttttgtttttgcattaattgaataaaggtaatttcaggctg

SEQ ID NO: 373091 - DNA, 371 bp, Homo sapiens
gctctgtctcaaaaaaaaaaaaaaaaagtagttagttaatgcaaaaagctcctatcttctagactgttagaatttgatggggttgggccgagcgcggtggctcatgcctataatcccagcactttgggaggccaaggtgggcggatcatgaggtcaggagatagaggccatcctggctaatatggtgaaaccccatctctactaaaactacaaaaaattagccagatgtggtggcacatgcctgtagtcccagctgctcgggaggctgaggcaggagaatcgcttgaacccgggaggcagaggttgcagtgagctgagattgcaccagtgcacaccagcctggtgacagagcgagactccatctcaaaaaa

SEQ ID NO: 373092 - DNA, 1002 bp, Homo sapiens
aacagtggtatcaacgcagagtgcccattacggccggggacttctaaatgcttggggaaaccaagacatagtagaaaggagtgtgcaattatcatttcccatgatgccgttacttaagaactctttgtgtccgtccttctaatggcaccaatgcctcccatcaagccttaaacctcacctaaattatgtcattgggctttttcatccataaatgagcataccaggtgccaagggaatcaatatgccctttcacatgccttagaccagtgtccaaagaaagataaaatgttattctataaaagctttctcccagcatttctattcctttacattttgtgccatatacaactatggttttttaatgatcttatttctgacagctgtttttcttcagaacatcaacagcttctttcctaaattagttttagtatgagttccatttctaattagctcaaattaaagtcctagagagcagcgaggtaatatttaaaccctcaggctaaatttcggagtaggtgcagaatgttgactctaaatgagtttttcctgtgacataacacgcatgaaaccaggatttctttcatgtgtgaaatgtcttaaatcagacttaccctttgtgattctcttttagctttaaatgtcatttaagaagaaaaaagaaaagaaaattaagcatgacattccccaatatcctctgctcactgtgttataatccctatcactccacaagtgaattggagagagtgaagacacaatgaacagaaacttccctgatgcttcacagaggaagtgttctccgggaccacacagcctccaccatgtccatctacgaagggctgtggcaagccatatacacaaagatgcctgtttcctgtcttcttggttaaaaacaaaaacaaaacactggaaggaaccccaaagccaagctgccatgggttgcagagtgccagcccttaagtagtgttgttcatgggtaaacaggagacggataagggcaatttc

SEQ ID NO: 373093 - DNA, 429 bp, Homo sapiens
tctcattagattaaaaacacatgttgaatctccacactgtagataagccaatttttcctaagctgttaaaggaaaaagtggggttcttgtgggcttgggagaagcacctgctttgaattaagctgtgtttgtattaaccactgtcaatttaacaagggtttgctctgtgtgctttgagcaatttgagggagaagtccctagatgcttatcaagtattactgtcattactatagttcactgtttcattacattatagtaatactgatggctgtcaattgttttgaaatgcttttttctgtattctatttaatttactgagatatggagaaaatcgtcgaaggaattagtgtatctgggtcaacaatttggctgaccaatcactagacttcttttggcttcatactgagaaataaaaatctctaacccata

SEQ ID NO: 373094 - DNA, 882 bp, Homo sapiens
  misc_feature (29)..(29): n is a, c, g, or t
gtagcagtaggagctggtgttaattcggncgagctccgctggcttcttggacaattgcgccatgtgtgctgctcggctagcggcggcggcggcggcccagtcggtgtatgccttctcggcgcgcccgctggccggcggggagcctgtgagcctgggctccctgcggggcaaggtactacttatcgagaatgtggcgtccctctgaggcaccacggtccgggactacacccagatgaacgagctgcagcggcgcctcggaccccggggcctggtggtgctcggcttcccgtgcaaccagtttgggcatcaggagaacgccaagaacgaagagattctgaattccctcaagtacgtccggcctggtggtgggttcgagcccaacttcatgctcttcgagaagtgcgaggtgaacggtgcgggggcgcaccctctcttcgccttcctgcgggaggccctgccagctcccagcgacgacgccaccgcgcttatgaccgaccccaagctcatcacctggtctccggtgtgtcgcaacgatgttgcctggaactttgagaagttcctggtgggccctgacggtgtgcccctacgcaggtacagccgccgcttccagaccattgacatcgagcctgacatcgaagccctgctgtctcaagggcccagctgtgcctagggcgcccctcctaccccggctgcttggcagttgcagtgctgctgtctcgggggggttttcatctatgagggtgtttcctctaaacctacgagggaggaacacctgatcttacagaaaataccacctcgagatgggtgctggtcctgttgatcccagtctctgccagaccaaggcgagtttccccactaataaagtgccgggtgtcagcagaa

SEQ ID NO: 373095 - DNA, 438 bp, Homo sapiens
atttcttgaggatccccgaacggccctaataaccaccgcgcttatgaccgaccccaagctcatcacctggtctccggtgtgtcgcaacgatgttgcctggaactttgagaagttcctggtgggccctgacggtgtgcccctacgcaggtacagccgccgcttccagaccattgacatcgagcctgacatcgaagccctgctgtctcaagggcccagctgtgcctagggcgcccctcctaccccggctgcttggcagttgcagtgctgctgtctcgggggggttttcatctatgagggtgtttcctctaaacctacgagggaggaacacctgatcttacagaaaataccacctcgagatgggtgctggtcctgttgatcccagtctctgccagaccaaggcgagtttccccactaataaagtgccgggtgtcagcagaa

SEQ ID NO: 373096 - DNA, 844 bp, Homo sapiens
gacgaccggaaacaaaagtcatgatgaagaagggaacctggcttggcggagaacgccaagaacgaagagattctgaattccctcaagtacgtccggcctggtggtgggttcgagcccaacttcatgctcttcgagaagtgcgaggtgaacggtgcgggggcgcaccctctcttcgccttcctgcgggaggccctgccagctcccagcgacgacgccaccgcgcttatgaccgaccccaagctcatcacctggtctccggtgtgtcgcaacgatgttgcctggaactttgagaagttcctggtgggccctgacggtgtgcccctacgcaggtacagccgccgcttccagaccattgacatcgagcctgacatcgaagccctgctgtctcaagggcccagctgtgcctagggcgcccctcctaccccggctgcttggcagttgcagtgctgctgtctcgggggggttttcatctatgagggtgtttcctctaaacctacgagggaggaacacctgatcttacagaaaataccacctcgagatgggtgctggtcctgttgatcccagtctctgccagaccaaggcgagtttccccactaataaagtgccgggtgtcagcagaaaaaaaaaaataaaaatggcctcttcggcctgacggtggagctggggggcactagcctttaggagggcaatcagttgtgctgagctacttactatctggtaggactgttagatgaggtagcgggttagcggactcaaaggtcgaatacggtgtgcccgaataggggataccgcgcaataaccttggtgcccaggctacatatggcttaacctagtaaggcctttt

SEQ ID NO: 373097 - DNA, 880 bp, Homo sapiens
tagtaaggccggtgttaatcggcgagggacgctccgctggcttcttggacaattgcgccatgtgtgctgctcggctagcggcggcggcggcggcccagtcggtgtatgccttctcggcgcgcccgctggccggcggggagcctgtgagcctgggctccctgcggggcaaggtactacttatcgagaatgtggcgtccctctgaggcaccacggtccgggactacacccagatgaacgagctgcagcggcgcctcggaccccggggcctggtggtgctcggcttcccgtgcaaccagtttgggcatcaggagaacgccaagaacgaagagattctgaattccctcaagtacgtccggcctggtggtgggttcgagcccaacttcatgctcttcgagaagtgcgaggtgaacggtgcgggggcgcaccctctcttcgccttcctgcgggaggccctgccagctcccagcgacgacgccaccgcgcttatgaccgaccccaagctcatcacctggtctccggtgtgtcgcaacgatgttgcctggaactttgagaagttcctggtgggccctgacggtgtgcccctacgcaggtacagccgccgcttccagaccattgacatcgagcctgacatcgaagccctgctgtctcaagggcccagctgtgcctagggcgcccctcctaccccggctgcttggcagttgcagtgctgctgtctcgggggggttttcatctatgagggtgtttcctctaaacctacgagggaggaacacctgatcttacagaaaataccacctcgagatgggtgctggtcctgttgatcccagtctctgccagaccaaggcgagtttccccactaataaagtgccgggtgtcagcagaa

SEQ ID NO: 373098 - DNA, 915 bp, Homo sapiens
gcttcccccccgcccacgccccccccccactgcattgtatgcccagtgggtttttatcggcacgagctccgctggcttcttggacaattgcgccatgtgtgctgctcggctagcggcggcggcggcggcccagtcggtgtatgccttctcggcgcgcccgctggccggcggggagcctgtgagcctgggctccctgcggggcaaggtactacttatcgagaatgtggcgtccctctgaggcaccacggtccgggactacacccagatgaacgagctgcagcggcgcctcggaccccggggcctggtggtgctcggcttcccgtgcaaccagtttgggcatcaggagaacgccaagaacgaagagattctgaattccctcaagtacgtccggcctggtggtgggttcgagcccaacttcatgctcttcgagaagtgcgaggtgaacggtgcgggggcgcaccctctcttcgccttcctgcgggaggccctgccagctcccagcgacgacgccaccgcgcttatgaccgaccccaagctcatcacctggtctccggtgtgtcgcaacgatgttgcctggaactttgagaagttcctggtgggccctgacggtgtgcccctacgcaggtacagccgccgcttccagaccattgacatcgagcctgacatcgaagccctgctgtctcaagggcccagctgtgcctagggcgcccctcctaccccggctgcttggcagttgcagtgctgctgtctcgggggggttttcatctatgagggtgtttcctctaaacctacgagggaggaacacctgatcttacagaaaataccacctcgagatgggtgctggtcctgttgatcccagtctctgccagaccaaggcgagtttccccactaataaagtgccgggtgtcagcagaa

SEQ ID NO: 373099 - DNA, 898 bp, Homo sapiens
  misc_feature (17)..(17): n is a, c, g, or t
ccatgctggtacggccncgcgtattggctatcgtcgaccaggcgctcggctccgctggcttcttggacaattgcgccatgtgtgctgctcggctagcggcggcggcggcggcccagtcggtgtatgccttctcggcgcgcccgctggccggcggggagcctgtgagcctgggctccctgcggggcaaggtactacttatcgagaatgtggcgtccctctgaggcaccacggtccgggactacacccagatgaacgagctgcagcggcgcctcggaccccggggcctggtggtgctcggcttcccgtgcaaccagtttgggcatcaggagaacgccaagaacgaagagattctgaattccctcaagtacgtccggcctggtggtgggttcgagcccaacttcatgctcttcgagaagtgcgaggtgaacggtgcgggggcgcaccctctcttcgccttcctgcgggaggccctgccagctcccagcgacgacgccaccgcgcttatgaccgaccccaagctcatcacctggtctccggtgtgtcgcaacgatgttgcctggaactttgagaagttcctggtgggccctgacggtgtgcccctacgcaggtacagccgccgcttccagaccattgacatcgagcctgacatcgaagccctgctgtctcaagggcccagctgtgcctagggcgcccctcctaccccggctgcttggcagttgcagtgctgctgtctcgggggggttttcatctatgagggtgtttcctctaaacctacgagggaggaacacctgatcttacagaaaataccacctcgagatgggtgctggtcctgttgatcccagtctctgccagaccaaggcgagtttccccactaataaagtgccgggtgtcagcagaa

SEQ ID NO: 373100 - DNA, 929 bp, Homo sapiens
gtggtattttctgtaagatcaggtgttcctccctcgtaggtttagaggaaacaccctcatagatgaaaacccccccgacgctccgctggcttcttggacaattgcgccatgtgtgctgctcggctagcggcggcggcggcggcccagtcggtgtatgccttctcggcgcgcccgctggccggcggggagcctgtgagcctgggctccctgcggggcaaggtactacttatcgagaatgtggcgtccctctgaggcaccacggtccgggactacacccagatgaacgagctgcagcggcgcctcggaccccggggcctggtggtgctcggcttcccgtgcaaccagtttgggcatcaggagaacgccaagaacgaagagattctgaattccctcaagtacgtccggcctggtggtgggttcgagcccaacttcatgctcttcgagaagtgcgaggtgaacggtgcgggggcgcaccctctcttcgccttcctgcgggaggccctgccagctcccagcgacgacgccaccgcgcttatgaccgaccccaagctcatcacctggtctccggtgtgtcgcaacgatgttgcctggaactttgagaagttcctggtgggccctgacggtgtgcccctacgcaggtacagccgccgcttccagaccattgacatcgagcctgacatcgaagccctgctgtctcaagggcccagctgtgcctagggcgcccctcctaccccggctgcttggcagttgcagtgctgctgtctcgggggggttttcatctatgagggtgtttcctctaaacctacgagggaggaacacctgatcttacagaaaataccacctcgagatgggtgctggtcctgttgatcccagtctctgccagaccaaggcgagtttccccactaataaagtgccgggtgtcagcagaa

SEQ ID NO: 373101 - DNA, 1196 bp, Homo sapiens
cgacccctcgaggggcccagccttggaagggtaactggaccgctgccgcctggttgcctgggccagaccagacatgcctgctgctccttccggcttaggaggagcacgcgtcccgctcgggcgcactctccagccttttcctggctgaggaggggccgagcctccggtagggcgggggccggatgaggcgggacctcaggcccggaaaactgcctgtgccacgtgacccgccgccggccagttaaaaggaggcgcctgctggcctccccttacagtgcttgttcggggcgctccgctggcttcttggacaattgcgccatgtgtgctgctcggctagcggcggcggcggcggcccagtcggtgtatgccttctcggcgcgcccgctggccggcggggagcctgtgagcctgggctccctgcggggcaaggtactacttatcgagaatgtggcgtccctctgaggcaccacggtccgggactacacccagatgaacgagctgcagcggcgcctcggaccccggggcctggtggtgctcggcttcccgtgcaaccagtttgggcatcaggagaacgccaagaacgaagagattctgaattccctcaagtacgtccggcctggtggtgggttcgagcccaacttcatgctcttcgagaagtgcgaggtgaacggtgcgggggcgcaccctctcttcgccttcctgcgggaggccctgccagctcccagcgacgacgccaccgcgcttatgaccgaccccaagctcatcacctggtctccggtgtgtcgcaacgatgttgcctggaactttgagaagttcctggtgggccctgacggtgtgcccctacgcaggtacagccgccgcttccagaccattgacatcgagcctgacatcgaagccctgctgtctcaagggcccagctgtgcctagggcgcccctcctaccccggctgcttggcagttgcagtgctgctgtctcgggggggttttcatctatgagggtgtttcctctaaacctacgagggaggaacacctgatcttacagaaaataccacctcgagatgggtgctggtcctgttgatcccagtctctgccagaccaaggcgagtttccccactaataaagtgccgggtgtcagcagaaaaaaaaacaaaaatgggccctcttgggccttaacgggggaagctcctgccgcccgct

SEQ ID NO: 373102 - DNA, 1878 bp, Homo sapiens
  misc_feature (1218)..(1218): n is a, c, g, or t
  misc_feature (1221)..(1221): n is a, c, g, or t
  misc_feature (1232)..(1232): n is a, c, g, or t
  misc_feature (1236)..(1236): n is a, c, g, or t
cgacccctcgaggggcccagccttggaagggtaactggaccgctgccgcctggttgcctgggccagaccagacatgcctgctgctccttccggcttaggaggagcacgcgtcccgctcgggcgcactctccagccttttcctggctgaggaggggccgagcctccggtagggcgggggccggatgaggcgggacctcaggcccggaaaactgcctgtgccacgtgacccgccgccggccagttaaaaggaggcgcctgctggcctccccttacagtgcttgttcggggcgctccgctggcttcttggacaattgcgccatgtgtgctgctcggctagcggcggcggcggcggcccagtcggtgtatgccttctcggcgcgcccgctggccggcggggagcctgtgagcctgggctccctgcggggcaaggtactacttatcgagaatgtggcgtccctctgaggcaccacggtccgggactacacccagatgaacgagctgcagcggcgcctcggaccccggggcctggtggtgctcggcttcccgtgcaaccagtttgggcatcaggagaacgccaagaacgaagagattctgaattccctcaagtacgtccggcctggtggtgggttcgagcccaacttcatgctcttcgagaagtgcgaggtgaacggtgcgggggcgcaccctctcttcgccttcctgcgggaggccctgccagctcccagcgacgacgccaccgcgcttatgaccgaccccaagctcatcacctggtctccggtgtgtcgcaacgatgttgcctggaactttgagaagttcctggtgggccctgacggtgtgcccctacgcaggtacagccgccgcttccagaccattgacatcgagcctgacatcgaagccctgctgtctcaagggcccagctgtgcctagggcgcccctcctaccccggctgcttggcagttgcagtgctgctgtctcgggggggttttcatctatgagggtgtttcctctaaacctacgagggaggaacacctgatcttacagaaaataccacctcgagatgggtgctggtcctgttgatcccagtctctgccagaccaaggcgagtttccccactaataaagtgccgggtgtcagcagaaaaaaaaaaaaaaaaaaaaaaaaaaaaaaaaaaaaaaaaaaaaaaaaaaaaaaaaaaaaaaaaaaaaaaaaaaaaaaaanaanaaaaaaaaaanaaanaaaaaaaggggggggggcgcaaaaacccccgcggtggcggcgaccgcacttacgtgccggctcaccctacgatacttattggtgcaagaagagcggcgcgaccaccacaactgagagcggcaatcatataaaaacagcagcaaagcgcggcgcgacaaaaaaaacaacgctgctggggtgagggaaaaacacgccgaaccgataggatcacttattggaggacgacacacaccacccttaggggtggcggaggcaacagtgagggacacacaaacgactgacaagttatatccccatcgggagacacacaaacacacccgcaacgccggtgatgccagggtacatccaacaagcagcacgaacttacggcgacgggcagcaaaacccgagccgcgcacgcgagaggaacgtcgcacagagcacacacccatacccgcgggggccgactcgtaaatatacaatagtgccaacgaccctacccacaaaccaacacgaacgcgacacgcactacgggaacaagcaaccaccggaccccaacgagaacgagaacacaagacgccgaaaccacacaccaagtcacacaagaaagacgactaacgtacacagaaagcagacgaaccgacaactaacagacaagacaca

SEQ ID NO: 373103 - DNA, 1494 bp, Homo sapiens
  misc_feature (1218)..(1218): n is a, c, g, or t
  misc_feature (1221)..(1221): n is a, c, g, or t
  misc_feature (1232)..(1232): n is a, c, g, or t
  misc_feature (1236)..(1236): n is a, c, g, or t
cgacccctcgaggggcccagccttggaagggtaactggaccgctgccgcctggttgcctgggccagaccagacatgcctgctgctccttccggcttaggaggagcacgcgtcccgctcgggcgcactctccagccttttcctggctgaggaggggccgagcctccggtagggcgggggccggatgaggcgggacctcaggcccggaaaactgcctgtgccacgtgacccgccgccggccagttaaaaggaggcgcctgctggcctccccttacagtgcttgttcggggcgctccgctggcttcttggacaattgcgccatgtgtgctgctcggctagcggcggcggcggcggcccagtcggtgtatgccttctcggcgcgcccgctggccggcggggagcctgtgagcctgggctccctgcggggcaaggtactacttatcgagaatgtggcgtccctctgaggcaccacggtccgggactacacccagatgaacgagctgcagcggcgcctcggaccccggggcctggtggtgctcggcttcccgtgcaaccagtttgggcatcaggagaacgccaagaacgaagagattctgaattccctcaagtacgtccggcctggtggtgggttcgagcccaacttcatgctcttcgagaagtgcgaggtgaacggtgcgggggcgcaccctctcttcgccttcctgcgggaggccctgccagctcccagcgacgacgccaccgcgcttatgaccgaccccaagctcatcacctggtctccggtgtgtcgcaacgatgttgcctggaactttgagaagttcctggtgggccctgacggtgtgcccctacgcaggtacagccgccgcttccagaccattgacatcgagcctgacatcgaagccctgctgtctcaagggcccagctgtgcctagggcgcccctcctaccccggctgcttggcagttgcagtgctgctgtctcgggggggttttcatctatgagggtgtttcctctaaacctacgagggaggaacacctgatcttacagaaaataccacctcgagatgggtgctggtcctgttgatcccagtctctgccagaccaaggcgagtttccccactaataaagtgccgggtgtcagcagaaaaaaaaaaaaaaaaaaaaaaaaaaaaaaaaaaaaaaaaaaaaaaaaaaaaaaaaaaaaaaaaaaaaaaaaaaaaaaaanaanaaaaaaaaaanaaanaaaaaaaaataaaaatgaggaaaattatcaatatacaaaaaaaaaaaaaacttggggccggtttgggccatttgattttaaaatttggaaagtttattttcgcggccccattttgggctaatttggccaaatccccccttaggggggcggttaacaaattatggggccgggttttaaaaccgctggatgtgaaaaaccctgggtgtccccatttaaatcgtttgtaaaaataccctcttcgcaagtggggtaaaaacc

SEQ ID NO: 373104 - DNA, 1246 bp, Homo sapiens
cgacccctcgaggggcccagccttggaagggtaactggaccgctgccgcctggttgcctgggccagaccagacatgcctgctgctccttccggcttaggaggagcacgcgtcccgctcgggcgcactctccagccttttcctggctgaggaggggccgagcctccggtagggcgggggccggatgaggcgggacctcaggcccggaaaactgcctgtgccacgtgacccgccgccggccagttaaaaggaggcgcctgctggcctccccttacagtgcttgttcggggcgctccgctggcttcttggacaattgcgccatgtgtgctgctcggctagcggcggcggcggcggcccagtcggtgtatgccttctcggcgcgcccgctggccggcggggagcctgtgagcctgggctccctgcggggcaaggtactacttatcgagaatgtggcgtccctctgaggcaccacggtccgggactacacccagatgaacgagctgcagcggcgcctcggaccccggggcctggtggtgctcggcttcccgtgcaaccagtttgggcatcaggagaacgccaagaacgaagagattctgaattccctcaagtacgtccggcctggtggtgggttcgagcccaacttcatgctcttcgagaagtgcgaggtgaacggtgcgggggcgcaccctctcttcgccttcctgcgggaggccctgccagctcccagcgacgacgccaccgcgcttatgaccgaccccaagctcatcacctggtctccggtgtgtcgcaacgatgttgcctggaactttgagaagttcctggtgggccctgacggtgtgcccctacgcaggtacagccgccgcttccagaccattgacatcgagcctgacatcgaagccctgctgtctcaagggcccagctgtgcctagggcgcccctcctaccccggctgcttggcagttgcagtgctgctgtctcgggggggttttcatctatgagggtgtttcctctaaacctacgagggaggaacacctgatcttacagaaaataccacctcgagatgggtgctggtcctgttgatcccagtctctgccagaccaaggcgagtttccccactaataaagtgccgggtgtcagcagaaggtggtcgcgaaaaaagaaaatcgggcacagggggggaacaggaggaaggcgggccaggtcgccctttgccacgggaacgggcccaaggggatgacgcgaggaaaca

SEQ ID NO: 373105 - DNA, 1172 bp, Homo sapiens
cgacccctcgaggggcccagccttggaagggtaactggaccgctgccgcctggttgcctgggccagaccagacatgcctgctgctccttccggcttaggaggagcacgcgtcccgctcgggcgcactctccagccttttcctggctgaggaggggccgagcctccggtagggcgggggccggatgaggcgggacctcaggcccggaaaactgcctgtgccacgtgacccgccgccggccagttaaaaggaggcgcctgctggcctccccttacagtgcttgttcggggcgctccgctggcttcttggacaattgcgccatgtgtgctgctcggctagcggcggcggcggcggcccagtcggtgtatgccttctcggcgcgcccgctggccggcggggagcctgtgagcctgggctccctgcggggcaaggtactacttatcgagaatgtggcgtccctctgaggcaccacggtccgggactacacccagatgaacgagctgcagcggcgcctcggaccccggggcctggtggtgctcggcttcccgtgcaaccagtttgggcatcaggagaacgccaagaacgaagagattctgaattccctcaagtacgtccggcctggtggtgggttcgagcccaacttcatgctcttcgagaagtgcgaggtgaacggtgcgggggcgcaccctctcttcgccttcctgcgggaggccctgccagctcccagcgacgacgccaccgcgcttatgaccgaccccaagctcatcacctggtctccggtgtgtcgcaacgatgttgcctggaactttgagaagttcctggtgggccctgacggtgtgcccctacgcaggtacagccgccgcttccagaccattgacatcgagcctgacatcgaagccctgctgtctcaagggcccagctgtgcctagggcgcccctcctaccccggctgcttggcagttgcagtgctgctgtctcgggggggttttcatctatgagggtgtttcctctaaacctacgagggaggaacacctgatcttacagaaaataccacctcgagatgggtgctggtcctgttgatcccagtctctgccagaccaaggcgagtttccccactaataaagtgccgggtgtcagcagaaaacacacaacacggttcgacacaaaaaagaggg

SEQ ID NO: 373106 - DNA, 1659 bp, Homo sapiens
  misc_feature (1141)..(1141): n is a, c, g, or t
  misc_feature (1147)..(1147): n is a, c, g, or t
  misc_feature (1152)..(1152): n is a, c, g, or t
  misc_feature (1155)..(1155): n is a, c, g, or t
  misc_feature (1157)..(1157): n is a, c, g, or t
  misc_feature (1161)..(1161): n is a, c, g, or t
  misc_feature (1164)..(1164): n is a, c, g, or t
cgacccctcgaggggcccagccttggaagggtaactggaccgctgccgcctggttgcctgggccagaccagacatgcctgctgctccttccggcttaggaggagcacgcgtcccgctcgggcgcactctccagccttttcctggctgaggaggggccgagcctccggtagggcgggggccggatgaggcgggacctcaggcccggaaaactgcctgtgccacgtgacccgccgccggccagttaaaaggaggcgcctgctggcctccccttacagtgcttgttcggggcgctccgctggcttcttggacaattgcgccatgtgtgctgctcggctagcggcggcggcggcggcccagtcggtgtatgccttctcggcgcgcccgctggccggcggggagcctgtgagcctgggctccctgcggggcaaggtactacttatcgagaatgtggcgtccctctgaggcaccacggtccgggactacacccagatgaacgagctgcagcggcgcctcggaccccggggcctggtggtgctcggcttcccgtgcaaccagtttgggcatcaggagaacgccaagaacgaagagattctgaattccctcaagtacgtccggcctggtggtgggttcgagcccaacttcatgctcttcgagaagtgcgaggtgaacggtgcgggggcgcaccctctcttcgccttcctgcgggaggccctgccagctcccagcgacgacgccaccgcgcttatgaccgaccccaagctcatcacctggtctccggtgtgtcgcaacgatgttgcctggaactttgagaagttcctggtgggccctgacggtgtgcccctacgcaggtacagccgccgcttccagaccattgacatcgagcctgacatcgaagccctgctgtctcaagggcccagctgtgcctagggcgcccctcctaccccggctgcttggcagttgcagtgctgctgtctcgggggggttttcatctatgagggtgtttcctctaaacctacgagggaggaacacctgatcttacagaaaataccacctcgagatgggtgctggtcctgttgatcccagtctctgccagaccaaggcgagtttccccactaataaagtgccgggtgtcagcagaaanaaaaancacancananaacnacnaacaacacatcttgtttcgggccggcctaggagcctgaggagagggatgtttagaaccaattctcgttgtggtgcccgggcgccccaaggattgttacagctgaccccgtgggccaagatacgtgctagccacaagagagcaccgtgcggcagcagcactaggtcgttgccgtttcttcaccaaataaaaaaaccgcgggcgcgacacggagcgtttctggaacgacactccagatcggttccgagggcacataaagcggggctctatcacacaggggggccagcgggagcgcccgaaataaaaatcccgccgcgcgcggagagatacacgagcagaaaaaagacaaaaacaacaaaagaacaagcagacaaaagcacagcacaaggagaaaggaacaagacacaaaaagacagacacagacaagaaacgaacataaaaacagaaaaaaagaaaagacaaaaacagaaaaataacacacacccaaataaaataac

SEQ ID NO: 373107 - DNA, 1255 bp, Homo sapiens
  misc_feature (1239)..(1239): n is a, c, g, or t
cgacccctcgaggggcccagccttggaagggtaactggaccgctgccgcctggttgcctgggccagaccagacatgcctgctgctccttccggcttaggaggagcacgcgtcccgctcgggcgcactctccagccttttcctggctgaggaggggccgagcctccggtagggcgggggccggatgaggcgggacctcaggcccggaaaactgcctgtgccacgtgacccgccgccggccagttaaaaggaggcgcctgctggcctccccttacagtgcttgttcggggcgctccgctggcttcttggacaattgcgccatgtgtgctgctcggctagcggcggcggcggcggcccagtcggtgtatgccttctcggcgcgcccgctggccggcggggagcctgtgagcctgggctccctgcggggcaaggtactacttatcgagaatgtggcgtccctctgaggcaccacggtccgggactacacccagatgaacgagctgcagcggcgcctcggaccccggggcctggtggtgctcggcttcccgtgcaaccagtttgggcatcaggagaacgccaagaacgaagagattctgaattccctcaagtacgtccggcctggtggtgggttcgagcccaacttcatgctcttcgagaagtgcgaggtgaacggtgcgggggcgcaccctctcttcgccttcctgcgggaggccctgccagctcccagcgacgacgccaccgcgcttatgaccgaccccaagctcatcacctggtctccggtgtgtcgcaacgatgttgcctggaactttgagaagttcctggtgggccctgacggtgtgcccctacgcaggtacagccgccgcttccagaccattgacatcgagcctgacatcgaagccctgctgtctcaagggcccagctgtgcctagggcgcccctcctaccccggctgcttggcagttgcagtgctgctgtctcgggggggttttcatctatgagggtgtttcctctaaacctacgagggaggaacacctgatcttacagaaaataccacctcgagatgggtgctggtcctgttgatcccagtctctgccagaccaaggcgagtttccccactaataaagtgccgggtgtcagcagaatataaaaaacaaaagtaggggggccccaaggataaaaaagctgggagaagggtaatggatcgccgccacaatgtaagctctcattggccatttccccctntaaggtaaaccaattc

SEQ ID NO: 373108 - DNA, 809 bp, Homo sapiens
aggcatacaccgactgggccagcggcgcccgagaagcatacaccgactgggccgcccgtcggcggggagcctgtgagcctgggctccctgcggggcaaggtactacttatcgagaatgtggcgtccctctgaggcaccacggtccgggactacacccagatgaacgagctgcagcggcgcctcggaccccggggcctggtggtgctcggcttcccgtgcaaccagtttgggcatcaggagaacgccaagaacgaagagattctgaattccctcaagtacgtccggcctggtggtgggttcgagcccaacttcatgctcttcgagaagtgcgaggtgaacggtgcgggggcgcaccctctcttcgccttcctgcgggaggccctgccagctcccagcgacgacgccaccgcgcttatgaccgaccccaagctcatcacctggtctccggtgtgtcgcaacgatgttgcctggaactttgagaagttcctggtgggccctgacggtgtgcccctacgcaggtacagccgccgcttccagaccattgacatcgagcctgacatcgaagccctgctgtctcaagggcccagctgtgcctagggcgcccctcctaccccggctgcttggcagttgcagtgctgctgtctcgggggggttttcatctatgagggtgtttcctctaaacctacgagggaggaacacctgatcttacagaaaataccacctcgagatgggtgctggtcctgttgatcccagtctctgccagaccaaggcgagtttccccactaataaagtgccgggtgtcagcagaa

SEQ ID NO: 373109 - DNA, 1243 bp, Homo sapiens
cgacccctcgaggggcccagccttggaagggtaactggaccgctgccgcctggttgcctgggccagaccagacatgcctgctgctccttccggcttaggaggagcacgcgtcccgctcgggcgcactctccagccttttcctggctgaggaggggccgagcctccggtagggcgggggccggatgaggcgggacctcaggcccggaaaactgcctgtgccacgtgacccgccgccggccagttaaaaggaggcgcctgctggcctccccttacagtgcttgttcggggcgctccgctggcttcttggacaattgcgccatgtgtgctgctcggctagcggcggcggcggcggcccagtcggtgtatgccttctcggcgcgcccgctggccggcggggagcctgtgagcctgggctccctgcggggcaaggtactacttatcgagaatgtggcgtccctctgaggcaccacggtccgggactacacccagatgaacgagctgcagcggcgcctcggaccccggggcctggtggtgctcggcttcccgtgcaaccagtttgggcatcaggagaacgccaagaacgaagagattctgaattccctcaagtacgtccggcctggtggtgggttcgagcccaacttcatgctcttcgagaagtgcgaggtgaacggtgcgggggcgcaccctctcttcgccttcctgcgggaggccctgccagctcccagcgacgacgccaccgcgcttatgaccgaccccaagctcatcacctggtctccggtgtgtcgcaacgatgttgcctggaactttgagaagttcctggtgggccctgacggtgtgcccctacgcaggtacagccgccgcttccagaccattgacatcgagcctgacatcgaagccctgctgtctcaagggcccagctgtgcctagggcgcccctcctaccccggctgcttggcagttgcagtgctgctgtctcgggggggttttcatctatgagggtgtttcctctaaacctacgagggaggaacacctgatcttacagaaaataccacctcgagatgggtgctggtcctgttgatcccagtctctgccagacagggagttccataatatgcgggtgggaaaaaaaaaaaccgggtttgtggggcgaaggttgaggcctggatgtctgcccgttgagggaatgggccttgggtatcgacgactgttaaaaaccgagagagaagagggatggggatggagag

SEQ ID NO: 373110 - DNA, 1001 bp, Homo sapiens
cgacccctcgaggggcccagccttggaagggtaactggaccgctgccgcctggttgcctgggccagaccagacatgcctgctgctccttccggcttaggaggagcacgcgtcccgctcgggcgcactctccagccttttcctggctgaggaggggccgagcctccggtagggcgggggccggatgaggcgggacctcaggcccggaaaactgcctgtgccacgtgacccgccgccggccagttaaaaggaggcgcctgctggcctccccttacagtgcttgttcggggcgctccgctggcttcttggacaattgcgccatgtgtgctgctcggctagcggcggcggcggcggcccagtcggtgtatgccttctcggcgcgcccgctggccggcggggagcctgtgagcctgggctccctgcggggcaaggagaacgccaagaacgaagagattctgaattccctcaagtacgtccggcctggtggtgggttcgagcccaacttcatgctcttcgagaagtgcgaggtgaacggtgcgggggcgcaccctctcttcgccttcctgcgggaggccctgccagctcccagcgacgacgccaccgcgcttatgaccgaccccaagctcatcacctggtctccggtgtgtcgcaacgatgttgcctggaactttgagaagttcctggtgggccctgacggtgtgcccctacgcaggtacagccgccgcttccagaccattgacatcgagcctgacatcgaagccctgctgtctcaagggcccagctgtgcctagggcgcccctcctaccccggctgcttggcagttgcagtgctgctgtctcgggggggttttcatctatgagggtgtttcctctaaacctacgagggaggaacacctgatcttacagaaaataccacctcgagatgggtgctggtcctgttgatcccagtctctgccagaccaaggcgagtttccccactaataaagtgccgggtgtcagcagaa

SEQ ID NO: 373111 - DNA, 1475 bp, Homo sapiens
cgacccctcgaggggcccagccttggaagggtaactggaccgctgccgcctggttgcctgggccagaccagacatgcctgctgctccttccggcttaggaggagcacgcgtcccgctcgggcgcactctccagccttttcctggctgaggaggggccgagcctccggtagggcgggggccggatgaggcgggacctcaggcccggaaaactgcctgtgccacgtgacccgccgccggccagttaaaaggaggcgcctgctggcctccccttacagtgcttgttcggggcgctccgctggcttcttggacaattgcgccatgtgtgctgctcggctagcggcggcggcggcggcccagtcggtgtatgccttctcggcgcgcccgctggccggcggggagcctgtgagcctgggctccctgcggggcaaggtactacttatcgagaatgtggcgtccctctgaggcaccacggtccgggactacacccagatgaacgagctgcagcggcgcctcggaccccggggcctggtggtgctcggcttcccgtgcaaccagtttgggcatcaggtgcgccgggcggagcggggcggggcgggggcggacgtgcagtagtggctgggggcgccggcggtgtgctggtgggtgccgtcggctccatgcgcggagagtctggctactctctcgtttcctttctgttgctcgtagctgctgaaattcctctccgcccttgggattgcgcatggagggcaaaatcccggtgactcatagaaaatctcccttgtttgtggttagaacgtttctctcctcctcttgaccccgggttctagctgcccttctctcctgtaggagaacgccaagaacgaagagattctgaattccctcaagtacgtccggcctggtggtgggttcgagcccaacttcatgctcttcgagaagtgcgaggtgaacggtgcgggggcgcaccctctcttcgccttcctgcgggaggccctgccagctcccagcgacgacgccaccgcgcttatgaccgaccccaagctcatcacctggtctccggtgtgtcgcaacgatgttgcctggaactttgagaagttcctggtgggccctgacggtgtgcccctacgcaggtacagccgccgcttccagaccattgacatcgagcctgacatcgaagccctgctgtctcaagggcccagctgtgcctagggcgcccctcctaccccggctgcttggcagttgcagtgctgctgtctcgggggggttttcatctatgagggtgtttcctctaaacctacgagggaggaacacctgatcttacagaaaataccacctcgagatgggtgctggtcctgttgatcccagtctctgccagaccaaggcgagtttccccactaataaagtgccgggtgtcagcagaaaaaaaaacaaaaatgggccctcttgggccttaacgggggaagctcctgccgcccgct

SEQ ID NO: 373112 - DNA, 1137 bp, Homo sapiens
cgacccctcgaggggcccagccttggaagggtaactggaccgctgccgcctggttgcctgggccagaccagacatgcctgctgctccttccggcttaggaggagcacgcgtcccgctcgggcgcactctccagccttttcctggctgaggaggggccgagcctccggtagggcgggggccggatgaggcgggacctcaggcccggaaaactgcctgtgccacgtgacccgccgccggccagttaaaaggaggcgcctgctggcctccccttacagtgcttgttcggggcgctccgctggcttcttggacaattgcgccatgtgtgctgctcggctagcggcggcggcggcggcccagtcggtgtatgccttctcggcgcgcccgctggccggcggggagcctgtgagcctgggctccctgcggggcaaggtactacttatcgagaatgtggcgtccctctgaggcaccacggtccgggactacacccagatgaacgagctgcagcggcgcctcggaccccggggcctggtggtgctcggcttcccgtgcaaccagtttgggcatcaggagaacgccaagaacgaagagattctgaattccctcaagtacgtccggcctggtggtgggttcgaggggggattatgtttggggggggggttttcgggggtttttgttttgggggttttggttggggggggtgggggaggccctgccagctcccagcgacgacgccaccgcgcttatgaccgaccccaagctcatcacctggtctccggtgtgtcgcaacgatgttgcctggaactttgagaagttcctggtgggccctgacggtgtgcccctacgcaggtacagccgccgcttccagaccattgacatcgagcctgacatcgaagccctgctgtctcaagggcccagctgtgcctagggcgcccctcctaccccggctgcttggcagttgcagtgctgctgtctcgggggggttttcatctatgagggtgtttcctctaaacctacgagggaggaacacctgatcttacagaaaataccacctcgagatgggtgctggtcctgttgatcccagtctctgccagaccaaggcgagtttccccactaataaagtgccgggtgtcagcagaa

SEQ ID NO: 373113 - DNA, 1026 bp, Homo sapiens
cgacccctcgaggggcccagccttggaagggtaactggaccgctgccgcctggttgcctgggccagaccagacatgcctgctgctccttccggcttaggaggagcacgcgtcccgctcgggcgcactctccagccttttcctggctgaggaggggccgagcctccggtagggcgggggccggatgaggcgggacctcaggcccggaaaactgcctgtgccacgtgacccgccgccggccagttaaaaggaggcgcctgctggcctccccttacagtgcttgttcggggcgctccgctggcttcttggacaattgcgccatgtgtgctgctcggctagcggcggcggcggcggcccagtcggtgtatgccttctcggcgcgcccgctggccggcggggagcctgtgagcctgggctccctgcggggcaaggagaacgccaagaacgaagagattctgaattccctcaagtacgtccggcctggtggtgggttcgagcccaacttcatgctcttcgagaagtgcgaggtgaacggtgcgggggcgcaccctctcttcgccttcctgcgggaggccctgccagctcccagcgacgacgccaccgcgcttatgaccgaccccaagctcatcacctggtctccggtgtgtcgcaacgatgttgcctggaactttgagaagttcctggtgggccctgacggtgtgcccctacgcaggtacagccgccgcttccagaccattgacatcgagcctgacatcgaagccctgctgtctcaagggcccagctgtgcctagggcgcccctcctaccccggctgcttggcagttgcagtgctgctgtctcgggggggttttcatctatgagggtgtttcctctaaacctacgagggaggaacacctgatcttacagaaaataccacctcgagatgggtgctggtcctgttgatcccagtctctgccagaccaaggcgagtttccccactaataaagtgccgggtgtcagcagaatagatattggccttctttggcctta

SEQ ID NO: 373114 - DNA, 975 bp, Homo sapiens
cgacccctcgaggggcccagccttggaagggtaactggaccgctgccgcctggttgcctgggccagaccagacatgcctgctgctccttccggcttaggaggagcacgcgtcccgctcgggcgcactctccagccttttcctggctgaggaggggccgagcctccggtagggcgggggccggatgaggcgggacctcaggcccggaaaactgcctgtgccacgtgacccgccgccggccagttaaaaggaggcgcctgctggcctccccttacagtgcttgttcggggcgctccgctggcttcttggacaattgcgccatgtgtgctgctcggctagcggcggcggcggcggcccagtcggtgtatgccttctcggcgcgcccgctggccggcggggagcctgtgagcctgggctccctgcggggcaaggtactacttatcgagaatgtggcgtccctctgaggcaccacggtccgggactacacccagatgaacgagctgcagcggcgcctcggaccccggggcctggtggtgctcggcttcccgtgcaaccagtttgggcatcaggagaacgccaagaacgaagagattctgaattccctcaagtacgtccggcctggtggtgggttcgagcccaacttcatgctcttcgagaagtgcgaggtgaacggtgcccctacgcaggtacagccgccgcttccagaccattgacatcgagcctgacatcgaagccctgctgtctcaagggcccagctgtgcctagggcgcccctcctaccccggctgcttggcagttgcagtgctgctgtctcgggggggttttcatctatgagggtgtttcctctaaacctacgagggaggaacacctgatcttacagaaaataccacctcgagatgggtgctggtcctgttgatcccagtctctgccagaccaaggcgagtttccccactaataaagtgccgggtgtcagcagaa

SEQ ID NO: 373115 - DNA, 328 bp, Homo sapiens
gtgcccctacgcaggtacagccgccgcttccagaccattgacatcgagcctgacatcgaagccctgctgtctcaagggcccagctgtgcctagggcgcccctcctaccccggctgcttggcagttgcagtgctgctgtctcgggggggttttcatctatgagggtgtttcctctaaacctacgagggaggaacacctgatcttacagaaaataccacctcgagatgggtgctggtcctgttgatcccagtctctgccagaccaaggcgagtttccccactaataaagtgccgggtgtcagcagaacagaactgtgtgtatgtcctgtg

SEQ ID NO: 373116 - DNA, 1139 bp, Homo sapiens
cgacccctcgaggggcccagccttggaagggtaactggaccgctgccgcctggttgcctgggccagaccagacatgcctgctgctccttccggcttaggaggagcacgcgtcccgctcgggcgcactctccagccttttcctggctgaggaggggccgagcctccggtagggcgggggccggatgaggcgggacctcaggcccggaaaactgcctgtgccacgtgacccgccgccggccagttaaaaggaggcgcctgctggcctccccttacagtgcttgttcggggcgctccgctggcttcttggacaattgcgccatgtgtgctgctcggctagcggcggcggcggcggcccagtcggtgtatgccttctcggcgcgcccgctggccggcggggagcctgtgagcctgggctccctgcggggcaaggtactacttatcgagaatgtggcgtccctctgaggcaccacggtccgggactacacccagatgaacgagctgcagcggcgcctcggaccccggggcctggtggtgctcggcttcccgtgcaaccagtttgggcatcaggagaacgccaagaacgaagagattctgaattccctcaagtacgtccggcctggtggtgggttcgagcccaacttcatgctcttcgagaagtgcgaggtgaacggtgcgggggcgcaccctctcttcgccttcctgcgggaggccctgccagctcccagcgacgacgccaccgcgcttatgaccgaccccaagctcatcacctggtctccggtgtgtcgcaacgatgttgcctggaactttgagaagttcctggtgggccctgacggtgtgcccctacgcaggtacagccgccgcttccagaccattgacatcgagcctgacatcgaagccctgctgtctcaagggcccagctgtgcctagggcgcccctcctaccccggctgcttggcagttgcagtgctgctgtctcgggggggttttcatctatgagggtgtttcctctaaacctacgagggaggaacacctgatcttacagaaaataccacctcgagatgggtgctggtcctgttgatcccagtctctgccagaccaaggcgagtttccccactaataaagtgccgggtgtcagcagaa

SEQ ID NO: 373117 - DNA, 1162 bp, Homo sapiens
  misc_feature (1151)..(1151): n is a, c, g, or t
cgacccctcgaggggcccagccttggaagggtaactggaccgctgccgcctggttgcctgggccagaccagacatgcctgctgctccttccggcttaggaggagcacgcgtcccgctcgggcgcactctccagccttttcctggctgaggaggggccgagcctccggtagggcgggggccggatgaggcgggacctcaggcccggaaaactgcctgtgccacgtgacccgccgccggccagttaaaaggaggcgcctgctggcctccccttacagtgcttgttcggggcgctccgctggcttcttggacaattgcgccatgtgtgctgctcggctagcggcggcggcggcggcccagtcggtgtatgccttctcggcgcgcccgctggccggcggggagcctgtgagcctgggctccctgcggggcaaggtactacttatcgagaatgtggcgtccctctgaggcaccacggtccgggactacacccagatgaacgagctgcagcggcgcctcggaccccggggcctggtggtgctcggcttcccgtgcaaccagtttgggcatcaggagaacgccaagaacgaagagattctgaattccctcaagtacgtccggcctggtggtgggttcgagcccaacttcatgctcttcgagaagtgcgaggtgaacggtgcgggggcgcaccctctcttcgccttcctgcgggaggccctgccagctcccagcgacgacgccaccgcgcttatgaccgaccccaagctcatcacctggtctccggtgtgtcgcaacgatgttgcctggaactttgagaagttcctggtgggccctgacggtgtgcccctacgcaggtacagccgccgcttccagaccattgacatcgagcctgacatcgaagccctgctgtctcaagggcccagctgtgcctagggcgcccctcctaccccggctgcttggcagttgcagtgctgctgtctcgggggggttttcatctatgagggtgtttcctctaaacctacgagggaggaacacctgatcttacagaaaataccacctcgagatgggtgctggtcctgttgatcccagtctctgccagaccaaggcgagtttccccactaataaagtgccgggtgtcagcagaaaaaaaaaaaaantctccagggcg

SEQ ID NO: 373118 - DNA, 958 bp, Homo sapiens
  misc_feature (26)..(26): n is a, c, g, or t
  misc_feature (37)..(37): n is a, c, g, or t
  misc_feature (910)..(910): n is a, c, g, or t
ggtggacattgaggattaacgcctgncgccccccccnggaggtacgggatgcgctccgctggcttcttggacaattgcgccatgtgtgctgctcggctagcggcggcggcggcggcccagtcggtgtatgccttctcggcgcgcccgctggccggcggggagcctgtgagcctgggctccctgcggggcaaggtactacttatcgagaatgtggcgtccctctgaggcaccacggtccgggactacacccagatgaacgagctgcagcggcgcctcggaccccggggcctggtggtgctcggcttcccgtgcaaccagtttgggcatcaggagaacgccaagaacgaagagattctgaattccctcaagtacgtccggcctggtggtgggttcgagcccaacttcatgctcttcgagaagtgcgaggtgaacggtgcgggggcgcaccctctcttcgccttcctgcgggaggccctgccagctcccagcgacgacgccaccgcgcttatgaccgaccccaagctcatcacctggtctccggtgtgtcgcaacgatgttgcctggaactttgagaagttcctggtgggccctgacggtgtgcccctacgcaggtacagccgccgcttccagaccattgacatcgagcctgacatcgaagccctgctgtctcaagggcccagctgtgcctagggcgcccctcctaccccggctgcttggcagttgcagtgctgctgtctcgggggggttttcatctatgagggtgtttcctctaaacctacgagggaggaacacctgatcttacagaaaataccacctcgagatgggtgctggtcctgttgatcccagtctctgccagaccaaggcgagtttccccactaataaagtgccgggtgtcagcagaaaaaaaaanacaaaaaaaaaggggggggaaaaaatccccggggggccatagggtcca

SEQ ID NO: 373119 - DNA, 577 bp, Homo sapiens
  misc_feature (26)..(26): n is a, c, g, or t
  misc_feature (31)..(31): n is a, c, g, or t
  misc_feature (34)..(34): n is a, c, g, or t
acaactttgtgtacataccccacgancttanggnattacgtcagtacgtccggcctggtggtgggttcgagcccaacttcatgctcttcgagaagtgcgaggtgaacggtgcgggggcgcaccctctcttcgccttcctgcgggaggccctgccagctcccagcgacgacgccaccgcgcttatgaccgaccccaagctcatcacctggtctccggtgtgtcgcaacgatgttgcctggaactttgagaagttcctggtgggccctgacggtgtgcccctacgcaggtacagccgccgcttccagaccattgacatcgagcctgacatcgaagccctgctgtctcaagggcccagctgtgcctagggcgcccctcctaccccggctgcttggcagttgcagtgctgctgtctcgggggggttttcatctatgagggtgtttcctctaaacctacgagggaggaacacctgatcttacagaaaataccacctcgagatgggtgctggtcctgttgatcccagtctctgccagaccaaggcgagtttccccactaataaagtgccgggtgtcagcagaa

SEQ ID NO: 373120 - DNA, 667 bp, Homo sapiens
ggtgggttcgagcccaacttcatgctcttcgagaagtgcgagggaattctgaattccctcaagtacgtccggcctggtggtgggttcgagcccaacttcatgctcttcgagaagtgcgaggtgaacggtgcgggggcgcaccctctcttcgccttcctgcgggaggccctgccagctcccagcgacgacgccaccgcgcttatgaccgaccccaagctcatcacctggtctccggtgtgtcgcaacgatgttgcctggaactttgagaagttcctggtgggccctgacggtgtgcccctacgcaggtacagccgccgcttccagaccattgacatcgagcctgacatcgaagccctgctgtctcaagggcccagctgtgcctagggcgcccctcctaccccggctgcttggcagttgcagtgctgctgtctcgggggggttttcatctatgagggtgtttcctctaaacctacgagggaggaacacctgatcttacagaaaataccacctcgagatgggtgctggtcctgttgatcccagtctctgccagaccaaggcgagtttccccactaataaagtgccgggtgtcagcagaaagaaacaaaaagaaacaacatcagattatctaaccctgcaacagaaaagacaaacaaatcgaaagccaaaa

SEQ ID NO: 373121 - DNA, 902 bp, Homo sapiens
  misc_feature (26)..(26): n is a, c, g, or t
  misc_feature (37)..(37): n is a, c, g, or t
ggtggacattgaggattaacgcctgncgccccccccnggaggtacgggatgcgctccgctggcttcttggacaattgcgccatgtgtgctgctcggctagcggcggcggcggcggcccagtcggtgtatgccttctcggcgcgcccgctggccggcggggagcctgtgagcctgggctccctgcggggcaaggtactacttatcgagaatgtggcgtccctctgaggcaccacggtccgggactacacccagatgaacgagctgcagcggcgcctcggaccccggggcctggtggtgctcggcttcccgtgcaaccagtttgggcatcaggagaacgccaagaacgaagagattctgaattccctcaagtacgtccggcctggtggtgggttcgagcccaacttcatgctcttcgagaagtgcgaggtgaacggtgcgggggcgcaccctctcttcgccttcctgcgggaggccctgccagctcccagcgacgacgccaccgcgcttatgaccgaccccaagctcatcacctggtctccggtgtgtcgcaacgatgttgcctggaactttgagaagttcctggtgggccctgacggtgtgcccctacgcaggtacagccgccgcttccagaccattgacatcgagcctgacatcgaagccctgctgtctcaagggcccagctgtgcctagggcgcccctcctaccccggctgcttggcagttgcagtgctgctgtctcgggggggttttcatctatgagggtgtttcctctaaacctacgagggaggaacacctgatcttacagaaaataccacctcgagatgggtgctggtcctgttgatcccagtctctgccagaccaaggcgagtttccccactaataaagtgccgggtgtcagcagaa

SEQ ID NO: 373122 - DNA, 1358 bp, Homo sapiens
cgacccctcgaggggcccagccttggaagggtaactggaccgctgccgcctggttgcctgggccagaccagacatgcctgctgctccttccggcttaggaggagcacgcgtcccgctcgggcgcactctccagccttttcctggctgaggaggggccgagcctccggtagggcgggggccggatgaggcgggacctcaggcccggaaaactgcctgtgccacgtgacccgccgccggccagttaaaaggaggcgcctgctggcctccccttacagtgcttgttcggggcgctccgctggcttcttggacaattgcgccatgtgtgctgctcggctagcggcggcggcggcggcccagtcggtgtatgccttctcggcgcgcccgctggccggcggggagcctgtgagcctgggctccctgcggggcaaggtactacttatcgagaatgtggcgtccctctgaggcaccacggtccgggactacacccagatgaacgagctgcagcggcgcctcggaccccggggcctggtggtgctcggcttcccgtgcaaccagtttgggcatcaggagaacgccaagaacgaagagattctgaattccctcaagtacgtccggcctggtggtgggttcgagcccaacttcatgctcttcgagaagtgcgaggtgaacggtgcgggggcgcaccctctcttcgccttcctgcgggaggccctgccagctcccagcgacgacgccaccgcgcttatgaccgaccccaagctcatcacctggtctccggtgtgtcgcaacgatgttgcctggaactttgagaagttcctggtgggccctgacggtgtgcccctacgcaggtacagccgccgcttccagaccattgacatcgagcctgacatcgaagccctgctgtctcaagggcccagctgtgcctagggcgcccctcctaccccggctgcttggcagttgcagtgctgctgtctcgggggggttttcatctatgagggtgtttcctctaaacctacgagggaggaacacctgatcttacagaaaataccacctcgagatgggtgctggtcctgttgatcccagtctctgccagaccaaggcgagtttccccactaataaagtgccgggtgtcagcagaacgctggcctcgttggcctcagcggtggagctctggggtacgctttcctttacagaggaccaaataatgagtctggctcactgactactccccctcgtttcttctggttgttttcagcggctgaacatcacttatagtttgttcccggttttttacacagcgcgggattctctgcgagcaccgcccgcccctttcacttatttcgcccctacgccccacc

SEQ ID NO: 373123 - DNA, 1195 bp, Homo sapiens
  misc_feature (1147)..(1147): n is a, c, g, or t
cgacccctcgaggggcccagccttggaagggtaactggaccgctgccgcctggttgcctgggccagaccagacatgcctgctgctccttccggcttaggaggagcacgcgtcccgctcgggcgcactctccagccttttcctggctgaggaggggccgagcctccggtagggcgggggccggatgaggcgggacctcaggcccggaaaactgcctgtgccacgtgacccgccgccggccagttaaaaggaggcgcctgctggcctccccttacagtgcttgttcggggcgctccgctggcttcttggacaattgcgccatgtgtgctgctcggctagcggcggcggcggcggcccagtcggtgtatgccttctcggcgcgcccgctggccggcggggagcctgtgagcctgggctccctgcggggcaaggtactacttatcgagaatgtggcgtccctctgaggcaccacggtccgggactacacccagatgaacgagctgcagcggcgcctcggaccccggggcctggtggtgctcggcttcccgtgcaaccagtttgggcatcaggagaacgccaagaacgaagagattctgaattccctcaagtacgtccggcctggtggtgggttcgagcccaacttcatgctcttcgagaagtgcgaggtgaacggtgcgggggcgcaccctctcttcgccttcctgcgggaggccctgccagctcccagcgacgacgccaccgcgcttatgaccgaccccaagctcatcacctggtctccggtgtgtcgcaacgatgttgcctggaactttgagaagttcctggtgggccctgacggtgtgcccctacgcaggtacagccgccgcttccagaccattgacatcgagcctgacatcgaagccctgctgtctcaagggcccagctgtgcctagggcgcccctcctaccccggctgcttggcagttgcagtgctgctgtctcgggggggttttcatctatgagggtgtttcctctaaacctacgagggaggaacacctgatcttacagaaaataccacctcgagatgggtgctggtcctgttgatcccagtctctgccagaccaaggcgagtttccccactaataaagtgccgggtgtcagcagaaaaaaaaanacaaaaaaaaaggggggggaaaaaatccccggggggccatagggtcca

SEQ ID NO: 373124 - DNA, 1363 bp, Homo sapiens
cgacccctcgaggggcccagccttggaagggtaactggaccgctgccgcctggttgcctgggccagaccagacatgcctgctgctccttccggcttaggaggagcacgcgtcccgctcgggcgcactctccagccttttcctggctgaggaggggccgagcctccggtagggcgggggccggatgaggcgggacctcaggcccggaaaactgcctgtgccacgtgacccgccgccggccagttaaaaggaggcgcctgctggcctccccttacagtgcttgttcggggcgctccgctggcttcttggacaattgcgccatgtgtgctgctcggctagcggcggcggcggcggcccagtcggtgtatgccttctcggcgcgcccgctggccggcggggagcctgtgagcctgggctccctgcggggcaaggtactacttatcgagaatgtggcgtccctctgaggcaccacggtccgggactacacccagatgaacgagctgcagcggcgcctcggaccccggggcctggtggtgctcggcttcccgtgcaaccagtttgggcatcaggagaacgccaagaacgaagagattctgaattccctcaagtacgtccggcctggtggtgggttcgagcccaacttcatgctcttcgagaagtgcgaggtgaacggtgcgggggcgcaccctctcttcgccttcctgcgggaggccctgccagctcccagcgacgacgccaccgcgcttatgaccgaccccaagctcatcacctggtctccggtgtgtcgcaacgatgttgcctggaactttgagaagttcctggtgggccctgacggtgtgcccctacgcaggtacagccgccgcttccagaccattgacatcgagcctgacatcgaagccctgctgtctcaagggcccagctgtgcctagggcgcccctcctaccccggctgcttggcagttgcagtgctgctgtctcgggggggttttcatctatgagggtgtttcctctaaacctacgagggaggaacacctgatcttacagaaaataccacctcgagatgggtgctggtcctgttgatcccagtctctgccagaccaaggcgagtttccccactaataaagtgccgggtgtcagcagaaaaaaaaaaataaaaatggcctcttcggcctgacggtggagctggggggcactagcctttaggagggcaatcagttgtgctgagctacttactatctggtaggactgttagatgaggtagcgggttagcggactcaaaggtcgaatacggtgtgcccgaataggggataccgcgcaataaccttggtgcccaggctacatatggcttaacctagtaaggcctttt

SEQ ID NO: 373125 - DNA, 1418 bp, Homo sapiens
cgacccctcgaggggcccagccttggaagggtaactggaccgctgccgcctggttgcctgggccagaccagacatgcctgctgctccttccggcttaggaggagcacgcgtcccgctcgggcgcactctccagccttttcctggctgaggaggggccgagcctccggtagggcgggggccggatgaggcgggacctcaggcccggaaaactgcctgtgccacgtgacccgccgccggccagttaaaaggaggcgcctgctggcctccccttacagtgcttgttcggggcgctccgctggcttcttggacaattgcgccatgtgtgctgctcggctagcggcggcggcggcggcccagtcggtgtatgccttctcggcgcgcccgctggccggcggggagcctgtgagcctgggctccctgcggggcaaggtactacttatcgagaatgtggcgtccctctgaggcaccacggtccgggactacacccagatgaacgagctgcagcggcgcctcggaccccggggcctggtggtgctcggcttcccgtgcaaccagtttgggcatcaggtgcgccgggcggagcggggcggggcgggggcggacgtgcagtagtggctgggggcgccggcggtgtgctggtgggtgccgtcggctccatgcgcggagagtctggctactctctcgtttcctttctgttgctcgtagctgctgaaattcctctccgcccttgggattgcgcatggagggcaaaatcccggtgactcatagaaaatctcccttgtttgtggttagaacgtttctctcctcctcttgaccccgggttctagctgcccttctctcctgtaggagaacgccaagaacgaagagattctgaattccctcaagtacgtccggcctggtggtgggttcgagcccaacttcatgctcttcgagaagtgcgaggtgaacggtgcgggggcgcaccctctcttcgccttcctgcgggaggccctgccagctcccagcgacgacgccaccgcgcttatgaccgaccccaagctcatcacctggtctccggtgtgtcgcaacgatgttgcctggaactttgagaagttcctggtgggccctgacggtgtgcccctacgcaggtacagccgccgcttccagaccattgacatcgagcctgacatcgaagccctgctgtctcaagggcccagctgtgcctagggcgcccctcctaccccggctgcttggcagttgcagtgctgctgtctcgggggggttttcatctatgagggtgtttcctctaaacctacgagggaggaacacctgatcttacagaaaataccacctcgagatgggtgctggtcctgttgatcccagtctctgccagaccaaggcgagtttccccactaataaagtgccgggtgtcagcagaa

SEQ ID NO: 373126 - DNA, 626 bp, Homo sapiens
tctatgccacccgcatgtaggtccggccgctatatctacagcaggtttttgggggagaacgccaagaacgaagagattctgaattccctcaagtacgtccggcctggtggtgggttcgagcccaacttcatgctcttcgagaagtgcgaggtgaacggtgcgggggcgcaccctctcttcgccttcctgcgggaggccctgccagctcccagcgacgacgccaccgcgcttatgaccgaccccaagctcatcacctggtctccggtgtgtcgcaacgatgttgcctggaactttgagaagttcctggtgggccctgacggtgtgcccctacgcaggtacagccgccgcttccagaccattgacatcgagcctgacatcgaagccctgctgtctcaagggcccagctgtgcctagggcgcccctcctaccccggctgcttggcagttgcagtgctgctgtctcgggggggttttcatctatgagggtgtttcctctaaacctacgagggaggaacacctgatcttacagaaaataccacctcgagatgggtgctggtcctgttgatcccagtctctgccagaccaaggcgagtttccccactaataaagtgccgggtgtcagcagaa

SEQ ID NO: 373127 - DNA, 1109 bp, Homo sapiens
cgacccctcgaggggcccagccttggaagggtaactggaccgctgccgcctggttgcctgggccagaccagacatgcctgctgctccttccggcttaggaggagcacgcgtcccgctcgggcgcactctccagccttttcctggctgaggaggggccgagcctccggtagggcgggggccggatgaggcgggacctcaggcccggaaaactgcctgtgccacgtgacccgccgccggccagttaaaaggaggcgcctgctggcctccccttacagtgcttgttcggggcgctccgctggcttcttggacaattgcgccatgtgtgctgctcggctagcggcggcggcggcggcccagtcggtgtatgccttctcggcgcgcccgctggccggcggggagcctgtgagcctgggctccctgcggggcaaggtactacttatcgagaatgtggcgtccctctgaggcaccacggtccgggactacacccagatgaacgagctgcagcggcgcctcggaccccggggcctggtggtgctcggcttcccgtgcaaccagtttgggcatcaggagaacgccaagaacgaagagattctgaattccctcaagtacgtccggcctggtggtgggttcgagcccaacttcatgctcttcgagaagtgcgaggtgaacggtgcgggggcgcaccctctcttcgccttcctgcccaccgcgcttatgaccgaccccaagctcatcacctggtctccggtgtgtcgcaacgatgttgcctggaactttgagaagttcctggtgggccctgacggtgtgcccctacgcaggtacagccgccgcttccagaccattgacatcgagcctgacatcgaagccctgctgtctcaagggcccagctgtgcctagggcgcccctcctaccccggctgcttggcagttgcagtgctgctgtctcgggggggttttcatctatgagggtgtttcctctaaacctacgagggaggaacacctgatcttacagaaaataccacctcgagatgggtgctggtcctgttgatcccagtctctgccagaccaaggcgagtttccccactaataaagtgccgggtgtcagcagaa

SEQ ID NO: 373128 - DNA, 1089 bp, Homo sapiens
cgacccctcgaggggcccagccttggaagggtaactggaccgctgccgcctggttgcctgggccagaccagacatgcctgctgctccttccggcttaggaggagcacgcgtcccgctcgggcgcactctccagccttttcctggctgaggaggggccgagcctccggtagggcgggggccggatgaggcgggacctcaggcccggaaaactgcctgtgccacgtgacccgccgccggccagttaaaaggaggcgcctgctggcctccccttacagtgcttgttcggggcgctccgctggcttcttggacaattgcgccatgtgtgctgctcggctagcggcggcggcggcggcccagtcggtgtatgccttctcggcgcgcccgctggccggcggggagcctgtgagcctgggctccctgcggggcaaggtactacttatcgagaatgtggcgtccctctgaggcaccacggtccgggactacacccagatgaacgagctgcagcggcgcctcggaccccggggcctggtggtgctcggcttcccgtgcaaccagtttgggcatcaggagaacgccaagaacgaagagattctgaattccctcaagtacgtccggcctggtggtgggttcgagcccaacttcatgctcttcgagaagtgcgaggtgaacggtgcgggggcgcaccctctcttcgccttcctgcgggaggccctgccagctcccagcgacgacgccaccgcgcttatgaccgaccccaagctcatcacctggtctccggtgtgtcgcaacgatgttgcctggaactttgagaagttcctggtgggccctgacggtgtgcccctacgcaggtacagccgccgcttccagaccattgacatcgagcctgacatcgaagcctgcttggcagttgcagtgctgctgtctcgggggggttttcatctatgagggtgtttcctctaaacctacgagggaggaacacctgatcttacagaaaataccacctcgagatgggtgctggtcctgttgatcccagtctctgccagaccaaggcgagtttccccactaataaagtgccgggtgtcagcagaa

SEQ ID NO: 373129 - DNA, 2399 bp, Homo sapiens
aacggcccttcgcagcgggcgcgctgtcagacctcagtctggcggctgcattgctgggcgcgccgctctcgtctgatccctgctggggacggttgcccgggcaggatcctttacgatcccttctcggtttctccgtcgtcacagggaataaatctcgctcgaaactcactggaccgctcctagaaaggcgaaaagatattcaggagcccttccattttccttccagtaggcaccgaacccagcattttcggcaaccgctgctggcagttttgccaggtgtttgttaccttgaaaaatggctactggacaggatcgagtggttgctctcgtggacatggactgtttttttgttcaagtggagcagcggcaaaatcctcatttgaggaataaaccttgtgcagttgtacagtacaaatcatggaagggtggtggaataattgcagtgagttatgaagctcgtgcatttggagtcactagaagtatgtgggcagatgatgctaagaagttatgtccagatcttctactggcacaagttcgtgagtcccgtgggaaagctaacctcaccaagtaccgggaagccagtgttgaagtgatggagataatgtctcgttttgctgtgattgaacgtgccagcattgatgaggcttacgtagatctgaccagtgctgtacaagagagactacaaaagctacaaggtcagcctatctcggcagacttgttgccaagcacttacattgaagggttgccccaaggccctacaacggcagaagagactgttcagaaagaggggatgcgaaaacaaggcttatttcaatggctcgattctcttcagattgataacctcacctctccagacctgcagctcaccgtgggagcagtgattgtggaggaaatgagagcagccatagagagggagactggttttcagtgttcagctggaatttcacacaataaggtcctggcaaaactggcctgtggactaaacaagcccaaccgccaaaccctggtttcacatgggtcagtcccacagctcttcagccaaatgcccattcgcaaaatccgtagtcttggaggaaagctaggggcctctgtcattgagatcctagggatagaatacatgggtgaactgacccagttcactgaatcccagctccagagtcattttggggagaagaatgggtcttggctatatgccatgtgccgagggattgaacatgatccagttaaacccaggcaactacccaaaaccattggctgtagtaagaacttcccaggaaaaacagctcttgctactcgggaacaggtacaatggtggctgttgcaattagcccaggaactagaggagagactgactaaagaccgaaatgataatgacagggtagccacccagctggttgtgagcattcgtgtacaaggagacaaacgcctcagcagcctgcgccgctgctgtgcccttacccgctatgatgctcacaagatgagccatgatgcatttactgtcatcaagaactgtaatacttctggaatccagacagaatggtctcctcctctcacaatgcttttcctctgtgctacaaaattttctgcctctgccccttcatcttctacagacatcaccagcttcttgagcagtgacccaagttctctgccaaaggtgccagttaccagctcagaagctaagacccagggaagtggcccagcggtgacagccactaagaaagcaaccacgtctctggaatcattcttccaaaaagctgcagaaaggcagaaagttaaagaagcttcgctttcatctcttactgctcccactcaggctcccatgagcaattcaccatccaagccctcattaccttttcaaaccagtcaaagtacaggaactgagcccttctttaagcagaaaagtctgcttctaaagcagaaacagcttaataattcttcagtttcttccccccaacaaaacccatggtccaactgtaaagcattaccaaactctttaccaacagagtatccagggtgtgtccctgtttgtgaaggggtgtcgaagctagaagaatcctctaaagcaactcctgcagagatggatttggcccacaacagccaaagcatgcacgcctcttcagcttccaaatctgtgctggaggtgactcagaaagcaaccccaaatccaagtcttctagctgctgaggaccaagtgccctgtgagaagtgtggctccctggtaccggtatgggatatgccagaacacatggactatcattttgcattggagttgcagaaatcctttttgcagccccactcttcaaacccccaggttgtttctgccgtatctcatcaaggcaaaagaaatcccaagagccctttggcctgcactaataaacgccccaggcctgagggcatgc

SEQ ID NO: 373130 - DNA, 793 bp, Homo sapiens
aacggcccttcgcagcgggcgcgctgtcagacctcagtctggcggctgcattgctgggcgcgccgctctcgtctgatccctgctggggacggttgcccgggcaggatcctttacgatcccttctcggtttctccgtcgtcacagggaataaatctcgctcgaaactcactggaccgctcctagaaaggcgaaaagatattcaggagcccttccattttccttccagtaggcaccgaacccagcattttcggcaaccgctgctggcagttttgccaggtgtttgttaccttgaataattgcagtgagttatgaagctcgtgcatttggagtcactagaagtatgtgggcagatgatgctaagaagttatgtccagatcttctactggcacaagttcgtgagtcccgtgggaaagctaacctcaccaagtaccgggaagccagtgttgaagtgatggagataatgtctcgttttgctgtgattgaacgtgccagcattgatgaggcttacgtagatctgaccagtgctgtacaagagagactacaaaagctacaaggtcagcctatctcggcagacttgttgccaagcacttacattgaagggttgccccaaggccctacaacggcagaagagactgttcagaaaggtacttccatagcatcatactgcttctgcttcctgcctttggaacctgctttgcttggtcatgctgattctccttggaataattgaaaggaaacttaaatccagcctgggtggcgacagagcaagactctgtctcaaaaaaaaaaaaga

SEQ ID NO: 373131 - DNA, 405 bp, Homo sapiens
gcatgagccaccacgcccagcctatagtactgtattcttattctccactcttgtgtgtgaaaagtcagctcttttggcttttctgttatggggaaacttgaattacacagggaacccaactgaagaaaatgaactgaagtaggtggcgctgggtgaagtgggcccagagaatggtgtacacatccctcccatacatatacccaaacttctatttttttatgtgacggagtttctctcatcgccccggcgagattgcgccattgcactccagcctgggcaaaagagtgagactccttctaaaaaaaaaacaaaaaaacaaaaaacaaacataaagttggcacagaaaagggaccaagtttaaaaaagggttttaaatgtaatgagacttgcatagttaaaaaaaaa

SEQ ID NO: 373132 - DNA, 4366 bp, Homo sapiens
aacggcccttcgcagcgggcgcgctgtcagacctcagtctggcggctgcattgctgggcgcgccgctctcgtctgatccctgctggggacggttgcccgggcaggatcctttacgatcccttctcggtttctccgtcgtcacagggaataaatctcgctcgaaactcactggaccgctcctagaaaggcgaaaagatattcaggagcccttccattttccttccagtaggcaccgaacccagcattttcggcaaccgctgctggcagttttgccaggtgtttgttaccttgaaaaatggctactggacaggatcgagtggttgctctcgtggacatggactgtttttttgttcaagtggagcagcggcaaaatcctcatttgaggaataaaccttgtgcagttgtacagtacaaatcatggaagggtggtggaataattgcagtgagttatgaagctcgtgcatttggagtcactagaagtatgtgggcagatgatgctaagaagttatgtccagatcttctactggcacaagttcgtgagtcccgtgggaaagctaacctcaccaagtaccgggaagccagtgttgaagtgatggagataatgtctcgttttgctgtgattgaacgtgccagcattgatgaggcttacgtagatctgaccagtgctgtacaagagagactacaaaagctacaaggtcagcctatctcggcagacttgttgccaagcacttacattgaagggttgccccaaggccctacaacggcagaagagactgttcagaaagaggggatgcgaaaacaaggcttatttcaatggctcgattctcttcagattgataacctcacctctccagacctgcagctcaccgtgggagcagtgattgtggaggaaatgagagcagccatagagagggagactggttttcagtgttcagctggaatttcacacaataaggtcctggcaaaactggcctgtggactaaacaagcccaaccgccaaaccctggtttcacatgggtcagtcccacagctcttcagccaaatgcccattcgcaaaatccgtagtcttggaggaaagctaggggcctctgtcattgagatcctagggatagaatacatgggtgaactgacccagttcactgaatcccagctccagagtcattttggggagaagaatgggtcttggctatatgccatgtgccgagggattgaacatgatccagttaaacccaggcaactacccaaaaccattggctgtagtaagaacttcccaggaaaaacagctcttgctactcgggaacaggtacaatggtggctgttgcaattagcccaggaactagaggagagactgactaaagaccgaaatgataatgacagggtagccacccagctggttgtgagcattcgtgtacaaggagacaaacgcctcagcagcctgcgccgctgctgtgcccttacccgctatgatgctcacaagatgagccatgatgcatttactgtcatcaagaactgtaatacttctggaatccagacagaatggtctcctcctctcacaatgcttttcctctgtgctacaaaattttctgcctctgccccttcatcttctacagacatcaccagcttcttgagcagtgacccaagttctctgccaaaggtgccagttaccagctcagaagctaagacccagggaagtggcccagcggtgacagccactaagaaagcaaccacgtctctggaatcattcttccaaaaagctgcagaaaggcagaaagttaaagaagcttcgctttcatctcttactgctcccactcaggctcccatgagcaattcaccatccaagccctcattaccttttcaaaccagtcaaagtacaggaactgagcccttctttaagcagaaaagtctgcttctaaagcagaaacagcttaataattcttcagtttcttccccccaacaaaacccatggtccaactgtaaagcattaccaaactctttaccaacagagtatccagggtgtgtccctgtttgtgaaggggtgtcgaagctagaagaatcctctaaagcaactcctgcagagatggatttggcccacaacagccaaagcatgcacgcctcttcagcttccaaatctgtgctggaggtgactcagaaagcaaccccaaatccaagtcttctagctgctgaggaccaagtgccctgtgagaagtgtggctccctggtaccggtatgggatatgccagaacacatggactatcattttgcattggagttgcagaaatcctttttgcagccccactcttcaaacccccaggttgtttctgccgtatctcatcaaggcaaaagaaatcccaagagccctttggcctgcactaataaacgccccaggcctgagggcatgcaaacattggaatcattttttaagccattaacacattagtgctgccctcaggcttgcctgtaggatttaatattttttatctttacagatctttatctttaatattttatctttacagatttccctgagaaagggaattatgaaatttttaatacaaaaaataatccatttaggtgctgagttacggtcccatctcttcacaggcatggattctaatcccactgctgacagagatgtaaaaattcatcctaccagagtttttaatctttagcatttagggaggcagtgtcataaagtaaaaagtgtgtgggccttggagtctaagagacgtggttgcaaacttagctctggttattgcaatgagggccttgaacaagtcattttcttcacattctcatctgtaaaatggagataataccttacagattattgcagattaataacaatgtattcaaattatgtaactcggccgggtacaatggctcacgcctgtaatcctaacactttgggaggccgaggcagacagatcacctgaggtcaggagtttgagaccagcctggccaacatggcaaaaccatctctactaaaaatagaaaaattagccaggcacgttccaggcacctgtgatcccagctacttagaggctgaggcagaagaattgctttaaccttggaggcggaggttgcattgagctgagatcatgctagtgcgctccagcctgggcaacagagcgagacttcatctcagaaaataaaaaataggggccaggcacagtggctcatacctgtaatgccagcactttgggaggccaaggcgggcagatcacgaggtcaggagtttcagaccaatatggtgaaaccccatctctactaaaattacaaaaaaaattatccaggcgtggtggtgcacgcctgtaatcccagctactcaggaggctaaggcaggagaatcacttgaacccaggaggcagaggttggagtgagctgagatcgcgccaccgcactccagcctgggcaacagagcgagactccatctcaaacaaaaacaagaacaaaaacaaacataaagttggcacagaaaagggaccaagtttaaaaaagggttttaaatgtaatgagacttgcatagttaaaaaaaaaaaaaaaaaaaaaaaaaaaaaaaaaaaaaaaaaaaaaaaaacaaaagaaaaacttctctctagctctgtgacgggcagttcagataataccttcaccagatttacctgttttcagctgaagaatgtgagatgaagccttgaaaccctaaaagtgatatggtaactagggcaggtctttctgtacataaaagtgacttaataaacagtgaatttcatacaggtaaaccctattataccctcagttctaaccattggcctatctcttgcgttttgttctaatgtagaattagattgctacttgactagttcaggaactctgtttagatctgataagtcataatcaaatcttgccaggctgctgggattacaggcctgagccaccaggccagccccaacttctactttttattttatttataaattggggggggggttctatatttagtttgaagaggtggggaagatttgaaaaccactagatttaccaggaaatttttttcttcaaaaatattttctgcttttatgatacttgaatatctaataaaagacaatatttagccagtcacggtggctgatgcttgtaatcctaacactttgggaggctgaggtgggtggactactggagccctggagttcaaaaccggcctaagccacatggcaaaacagtctttacaaaaaatacaaagatggtggcttatgcctgtagtcgtacctactcaggaggctgaggttgggaggatcacctgaatctgggagtttggggctgcaataagccatgattgtgccgctgcactccagcctgggtgacagtctgagaccctgtctcaaaa

SEQ ID NO: 373133 - DNA, 3459 bp, Homo sapiens
aacggcccttcgcagcgggcgcgctgtcagacctcagtctggcggctgcattgctgggcgcgccgctctcgtctgatccctgctggggacggttgcccgggcaggatcctttacgatcccttctcggtttctccgtcgtcacagggaataaatctcgctcgaaactcactggaccgctcctagaaaggcgaaaagatattcaggagcccttccattttccttccagtaggcaccgaacccagcattttcggcaaccgctgctggcagttttgccaggtgtttgttaccttgaaaaatggctactggacaggatcgagtggttgctctcgtggacatggactgtttttttgttcaagtggagcagcggcaaaatcctcatttgaggaataaaccttgtgcagttgtacagtacaaatcatggaagggtggtggaataattgcagtgagttatgaagctcgtgcatttggagtcactagaagtatgtgggcagatgatgctaagaagttatgtccagatcttctactggcacaagttcgtgagtcccgtgggaaagctaacctcaccaagtaccgggaagccagtgttgaagtgatggagataatgtctcgttttgctgtgattgaacgtgccagcattgatgaggcttacgtagatctgaccagtgctgtacaagagagactacaaaagctacaaggtcagcctatctcggcagacttgttgccaagcacttacattgaagggttgccccaaggccctacaacggcagaagagactgttcagaaagaggggatgcgaaaacaaggcttatttcaatggctcgattctcttcagattgataacctcacctctccagacctgcagctcaccgtgggagcagtgattgtggaggaaatgagagcagccatagagagggagactggttttcagtgttcagctggaatttcacacaataaggtcctggcaaaactggcctgtggactaaacaagcccaaccgccaaaccctggtttcacatgggtcagtcccacagctcttcagccaaatgcccattcgcaaaatccgtagtcttggaggaaagctaggggcctctgtcattgagatcctagggatagaatacatgggtgaactgacccagttcactgaatcccagctccagagtcattttggggagaagaatgggtcttggctatatgccatgtgccgagggattgaacatgatccagttaaacccaggcaactacccaaaaccattggctgtagtaagaacttcccaggaaaaacagctcttgctactcgggaacaggtacaatggtggctgttgcaattagcccaggaactagaggagagactgactaaagaccgaaatgataatgacagggtagccacccagctggttgtgagcattcgtgtacaaggagacaaacgcctcagcagcctgcgccgctgctgtgcccttacccgctatgatgctcacaagatgagccatgatgcatttactgtcatcaagaactgtaatacttctggaatccagacagaatggtctcctcctctcacaatgcttttcctctgtgctacaaaattttctgcctctgccccttcatcttctacagacatcaccagcttcttgagcagtgacccaagttctctgccaaaggtgccagttaccagctcagaagctaagacccagggaagtggcccagcggtgacagccactaagaaagcaaccacgtctctggaatcattcttccaaaaagctgcagaaaggcagaaagttaaagaagcttcgctttcatctcttactgctcccactcaggctcccatgagcaattcaccatccaagccctcattaccttttcaaaccagtcaaagtacaggaactgagcccttctttaagcagaaaagtctgcttctaaagcagaaacagcttaataattcttcagtttcttccccccaacaaaacccatggtccaactgtaaagcattaccaaactctttaccaacagagtatccagggtgtgtccctgtttgtgaaggggtgtcgaagctagaagaatcctctaaagcaactcctgcagagatggatttggcccacaacagccaaagcatgcacgcctcttcagcttccaaatctgtgctggaggtgactcagaaagcaaccccaaatccaagtcttctagctgctgaggaccaagtgccctgtgagaagtgtggctccctggtaccggtatgggatatgccagaacacatggactatcattttgcattggagttgcagaaatcctttttgcagccccactcttcaaacccccaggttgtttctgccgtatctcatcaaggcaaaagaaatcccaagagccctttggcctgcactaataaacgccccaggcctgagggcatgcaaacattggaatcattttttaagccattaacacattagtgctgccctcaggcttgcctgtaggatttaatattttttatctttacagatctttatctttaatattttatctttacagatttccctgagaaagggaattatgaaatttttaatacaaaaaataatccatttaggtgctgagttacggtcccatctcttcacaggcatggattctaatcccactgctgacagagatgtaaaaattcatcctaccagagtttttaatctttagcatttagggaggcagtgtcataaagtaaaaagtgtgtgggccttggagtctaagagacgtggttgcaaacttagctctggttattgcaatgagggccttgaacaagtcattttcttcacattctcatctgtaaaatggagataataccttacagattattgcagattaataacaatgtattcaaattatgtaactcggccgggtacaatggctcacgcctgtaatcctaacactttgggaggccgaggcagacagatcaccaggctggtcttgaactcttgatctcaagtgatccacccgccctggcctcccaaggtgctgggattacaggcctgagccaccaggccagccccaacttctactttttattttatttataaattggggggggggttctatatttagtttgaagaggtggggaagatttgaaaaccactagatttaccaggaaatttttttcttcaaaaatattttctgcttttatgatacttgaatatctaataaaagacaatatttagccagtcacggtggctgatgcttgtaatcctaacactttgggaggctgaggtgggtggactactggagccctggagttcaaaaccggcctaagccacatggcaaaacagtctttacaaaaaatacaaagatggtggcttatgcctgtagtcgtacctactcaggaggctgaggttgggaggatcacctgaatctgggagtttggggctgcaataagccatgattgtgccgctgcactccagcctgggtgacagtctgagaccctgtctcaaaa

SEQ ID NO: 373134 - DNA, 4502 bp, Homo sapiens
aacggcccttcgcagcgggcgcgctgtcagacctcagtctggcggctgcattgctgggcgcgccgctctcgtctgatccctgctggggacggttgcccgggcaggatcctttacgatcccttctcggtttctccgtcgtcacagggaataaatctcgctcgaaactcactggaccgctcctagaaaggcgaaaagatattcaggagcccttccattttccttccagtaggcaccgaacccagcattttcggcaaccgctgctggcagttttgccaggtgtttgttaccttgaataattgcagtgagttatgaagctcgtgcatttggagtcactagaagtatgtgggcagatgatgctaagaagttatgtccagatcttctactggcacaagttcgtgagtcccgtgggaaagctaacctcaccaagtaccgggaagccagtgttgaagtgatggagataatgtctcgttttgctgtgattgaacgtgccagcattgatgaggcttacgtagatctgaccagtgctgtacaagagagactacaaaagctacaaggtcagcctatctcggcagacttgttgccaagcacttacattgaagggttgccccaaggccctacaacggcagaagagactgttcagaaagaggggatgcgaaaacaaggcttatttcaatggctcgattctcttcagattgataacctcacctctccagacctgcagctcaccgtgggagcagtgattgtggaggaaatgagagcagccatagagagggagactggttttcagtgttcagctggaatttcacacaataaggtcctggcaaaactggcctgtggactaaacaagcccaaccgccaaaccctggtttcacatgggtcagtcccacagctcttcagccaaatgcccattcgcaaaatccgtagtcttggaggaaagctaggggcctctgtcattgagatcctagggatagaatacatgggtgaactgacccagttcactgaatcccagctccagagtcattttggggagaagaatgggtcttggctatatgccatgtgccgagggattgaacatgatccagttaaacccaggcaactacccaaaaccattggctgtagtaagaacttcccaggaaaaacagctcttgctactcgggaacaggtacaatggtggctgttgcaattagcccaggaactagaggagagactgactaaagaccgaaatgataatgacagggtagccacccagctggttgtgagcattcgtgtacaaggagacaaacgcctcagcagcctgcgccgctgctgtgcccttacccgctatgatgctcacaagatgagccatgatgcatttactgtcatcaagaactgtaatacttctggaatccagacagaatggtctcctcctctcacaatgcttttcctctgtgctacaaaattttctgcctctgccccttcatcttctacagacatcaccagcttcttgagcagtgacccaagttctctgccaaaggtgccagttaccagctcagaagctaagacccagggaagtggcccagcggtgacagccactaagaaagcaaccacgtctctggaatcattcttccaaaaagctgcagaaaggcagaaagttaaagaagcttcgctttcatctcttactgctcccactcaggctcccatgagcaattcaccatccaagccctcattaccttttcaaaccagtcaaagtacaggaactgagcccttctttaagcagaaaagtctgcttctaaagcagaaacagcttaataattcttcagtttcttccccccaacaaaacccatggtccaactgtaaagcattaccaaactctttaccaacagagtatccagggtgtgtccctgtttgtgaaggggtgtcgaagctagaagaatcctctaaagcaactcctgcagagatggatttggcccacaacagccaaagcatgcacgcctcttcagcttccaaatctgtgctggaggtgactcagaaagcaaccccaaatccaagtcttctagctgctgaggaccaagtgccctgtgagaagtgtggctccctggtaccggtatgggatatgccagaacacatggactatcattttgcattggagttgcagaaatcctttttgcagccccactcttcaaacccccaggttgtttctgccgtatctcatcaaggcaaaagaaatcccaagagccctttggcctgcactaataaacgccccaggcctgagggcatgcaaacattggaatcattttttaagccattaacacattagtgctgccctcaggcttgcctgtaggatttaatattttttatctttacagatctttatctttaatattttatctttacagatttccctgagaaagggaattatgaaatttttaatacaaaaaataatccatttaggtgctgagttacggtcccatctcttcacaggcatggattctaatcccactgctgacagagatgtaaaaattcatcctaccagagtttttaatctttagcatttagggaggcagtgtcataaagtaaaaagtgtgtgggccttggagtctaagagacgtggttgcaaacttagctctggttattgcaatgagggccttgaacaagtcattttcttcacattctcatctgtaaaatggagataataccttacagattattgcagattaataacaatgtattcaaattatgtaactcggccgggtacaatggctcacgcctgtaatcctaacactttgggaggccgaggcagacagatcacctgaggtcaggagtttgagaccagcctggccaacatggcaaaaccatctctactaaaaatagaaaaattagccaggcacgttccaggcacctgtgatcccagctacttagaggctgaggcagaagaattgctttaaccttggaggcggaggttgcattgagctgagatcatgctagtgcgctccagcctgggcaacagagcgagacttcatctcagaaaataaaaaataggggccaggcacagtggctcatacctgtaatgccagcactttgggaggccaaggcgggcagatcacgaggtcaggagtttcagaccaatatggtgaaaccccatctctactaaaattacaaaaaaaattatccaggcgtggtggtgcacgcctgtaatcccagctactcaggaggctaaggcaggagaatcacttgaacccaggaggcagaggttggagtgagctgagatcgcgccaccgcactccagcctgggcaacagagcgagactccatctcaaacaaaaacaagaacaaaaacaaacataaagttggcacagaaaagggaccaagtttaaaaaagggttttaaatgtaatgagacttgcatagttaaaaaaaaaaaaaaaaaaaagaaaaacttctctttaggctgggtgcggttcctcatgcctataatcccagcatttagggaggctgaggtgagtggattgcaggagctcaggagttcgagaccagcctgggcaaggtggcaaaaccccgtctctactaaaaaaaattagctgggcttggtggcaggcgccgtgtaatcccaggtactcgggagactgaggcaggagaattgcttgaacctggaaggtggaggttgcagtgagttgagatcacaccaatgcactccagccagggtgagagtgagagactgtctcaaaaaaaaaaaaaacaaaagaaaaacttctctctagctctgtgacgggcagttcagataataccttcaccagatttacctgttttcagctgaagaatgtgagatgaagccttgaaaccctaaaagtgatatggtaactagggcaggtctttctgtacataaaagtgacttaataaacagtgaatttcatacaggtaaaccctattataccctcagttctaaccattggcctatctcttgcgttttgttctaatgtagaattagattgctacttgactagttcaggaactctgtttagatctgataagtcataatcaaatcttgccaggctgctgggattacaggcctgagccaccaggccagccccaacttctactttttattttatttataaattggggggggggttctatatttagtttgaagaggtggggaagatttgaaaaccactagatttaccaggaaatttttttcttcaaaaatattttctgcttttatgatacttgaatatctaataaaagacaatatttagccagtcacggtggctgatgcttgtaatcctaacactttgggaggctgaggtgggtggactactggagccctggagttcaaaaccggcctaagccacatggcaaaacagtctttacaaaaaatacaaagatggtggcttatgcctgtagtcgtacctactcaggaggctgaggttgggaggatcacctgaatctgggagtttggggctgcaataagccatgattgtgccgctgcactccagcctgggtgacagtctgagaccctgtctcaaaa

SEQ ID NO: 373135 - DNA, 2090 bp, Homo sapiens
  misc_feature (1897)..(1897): n is a, c, g, or t
aacggcccttcgcagcgggcgcgctgtcagacctcagtctggcggctgcattgctgggcgcgccgctctcgtctgatccctgctggggacggttgcccgggcaggatcctttacgatcccttctcggtttctccgtcgtcacagggaataaatctcgctcgaaactcactggaccgctcctagaaaggcgaaaagatattcaggagcccttccattttccttccagtaggcaccgaacccagcattttcggcaaccgctgctggcagttttgccaggtgtttgttaccttgaaaaatggctactggacaggatcgagtggttgctctcgtggacatggactgtttttttgttcaagtggagcagcggcaaaatcctcatttgaggaataaaccttgtgcagttgtacagtacaaatcatggaagggtggtggaataattgcagtgagttatgaagctcgtgcatttggagtcactagaagtatgtgggcagatgatgctaagaagttatgtccagatcttctactggcacaagttcgtgagtcccgtgggaaagctaacctcaccaagtaccgggaagccagtgttgaagtgatggagataatgtctcgttttgctgtgattgaacgtgccagcattgatgaggcttacgtagatctgaccagtgctgtacaagagagactacaaaagctacaaggtcagcctatctcggcagacttgttgccaagcacttacattgaagggttgccccaaggccctacaacggcagaagagactgttcagaaagaggggatgcgaaaacaaggcttatttcaatggctcgattctcttcagattgataacctcacctctccagacctgcagctcaccgtgggagcagtgattgtggaggaaatgagagcagccatagagagggagactggttttcagtgttcagctggaatttcacacaataaggtcctggcaaaactggcctgtggactaaacaagcccaaccgccaaaccctggtttcacatgggtcagtcccacagctcttcagccaaatgcccattcgcaaaatccgtagtcttggaggaaagctaggggcctctgtcattgagatcctagggatagaatacatgggtgaactgacccagttcactgaatcccagctccagagtcattttggggagaagaatgggtcttggctatatgccatgtgccgagggattgaacatgatccagttaaacccaggcaactacccaaaaccattggctgtagtaagaacttcccaggaaaaacagctcttgctactcgggaacaggtacaatggtggctgttgcaattagcccaggaactagaggagagactgactaaagaccgaaatgataatgacagggtagccacccagctggttgtgagcattcgtgtacaaggagacaaacgcctcagcagcctgcgccgctgctgtgcccttacccgctatgatgctcacaagatgagccatgatgcatttactgtcatcaagaactgtaatacttctggaatccagacagaatggtctcctcctctcacaatgcttttcctctgtgctacaaaattttctgcctctgccccttcatcttctacagacatcaccagcttcttgagcagtgacccaagttctctgccaaaggtgccagttaccagctcagaagctaagacccagggaagtggcccagcggtgacagccactaagaaagcaaccacgtctctggaatcattcttccaaaaagctgcagaaaggcagaaagttaaagaagcttcgctttcatctcttactgctcccactcaggctcccatgagcaattcaccatccaagccctcattaccttttcaaaccagtcaaagtacaggaactgagccctttagcgaaagntggtcttaggccgaaccgcttataatcttggttttcccccgaaaccggctccggtgggttccccttcaccggtccgggggcggtggtggggggcgagacctcatccggggttggccggaggcgttcacgtggggggggcccccttggtggtgtgggggagctgggtgccctttcgtcgccgcttgctctctct

SEQ ID NO: 373136 - DNA, 2305 bp, Homo sapiens
  misc_feature (499)..(499): n is a, c, g, or t
  misc_feature (726)..(726): n is a, c, g, or t
ggtgtgtagaggacattttcttaagcccttaagtacaaatttaagaggtaagtgcttcagccattagggttactggcttgttcatctttcccactgagtgtaaatatttagcttagggtttaaaatttgttatgtagctttttgcacttgtccatgtttatactactgtattattatttatttattttgagatggaagtctcactctgtcgcccaggctggagtgcagtggcgtgatcttagctcactgcaatctccgcctcccgggttcaagcgattctcctgcctcagcctctcgagtagctgggattacaggcatgtgccaccatgcccagctaatttttgtatttttagtagagacagggtttcatcatgttggccaggctggtctgaaactcctgacctcaagtgattgacccaccttggcctcccaaagtgctgggattacaggtgtgagccaccacaccccgcctatagtactgattcttattctccactcntgtgtgtgaaaagtcagctcttttggcttttctgttatggggaaacttgaattacacagggaacccaactgaagaaaattgaacctgggaggcggaggttgcagtgagccgagatttccactgcattccagcctgggcgatagagtaactctgtctcaaaaaaacccactagatcatctctagaacattgctactcccaagtatgatttgaggaacagcagcctcantatcaccagggaacttattagaaatagtctcagcctcaccactattcccacttaattgtaatctgatattaacaagatttcccaatgtgggtcaggtgtggtggctcatgcctgtaatcccacactttgggaggccaaggcaggtggatcacctgaggtcaggagttcaagaccagtctggccaacatggcgaaaccccatctctactaaaaatacaaaaattagccgggcgtggtggtgcacgcctgtaatcccagctactcaggaggctaaggcaggagaatcacttgaacccaggaggcagaggttggagtgagctgagatcgcgccaccgcactccagcctgggcaacagagcgagactccatctcaaacaaaaacaagaacaaaaacaaacataaagttggcacagaaaagggaccaagtttaaaaaagggttttaaatgtaatgagacttgcatagttaaaaaaaaaaaaaaaaaaaagaaaaacttctctttaggctgggtgcggttcctcatgcctataatcccagcatttagggaggctgaggtgagtggattgcaggagctcaggagttcgagaccagcctgggcaaggtggcaaaaccccgtctctactaaaaaaaattagctgggcttggtggcaggcgccgtgtaatcccaggtactcgggagactgaggcaggagaattgcttgaacctggaaggtggaggttgcagtgagttgagatcacaccaatgcactccagccagggtgagagtgagagactgtctcaaaaaaaaaaaaaacaaaagaaaaacttctctctagctctgtgacgggcagttcagataataccttcaccagatttacctgttttcagctgaagaatgtgagatgaagccttgaaaccctaaaagtgatatggtaactagggcaggtctttctgtacataaaagtgacttaataaacagtgaatttcatacaggtaaaccctattataccctcagttctaaccattggcctatctcttgcgttttgttctaatgtagaattagattgctacttgactagttcaggaactctgtttagatctgataagtcataatcaaatcttgccaggctgctgggattacaggcctgagccaccaggccagccccaacttctactttttattttatttataaattggggggggggttctatatttagtttgaagaggtggggaagatttgaaaaccactagatttaccaggaaatttttttcttcaaaaatattttctgcttttatgatacttgaatatctaataaaagacaatatttagccagtcacggtggctgatgcttgtaatcctaacactttgggaggctgaggtgggtggactactggagccctggagttcaaaaccggcctaagccacatggcaaaacagtctttacaaaaaatacaaagatggtggcttatgcctgtagtcgtacctactcaggaggctgaggttgggaggatcacctgaatctgggagtttggggctgcaataagccatgattgtgccgctgcactccagcctgggtgacagtctgagaccctgtctcaaaa

SEQ ID NO: 373137 - DNA, 1897 bp, Homo sapiens
  misc_feature (499)..(499): n is a, c, g, or t
  misc_feature (726)..(726): n is a, c, g, or t
ggtgtgtagaggacattttcttaagcccttaagtacaaatttaagaggtaagtgcttcagccattagggttactggcttgttcatctttcccactgagtgtaaatatttagcttagggtttaaaatttgttatgtagctttttgcacttgtccatgtttatactactgtattattatttatttattttgagatggaagtctcactctgtcgcccaggctggagtgcagtggcgtgatcttagctcactgcaatctccgcctcccgggttcaagcgattctcctgcctcagcctctcgagtagctgggattacaggcatgtgccaccatgcccagctaatttttgtatttttagtagagacagggtttcatcatgttggccaggctggtctgaaactcctgacctcaagtgattgacccaccttggcctcccaaagtgctgggattacaggtgtgagccaccacaccccgcctatagtactgattcttattctccactcntgtgtgtgaaaagtcagctcttttggcttttctgttatggggaaacttgaattacacagggaacccaactgaagaaaattgaacctgggaggcggaggttgcagtgagccgagatttccactgcattccagcctgggcgatagagtaactctgtctcaaaaaaacccactagatcatctctagaacattgctactcccaagtatgatttgaggaacagcagcctcantatcaccagggaacttattagaaatagtctcagcctcaccactattcccacttaattgtaatctgatattaacaagatttcccaatgtgggtcagcgtggtggctcacgcctgtaatcccagcagtctgggaggccaaggcaggtggatcacctgaggtcaggagtttgagaccagtctggccaacatggtgaaaccccatctctactaaaattacaaaaattagccggtgtgctggcgcatgccgtgtaatcccaggtactcgggagactgaggcaggagaattgcttgaacctggaaggtggaggttgcagtgagttgagatcacaccaatgcactccagccagggtgagagtgagagactgtctcaaaaaaaaaaaaaacaaaagaaaaacttctctctagctctgtgacgggcagttcagataataccttcaccagatttacctgttttcagctgaagaatgtgagatgaagccttgaaaccctaaaagtgatatggtaactagggcaggtctttctgtacataaaagtgacttaataaacagtgaatttcatacaggtaaaccctattataccctcagttctaaccattggcctatctcttgcgttttgttctaatgtagaattagattgctacttgactagttcaggaactctgtttagatctgataagtcataatcaaatcttgccaggctgctgggattacaggcctgagccaccaggccagccccaacttctactttttattttatttataaattggggggggggttctatatttagtttgaagaggtggggaagatttgaaaaccactagatttaccaggaaatttttttcttcaaaaatattttctgcttttatgatacttgaatatctaataaaagacaatatttagccagtcacggtggctgatgcttgtaatcctaacactttgggaggctgaggtgggtggactactggagccctggagttcaaaaccggcctaagccacatggcaaaacagtctttacaaaaaatacaaagatggtggcttatgcctgtagtcgtacctactcaggaggctgaggttgggaggatcacctgaatctgggagtttggggctgcaataagccatgattgtgccgctgcactccagcctgggtgacagtctgagaccctgtctcaaaa

SEQ ID NO: 373138 - DNA, 1268 bp, Homo sapiens
  misc_feature (499)..(499): n is a, c, g, or t
ggtgtgtagaggacattttcttaagcccttaagtacaaatttaagaggtaagtgcttcagccattagggttactggcttgttcatctttcccactgagtgtaaatatttagcttagggtttaaaatttgttatgtagctttttgcacttgtccatgtttatactactgtattattatttatttattttgagatggaagtctcactctgtcgcccaggctggagtgcagtggcgtgatcttagctcactgcaatctccgcctcccgggttcaagcgattctcctgcctcagcctctcgagtagctgggattacaggcatgtgccaccatgcccagctaatttttgtatttttagtagagacagggtttcatcatgttggccaggctggtctgaaactcctgacctcaagtgattgacccaccttggcctcccaaagtgctgggattacaggtgtgagccaccacaccccgcctatagtactgattcttattctccactcntgtgtgtgaaaagtcagctcttttggcttttctgttatggggaaacttgaattacacagggaacccaactgaagaaattgaacctgggaggcagaggttgcagtgagccgagatttccactgcattccagcctgggcgatagagtaactctgtctcaaaaaaacccactagatcatctctagaacattgctactcccaagtatgatttgaggaacagcagcctcagtatcaccagggaacttattagaaatagtctcagcctcaccactattcccacttaattgtaatctgatattaacaagatttcccaatgtgggtcaggtgtggtggctcatgcctgtaatcccacactttgggaggccaaggtgggcggatcacttgaggctgggagtttgagaccaggctggccaacatggggaaaacccatctctacaaaaaataacaaaaattaggtgtgtgtggtgacgcatgcgtgtaatcccagctacttaggaggctgaggcaggagaatcacttgaatctgggaggcagaggttgtagtgagctgagattgtgccactgcactccagtctgggcaacagagtgacactgttacacgctgaagcaatgtgacgatgaagccttgaaaacctaacaagtgatatggtaactagggcaggtctttctgtacataaaagtgacttcactaaacagtgaattccatacaggtcaaccctattataccctcagttctaacattggctatctcttgcgttggtcttatgtagaa

SEQ ID NO: 373139 - DNA, 1004 bp, Homo sapiens
ctgtaatcccagcactttgggaggccgaggcgggcggatcacgaggtcaggagatcgagaccatcctggctaacacggtgaaaccccgtctctactaaaaatacaaaaaattagccgggcggggtggcacgcgcctgtagtcccagccactttgggaggccaaggcaggtggaccacgtgaagtcaggagttcaagacaagcatggccaacatggcgaaaccctgtatctactaaaaatacaaaaattagccgggcatggtggtgggtgcgtgtaatcccagctagttgggaggctgaggcaggagaatcacttgaacctgggaggcagaggttgcagtgagccgagatttccactgcattccagcctgggcgatagagtaactctgtctcaaaaaaacccactagatcatctctagaacattgctactcccaagtatgatttgaggaacagcagcctcagtatcaccagggaacttattagaaatagtctcagcctcaccactattcccacttaattgtaatctgatattaacaagatttcccaatgtgggtcaggtgtggtggctcatgcctgtaatcccacactttgggaggccaaggtgggcggatcacttgaggctgggagtttgagaccaggctggccaacatggggaaaacccatctctacaaaaaataacaaaaattaggtgtgtgtggtgacgcatgcgtgtaatcccagctacttaggaggctgaggcaggagaatcacttgaatctgggaggcagaggttgtagtgagctgagattgtgccactgcactccagtctgggcaacagagtgacactgttacacgctgaagcaatgtgacgatgaagccttgaaaacctaacaagtgatatggtaactagggcaggtctttctgtacataaaagtgacttcactaaacagtgaattccatacaggtcaaccctattataccctcagttctaacattggctatctcttgcgttggtcttatgtagaa

SEQ ID NO: 373140 - DNA, 740 bp, Homo sapiens
ttatgtgacggagtttctctcatcgccccggctggaatgcaatggcacgatctcggctcactgcaacctccgcctcccgggttcaagcgattctcctgcatcagcctcctgagtagctgggattataggcatgcaccatcacgcctggctaatttttgtatttttagtagagatggggtttcgccacgttggccaggctggtcttgaactcttgatctcaagtgatccacccgccctggcctcccaaggtgctgggattacaggcctgagccaccaggccagccccaacttctactttttattttatttataaattggggggggggttctatatttagtttgaagaggtggggaagatttgaaaaccactagatttaccaggaaatttttttcttcaaaaatattttctgcttttatgatacttgaatatctaataaaagacaatatttagccagtcacggtggctgatgcttgtaatcctaacactttgggaggctgaggtgggtggactactggagccctggagttcaaaaccggcctaagccacatggcaaaacagtctttacaaaaaatacaaagatggtggcttatgcctgtagtcgtacctactcaggaggctgaggttgggaggatcacctgaatctgggagtttggggctgcaataagccatgattgtgccgctgcactccagcctgggtgacagtctgagaccctgtctcaaaaaaaaaaaaaaaaaaaaa

SEQ ID NO: 373141 - DNA, 2328 bp, Homo sapiens
aacggcccttcgcagcgggcgcgctgtcagacctcagtctggcggctgcattgctgggcgcgccgctctcgtctgatccctgctggggacggttgcccgggcaggatcctttacgatcccttctcggtttctccgtcgtcacagggaataaatctcgctcgaaactcactggaccgctcctagaaaggcgaaaagatattcaggagcccttccattttccttccagtaggcaccgaacccagcattttcggcaaccgctgctggcagttttgccaggtgtttgttaccttgaaaaatggctactggacaggatcgagtggttgctctcgtggacatggactgtttttttgttcaagtggagcagcggcaaaatcctcatttgaggaataaaccttgtgcagttgtacagtacaaatcatggaagggtggtggaataattgcagtgagttatgaagctcgtgcatttggagtcactagaagtatgtgggcagatgatgctaagaagttatgtccagatcttctactggcacaagttcgtgagtcccgtgggaaagctaacctcaccaagtaccgggaagccagtgttgaagtgatggagataatgtctcgttttgctgtgattgaacgtgccagcattgatgaggcttacgtagatctgaccagtgctgtacaagagagactacaaaagctacaaggtcagcctatctcggcagacttgttgccaagcacttacattgaagggttgccccaaggccctacaacggcagaagagactgttcagaaagaggggatgcgaaaacaaggcttatttcaatggctcgattctcttcagattgataacctcacctctccagacctgcagctcaccgtgggagcagtgattgtggaggaaatgagagcagccatagagagggagactggttttcagtgttcagctggaatttcacacaataaggtcctggcaaaactggcctgtggactaaacaagcccaaccgccaaaccctggtttcacatgggtcagtcccacagctcttcagccaaatgcccattcgcaaaatccgtagtcttggaggaaagctaggggcctctgtcattgagatcctagggatagaatacatgggtgaactgacccagttcactgaatcccagctccagagtcattttggggagaagaatgggtcttggctatatgccatgtgccgagggattgaacatgatccagttaaacccaggcaactacccaaaaccattggctgtagtaagaacttcccaggaaaaacagctcttgctactcgggaacaggtacaatggtggctgttgcaattagcccaggaactagaggagagactgactaaagaccgaaatgataatgacagggtagccacccagctggttgtgagcattcgtgtacaaggagacaaacgcctcagcagcctgcgccgctgctgtgcccttacccgctatgatgctcacaagatgagccatgatgcatttactgtcatcaagaactgtaatacttctggaatccagacagaatgacatcaccagcttcttgagcagtgacccaagttctctgccaaaggtgccagttaccagctcagaagctaagacccagggaagtggcccagcggtgacagccactaagaaagcaaccacgtctctggaatcattcttccaaaaagctgcagaaaggcagaaagttaaagaagcttcgctttcatctcttactgctcccactcaggctcccatgagcaattcaccatccaagccctcattaccttttcaaaccagtcaaagtacaggaactgagcccttctttaagcagaaaagtctgcttctaaagcagaaacagcttaataattcttcagtttcttccccccaacaaaacccatggtccaactgtaaagcattaccaaactctttaccaacagagtatccagggtgtgtccctgtttgtgaaggggtgtcgaagctagaagaatcctctaaagcaactcctgcagagatggatttggcccacaacagccaaagcatgcacgcctcttcagcttccaaatctgtgctggaggtgactcagaaagcaaccccaaatccaagtcttctagctgctgaggaccaagtgccctgtgagaagtgtggctccctggtaccggtatgggatatgccagaacacatggactatcattttgcattggagttgcagaaatcctttttgcagccccactcttcaaacccccaggttgtttctgccgtatctcatcaaggcaaaagaaatcccaagagccctttggcctgcactaataaacgccccaggcctgagggcatgc

SEQ ID NO: 373142 - DNA, 4643 bp, Homo sapiens
aacggcccttcgcagcgggcgcgctgtcagacctcagtctggcggctgcattgctgggcgcgccgctctcgtctgatccctgctggggacggttgcccgggcaggatcctttacgatcccttctcggtttctccgtcgtcacagggaataaatctcgctcgaaactcactggaccgctcctagaaaggcgaaaagatattcaggagcccttccattttccttccagtaggcaccgaacccagcattttcggcaaccgctgctggcagttttgccaggtgtttgttaccttgaaaaatggctactggacaggatcgagtggttgctctcgtggacatggactgtttttttgttcaagtggagcagcggcaaaatcctcatttgaggaataaaccttgtgcagttgtacagtacaaatcatggaagggtggtggaataattgcagtgagttatgaagctcgtgcatttggagtcactagaagtatgtgggcagatgatgctaagaagttatgtccagatcttctactggcacaagttcgtgagtcccgtgggaaagctaacctcaccaagtaccgggaagccagtgttgaagtgatggagataatgtctcgttttgctgtgattgaacgtgccagcattgatgaggcttacgtagatctgaccagtgctgtacaagagagactacaaaagctacaaggtcagcctatctcggcagacttgttgccaagcacttacattgaagggttgccccaaggccctacaacggcagaagagactgttcagaaagaggggatgcgaaaacaaggcttatttcaatggctcgattctcttcagattgataacctcacctctccagacctgcagctcaccgtgggagcagtgattgtggaggaaatgagagcagccatagagagggagactggttttcagtgttcagctggaatttcacacaataaggtcctggcaaaactggcctgtggactaaacaagcccaaccgccaaaccctggtttcacatgggtcagtcccacagctcttcagccaaatgcccattcgcaaaatccgtagtcttggaggaaagctaggggcctctgtcattgagatcctagggatagaatacatgggtgaactgacccagttcactgaatcccagctccagagtcattttggggagaagaatgggtcttggctatatgccatgtgccgagggattgaacatgatccagttaaacccaggcaactacccaaaaccattggctgtagtaagaacttcccaggaaaaacagctcttgctactcgggaacaggtacaatggtggctgttgcaattagcccaggaactagaggagagactgactaaagaccgaaatgataatgacagggtagccacccagctggttgtgagcattcgtgtacaaggagacaaacgcctcagcagcctgcgccgctgctgtgcccttacccgctatgatgctcacaagatgagccatgatgcatttactgtcatcaagaactgtaatacttctggaatccagacagaatggtctcctcctctcacaatgcttttcctctgtgctacaaaattttctgcctctgccccttcatcttctacagacatcaccagcttcttgagcagtgacccaagttctctgccaaaggtgccagttaccagctcagaagctaagacccagggaagtggcccagcggtgacagccactaagaaagcaaccacgtctctggaatcattcttccaaaaagctgcagaaaggcagaaagttaaagaagcttcgctttcatctcttactgctcccactcaggctcccatgagcaattcaccatccaagccctcattaccttttcaaaccagtcaaagtacaggaactgagcccttctttaagcagaaaagtctgcttctaaagcagaaacagcttaataattcttcagtttcttccccccaacaaaacccatggtccaactgtaaagcattaccaaactctttaccaacagagtatccagggtgtgtccctgtttgtgaaggggtgtcgaagctagaagaatcctctaaagcaactcctgcagagatggatttggcccacaacagccaaagcatgcacgcctcttcagcttccaaatctgtgctggaggtgactcagaaagcaaccccaaatccaagtcttctagctgctgaggaccaagtgccctgtgagaagtgtggctccctggtaccggtatgggatatgccagaacacatggactatcattttgcattggagttgcagaaatcctttttgcagccccactcttcaaacccccaggttgtttctgccgtatctcatcaaggcaaaagaaatcccaagagccctttggcctgcactaataaacgccccaggcctgagggcatgcaaacattggaatcattttttaagccattaacacattagtgctgccctcaggcttgcctgtaggatttaatattttttatctttacagatctttatctttaatattttatctttacagatttccctgagaaagggaattatgaaatttttaatacaaaaaataatccatttaggtgctgagttacggtcccatctcttcacaggcatggattctaatcccactgctgacagagatgtaaaaattcatcctaccagagtttttaatctttagcatttagggaggcagtgtcataaagtaaaaagtgtgtgggccttggagtctaagagacgtggttgcaaacttagctctggttattgcaatgagggccttgaacaagtcattttcttcacattctcatctgtaaaatggagataataccttacagattattgcagattaataacaatgtattcaaattatgtaactcggccgggtacaatggctcacgcctgtaatcctaacactttgggaggccgaggcagacagatcacctgaggtcaggagtttgagaccagcctggccaacatggcaaaaccatctctactaaaaatagaaaaattagccaggcacgttccaggcacctgtgatcccagctacttagaggctgaggcagaagaattgctttaaccttggaggcggaggttgcattgagctgagatcatgctagtgcgctccagcctgggcaacagagcgagacttcatctcagaaaataaaaaataggggccaggcacagtggctcatacctgtaatgccagcactttgggaggccaaggcgggcagatcacgaggtcaggagtttcagaccaatatggtgaaaccccatctctactaaaattacaaaaaaaattatccaggcgtggtggtgcacgcctgtaatcccagctactcaggaggctaaggcaggagaatcacttgaacccaggaggcagaggttggagtgagctgagatcgcgccaccgcactccagcctgggcaacagagcgagactccatctcaaacaaaaacaagaacaaaaacaaacataaagttggcacagaaaagggaccaagtttaaaaaagggttttaaatgtaatgagacttgcatagttaaaaaaaaaaaaaaaaaaaagaaaaacttctctttaggctgggtgcggttcctcatgcctataatcccagcatttagggaggctgaggtgagtggattgcaggagctcaggagttcgagaccagcctgggcaaggtggcaaaaccccgtctctactaaaaaaaattagctgggcttggtggcaggcgccgtgtaatcccaggtactcgggagactgaggcaggagaattgcttgaacctggaaggtggaggttgcagtgagttgagatcacaccaatgcactccagccagggtgagagtgagagactgtctcaaaaaaaaaaaaaacaaaagaaaaacttctctctagctctgtgacgggcagttcagataataccttcaccagatttacctgttttcagctgaagaatgtgagatgaagccttgaaaccctaaaagtgatatggtaactagggcaggtctttctgtacataaaagtgacttaataaacagtgaatttcatacaggtaaaccctattataccctcagttctaaccattggcctatctcttgcgttttgttctaatgtagaattagattgctacttgactagttcaggaactctgtttagatctgataagtcataatcaaatcttgccaggctgctgggattacaggcctgagccaccaggccagccccaacttctactttttattttatttataaattggggggggggttctatatttagtttgaagaggtggggaagatttgaaaaccactagatttaccaggaaatttttttcttcaaaaatattttctgcttttatgatacttgaatatctaataaaagacaatatttagccagtcacggtggctgatgcttgtaatcctaacactttgggaggctgaggtgggtggactactggagccctggagttcaaaaccggcctaagccacatggcaaaacagtctttacaaaaaatacaaagatggtggcttatgcctgtagtcgtacctactcaggaggctgaggttgggaggatcacctgaatctgggagtttggggctgcaataagccatgattgtgccgctgcactccagcctgggtgacagtctgagaccctgtctcaaaa

SEQ ID NO: 373143 - DNA, 3563 bp, Homo sapiens
  misc_feature (3544)..(3544): n is a, c, g, or t
aacggcccttcgcagcgggcgcgctgtcagacctcagtctggcggctgcattgctgggcgcgccgctctcgtctgatccctgctggggacggttgcccgggcaggatcctttacgatcccttctcggtttctccgtcgtcacagggaataaatctcgctcgaaactcactggaccgctcctagaaaggcgaaaagatattcaggagcccttccattttccttccagtaggcaccgaacccagcattttcggcaaccgctgctggcagttttgccaggtgtttgttaccttgaaaaatggctactggacaggatcgagtggttgctctcgtggacatggactgtttttttgttcaagtggagcagcggcaaaatcctcatttgaggaataaaccttgtgcagttgtacagtacaaatcatggaagggtggtggaataattgcagtgagttatgaagctcgtgcatttggagtcactagaagtatgtgggcagatgatgctaagaagttatgtccagatcttctactggcacaagttcgtgagtcccgtgggaaagctaacctcaccaagtaccgggaagccagtgttgaagtgatggagataatgtctcgttttgctgtgattgaacgtgccagcattgatgaggcttacgtagatctgaccagtgctgtacaagagagactacaaaagctacaaggtcagcctatctcggcagacttgttgccaagcacttacattgaagggttgccccaaggccctacaacggcagaagagactgttcagaaagaggggatgcgaaaacaaggcttatttcaatggctcgattctcttcagattgataacctcacctctccagacctgcagctcaccgtgggagcagtgattgtggaggaaatgagagcagccatagagagggagactggttttcagtgttcagctggaatttcacacaataaggtcctggcaaaactggcctgtggactaaacaagcccaaccgccaaaccctggtttcacatgggtcagtcccacagctcttcagccaaatgcccattcgcaaaatccgtagtcttggaggaaagctaggggcctctgtcattgagatcctagggatagaatacatgggtgaactgacccagttcactgaatcccagctccagagtcattttggggagaagaatgggtcttggctatatgccatgtgccgagggattgaacatgatccagttaaacccaggcaactacccaaaaccattggctgtagtaagaacttcccaggaaaaacagctcttgctactcgggaacaggtacaatggtggctgttgcaattagcccaggaactagaggagagactgactaaagaccgaaatgataatgacagggtagccacccagctggttgtgagcattcgtgtacaaggagacaaacgcctcagcagcctgcgccgctgctgtgcccttacccgctatgatgctcacaagatgagccatgatgcatttactgtcatcaagaactgtaatacttctggaatccagacagaatggtctcctcctctcacaatgcttttcctctgtgctacaaaattttctgcctctgccccttcatcttctacagacatcaccagcttcttgagcagtgacccaagttctctgccaaaggtgccagttaccagctcagaagctaagacccagggaagtggcccagcggtgacagccactaagaaagcaaccacgtctctggaatcattcttccaaaaagctgcagaaaggcagaaagttaaagaagcttcgctttcatctcttactgctcccactcaggctcccatgagcaattcaccatccaagccctcattaccttttcaaaccagtcaaagtacaggaactgagcccttctttaagcagaaaagtctgcttctaaagcagaaacagcttaataattcttcagtttcttccccccaacaaaacccatggtccaactgtaaagcattaccaaactctttaccaacagagtatccagggtgtgtccctgtttgtgaaggggtgtcgaagctagaagaatcctctaaagcaactcctgcagagatggatttggcccacaacagccaaagcatgcacgcctcttcagcttccaaatctgtgctggaggtgactcagaaagcaaccccaaatccaagtcttctagctgctgaggaccaagtgccctgtgagaagtgtggctccctggtaccggtatgggatatgccagaacacatggactatcattttgcattggagttgcagaaatcctttttgcagccccactcttcaaacccccaggttgtttctgccgtatctcatcaaggcaaaagaaatcccaagagccctttggcctgcactaataaacgccccaggcctgagggcatgcaaacattggaatcattttttaagccattaacacattagtgctgccctcaggcttgcctgtaggatttaatattttttatctttacagatctttatctttaatattttatctttacagatttccctgagaaagggaattatgaaatttttaatacaaaaaataatccatttaggtgctgagttacggtcccatctcttcacaggcatggattctaatcccactgctgacagagatgtaaaaattcatcctaccagagtttttaatctttagcatttagggaggcagtgtcataaagtaaaaagtgtgtgggccttggagtctaagagacgtggttgcaaacttagctctggttattgcaatgagggccttgaacaagtcattttcttcacattctcatctgtaaaatggagataataccttacagattattgcagattaataacaatgtattcaaattatgtaactcggccgggtacaatggctcacgcctgtaatcctaacactttgggaggccgaggcagacagatcacctgaggtcaggagtttgagaccagcctggccaacatggcaaaaccatctctactaaaaatagaaaaattagccaggcacgttccaggcacctgtgatcccagctacttagaggctgaggcagaagaattgctttaaccttggaggcggaggttgcattgagctgagatcatgctagtgcgctccagcctgggcaacagagcgagacttcatctcagaaaataaaaaataggggccaggcacagtggctcatacctgtaatgccagcactttgggaggccaaggcgggcagatcacgaggtcaggagtttcagaccaatatggtgaaaccccatctctactaaaattacaaaaaaaattatccaggcgtggtggtgcacgcctgtaatcccagctactcaggaggctaaggcaggagaatcacttgaacccaggaggcagaggttggagtgagctgagatcgcgccaccgcactccagcctgggcaacagagcgagactccatctcaaacaaaaacaagaacaaaaacaaacataaagttggcacagaaaagggaccaagtttaaaaaagggttttaaatgtaatgagacttgcatagttaaaaaaaaaaaagggnccgttggtacccgacctga

SEQ ID NO: 373144 - DNA, 3451 bp, Homo sapiens
ttatattttatctttactctttgcagaactcagtttacctttattcttgacttttaaactactgtttccaaaccattgtcaccctggttcttttaatttcctctcctgcagttcagtacctagaattcagatgctcctcataactttatttctggtctccatcctttccacccacagaatgacagggtagccacccagctggttgtgagcattcgtgtacaaggagacaaacgcctcagcagcctgcgccgctgctgtgcccttacccgctatgatgctcacaagatgagccatgatgcatttactgtcatcaagaactgtaatacttctggaatccagacagaatggtctcctcctctcacaatgcttttcctctgtgctacaaaattttctgcctctgccccttcatcttctacagacatcaccagcttcttgagcagtgacccaagttctctgccaaaggtgccagttaccagctcagaagctaagacccagggaagtggcccagcggtgacagccactaagaaagcaaccacgtctctggaatcattcttccaaaaagctgcagaaaggcagaaagttaaagaagcttcgctttcatctcttactgctcccactcaggctcccatgagcaattcaccatccaagccctcattaccttttcaaaccagtcaaagtacaggaactgagcccttctttaagcagaaaagtctgcttctaaagcagaaacagcttaataattcttcagtttcttccccccaacaaaacccatggtccaactgtaaagcattaccaaactctttaccaacagagtatccagggtgtgtccctgtttgtgaaggggtgtcgaagctagaagaatcctctaaagcaactcctgcagagatggatttggcccacaacagccaaagcatgcacgcctcttcagcttccaaatctgtgctggaggtgactcagaaagcaaccccaaatccaagtcttctagctgctgaggaccaagtgccctgtgagaagtgtggctccctggtaccggtatgggatatgccagaacacatggactatcattttgcattggagttgcagaaatcctttttgcagccccactcttcaaacccccaggttgtttctgccgtatctcatcaaggcaaaagaaatcccaagagccctttggcctgcactaataaacgccccaggcctgagggcatgcaaacattggaatcattttttaagccattaacacattagtgctgccctcaggcttgcctgtaggatttaatattttttatctttacagatctttatctttaatattttatctttacagatttccctgagaaagggaattatgaaatttttaatacaaaaaataatccatttaggtgctgagttacggtcccatctcttcacaggcatggattctaatcccactgctgacagagatgtaaaaattcatcctaccagagtttttaatctttagcatttagggaggcagtgtcataaagtaaaaagtgtgtgggccttggagtctaagagacgtggttgcaaacttagctctggttattgcaatgagggccttgaacaagtcattttcttcacattctcatctgtaaaatggagataataccttacagattattgcagattaataacaatgtattcaaattatgtaactcggccgggtacaatggctcacgcctgtaatcctaacactttgggaggccgaggcagacagatcacctgaggtcaggagtttgagaccagcctggccaacatggcaaaaccatctctactaaaaatagaaaaattagccaggcacgttccaggcacctgtgatcccagctacttagaggctgaggcagaagaattgctttaaccttggaggcggaggttgcattgagctgagatcatgctagtgcgctccagcctgggcaacagagcgagacttcatctcagaaaataaaaaataggggccaggcacagtggctcatacctgtaatgccagcactttgggaggccaaggcgggcagatcacgaggtcaggagtttcagaccaatatggtgaaaccccatctctactaaaattacaaaaaaaattatccaggcgtggtggtgcacgcctgtaatcccagctactcaggaggctaaggcaggagaatcacttgaacccaggaggcagaggttggagtgagctgagatcgcgccaccgcactccagcctgggcaacagagcgagactccatctcaaacaaaaacaagaacaaaaacaaacataaagttggcacagaaaagggaccaagtttaaaaaagggttttaaatgtaatgagacttgcatagttaaaaaaaaaaaaaaaaaaaagaaaaacttctctttaggctgggtgcggttcctcatgcctataatcccagcatttagggaggctgaggtgagtggattgcaggagctcaggagttcgagaccagcctgggcaaggtggcaaaaccccgtctctactaaaaaaaattagctgggcttggtggcaggcgccgtgtaatcccaggtactcgggagactgaggcaggagaattgcttgaacctggaaggtggaggttgcagtgagttgagatcacaccaatgcactccagccagggtgagagtgagagactgtctcaaaaaaaaaaaaaacaaaagaaaaacttctctctagctctgtgacgggcagttcagataataccttcaccagatttacctgttttcagctgaagaatgtgagatgaagccttgaaaccctaaaagtgatatggtaactagggcaggtctttctgtacataaaagtgacttaataaacagtgaatttcatacaggtaaaccctattataccctcagttctaaccattggcctatctcttgcgttttgttctaatgtagaattagattgctacttgactagttcaggaactctgtttagatctgataagtcataatcaaatcttgccaggctgctgggattacaggcctgagccaccaggccagccccaacttctactttttattttatttataaattggggggggggttctatatttagtttgaagaggtggggaagatttgaaaaccactagatttaccaggaaatttttttcttcaaaaatattttctgcttttatgatacttgaatatctaataaaagacaatatttagccagtcacggtggctgatgcttgtaatcctaacactttgggaggctgaggtgggtggactactggagccctggagttcaaaaccggcctaagccacatggcaaaacagtctttacaaaaaatacaaagatggtggcttatgcctgtagtcgtacctactcaggaggctgaggttgggaggatcacctgaatctgggagtttggggctgcaataagccatgattgtgccgctgcactccagcctgggtgacagtctgagaccctgtctcaaaa

SEQ ID NO: 373145 - DNA, 945 bp, Homo sapiens
aacggcccttcgcagcgggcgcgctgtcagacctcagtctggcggctgcattgctgggcgcgccgctctcgtctgatccctgctggggacggttgcccgggcaggatcctttacgatcccttctcggtttctccgtcgtcacagggaataaatctcgctcgaaactcactggaccgctcctagaaaggcgaaaagatattcaggagcccttccattttccttccagtaggcaccgaacccagcattttcggcaaccgctgctggcagttttgccaggtgtttgttaccttgaaaaatggctactggacaggatcgagtggttgctctcgtggacatggactgtttttttgttcaagtggagcagcggcaaaatcctcatttgaggaataaaccttgtgcagttgtacagtacaaatcatggaagggtggtggaataattgcagtgagttatgaagctcgtgcatttggagtcactagaagtatgtgggcagatgatgctaagaagttatgtccagatcttctactggcacaagttcgtgagtcccgtgggaaagctaacctcaccaagtaccgggaagccagtgttgaagtgatggagataatgtctcgttttgctgtgattgaacgtgccagcattgatgaggcttacgtagatctgaccagtgctgtacaagagagactacaaaagctacaaggtcagcctatctcggcagacttgttgccaagcacttacattgaagggttgccccaaggccctacaacggcagaagagactgttcagaaaggtacttccatagcatcatactgcttctgcttcctgcctttggaacctgctttgcttggtcatgctgattctccttggaataattgaaaggaaacttaaactacagcctgaatgaatcacaaggactcacatggaaggatatacaaattttcttatctttc

SEQ ID NO: 373146 - DNA, 435 bp, Homo sapiens
cacagggagtttcttagggcaatagaactaatagagtattctgtgtgatactctaataatgaatacatgacactgtgtcttcatcaaaacccacagaactttacagtacaaagaatgaactctaataatagacaaattgaaaatatcatttaggaggtcaggggcaggggatttcaacatgaaatgcagaatgtgacaaaagagtctaatgatacagtatcactaaaaggtaagggggaaaaggtcttgacctaagtgactttgaaaatgagtaaagattgtaagactgaaggcaaagcaactgtatactgacgttgtactctagttgataaagttctttcccatgggcataagggttaacaactctgaaaccactatacatgtatcctggaattgaacagttaagtaaatggatagcagattgtgggagccagg

SEQ ID NO: 373147 - DNA, 425 bp, Homo sapiens
  misc_feature (391)..(391): n is a, c, g, or t
ttacttaggaatatttttaaatttattacattactgtaaactttctgacaaattcaaaattaaataattccaacttgttcacggtaagcacaacagtgatttgtcaaaggcttcttgctttttccaggatccatcatagatacttgtttctgcctcttctgtcctcttaatatcctggtagacacagagactccatagcacccataccactgcccactctctcacccctccagcacctgaaactcatttgaaagctttcagctggggggtgggtggctcacgcctgtaaatcccagcactttcggagggccaagggggtgggataacttgagggtcagggagtttcgaggaccagcctgggccaacctgaacaaaaccctatctctacttnaaaaattaccaaaatttagccgagcatggtggca

SEQ ID NO: 373148 - DNA, 458 bp, Homo sapiens
tcctggccaaaatgacgaaaccctgtctgtactaaaaatacaaaaattagccgggcatggtggtgcatacctataatcccagctattcaggaggctgaggcatgaaacgtggaggttgtagtgagccgagatcgcaccactgcactccagcctgggcgagagagtgagaccccatctcacacacaaaaaaaggggagattatttggggtggagtgggcctcaaaccctggggaaacatttgtgctaagttccatgggcagctttggggatttgctccacaaggactcccgagagatcagtgtccgcagggtgacaccggtggctgggtgaccaggagaggtagaggggagatggggcctttgctgagaccctgtggaggtgatgaggttggaggagaggccatgtggaggagaccagctaagagcaaggaggggacggcctcagggaccacactgtct

SEQ ID NO: 373149 - DNA, 1427 bp, Homo sapiens
  misc_feature (612)..(612): n is a, c, g, or t
  misc_feature (740)..(740): n is a, c, g, or t
aagtagttgcgggagggcgcggagcacgccgggaagctcgcgggtcggcaccgggacagctcccgggcgccgtggaatgcacacgtcccgcacccggaccttccggtcagcttcccggctcgctgtctgatgcccgcggtagccaatgagctagtggtgtttgtcctgctccgtccccgccctccaggggaaccaatcccattgcaggagaggcaggacgcgcaaaggcccgaaagaggagctgggcggggtggggggaaggcggaggcagtctagtaatgtaaagctccgctgagagggagagtgctgaagaaggggacagcctctgtacctgcggcgcggcccgaggggcggacgcgagcggactgacgcgctggaggctgtttatagcgctgtcaggacagcgcggggagtggaggcagaggcctgagaggctccccgggaggatagaggcatcatgatggatggatcatgaattccaaagggcatcaaattagccaacttaaaaaacggaatactctcgcggcaagatcggatcctgatagaccttcccataatataaagccgcgataaacggtgcattcctgcaaaatcatgatcaaacatctgaancacctctgatcggctattaggctaagctgccacagataacgggactgaatattgatgaattacaaccaagatactgagcggactgatcaaaatccattgtctgctggattgaagatctaggagcctanatcaaacatagattcttgtggcgaaaaaggagaccagctcagaaaaacgaatcgaacatgcctcaatagctcgaaagggacatcaaatcttttaaagacaaagttacctcgaatcgccgggagccagtattcaaagtagtgcttaggcgggggggaaatgctgcttaaatggcctggattggcatagccataaatggcaggggacgctttataatattcatatgcatcacattaattttttaaaacgacaccccaaatcaaaaccaaaatagaaacatcagcattttagaaagggacagtggcatcaaccggacaatttagagggagccctaatttaaattcccccccgcggggggagagccaatggaccataacacacaccttgtatgaaagccccctattacgagagacagaggcgatccaaaattgagagaccccctgggagggacctcaaccctctatgtgacaaccccgacggatggctccaaaaggttgtggtgaccaccgtgtgagttcctagaagaatttaagtaattcccagaaagatttaatgaagcccccgaacatgtcaatgaaagcccaacacatccagaagaacaccaataaaaacccaagccaaaagtccccacccaaaccaaaacaacaacacacaagaaaaaacacacaaaacagaaacgaacccaccaa

SEQ ID NO: 373150 - DNA, 770 bp, Homo sapiens
ccccctcagccctgctgagctagaggtggagtcctcagagggctgagtagggagagggctgggcgggggcagtggaggagcctgaggtccattcacatgtggagaccccaggggtcctgaggctccagctgctgtaagtcacaagtgggccaagtccccactaatcagcctctcctttggccatcctcagaccgcatggtgccgagcgcccacaacaggctcatggaacagctggccctcctgtgcaccacgcagtccaaggcctctgcttgtgcccggaaggtgcctgccgacactccccaggacaccaaagaggcagattcaggaagcaggtgggacttgtagccaggcccggctcctgtggtcctttagaatggccccatggttttgtagcactgactgggcctaccaagggcggggcactccatgtgcattttctcagtcactctcaagcatctgatcaggcagtcgctccagtcatccccattttagagatggggaaaccaaggctcagagaggttgactctctctggccataaatggcagggctgggactcaagccctcaagtacctgctctttccccaaacccaacgggaaccctcctttcaatgggaggccatgaggcctccctgagagtaggaaggttatcatgtgaccctgcccctctggccacagctgattggtccagctctgggcatgtgaccccagctgcgggatttttcaatctctgtgtctctgtgtaggggtggaagggcaacagccacctgtc

SEQ ID NO: 373151 - DNA, 136 bp, Homo sapiens
ctccagccacagctcctctgacagtgaggaggaggaggaggaagagatggcagctctgggagacgcagagggggcatctccttcctccctggggctacggtaaccacccaggggcctctcgccacctgcagatgtc

SEQ ID NO: 373152 - DNA, 2678 bp, Homo sapiens
aagtagttgcgggagggcgcggagcacgccgggaagctcgcgggtcggcaccgggacagctcccgggcgccgtggaatgcacacgtcccgcacccggaccttccggtcagcttcccggctcgctgtctgatgcccgcggtagccaatgagctagtggtgtttgtcctgctccgtccccgccctccaggggaaccaatcccattgcaggagaggcaggacgcgcaaaggcccgaaagaggagctgggcggggtggggggaaggcggaggcagtctagtaatgtaaagctccgctgagagggagagtgctgaagaaggggacagcctctgtacctgcggcgcggcccgaggggcggacgcgagcggactgacgcgctggaggctgtttatagcgctgtcaggacagcgcggggagtggaggcagaggcctgagagctccccggattatggtgcactgagaaggcatctggaagcctgggccctcatggcatccaacgataaaggcatggcaccctcgctgggctctccctgggcctcccagatggggccctgggatgccatcctcaaggctgtcaaagaccagctcccgtctctggactcagactcccctttgtcggactatggggaagaggagctgttcatcttccagcgaaaccaaacctccctgattccagacctgtcggaggagctggctgaagatcctgccgatggcgacaagtccagggcctgggtcgctgcagctgaagagtcccttcccgagccagttctggtgcctgcagaattggccacagaacctgggtgcagacagaacacaaggacaaaggatgcatcctctcaggaaggaagagaccctggcaggccttttgaaagctctggtgaggtcagcgctcttcttgggatggccgaggagccccccaggtggctggaaggcgaccttggaagcctgtctttcaacaccaaaggatcccagggtcctccctgggacccacaggccgaagccactctctcctgccatgaaggagacccaaaggcagagcccctcagcactgcctcacaagaatctgtgaaccgccgggccctccgacaggagagaaggaagatgatagagacggacatcctccagaaagtcacccgggatgcctgcggcccgaccagcagtgacaaaggtggggtgaaggaggcgccctgccacgctgcggagtcagctcccagatccaaaatgcccctcgtggagcctccggagggaccaccagtgctctcgctccagcaacttgaagcgtgggatttggatgacatccttcagagtctggcgggacaagaagacaaccagggaaatcgtgcacctggaactgtgtggtgggcagctgaccaccgccaagttcaagaccgcatggtgccgagcgcccacaacaggctcatggaacagctggccctcctgtgcaccacgcagtccaaggcctctgcttgtgcccggaaggtgcctgccgacactccccaggacaccaaagaggcagattcaggaagcagatgtgcctcaaggaagcagggctcccaggctgggccaggcccgcagctggcccagggcatgaggcttaacgcagagtcccccaccatctttattgacctgcggcagatggagctaccagaccacctgtccccagaaagctccagccacagctcctctgacagtgaggaggaggaggaggaagagatggcagctctgggagacgcagagggggcatctccttcctccctggggctacggacctgtaccgggaaaagccagcttctccagcagctcagggcctttcagaaggggacagcccagcccgagctgcctgccagcaaggggcccgcgggtgggagggctcaggcccctgaagacacagctggatcacgaactgggaggaagcaacacatgaagctctgtgccaaggggcagagcgcccaggctcgactcccaagaggcaggcccagagccctgggggatgttcctgagccaggggcagccagggaggccctgatgcctcctctggagcaactatagctgcctcaggatgtgtcctgctgtctgccccgtgggaagagcagagaaatcatcaccaccttgggccccacggtgccacgggctcaggcagcacagtagggcgccgggcctttgggacagtgtcccagcttcccctggggttcacccctggctgccaggccactgaggatgggcaggggtctcttctcatcaagccttgtaccaggcaaaagacaggccctgcttggccgtggtcactggccgccaagatcagggctacagatgtctgctctctggaccccacgtgatctggccactggggacccccacccgaccccactcccaatgatgaggggcattttcattgcaagtcaaaggcaagacaggcttccataaagtcccaggaggtccctcctgtagggcacaaggccaggctgcctcccagcccccaggccctctcccacctacagagaccctcccctgccccctccactccggggcctgtgccgccagaaccgggctctgcccccatacgctgccctcgcagcctggcggcctccgctgtggctgcctagctgtcaagagcaaaggctttttttttcttcaaccccattttcttccatttctcccacctttttaatgccagtaacctca

SEQ ID NO: 373153 - DNA, 215 bp, Homo sapiens
tggagagtggtgcacatgctgtggaagacagttgggtggcttctcagttgaatgtgaaattgtcatatgactcaaatattctaccctaggtatatactcccagataactgaaaacaggtattcaaacaaacacttgtatatgaatgtttatagcaacccttatttacgttagctaaaatgtagaaacaacccaaatgtccatcagctgatgaatg

SEQ ID NO: 373154 - DNA, 1701 bp, Homo sapiens
acgaggaagaaggaaaacgatttcaagagctgcacttaagcatctagaattttctgcgtcacacctcttgagagaagagactggctccaggtctgactcagtccactacaagctagacggtcttcttaaagcaccaacattacttgagtctttggataaaattgagaaaagagtctacaagtattgtggactctacaggaggcaggaggctgacaactggcagtaaagacaaagatgtcaggcctgcggcccggcactcaagtggaccctgagattgagctttttgtaaaggctggaagtgatggagagagtattggaaactgtcccttttgccaacgccttttcatgatcctctggcttaaaggagttaaatttaatgtgacaactgttgacatgaccagaaagcctgaagaactaaaggacttagccccaggtaccaatcctccgttcctggtgtataacaaggagttgaaaacagacttcattaaaattgaggagtttttagaacaaaccctggctcctccaaggtaccctcacctgagtcccaagtacaaggagtcttttgatgtgggctgtaacctctttgccaagttttctgcatacattaagaatacacaaaaggaggcaaataagaattttgaaaaatctctgctcaaagaattcaagcgtctggatgactacttaaacaccccacttctggatgaaattgatccagacagtgctgaggaacccccagtttccagaagactattcttggatggggaccagctaacactggctgattgtagcttgttacccaagctgaacattattaaagttgctgccaagaaatatcgtgactttgacattccagcagaattctcaggagtctggcgttatctccacaatgcctatgcccgtgaagaatttacccacacgtgtcctgaagacaaagaaattgaaaatacttacgcaaatgtggctaaacagaagagttaggagagctcttacaggagaaaaggctatatttgtgatcagattttacttattgacatattagaaaggtttttgcaaataagaatatgaaaaatactgtttcttctatccaactctcttatgaaaaggaactctgtattttctattagccataaataatctgtccactgtattttacaggtcttcatacttttacttaattttctttatctgtatggcaaaccactgcaatcctgaatgacatggaaagcatcacaatcttttgccctttgcttgaattcctggaatgcatacatataagctaaacagatgtctgcagttataaatgtcataagtagaggtacaatctcaccctgctccttagaaacatttccatataaatcgctaaaataatttcacatttttgttagtttaatatatacatgagtttatttctgatataaataataaatacagagagtgagcatatcagagaggcaaattcttaaagaatgatttttaaaatcagctctaggaagagctcaagatcaattggtcatagaacagcatttgacgcctagaactatgaccacctcatggtcagagatgagaatgtagcctttgtgaccagattatattatttttaaatgaagaagcactcattaaataaaacataattttaaaaaacaatataagaaacaaagtcaactgaatcttttattcatagaaatgaaaaggaaaataaaa

SEQ ID NO: 373155 - DNA, 1636 bp, Homo sapiens
acgaggaagaaggaaaacgatttcaagagctgcacttaagcatctagaattttctgcgtcacacctcttgagagaagagactggctccaggtctgactcagtccactacaagctagacggtcttcttaaagcaccaacattacttgagtctttggataaaattgagaaaagagtctacaagtattgtggactctacaggaggcaggaggctgacaactggcagtaaagacaaagatgtcaggcctgcggcccggcactcaagtggaccctgagattgagctttttgtaaaggctggaagtgatggagagagtattggaaactgtcccttttgccaacgccttttcatgatcctctggcttaaaggagttaaatttaatgtgacaactgttgacatgaccagaaagcctgaagaactaaaggacttagccccaggtaccaatcctccgttcctggtgtataacaaggagttgaaaacagacttcattaaaattgaggagtttttagaacaaaccctggctcctccaaggtaccctcacctgagtcccaagtacaaggagtcttttgatgtgggctgtaacctctttgccaagttttctgcatacattaagaatacacaaaaggaggcaaataagaattttgaaaaatctctgctcaaagaattcaagcgtctggatgactacttaaacaccccacttctggatgaaattgatccagacagtgctgaggaacccccagtttccagaagactattcttggatggggaccagctaacactggctgattgtagcttgttacccaagctgaacattattaaagttgctgccaagaaatatcgtgactttgacattccagcagaattctcaggagtctggcgttatctccacaatgcctatgcccgtgaagaatttacccacacgtgtcctgaagacaaagaaattgaaaatacttacgcaaatgtggctaaacagaagagttaggagagctcttacaggagaaaaggctatatttgtgatcagattttacttattgacatattagaaaggtttttgcaaataagaatatgaaaaatactgtttcttctatccaactctcttatgaaaaggaactctgtattttctattagccataaataatctgtccactgtattttacaggtcttcatacttttacttaattttctttatctgtatggcaaaccactgcaatcctgaatgacatggaaagcatcacaatcttttgccctttgcttgaattcctggaatgcatacatataagctaaacagatgtctgcagttataaatgtcataagtagaggtacaatctcaccctgctccttagaaacatttccatataaatcgctaaaataatttcacatttttgttagtttaatatatacatgagtttatttctgatataaataataaatacagagagtgagcatatcagagaggcaaattcttaaagaatgatttttaaaatcagctctaggaagagctcaagatcaattggtcatagaacagcatttgacgcctagaactatgaccacctcatggtcagagatgagaatgtagcctttgtgaccagattatattatttttaaatgaagaagcactcattaaataaaacataatttta

SEQ ID NO: 373156 - DNA, 2233 bp, Homo sapiens
tctggatgactacttaaacattttgaaaaatctctgctcaaagaattcaagcgtctggatgactacttaaacaccccacttctggatgaaattgatccagacagtgctgaggaacccccagtttccagaagactattcttggatggggaccagctaacactggctgattgtagcttgttacccaagctgaacattattaaagttgctgccaagaaatatcgtgactttgacattccagcagaattctcaggagtctggcgttatctccacaatgcctatgcccgtgaagaatttacccacacgtgtcctgaagacaaagaaattgaaaatacttacgcaaatgtggctaaacagaagagttaggagagctcttacaggagaaaaggctatatttgtgatcagattttacttattgacatattagaaaggtttttgcaaataagaatatgaaaaatactgtttcttctatccaactctcttatgaaaaggaactctgtattttctattagccataaataatctgtccactgtattttacaggtcttcatacttttacttaattttctttatctgtatggcaaaccactgcaatcctgaatgacatggaaagcatcacaatcttttgccctttgcttgaattcctggaatgcatacatataagctaaacagatgtctgcagttataaatgtcataagtagaggtacaatctcaccctgctccttagaaacatttccatataaatcgctaaaataatttcacatttttgttagtttaatatatacatgagtttatttctgatataaataataaatacagagagtgagcatatcagagaggcaaattcttaaagaatgatttttaaaatcagctctaggaagagctcaagatcaattggtcatagaacagcatttgacgcctagaactatgaccacctcatggtcagagatgagaatgtagcctttgtgaccagattatattatttttaaatgaagaagcactcattaaataaaacataattttaaaaaacaatataagaaacaaagtcaactgaatcttttattcatagaaatgaaaaggaaaataaaaactgtggctgaccaaaaggtcttcttgttgtccataaaaggataaggtaaacagtccttagataattacaaaactttctacaaaagttaaaatgttacattactatacgtattcagattcacttgttaaagtactcttaaatcattcaaatctggaaacaaaagctgaacttaactcttgctccctcaaaagagaaacacaagcataagtgcagcttcaaaaaaggaaaatattttaggctttggtggaagggtggagtttagataaaatttaaatgaagtagcgttttaataggttcaaagaaaagtaaggcaatgagcaaactcaaagtactgtccttgaaaaccatagagtcaagataaatgtatagtgtatggttaggtggcagagaaatgcaatcatgttgataatctttgagatacatcctgtcatcagtatatttcagaatacatgcaatgcactagcaagttacaattgatagaatacatttgaaatgttaaatgaaataagccaggcacagaaagacaaacaccacatgatctcactcatatgtggaattttaaaaagttgatctcactcatatgtggaattttaaaaagttgatctcacacaagtagagggtagaatcgtggttaccaggggctagggagagaaagaaggcagaggcactgaaagatgttggtcaatgggtataaagttacacctaggaagaataaattttggtattcaccacagtagggtgactatagcaaataataatgtagcatgtatttcaagatagctagaaaagcaggtttttaaatgtcaccacaaagaaataacaaatgtttatagtggtggatatggtaattacgcctatttgatcattatactgtgtgtacatgcattgaaacaccacattgtatcccatatatatgtacaattatgtgcccattatacatttaaaaaataaattttaaaaaccttcaattaactcttggtttaaaagaaaaatataaaccaaaactacatgatctctaaaacaaataatgatgatgtaaacacttcatatcagaatccatgggataaatataaagcagtgatcagaggaaattttataactaaacactgctattagtaaaaataaaagattgaaaataaattgatt

SEQ ID NO: 373157 - DNA, 2848 bp, Homo sapiens
acgaggaagaaggaaaacgatttcaagagctgcacttaagcatctagaattttctgcgtcacacctcttgagagaagagactggctccaggtctgactcagtccactacaagctagacggtcttcttaaagcaccaacattacttgagtctttggataaaattgagaaaagagtctacaagtattgtggactctacaggaggcaggaggctgacaactggcagtaaagacaaagatgtcaggcctgcggcccggcactcaagtggaccctgagattgagctttttgtaaaggctggaagtgatggagagagtattggaaactgtcccttttgccaacgccttttcatgatcctctggcttaaaggagttaaatttaatgtgacaactgttgacatgaccagaaagcctgaagaactaaaggacttagccccaggtaccaatcctccgttcctggtgtataacaaggagttgaaaacagacttcattaaaattgaggagtttttagaacaaaccctggctcctccaaggtaccctcacctgagtcccaagtacaaggagtcttttgatgtgggctgtaacctctttgccaagttttctgcatacattaagaatacacaaaaggaggcaaataagaattttgaaaaatctctgctcaaagaattcaagcgtctggatgactacttaaacaccccacttctggatgaaattgatccagacagtgctgaggaacccccagtttccagaagactattcttggatggggaccagctaacactggctgattgtagcttgttacccaagctgaacattattaaagttgctgccaagaaatatcgtgactttgacattccagcagaattctcaggagtctggcgttatctccacaatgcctatgcccgtgaagaatttacccacacgtgtcctgaagacaaagaaattgaaaatacttacgcaaatgtggctaaacagaagagttaggagagctcttacaggagaaaaggctatatttgtgatcagattttacttattgacatattagaaaggtttttgcaaataagaatatgaaaaatactgtttcttctatccaactctcttatgaaaaggaactctgtattttctattagccataaataatctgtccactgtattttacaggtcttcatacttttacttaattttctttatctgtatggcaaaccactgcaatcctgaatgacatggaaagcatcacaatcttttgccctttgcttgaattcctggaatgcatacatataagctaaacagatgtctgcagttataaatgtcataagtagaggtacaatctcaccctgctccttagaaacatttccatataaatcgctaaaataatttcacatttttgttagtttaatatatacatgagtttatttctgatataaataataaatacagagagtgagcatatcagagaggcaaattcttaaagaatgatttttaaaatcagctctaggaagagctcaagatcaattggtcatagaacagcatttgacgcctagaactatgaccacctcatggtcagagatgagaatgtagcctttgtgaccagattatattatttttaaatgaagaagcactcattaaataaaacataattttaaaaaacaatataagaaacaaagtcaactgaatcttttattcatagaaatgaaaaggaaaataaaaactgtggctgaccaaaaggtcttcttgttgtccataaaaggataaggtaaacagtccttagataattacaaaactttctacaaaagttaaaatgttacattactatacgtattcagattcacttgttaaagtactcttaaatcattcaaatctggaaacaaaagctgaacttaactcttgctccctcaaaagagaaacacaagcataagtgcagcttcaaaaaaggaaaatattttaggctttggtggaagggtggagtttagataaaatttaaatgaagtagcgttttaataggttcaaagaaaagtaaggcaatgagcaaactcaaagtactgtccttgaaaaccatagagtcaagataaatgtatagtgtatggttaggtggcagagaaatgcaatcatgttgataatctttgagatacatcctgtcatcagtatatttcagaatacatgcaatgcactagcaagttacaattgatagaatacatttgaaatgttaaatgaaataagccaggcacagaaagacaaacaccacatgatctcactcatatgtggaattttaaaaagttgatctcactcatatgtggaattttaaaaagttgatctcacacaagtagagggtagaatcgtggttaccaggggctagggagagaaagaaggcagaggcactgaaagatgttggtcaatgggtataaagttacacctaggaagaataaattttggtattcaccacagtagggtgactatagcaaataataatgtagcatgtatttcaagatagctagaaaagcaggtttttaaatgtcaccacaaagaaataacaaatgtttatagtggtggatatggtaattacgcctatttgatcattatactgtgtgtacatgcattgaaacaccacattgtatcccatatatatgtacaattatgtgcccattatacatttaaaaaataaattttaaaaaccttcaattaactcttggtttaaaagaaaaatataaaccaaaactacatgatctctaaaacaaataatgatgatgtaaacacttcatatcagaatccatgggataaatataaagcagtgatcagaggaaattttataactaaacactgctattagtaaaaataaaagattgaaaataaattgatt

SEQ ID NO: 373158 - DNA, 2722 bp, Homo sapiens
acgaggaagaaggaaaacgatttcaagagctgcacttaagcatctagaattttctgcgtcacacctcttgagagaagagactggctccaggtctgactcagtccactacaagctagacggtcttcttaaagcaccaacattacttgagtctttggataaaattgagaaaagagtctacaagtattgtggactctacaggaggcaggaggctgacaactggcagtaaagacaaagatgtcaggcctgcggcccggcactcaagtggaccctgagattgagctttttgtaaaggctggaagtgatggagagagtattggaaactgtcccttttgccaacgccttttcatgatcctctggcttaaaggagttaaatttaatgtgacaactgttgacatgaccaggtaccctcacctgagtcccaagtacaaggagtcttttgatgtgggctgtaacctctttgccaagttttctgcatacattaagaatacacaaaaggaggcaaataagaattttgaaaaatctctgctcaaagaattcaagcgtctggatgactacttaaacaccccacttctggatgaaattgatccagacagtgctgaggaacccccagtttccagaagactattcttggatggggaccagctaacactggctgattgtagcttgttacccaagctgaacattattaaagttgctgccaagaaatatcgtgactttgacattccagcagaattctcaggagtctggcgttatctccacaatgcctatgcccgtgaagaatttacccacacgtgtcctgaagacaaagaaattgaaaatacttacgcaaatgtggctaaacagaagagttaggagagctcttacaggagaaaaggctatatttgtgatcagattttacttattgacatattagaaaggtttttgcaaataagaatatgaaaaatactgtttcttctatccaactctcttatgaaaaggaactctgtattttctattagccataaataatctgtccactgtattttacaggtcttcatacttttacttaattttctttatctgtatggcaaaccactgcaatcctgaatgacatggaaagcatcacaatcttttgccctttgcttgaattcctggaatgcatacatataagctaaacagatgtctgcagttataaatgtcataagtagaggtacaatctcaccctgctccttagaaacatttccatataaatcgctaaaataatttcacatttttgttagtttaatatatacatgagtttatttctgatataaataataaatacagagagtgagcatatcagagaggcaaattcttaaagaatgatttttaaaatcagctctaggaagagctcaagatcaattggtcatagaacagcatttgacgcctagaactatgaccacctcatggtcagagatgagaatgtagcctttgtgaccagattatattatttttaaatgaagaagcactcattaaataaaacataattttaaaaaacaatataagaaacaaagtcaactgaatcttttattcatagaaatgaaaaggaaaataaaaactgtggctgaccaaaaggtcttcttgttgtccataaaaggataaggtaaacagtccttagataattacaaaactttctacaaaagttaaaatgttacattactatacgtattcagattcacttgttaaagtactcttaaatcattcaaatctggaaacaaaagctgaacttaactcttgctccctcaaaagagaaacacaagcataagtgcagcttcaaaaaaggaaaatattttaggctttggtggaagggtggagtttagataaaatttaaatgaagtagcgttttaataggttcaaagaaaagtaaggcaatgagcaaactcaaagtactgtccttgaaaaccatagagtcaagataaatgtatagtgtatggttaggtggcagagaaatgcaatcatgttgataatctttgagatacatcctgtcatcagtatatttcagaatacatgcaatgcactagcaagttacaattgatagaatacatttgaaatgttaaatgaaataagccaggcacagaaagacaaacaccacatgatctcactcatatgtggaattttaaaaagttgatctcactcatatgtggaattttaaaaagttgatctcacacaagtagagggtagaatcgtggttaccaggggctagggagagaaagaaggcagaggcactgaaagatgttggtcaatgggtataaagttacacctaggaagaataaattttggtattcaccacagtagggtgactatagcaaataataatgtagcatgtatttcaagatagctagaaaagcaggtttttaaatgtcaccacaaagaaataacaaatgtttatagtggtggatatggtaattacgcctatttgatcattatactgtgtgtacatgcattgaaacaccacattgtatcccatatatatgtacaattatgtgcccattatacatttaaaaaataaattttaaaaaccttcaattaactcttggtttaaaagaaaaatataaaccaaaactacatgatctctaaaacaaataatgatgatgtaaacacttcatatcagaatccatgggataaatataaagcagtgatcagaggaaattttataactaaacactgctattagtaaaaataaaagattgaaaataaattgatt

SEQ ID NO: 373159 - DNA, 2968 bp, Homo sapiens
acgaggaagaaggaaaacgatttcaagagctgcacttaagcatctagaattttctgcgtcacacctcttgagagaagagactggctccaggtctgactcagtccactacaagctagacggtcttcttaaagcaccaacattacttgagtctttggataaaattgagaaaagagtctacaagtattgtggactctacaggaggcaggaggctgacaactggcagtaaagacaaagatgtcaggcctgcggcccggcactcaagtggaccctgagattgagctttttgtaaaggctggaagtgatggagagagtattggaaactgtcccttttgccaacgccttttcatgatcctctggcttaaaggagttaaatttaatgtgacaactgttgacatgaccagaaagcctgaagaactaaaggacttagccccaggtaccaatcctccgttcctggtgtataacaaggagttgaaaacagacttcattaaaattgaggagtttttagaacaaaccctggctcctccaaggtaccctcacctgagtcccaagtacaaggagtcttttgatgtgggctgtaacctctttgccaagttttctgcatacattaagaatacacaaaaggaggcaaataagaattttgaaaaatctctgctcaaagaattcaagcgtctggatgactacttaaacaccccacttctggatgaaattgatccagacagtgctgaggaacccccagtttccagaagactattcttggatggggaccagctaacactggctgattgtagcttgttacccaagctgaacattattaaaatagggtcttgctctgtcacccaggttggagtgcagtggcatgatcaaggcttattgcaacccccacctctgaggctcaagcagtcctcccaccccactcttgagtagctgggactacaggttgctgccaagaaatatcgtgactttgacattccagcagaattctcaggagtctggcgttatctccacaatgcctatgcccgtgaagaatttacccacacgtgtcctgaagacaaagaaattgaaaatacttacgcaaatgtggctaaacagaagagttaggagagctcttacaggagaaaaggctatatttgtgatcagattttacttattgacatattagaaaggtttttgcaaataagaatatgaaaaatactgtttcttctatccaactctcttatgaaaaggaactctgtattttctattagccataaataatctgtccactgtattttacaggtcttcatacttttacttaattttctttatctgtatggcaaaccactgcaatcctgaatgacatggaaagcatcacaatcttttgccctttgcttgaattcctggaatgcatacatataagctaaacagatgtctgcagttataaatgtcataagtagaggtacaatctcaccctgctccttagaaacatttccatataaatcgctaaaataatttcacatttttgttagtttaatatatacatgagtttatttctgatataaataataaatacagagagtgagcatatcagagaggcaaattcttaaagaatgatttttaaaatcagctctaggaagagctcaagatcaattggtcatagaacagcatttgacgcctagaactatgaccacctcatggtcagagatgagaatgtagcctttgtgaccagattatattatttttaaatgaagaagcactcattaaataaaacataattttaaaaaacaatataagaaacaaagtcaactgaatcttttattcatagaaatgaaaaggaaaataaaaactgtggctgaccaaaaggtcttcttgttgtccataaaaggataaggtaaacagtccttagataattacaaaactttctacaaaagttaaaatgttacattactatacgtattcagattcacttgttaaagtactcttaaatcattcaaatctggaaacaaaagctgaacttaactcttgctccctcaaaagagaaacacaagcataagtgcagcttcaaaaaaggaaaatattttaggctttggtggaagggtggagtttagataaaatttaaatgaagtagcgttttaataggttcaaagaaaagtaaggcaatgagcaaactcaaagtactgtccttgaaaaccatagagtcaagataaatgtatagtgtatggttaggtggcagagaaatgcaatcatgttgataatctttgagatacatcctgtcatcagtatatttcagaatacatgcaatgcactagcaagttacaattgatagaatacatttgaaatgttaaatgaaataagccaggcacagaaagacaaacaccacatgatctcactcatatgtggaattttaaaaagttgatctcactcatatgtggaattttaaaaagttgatctcacacaagtagagggtagaatcgtggttaccaggggctagggagagaaagaaggcagaggcactgaaagatgttggtcaatgggtataaagttacacctaggaagaataaattttggtattcaccacagtagggtgactatagcaaataataatgtagcatgtatttcaagatagctagaaaagcaggtttttaaatgtcaccacaaagaaataacaaatgtttatagtggtggatatggtaattacgcctatttgatcattatactgtgtgtacatgcattgaaacaccacattgtatcccatatatatgtacaattatgtgcccattatacatttaaaaaataaattttaaaaaccttcaattaactcttggtttaaaagaaaaatataaaccaaaactacatgatctctaaaacaaataatgatgatgtaaacacttcatatcagaatccatgggataaatataaagcagtgatcagaggaaattttataactaaacactgctattagtaaaaataaaagattgaaaataaattgatt

SEQ ID NO: 373160 - DNA, 2788 bp, Homo sapiens
acgaggaagaaggaaaacgatttcaagagctgcacttaagcatctagaattttctgcgtcacacctcttgagagaagagactggctccaggtctgactcagtccactacaagctagacggtcttcttaaagcaccaacattacttgagtctttggataaaattgagaaaagagtctacaagtattgtggactctacaggaggcaggaggctgacaactggcagtaaagacaaagatgtcaggcctgcggcccggcactcaagtggaccctgagattgagctttttgtaaaggctggaagtgatggagagagtattggaaactgtcccttttgccaacgccttttcatgatcctctggcttaaaggagttaaatttaatgtgacaactgttgacatgaccagaaagcctgaagaactaaaggacttagccccaggtaccaatcctccgttcctggtgtataacaaggagttgaaaacagacttcattaaaattgaggagtttttagaacaaaccctggctcctccaaggtaccctcacctgagtcccaagtacaaggagtcttttgatgtgggctgtaacctctttgccaagttttctgcatacattaagaatacacaaaaggaggcaaataagattctggatgaaattgatccagacagtgctgaggaacccccagtttccagaagactattcttggatggggaccagctaacactggctgattgtagcttgttacccaagctgaacattattaaagttgctgccaagaaatatcgtgactttgacattccagcagaattctcaggagtctggcgttatctccacaatgcctatgcccgtgaagaatttacccacacgtgtcctgaagacaaagaaattgaaaatacttacgcaaatgtggctaaacagaagagttaggagagctcttacaggagaaaaggctatatttgtgatcagattttacttattgacatattagaaaggtttttgcaaataagaatatgaaaaatactgtttcttctatccaactctcttatgaaaaggaactctgtattttctattagccataaataatctgtccactgtattttacaggtcttcatacttttacttaattttctttatctgtatggcaaaccactgcaatcctgaatgacatggaaagcatcacaatcttttgccctttgcttgaattcctggaatgcatacatataagctaaacagatgtctgcagttataaatgtcataagtagaggtacaatctcaccctgctccttagaaacatttccatataaatcgctaaaataatttcacatttttgttagtttaatatatacatgagtttatttctgatataaataataaatacagagagtgagcatatcagagaggcaaattcttaaagaatgatttttaaaatcagctctaggaagagctcaagatcaattggtcatagaacagcatttgacgcctagaactatgaccacctcatggtcagagatgagaatgtagcctttgtgaccagattatattatttttaaatgaagaagcactcattaaataaaacataattttaaaaaacaatataagaaacaaagtcaactgaatcttttattcatagaaatgaaaaggaaaataaaaactgtggctgaccaaaaggtcttcttgttgtccataaaaggataaggtaaacagtccttagataattacaaaactttctacaaaagttaaaatgttacattactatacgtattcagattcacttgttaaagtactcttaaatcattcaaatctggaaacaaaagctgaacttaactcttgctccctcaaaagagaaacacaagcataagtgcagcttcaaaaaaggaaaatattttaggctttggtggaagggtggagtttagataaaatttaaatgaagtagcgttttaataggttcaaagaaaagtaaggcaatgagcaaactcaaagtactgtccttgaaaaccatagagtcaagataaatgtatagtgtatggttaggtggcagagaaatgcaatcatgttgataatctttgagatacatcctgtcatcagtatatttcagaatacatgcaatgcactagcaagttacaattgatagaatacatttgaaatgttaaatgaaataagccaggcacagaaagacaaacaccacatgatctcactcatatgtggaattttaaaaagttgatctcactcatatgtggaattttaaaaagttgatctcacacaagtagagggtagaatcgtggttaccaggggctagggagagaaagaaggcagaggcactgaaagatgttggtcaatgggtataaagttacacctaggaagaataaattttggtattcaccacagtagggtgactatagcaaataataatgtagcatgtatttcaagatagctagaaaagcaggtttttaaatgtcaccacaaagaaataacaaatgtttatagtggtggatatggtaattacgcctatttgatcattatactgtgtgtacatgcattgaaacaccacattgtatcccatatatatgtacaattatgtgcccattatacatttaaaaaataaattttaaaaaccttcaattaactcttggtttaaaagaaaaatataaaccaaaactacatgatctctaaaacaaataatgatgatgtaaacacttcatatcagaatccatgggataaatataaagcagtgatcagaggaaattttataactaaacactgctattagtaaaaataaaagattgaaaataaattgatt

SEQ ID NO: 373161 - DNA, 692 bp, Homo sapiens
tatgacgctgtgacttttttgtttacaatgttttgctatgtagtatgtgctttctttattccccatcccactatgcatcctttgatacctattttttttttgagatggagttttgctcttgttgcccagaatggagtgcaatggtgtgatctcggctcactgcaacttctgcctcccgggttcaagcaatcctcctgtctcagcctcccaagtagctgggattacaggtatgcaccaccatgcccgtctaactttggatttttagtagagacggggtttcaccatactggtcaggctggtctcaaactcctgacctcaggtgatctaaccatctcaacctcctgaagtgctggggttacaggcatgagacaccgtgcccagcctaatacccatttaaaaaaaaaaaaactttcaattttgaaaataaaacaatccaagaatacagtcatctctaaccatctagacatagggagaagaaaagaaacaatcacacatctttgtagatggaattttttctattacgtaatttttccatacttagccaatcttccctaagcccatgggatttcccatcattgtaagacctaaaatgatgactgcctaataaagaatctgatacttatgaagaatatatttctgccactaaaacccaaacaatccccaaacaactaactaaataaaaatctgcccag

SEQ ID NO: 373162 - DNA, 1153 bp, Homo sapiens
cttcggtaacccgggcaacgcggcctcctggatgtaggaaggggcgctgcccccgaaacacaaatgtctccgccaagaccccagacggttcccaaaggctctccgtgatgcaactgcacgtccctcgaatgcctgggcctccgatatccgtccgccaggagcttggctggatgcacgggcggccagtcctcttatttccccgccctcccgccgcgtggagcggctgctgggtcccgagcctccgggcgggggcgggatcggggcggggcggaggcatctccctcccagcaccgcccccttagctgccccgagccctgcctgcgcccgcccccgaagcggcgcgggacgcctggcgccgtccgcgatccgcagggctgcccgcttaggcttaggcccggcccgctggcaaagccgagccgcagcattttatttcgttcgtggtttccgcacaggctggagtttcgtgggttgggtcgtacttgggacctcggcgaagaggacccgtttatttttttttctttccaaaatggcagcctccagtcgcgcacaagtgttatctctgtaccgggcgatgctgagagagagcaagcgtttcagcgcctacaattacagaacatatgctgtcaggaggataagagatgccttcagagaaaataaaaatgtaaaggatcctgtagaaattcaaaccctagtgaataaagccaagagagaccttggagtaattcgtcgacaggtccacattggccaactgtattcaactgacaagctgatcattgagaatcgagacatgcccaggacctagcaagccggggaccagccaccagtggcggccagggaccaccttcagcatccactctctgtttgagatgggggctcccaaaaccagcttacaatagccttttgcgctgcctgtcctgtgggagctgataaaccaagtcacatttgcattctgttgcaggcttagtgaaaaaggactgctgtctttccttggttcaagtgttagaatggagagctggagttcgttcagaatagtgctgtgtgttaccacgtctcccctgcaccccattcctaccttgtagctcatgaccattgtgtatagcatttctacactttgtttcttggtccttggcaataaaaagaatgatctccctga

SEQ ID NO: 373163 - DNA, 598 bp, Homo sapiens
gctgataggccacagctgctgctggctctgcagccttggcagagttgcaaataggttaaacggagatgggagttctagttctcttttgcttcagccagcttccttttctggctaaatctgaataaactcaaaagaaactgggcaaggggtttacggctccccatggtgcttcacaaaggtccacattggccaactgtattcaactgacaagctgatcattgagaatcgagacatgcccaggacctagcaagccggggaccagccaccagtggcggccagggaccaccttcagcatccactctctgtttgagatgggggctcccaaaaccagcttacaatagccttttgcgctgcctgtcctgtgggagctgataaaccaagtcacatttgcattctgttgcaggcttagtgaaaaaggactgctgtctttccttggttcaagtgttagaatggagagctggagttcgttcagaatagtgctgtgtgttaccacgtctcccctgcaccccattcctaccttgtagctcatgaccattgtgtatagcatttctacactttgtttcttggtccttggcaataaaaagaatgatctccctga

SEQ ID NO: 373164 - DNA, 1325 bp, Homo sapiens
cttcggtaacccgggcaacgcggcctcctggatgtaggaaggggcgctgcccccgaaacacaaatgtctccgccaagaccccagacggttcccaaaggctctccgtgatgcaactgcacgtccctcgaatgcctgggcctccgatatccgtccgccaggagcttggctggatgcacgggcggccagtcctcttatttccccgccctcccgccgcgtggagcggctgctgggtcccgagcctccgggcgggggcgggatcggggcggggcggaggcatctccctcccagcaccgcccccttagctgccccgagccctgcctgcgcccgcccccgaagcggcgcgggacgcctggcgccgtccgcgatccgcagggctgcccgcttaggcttaggcccggcccgctggcaaagccgagccgcagcattttatttcgttcgtggtttccgcacaggctggagtttcgtgggttgggtcgtacttgggacctcggcgaagaggacccgtttatttttttttctttccaaaatggcagcctccagtcgcgcacaagtgttatctctgtaccgggcgatgctgagagagagcaagcgtttcagcgcctacaattacagaacatatgctgtcaggaggataagagatgccttcagagaaaataaaaatgtaaaggatcctgtagaaattcaaaccctagtgaataaagccaagagagaccttggagtaattcgtcgacaggtccacattggccaactgtattcaactgacaagctgatcattgagaatcgagacatgcccaggacctagcaagccggggaccagccaccagtggcggccagggaccaccttcagcatccactctctgtttgagatgggggctcccaaaaccagcttacaatagccttttgcgctgcctgtcctgtgggagctgataaaccaagtcacatttgcattctgttgcaggcttagtgaaaaaggactgctgtctttccttggttcaagtgttagaatggagagctggagttcgttcagaatagtgctgtgtgttaccacgtctcccctgcaccccattcctaccttgtagctcatgaccattgtgtatagcatttctacactttgtttcttggtccttggcaataaaaagaatgatctccctgaagaaaaaaaaaaaaaaaaaaacaaaaaaaaaaaaaccccgggggctttttttcgggggggggaaaaagggcaataaaggggccgggccaacgggttccggccccctttttttggaccagggggaaaagggggggcccccaaaagggggggaaaaagaaaacccggtaccgaa

SEQ ID NO: 373165 - DNA, 1702 bp, Homo sapiens
cttcggtaacccgggcaacgcggcctcctggatgtaggaaggggcgctgcccccgaaacacaaatgtctccgccaagaccccagacggttcccaaaggctctccgtgatgcaactgcacgtccctcgaatgcctgggcctccgatatccgtccgccaggagcttggctggatgcacgggcggccagtcctcttatttccccgccctcccgccgcgtggagcggctgctgggtcccgagcctccgggcgggggcgggatcggggcggggcggaggcatctccctcccagcaccgcccccttagctgccccgagccctgcctgcgcccgcccccgaagcggcgcgggacgcctggcgccgtccgcgatccgcagggctgcccgcttaggcttaggcccggcccgctggcaaagccgagccgcagcattttatttcgttcgtggtttccgcacaggctggagtttcgtgggttgggtcgtacttgggacctcggcgaagaggacccgtttatttttttttctttccaaaatggcagcctccagtcgcgcacaagtgttatctctgtaccgggcgatgctgagagagagcaagcgtttcagcgcctacaattacagaacatatgctgtcaggaggataagagatgccttcagagaaaataaaaatgtaaaggatcctgtagaaattcaaaccctagtgaataaagccaagagagaccttggagtaattcgtcgacaggtccacattggccaactgtattcaactgacaagctgatcattgagaatcgagacatgcccaggacctagcaagccggggaccagccaccagtggcggccagggaccaccttcagcatccactctctgtttgagatgggggctcccaaaaccagcttacaatagccttttgcgctgcctgtcctgtgggagctgataaaccaagtcacatttgcattctgttgcaggcttagtgaaaaaggactgctgtctttccttggttcaagtgttagaatggagagctggagttcgttcagaatagtgctgtgtgttaccacgtctcccctgcaccccattcctaccttgtagctcatgaccattgtgtatagcatttctacactttgtttcttggtccttggcaataaaaagaatgatctccctgagcctttgaccccagataaacccctcccaattaatgcattttcatttcctactgatacaaggcctggagagggctgttgggggccctcagggagggttcaactctgagacgagaactgccttggtgaaggcaagttcaagcaccacttgagactgggggcagcatggagtagggcagggctacgggggtacacggtgcaccctgcaacttatacctgagcccaacctggtgaatgagagagccccagcctgacccaagcccagggcgactcccataccctgaagcctggggcatgctgggcagcaccggtgcccaaatctggctggtggacagaagcacctggagagttggagagctttttaaaaagacatctctcagcacttccctctctgcagattctgactcagtaagtgaggggtgaggcacagtcatttttctctattctgaagctctcccactgttttcaatgtttaaccaactggggacccctgctctttaagtatattacaggtaataaagatattgtttgtatgcttttaaaaaaaaaaca

SEQ ID NO: 373166 - DNA, 1262 bp, Homo sapiens
gctgataggccacagctgctgctggctctgcagccttggcagagttgcaaataggttaaacggagatgggagttctagttctcttttgcttcagccagcttccttttctggctaaatctgaataaactcaaaagaaactgggcaaggggtttacggctccccatggtgcttcacaaaggtccacattggccaactgtattcaactgacaagctgatcattgagaatcgagacatgcccaggacctagcaagccggggaccagccaccagtggcggccagggaccaccttcagcatccactctctgtttgagatgggggctcccaaaaccagcttacaatagccttttgcgctgcctgtcctgtgggagctgataaaccaagtcacatttgcattctgttgcaggcttagtgaaaaaggactgctgtctttccttggttcaagtgttagaatggagagctggagttcgttcagaatagtgctgtgtgttaccacgtctcccctgcaccccattcctaccttgtagctcatgaccattgtgtatagcatttctacactttgtttcttggtccttggcaataaaaagaatgatctccctgagcctttgaccccagataaacccctcccaattaatgcattttcatttcctactgatacaaggcctggagagggctgttgggggccctcagggagggttcaactctgagacgagaactgccttggtgaaggcaagttcaagcaccacttgagactgggggcagcatggagtagggcagggctacgggggtacacggtgcaccctgcaacttatacctgagcccagtacaacaaaggtgacgggtgtgtaggtacacacccagagatggagcactgcagatcagcaacctcagccccacctgggaatttgctggaaatgcaggctcaagcccctccccacacctggtgaatgagagagccccagcctgacccaagcccagggcgactcccataccctgaagcctggggcatgctgggcagcaccggtgcccaaatctggctggtggacagaagcacctggagagttggagagctttttaaaaagacatctctcagcacttccctctctgcagattctgactcagtaagtgaggggtgaggcacagtcatttttctctattctgaagctctcccactgttttcaatgtttaaccaactggggacccctgctctttaagtatattacaggtaataaagatattgtttgtatgcttttaaaaaaaaaaca

SEQ ID NO: 373167 - DNA, 1032 bp, Homo sapiens
cttcggtaacccgggcaacgcggcctcctggatgtaggaaggggcgctgcccccgaaacacaaatgtctccgccaagaccccagacggttcccaaaggctctccgtgatgcaactgcacgtccctcgaatgcctgggcctccgatatccgtccgccaggagcttggctggatgcacgggcggccagtcctcttatttccccgccctcccgccgcgtggagcggctgctgggtcccgagcctccgggcgggggcgggatcggggcggggcggaggcatctccctcccagcaccgcccccttagctgccccgagccctgcctgcgcccgcccccgaagcggcgcgggacgcctggcgccgtccgcgatccgcagggctgcccgcttaggcttaggcccggcccgctggcaaagccgagccgcagcattttatttcgttcgtggtttccgcacaggctggagtttcgtgggttgggtcgtacttgggacctcggcgaagaggacccgtttatttttttttctttccaaaatggcagcctccagtcgcgcacaagtgttatctctgtaccgggcgatgctgagagagagcaagcgtttcagcgcctacaattacaggtccacattggccaactgtattcaactgacaagctgatcattgagaatcgagacatgcccaggacctagcaagccggggaccagccaccagtggcggccagggaccaccttcagcatccactctctgtttgagatgggggctcccaaaaccagcttacaatagccttttgcgctgcctgtcctgtgggagctgataaaccaagtcacatttgcattctgttgcaggcttagtgaaaaaggactgctgtctttccttggttcaagtgttagaatggagagctggagttcgttcagaatagtgctgtgtgttaccacgtctcccctgcaccccattcctaccttgtagctcatgaccattgtgtatagcatttctacactttgtttcttggtccttggcaataaaaagaatgatctccctga

SEQ ID NO: 373168 - DNA, 825 bp, Homo sapiens
cttcggtaacccgggcaacgcggcctcctggatgtaggaaggggcgctgcccccgaaacacaaatgtctccgccaagaccccagacggttcccaaaggctctccgtgatgcaactgcacgtccctcgaatgcctgggcctccgatatccgtccgccaggagcttggctggatgcacgggcggccagtcctcttatttccccgccctcccgccgcgtggagcggctgctgggtcccgagcctccgggcgggggcgggatcggggcggggcggaggcatctccctcccagcaccgcccccttagctgccccgagccctgcctgcgcccgcccccgaagcggcgcgggacgcctggcgccgtccgcgatccgcagggctgcccgcttaggcttaggcccggcccgctggcaaagccgagccgcagcattttatttcgttcgtggtttccgcacaggctggagtttcgtgggttgggtcgtacttgggacctcggcgaagaggacccgtttatttttttttctttccaaaatggcagcctccagtcgcgcacaagtgttatctctgtaccgggcgatgctgagagagagcaagcgtttcagcgcctacaattacagaacatatgctgtcaggaggataagagatgccttcagagaaaataaaaatgtaaaggatcctgtagaaattcaaaccctagtgaataaagccaagagagaccttggagtaattcgtcgacagatggactctcactctgtcgcccaggctggagtgcattggaacgatctcagctcactacaacctctgcctccctggttcaagcaattctcctg

SEQ ID NO: 373169 - DNA, 988 bp, Homo sapiens
cttcggtaacccgggcaacgcggcctcctggatgtaggaaggggcgctgcccccgaaacacaaatgtctccgccaagaccccagacggttcccaaaggctctccgtgatgcaactgcacgtccctcgaatgcctgggcctccgatatccgtccgccaggagcttggctggatgcacgggcggccagtcctcttatttccccgccctcccgccgcgtggagcggctgctgggtcccgagcctccgggcgggggcgggatcggggcggggcggaggcatctccctcccagcaccgcccccttagctgccccgagccctgcctgcgcccgcccccgaagcggcgcgggacgcctggcgccgtccgcgatccgcagggctgcccgcttaggcttaggcccggcccgctggcaaagccgagccgcagcattttatttcgttcgtggtttccgcacaggctggagtttcgtgggttgggtcgtacttgggacctcggcgaagaggacccgtttatttttttttctttccaaaatggcagcctccagtcgcgcacaagtgttatctctgtaccgggcgatgctgagagagagcaagcgtttcagcgcctacaattacagcagtcctttctttccctggccatgctcacaaagctgggacctacattggatactactgctgcgggtttacaatcctcagttgacctgtctgcggggagacggaagcccctgagtactttgcccaggatgtcttgtctttggaactccactcctccccagcttggcaaaacccttggtgtgctcttcttttaaaacaggatggagtctcactctgtcgcccaggctggagtgcagtggtgctgtttcagctcaccacaacctctgcctcctgggttcaagcaattctcctgcctcagcctcccgagtagctgggattacaggcgcccgtcaccatgcccggctaatttttatatttttaatagagacggggtttcac

SEQ ID NO: 373170 - DNA, 1817 bp, Homo sapiens
cttcggtaacccgggcaacgcggcctcctggatgtaggaaggggcgctgcccccgaaacacaaatgtctccgccaagaccccagacggttcccaaaggctctccgtgatgcaactgcacgtccctcgaatgcctgggcctccgatatccgtccgccaggagcttggctggatgcacgggcggccagtcctcttatttccccgccctcccgccgcgtggagcggctgctgggtcccgagcctccgggcgggggcgggatcggggcggggcggaggcatctccctcccagcaccgcccccttagctgccccgagccctgcctgcgcccgcccccgaagcggcgcgggacgcctggcgccgtccgcgatccgcagggctgcccgcttaggcttaggcccggcccgctggcaaagccgagccgcagcattttatttcgttcgtggtttccgcacaggctggagtttcgtgggttgggtcgtacttgggacctcggcgaagaggacccgtttatttttttttctttccaaaatggcagcctccagtcgcgcacaagtgttatctctgtaccgggcgatgctgagagagagcaagcgtttcagcgcctacaattacagaacatatgctgtcaggaggataagagatgccttcagagaaaataaaaatgtaaaggatcctgtagaaattcaaaccctagtgaataaagccaagagagaccttggagtaattcgtcgacaggtccacattggccaactgtattcaactgacaagctgatcattgagaatcgagacatgcccaggacctagcaagccggggaccagccaccagtggcggccagggaccaccttcagcatccactctctgtttgagatgggggctcccaaaaccagcttacaatagccttttgcgctgcctgtcctgtgggagctgataaaccaagtcacatttgcattctgttgcaggcttagtgaaaaaggactgctgtctttccttggttcaagtgttagaatggagagctggagttcgttcagaatagtgctgtgtgttaccacgtctcccctgcaccccattcctaccttgtagctcatgaccattgtgtatagcatttctacactttgtttcttggtccttggcaataaaaagaatgatctccctgagcctttgaccccagataaacccctcccaattaatgcattttcatttcctactgatacaaggcctggagagggctgttgggggccctcagggagggttcaactctgagacgagaactgccttggtgaaggcaagttcaagcaccacttgagactgggggcagcatggagtagggcagggctacgggggtacacggtgcaccctgcaacttatacctgagcccagtacaacaaaggtgacgggtgtgtaggtacacacccagagatggagcactgcagatcagcaacctcagccccacctgggaatttgctggaaatgcaggctcaagcccctccccacacctggtgaatgagagagccccagcctgacccaagcccagggcgactcccataccctgaagcctggggcatgctgggcagcaccggtgcccaaatctggctggtggacagaagcacctggagagttggagagctttttaaaaagacatctctcagcacttccctctctgcagattctgactcagtaagtgaggggtgaggcacagtcatttttctctattctgaagctctcccactgttttcaatgtttaaccaactggggacccctgctctttaagtatattacaggtaataaagatattgtttgtatgcttttaaaaaaaaaaca

SEQ ID NO: 373171 - DNA, 1696 bp, Homo sapiens
cttcggtaacccgggcaacgcggcctcctggatgtaggaaggggcgctgcccccgaaacacaaatgtctccgccaagaccccagacggttcccaaaggctctccgtgatgcaactgcacgtccctcgaatgcctgggcctccgatatccgtccgccaggagcttggctggatgcacgggcggccagtcctcttatttccccgccctcccgccgcgtggagcggctgctgggtcccgagcctccgggcgggggcgggatcggggcggggcggaggcatctccctcccagcaccgcccccttagctgccccgagccctgcctgcgcccgcccccgaagcggcgcgggacgcctggcgccgtccgcgatccgcagggctgcccgcttaggcttaggcccggcccgctggcaaagccgagccgcagcattttatttcgttcgtggtttccgcacaggctggagtttcgtgggttgggtcgtacttgggacctcggcgaagaggacccgtttatttttttttctttccaaaatggcagcctccagtcgcgcacaagtgttatctctgtaccgggcgatgctgagagagagcaagcgtttcagcgcctacaattacaggtccacattggccaactgtattcaactgacaagctgatcattgagaatcgagacatgcccaggacctagcaagccggggaccagccaccagtggcggccagggaccaccttcagcatccactctctgtttgagatgggggctcccaaaaccagcttacaatagccttttgcgctgcctgtcctgtgggagctgataaaccaagtcacatttgcattctgttgcaggcttagtgaaaaaggactgctgtctttccttggttcaagtgttagaatggagagctggagttcgttcagaatagtgctgtgtgttaccacgtctcccctgcaccccattcctaccttgtagctcatgaccattgtgtatagcatttctacactttgtttcttggtccttggcaataaaaagaatgatctccctgagcctttgaccccagataaacccctcccaattaatgcattttcatttcctactgatacaaggcctggagagggctgttgggggccctcagggagggttcaactctgagacgagaactgccttggtgaaggcaagttcaagcaccacttgagactgggggcagcatggagtagggcagggctacgggggtacacggtgcaccctgcaacttatacctgagcccagtacaacaaaggtgacgggtgtgtaggtacacacccagagatggagcactgcagatcagcaacctcagccccacctgggaatttgctggaaatgcaggctcaagcccctccccacacctggtgaatgagagagccccagcctgacccaagcccagggcgactcccataccctgaagcctggggcatgctgggcagcaccggtgcccaaatctggctggtggacagaagcacctggagagttggagagctttttaaaaagacatctctcagcacttccctctctgcagattctgactcagtaagtgaggggtgaggcacagtcatttttctctattctgaagctctcccactgttttcaatgtttaaccaactggggacccctgctctttaagtatattacaggtaataaagatattgtttgtatgcttttaaaaaaaaaaca

SEQ ID NO: 373172 - DNA, 385 bp, Homo sapiens
tcccctggggttggggggaatatcttactcctacagggaaggacagagttccaaagaccctgaagcacagacctctcttcctgtgcctacctgctcttgatgactgagaactgacccaaaaagatgtacaaattcaggtaagcatctagccctgcgtgtgccctaaaccaagagctcctttctcttagctgtcaatacataaagtcagcgccgattcacagaggcatcagggaggcattgcagggtatgatgaagagttggcttttagcaaacctttaaccaaactcttggctctgcagttctccaagtttagcacatttccccagtgtatcagtagggattcttcgatcacagaaaaaaggaataggtctgactaacttcagca

SEQ ID NO: 373173 - DNA, 732 bp, Homo sapiens
tttttttgagatggagtttcactcttgttgcccaggctggagtgcagtggcacgatcccagctcactgcaacctccacctcctgggttcaaacgattctcctgccttaacctcccaagtagctgattacaaacacagaccaccatgccccgctaatttttgtatttttggtacagatgaggtttcaccatgttggtcaggctggtcttgaacttccgacctcaagtgatccacccgccttggcctcccaaagtgctgggattacaggcatgagccaccgctcgtggcctatttttgttcttatatattttttaataagtttccactctcacaaatttgatacaatagatgatagactatccttttaccatgttttaaaattaaaaaagatggactccacatctgaaatttcttcttgctctgaagaaaacactattttaagaaaatgatatttgaactaattaacctggcttttgactcaaaactcaatttaagtgacatcttaaggactagtgaatggctctttggttaacatttacttagaatccaaataatatctcaaatcataggtaccattttgcatttgagagacagtgatcctaaatgcctaaataagaatagacacacagctctacccctagaaagcatagggtgttatataagtacatttaattgttaattaaaatttcctagaatacctaaagtcaggaagaaatttaacaagaagataatt

SEQ ID NO: 373174 - DNA, 251 bp, Homo sapiens
acaaaacaaatcccccagtggcataaagccccaaatctccagtttctcacatctccaggagaattcctgcagtgaaaacagcaatactggcacagacaatataaactgttactctgcttgaaaagtcacaagggactacacaggaagagctgactctatattgctgttttcctttacagttctaaatacagggacaactttcactgtggagctctgacttacatgaatgttttgtaatggaagccagtgca

SEQ ID NO: 373175 - DNA, 554 bp, Homo sapiens
tgagacagagtcttgctctgtcacccagggtggagtgtagtggcacaatctcagctcactgcaacctctacctcccgggtttgagcaattctcctgcctcagcctccctagtagctgggattacaggtgtgcacaaccacacccggctaatttttgtatttttagtagagacagggttgtaccatgttggccaggctggtctcaaactcctgacctcaggtgacccaactgcctctgcctcccaaagtgctgggattacaggcatgagctaccacacgctgtcaggatttgcatttttaatggccacagtgtaatatcttaacttctcaactagactgtatgttccttgtgagcagagcccaggtcttatgtgtccacggtacttgtcccaccttggtcccagcatcttaactgaaagcagatgctcctgttttcagtgaagaatgtgctctcagtggaacccactcttgatcattcaatgcaaaggaactaaacggtgttcagagacccaacaatgtcatgcaagtatgattccaggacactcctcatttaag

SEQ ID NO: 373176 - DNA, 3508 bp, Homo sapiens
cggtgctggccccggcgaggtagcttctggaaggcgctgctcttccggttctctgtcccggttcctggggttgcacagacagaccctgtaaacatgtcagggttcagtccggaactcatcgactacttggaagggaaaatctcctttgaggagttcgaacggcggagagaagagagaaaaacccgcgagaagaaaagtcttcaggaaaaaggcaagttatcagctgaagaaaatcccgatgactctgaagttccatcatcatcaggaattaactctaccaaatcccaagacaaagatgtcaatgaaggagaaacatcagatggagtgaggaagtcagttcacaaggtctttgcttccatgcttggagagaatgaagatgatgaggaggaagaggaagaagaggaggaggaggaggaggaggaagaaacacctgagcaacccactgcgggcgatgtatttgtattggagatggttctcaatcgtgaaaccaagaaaatgatgaaagagaaaaggcctcggagtaaacttcccagagctctgagaggtctcatgggtgaagccaacattcgttttgctcgaggagaacgtgaagaggcgatattgatgtgcatggaaatcataagacaagctcctctggcttatgagccattctctactctagccatgatatatgaggaccaaggtgacatggaaaaatcattgcagtttgagttgattgctgcgcatttaaatcccagtgacacagaagaatgggttagactggcagaaatgtctctggaacaagacaatattaagcaggctattttttgctatacaaaagctcttaaatatgaacctactaatgtccgttatctgtgggagcgatcaagcctttatgaacagatgggtgatcataaaatggccatggatggttataggcgtattttaaaccttttgtctccatctgatggcgaacgttttatgcagctggctagagatatggcaaagagttactatgaagccaatgatgttacttctgctattaacataattgatgaagctttctcaaaacaccagggcctagtctccatggaagatgttaacatagcagctgaactatatatttctaacaaacagtatgacaaagctttggagataattacagatttttctggaattgtgctggaaaaaaaaacttcagaagaaggcacctcagaagagaataaagctcctgagaatgttacctgcactatacctgatggcgtgccaatagatatcacagtgaagttgatggtctgccttgtacatctcaacattcttgaaccacttaatcctctcttgacaacactagtagaacagaatcctgaagatatgggagacctatacctagatgttgctgaagcttttctggatgttggtgaatataattctgcacttcccctcctcagtgctcttgtttgctctgaaagatacaaccttgcagtagtttggcttcgtcatgcagaatgtttaaaggccttaggctatatggagcgagctgctgaaagctatggcaaggtggttgatctggccccactccatttggatgcaaggatttcactttctacccttcagcagcagctgggccagcctgagaaagctctggaagctctggaaccaatgtatgatccagatactttagcacaggatgcaaatgctgcacagcaggaactgaagttattgcttcatcgttctactctgttgttttcacaaggcaaaatgtatggttatgtggataccttacttactatgttagccatgcttttaaaggtagcaatgaatcgagcccaagtttgtttgatatccagttccaagtctggagagaggcatctttatcttattaaagtatcgagagacaaaatatcagacagcaatgaccaagagtcagcaaattgtgatgcaaaagcaatatttgctgtgctcacaagcgtcttgacaaaggatgactggtggaatcttctgttgaaggccatatactccttatgtgacctatcccgatttcaagaggctgagttgcttgtagattcctcattggaatattactcattttatgatgacaggcaaaaacgcaaagaactagaatactttggtctgtctgctgcaattctggacaaaaatttcagaaaggcatacaactatatcaggataatggtaatggaaaatgtcaataaaccccagctctggaacattttcaatcaagttaccatgcactcccaagatgtacgacatcatcgcttctgtctccgtttgatgctgaaaaacccagaaaatcatgccctatgtgtcttaaatggacacaatgcatttgtatctggtagttttaagcatgcgcttggacagtatgtgcaagcctttcgcactcaccctgacgaacctctctatagcttctgtataggcctaacctttattcatatggcatctcagaagtatgtgttacggagacatgctcttattgtacagggcttttcctttcttaatcgatacctcagtttacgtgggccctgccaggaatcattctacaatttgggccgtggccttcatcagttggggctgattcatcttgcaatccactattatcagaaggccctggagctccctccacttgtggtagagggtatagaacttgaccagttagacttacgaagagatattgcctacaacttgtctctcatctatcagagcagtgggaataccggaatggctcaaacgcttttgtatacctattgttctatataaagcaccgcaactgagaacagagcaatggcagctgctgtgtgaggaccagtgtcttctgtctcagggcttattatttgtaactccaaaatagaaatgacaatttcagaattacctaacaaacagtgtatttatttttaatatgtgataatgatcttgtggtatatatgcaaaattattcctacaaaaatttgtatattggtctgtcattttcctttcacattctatagtgaattgttcccaatgttgaaatggacgtgtaagcctttgagctagcttggagtcgaatacactatttttcactcacaccatttattcatctttgtatttaatactatagctctgtcaatatcacatgaggcagtttttcaaatacgtataaacagaggttgcttattattaaaggaaagacaaagtgggactctttatgatgtcatgaccatgataactaagcacctaagaaaattatttaaaatagttatgtggtaggcagaaagacaaataatttagttttttacttttcaccagcatgtatcttagctacctaaactgaaacatgggaggctgggcttaattcaaaatatattgctccaaggcaaataaaaaaatgctttatctatatttgtggctttctgatgaaaaaatagagaagagcttgttcaataacaggacatggtttccatttcaagatcacaagtaatataagactgggcaagtagtacgtatggaataaaggacatactgctgattgataaag

SEQ ID NO: 373177 - DNA, 3099 bp, Homo sapiens
agagtgcagtggcgtgatcttggctcactgtaacctccgcctcccaggttcaagtgattctcatgcctcagcctaccaagtagctgagattgtgggagaaaaggcctcggagtaaacttcccagagctctgagaggtctcatgggtgaagccaacattcgttttgctcgaggagaacgtgaagaggcgatattgatgtgcatggaaatcataagacaagctcctctggcttatgagccattctctactctagccatgatatatgaggaccaaggtgacatggaaaaatcattgcagtttgagttgattgctgcgcatttaaatcccagtgacacagaagaatgggttagactggcagaaatgtctctggaacaagacaatattaagcaggctattttttgctatacaaaagctcttaaatatgaacctactaatgtccgttatctgtgggagcgatcaagcctttatgaacagatgggtgatcataaaatggccatggatggttataggcgtattttaaaccttttgtctccatctgatggcgaacgttttatgcagctggctagagatatggcaaagagttactatgaagccaatgatgttacttctgctattaacataattgatgaagctttctcaaaacaccagggcctagtctccatggaagatgttaacatagcagctgaactatatatttctaacaaacagtatgacaaagctttggagataattacagatttttctggaattgtgctggaaaaaaaaacttcagaagaaggcacctcagaagagaataaagctcctgagaatgttacctgcactatacctgatggcgtgccaatagatatcacagtgaagttgatggtctgccttgtacatctcaacattcttgaaccacttaatcctctcttgacaacactagtagaacagaatcctgaagatatgggagacctatacctagatgttgctgaagcttttctggatgttggtgaatataattctgcacttcccctcctcagtgctcttgtttgctctgaaagatacaaccttgcagtagtttggcttcgtcatgcagaatgtttaaaggccttaggctatatggagcgagctgctgaaagctatggcaaggtggttgatctggccccactccatttggatgcaaggatttcactttctacccttcagcagcagctgggccagcctgagaaagctctggaagctctggaaccaatgtatgatccagatactttagcacaggatgcaaatgctgcacagcaggaactgaagttattgcttcatcgttctactctgttgttttcacaaggcaaaatgtatggttatgtggataccttacttactatgttagccatgcttttaaaggtagcaatgaatcgagcccaagtttgtttgatatccagttccaagtctggagagaggcatctttatcttattaaagtatcgagagacaaaatatcagacagcaatgaccaagagtcagcaaattgtgatgcaaaagcaatatttgctgtgctcacaagcgtcttgacaaaggatgactggtggaatcttctgttgaaggccatatactccttatgtgacctatcccgatttcaagaggctgagttgcttgtagattcctcattggaatattactcattttatgatgacaggcaaaaacgcaaagaactagaatactttggtctgtctgctgcaattctggacaaaaatttcagaaaggcatacaactatatcaggataatggtaatggaaaatgtcaataaaccccagctctggaacattttcaatcaagttaccatgcactcccaagatgtacgacatcatcgcttctgtctccgtttgatgctgaaaaacccagaaaatcatgccctatgtgtcttaaatggacacaatgcatttgtatctggtagttttaagcatgcgcttggacagtatgtgcaagcctttcgcactcaccctgacgaacctctctatagcttctgtataggcctaacctttattcatatggcatctcagaagtatgtgttacggagacatgctcttattgtacagggcttttcctttcttaatcgatacctcagtttacgtgggccctgccaggaatcattctacaatttgggccgtggccttcatcagttggggctgattcatcttgcaatccactattatcagaaggccctggagctccctccacttgtggtagagggtatagaacttgaccagttagacttacgaagagatattgcctacaacttgtctctcatctatcagagcagtgggaataccggaatggctcaaacgcttttgtatacctattgttctatataaagcaccgcaactgagaacagagcaatggcagctgctgtgtgaggaccagtgtcttctgtctcagggcttattatttgtaactccaaaatagaaatgacaatttcagaattacctaacaaacagtgtatttatttttaatatgtgataatgatcttgtggtatatatgcaaaattattcctacaaaaatttgtatattggtctgtcattttcctttcacattctatagtgaattgttcccaatgttgaaatggacgtgtaagcctttgagctagcttggagtcgaatacactatttttcactcacaccatttattcatctttgtatttaatactatagctctgtcaatatcacatgaggcagtttttcaaatacgtataaacagaggttgcttattattaaaggaaagacaaagtgggactctttatgatgtcatgaccatgataactaagcacctaagaaaattatttaaaatagttatgtggtaggcagaaagacaaataatttagttttttacttttcaccagcatgtatcttagctacctaaactgaaacatgggaggctgggcttaattcaaaatatattgctccaaggcaaataaaaaaatgctttatctatatttgtggctttctgatgaaaaaatagagaagagcttgttcaataacaggacatggtttccatttcaagatcacaagtaatataagactgggcaagtagtacgtatggaataaaggacatactgctgattgataaag

SEQ ID NO: 373178 - DNA, 3670 bp, Homo sapiens
cggtgctggccccggcgaggtagcttctggaaggcgctgctcttccggttctctgtcccggttcctggggttgcacagacagaccctgtaaacatgtcagggttcagtccggaactcatcgactacttggaagggaaaatctcctttgaggagttcgaacggcggagagaagagagaaaaacccgcgagaagaaaagtcttcaggaaaaaggcaagttatcagctgaagaaaatcccgatgactctgaagttccatcatcatcaggaattaactctaccaaatcccaagacaaagatgtcaatgaaggagaaacatcagatggagtgaggaagtcagttcacaaggtctttgcttccatgcttggagagaatgaagatgatgaggaggaagaggaagaagaggaggaggaggaggaggaggaagaaacacctgagcaacccactgcgggcgatgtatttgtattggagatggttctcaatcgtgaaaccaagaaaatgatgaaagagaaaaggcctcggagtaaacttcccagagctctgagaggtctcatgggtgaagccaacattcgttttgctcgaggagaacgtgaagaggcgatattgatgtgcatggaaatcataagacaagctcctctggcttatgagccattctctactctagccatgatatatgaggaccaaggtgacatggaaaaatcattgcagtttgagttgattgctgcgcatttaaatcccagtgacacagaagaatgggttagactggcagaaatgtctctggaacaagacaatattaagcaggctattttttgctatacaaaagctcttaaatatgaacctactaatgtccgttatctgtgggagcgatcaagcctttatgaacagatgggtgatcataaaatggccatggatggttataggcgtattttaaaccttttgtctccatctgatggcgaacgttttatgcagctggctagagatatggcaaagagttactatgaagccaatgatgttacttctgctattaacataattgatgaagctttctcaaaacaccagggcctagtctccatggaagatgttaacatagcagctgaactatatatttctaacaaacagtatgacaaagctttggagataattacagatttttctggaattgtgctggaaaaaaaaacttcagaagaaggcacctcagaagagaataaagctcctgagaatgttacctgcactatacctgatggcgtgccaatagatatcacagtgaagttgatggtctgccttgtacatctcaacattcttgaaccacttaatcctctcttgacaacactagtagaacagaatcctgaagatatgggagacctatacctagatgttgctgaagcttttctggatgttggtgaatataattctgcacttcccctcctcagtgctcttgtttgctctgaaagatacaaccttgcagtagtttggcttcgtcatgcagaatgtttaaaggccttaggctatatggagcgagctgctgaaagctatggcaaggtggttgatctggccccactccatttggatgcaaggatttcactttctacccttcagcagcagctgggccagcctgagaaagctctggaagctctggaaccaatgtatgatccagatactttagcacaggatgcaaatgctgcacagcaggaactgaagttattgcttcatcgttctactctgttgttttcacaaggcaaaatgtatggttatgtggataccttacttactatgttagccatgcttttaaagatggtactgtctagttgcaggaaaacaagctcagggctcccactgattctacattatgcaatatttgctgtgctcacaagcgtcttgacaaaggatgactggtggaatcttctgttgaaggccatatactccttatgtgacctatcccgatttcaagaggctgagttgcttgtagattcctcattggaatattactcattttatgatgacaggcaaaaacgcaaagaactagaatactttggtctgtctgctgcaattctggacaaaaatttcagaaaggcatacaactatatcaggataatggtaatggaaaatgtcaataaaccccagctctggaacattttcaatcaagttaccatgcactcccaagatgtacgacatcatcgcttctgtctccgtttgatgctgaaaaacccagaaaatcatgccctatgtgtcttaaatggacacaatgcatttgtatctggtagttttaagcatgcgcttggacagtatgtgcaagcctttcgcactcaccctgacgaacctctctatagcttctgtataggcctaacctttattcatatggcatctcagaagtatgtgttacggagacatgctcttattgtacagggcttttcctttcttaatcgatacctcagtttacgtgggccctgccaggaatcattctacaatttgggccgtggccttcatcagttggggctgattcatcttgcaatccactattatcagaaggccctggagctccctccacttgtggtagagggtatagaacttgaccagttagacttacgaagagatattgcctacaacttgtctctcatctatcagagcagtgggaataccggaatggctcaaacgcttttgtatacctattgttctatataaagcaccgcaactgagaacagagcaatggcagctgctgtgtgaggaccagtgtcttctgtctcagggcttattatttgtaactccaaaatagaaatgacaatttcagaattacctaacaaacagtgtatttatttttaatatgtgataatgatcttgtggtatatatgcaaaattattcctacaaaaatttgtatattggtctgtcattttcctttcacattctatagtgaattgttcccaatgttgaaatggacgtgtaagcctttgagctagcttggagtcgaatacactatttttcactcacaccatttattcatctttgtatttaatactatagctctgtcaatatcacatgaggcagtttttcaaatacgtataaacagaggttgcttattattaaaggaaagacaaagtgggactctttatgatgtcatgaccatgataactaagcacctaagaaaattatttaaaatagttatgtggtaggcagaaagacaaataatttagttttttacttttcaccagcatgtatcttagctacctaaactgaaacatgggaggctgggcttaattcaaaatatattgctccaaggcaaataaaaaaatgctttatctatatttgtggctttctgatgaaaaaatagagaagagcttgttcaataacaggacatggtttccatttcaagatcacaagtaatataagactgggcaagtagtacgtatggaataaaggacatactgctgattgataaagtaaaaaactttttttttgtttgtttactcatctccactatttattatatgttcttgaatttaagttaacagtactttttagatgatatactgttagcttaataacaactttttagggaaaaataaatgctgtaattaatgtgcacatgggttagtaacacccagcccaattgtgggagggaaacaagtagaggcttaggatcaaagaaataaaattgggacttattagaaattcttacca

SEQ ID NO: 373179 - DNA, 2673 bp, Homo sapiens
gaaaaccctggcagcttttactatatgtactaagcatacagtttgacaaagctaaggacataattacagatttttctggaattgtgctggaaaaaaaaacttcagaagaaggcacctcagaagagaataaagctcctgagaatgttacctgcactatacctgatggcgtgccaatagatatcacagtgaagttgatggtctgccttgtacatctcaacattcttgaaccacttaatcctctcttgacaacactagtagaacagaatcctgaagatatgggagacctatacctagatgttgctgaagcttttctggatgttggtgaatataattctgcacttcccctcctcagtgctcttgtttgctctgaaagatacaaccttgcagtagtttggcttcgtcatgcagaatgtttaaaggccttaggctatatggagcgagctgctgaaagctatggcaaggtggttgatctggccccactccatttggatgcaaggatttcactttctacccttcagcagcagctgggccagcctgagaaagctctggaagctctggaaccaatgtatgatccagatactttagcacaggatgcaaatgctgcacagcaggaactgaagttattgcttcatcgttctactctgttgttttcacaaggcaaaatgtatggttatgtggataccttacttactatgttagccatgcttttaaaggtagcaatgaatcgagcccaagtttgtttgatatccagttccaagtctggagagaggcatctttatcttattaaagtatcgagagacaaaatatcagacagcaatgaccaagagtcagcaaattgtgatgcaaaagcaatatttgctgtgctcacaagcgtcttgacaaaggatgactggtggaatcttctgttgaaggccatatactccttatgtgacctatcccgatttcaagaggctgagttgcttgtagattcctcattggaatattactcattttatgatgacaggcaaaaacgcaaagaactagaatactttggtctgtctgctgcaattctggacaaaaatttcagaaaggcatacaactatatcaggataatggtaatggaaaatgtcaataaaccccagctctggaacattttcaatcaagttaccatgcactcccaagatgtacgacatcatcgcttctgtctccgtttgatgctgaaaaacccagaaaatcatgccctatgtgtcttaaatggacacaatgcatttgtatctggtagttttaagcatgcgcttggacagtatgtgcaagcctttcgcactcaccctgacgaacctctctatagcttctgtataggcctaacctttattcatatggcatctcagaagtatgtgttacggagacatgctcttattgtacagggcttttcctttcttaatcgatacctcagtttacgtgggccctgccaggaatcattctacaatttgggccgtggccttcatcagttggggctgattcatcttgcaatccactattatcagaaggccctggagctccctccacttgtggtagagggtatagaacttgaccagttagacttacgaagagatattgcctacaacttgtctctcatctatcagagcagtgggaataccggaatggctcaaacgcttttgtatacctattgttctatataaagcaccgcaactgagaacagagcaatggcagctgctgtgtgaggaccagtgtcttctgtctcagggcttattatttgtaactccaaaatagaaatgacaatttcagaattacctaacaaacagtgtatttatttttaatatgtgataatgatcttgtggtatatatgcaaaattattcctacaaaaatttgtatattggtctgtcattttcctttcacattctatagtgaattgttcccaatgttgaaatggacgtgtaagcctttgagctagcttggagtcgaatacactatttttcactcacaccatttattcatctttgtatttaatactatagctctgtcaatatcacatgaggcagtttttcaaatacgtataaacagaggttgcttattattaaaggaaagacaaagtgggactctttatgatgtcatgaccatgataactaagcacctaagaaaattatttaaaatagttatgtggtaggcagaaagacaaataatttagttttttacttttcaccagcatgtatcttagctacctaaactgaaacatgggaggctgggcttaattcaaaatatattgctccaaggcaaataaaaaaatgctttatctatatttgtggctttctgatgaaaaaatagagaagagcttgttcaataacaggacatggtttccatttcaagatcacaagtaatataagactgggcaagtagtacgtatggaataaaggacatactgctgattgataaagtaaaaaactttttttttgtttgtttactcatctccactatttattatatgttcttgaatttaagttaacagtactttttagatgatatactgttagcttaataacaactttttagggaaaaataaatgctgtaattaatgtgcacatgggttagtaacacccagcccaattgtgggagggaaacaagtagaggcttaggatcaaagaaataaaattgggacttattagaaattcttacca

SEQ ID NO: 373180 - DNA, 2475 bp, Homo sapiens
cggtgctggccccggcgaggtagcttctggaaggcgctgctcttccggttctctgtcccggttcctggggttgcacagacagaccctgtaaacatgtcagggttcagtccggaactcatcgactacttggaagggaaaatctcctttgaggagttcgaacggcggagagaagagagaaaaacccgcgagaagaaaagtcttcaggaaaaaggcaagttatcagctgaagaaaatcccgatgactctgaagttccatcatcatcaggaattaactctaccaaatcccaagacaaagatgtcaatgaaggagaaacatcagatggagtgaggaagtcagttcacaaggtctttgcttccatgcttggagagaatgaagatgatgaggaggaagaggaagaagaggaggaggaggaggaggaggaagaaacacctgagcaacccactgcgggcgatgtatttgtattggagatggttctcaatcgtgaaaccaagaaaatgatgaaagagaaaaggcctcggagtaaacttcccagagctctgagaggtctcatgggtgaagccaacattcgttttgctcgaggagaacgtgaagaggcgatattgatgtgcatggaaatcataagacaagctcctctggcttatgagccattctctactctagccatgatatatgaggaccaaggtgacatggaaaaatcattgcagtttgagttgattgctgcgcatttaaatcccagtgacacagaagaatgggttagactggcagaaatgtctctggaacaagacaatattaagcaggctattttttgctatacaaaagctcttaaatatgaacctactaatgtccgttatctgtgggagcgatcaagcctttatgaacagatgggtgatcataaaatggccatggatggttataggcgtattttaaaccttttgtctccatctgatggcgaacgttttatgcagctggctagagatatggcaaagagttactatgaagccaatgatgttacttctgctattaacataattgatgaagctttctcaaaacaccagggcctagtctccatggaagatgttaacatagcagctgaactatatatttctaacaaacagtatgacaaagctttggagataattacagatttttctggaattgtgctggaaaaaaaaacttcagaagaaggcacctcagaagagaataaagctcctgagaatgttacctgcactatacctgatggcgtgccaatagatatcacagtgaagttgatggtctgccttgtacatctcaacattcttgaaccacttaatcctctcttgacaacactagtagaacagaatcctgaagatatgggagacctatacctagatgttgctgaagcttttctggatgttggtgaatataattctgcacttcccctcctcagtgctcttgtttgctctgaaagatacaaccttgcagtagtttggcttcgtcatgcagaatgtttaaaggccttaggctatatggagcgagctgctgaaagctatggcaaggtggttgatctggccccactccatttggatgcaaggatttcactttctacccttcagcagcagctgggccagcctgagaaagctctggaagctctggaaccaatgtatgatccagatactttagcacaggatgcaaatgctgcacagcaggaactgaagttattgcttcatcgttctactctgttgttttcacaaggcaaaatgtatggttatgtggataccttacttactatgttagccatgcttttaaaggtagcaatgaatcgagcccaagtttgtttgatatccagttccaagtctggagagaggcatctttatcttattaaagtatcgagagacaaaatatcagacagcaatgaccaagagtcagcaaattgtgatgcaaaagcaatatttgctgtgctcacaagcgtcttgacaaaggatgactggtggaatcttctgttgaaggccatatactccttatgtgacctatcccgatttcaagaggctgagttgcttgtagattcctcattggaatattactcattttatgatgacaggcaaaaacgcaaagaactagaatactttggtctgtctgctgcaattctggacaaaaatttcagaaaggcatacaactatatcaggataatggtaatggaaaatgtcaataaaccccagctctggaacattttcaatcaagttaccatgcactcccaagatgtacgacatcatcgcttctgtctccgtttgatgctgaaaaacccagaaaatcatgccctatgtgtcttaaatggacacaatgcatttgtatctggtagttttaagcatgcgcttggacagtatgtgcaagcctttcgcactcaccctgacgaacctctctatagcttcgtaagtctaactggtcaagttctataccctctaccacaagtcgacgcggccgcgaatttagtagtagta

SEQ ID NO: 373181 - DNA, 1751 bp, Homo sapiens
cggtgctggccccggcgaggtagcttctggaaggcgctgctcttccggttctctgtcccggttcctggggttgcacagacagaccctgtaaacatgtcagggttcagtccggaactcatcgactacttggaagggaaaatctcctttgaggagttcgaacggcggagagaagagagaaaaacccgcgagaagaaaagtcttcaggaaaaaggcaagttatcagctgaagaaaatcccgatgactctgaagttccatcatcatcaggaattaactctaccaaatcccaagacaaagatgtcaatgaaggagaaacatcagatggagtgaggaagtcagttcacaaggtctttgcttccatgcttggagagaatgaagatgatgaggaggaagaggaagaagaggaggaggaggaggaggaggaagaaacacctgagcaacccactgcgggcgatgtatttgtattggagatggttctcaatcgtgaaaccaagaaaatgatgaaagagaaaaggcctcggagtaaacttcccagagctctgagaggtctcatgggtgaagccaacattcgttttgctcgaggagaacgtgaagaggcgatattgatgtgcatggaaatcataagacaagctcctctggcttatgagccattctctactctagccatgatatatgaggaccaaggtgacatggaaaaatcattgcagtttgagttgattgctgcgcatttaaatcccagtgacacagaagaatgggttagactggcagaaatgtctctggaacaagacaatattaagcaggctattttttgctatacaaaagctcttaaatatgaacctactaatgtccgttatctgtgggagcgatcaagcctttatgaacagatgggtgatcataaaatggccatggatggttataggcgtattttaaaccttttgtctccatctgatggcgaacgttttatgcagctggctagagatatggcaaagagttactatgaagccaatgatgttacttctgctattaacataattgatgaagctttctcaaaacaccagggcctagtctccatggaagatgttaacatagcagctgaactatatatttctaacaaacagtatgacaaagctttggagataattacagatttttctggaattgtgctggaaaaaaaaacttcagaagaaggcacctcagaagagaataaagctcctgagaatgttacctgcactatacctgatggcgtgccaatagatatcacagtgaagttgatggtctgccttgtacatctcaacattcttgaaccacttaatcctctcttgacaacactagtagaacagaatcctgaagatatgggagacctatacctagatgttgctgaagcttttctggatgttggtgaatataattctgcacttcccctcctcagtgctcttgtttgctctgaaagatacaaccttgcagtagtttggcttcgtcatgcaggtaacacttttttgtgggaggaagaagttttaatcatataagcagccaagaacttactttcccaagatggtaataattattatagtgcaagtgtttctggtttcaggggagttttttgaaagtcagtattttaaattgtcttgctaggctactaagtgatttccccatcactaatgctttggaggaatgatttacttaatgatgccagagtgaagttgaaggactcacatttcccttagatgcctgtcttgaacctctcttaaccata

SEQ ID NO: 373182 - DNA, 348 bp, Homo sapiens
gaagaaaatcccgatgactctgaagttccatcatcatcaggaattaactctaccaaatcccaagacaaagatgtcaatgaaggtatgttaaaattatgtgcttcctgcaatgaatgtttagagtatgtaagcaaagtaatttagtgaaacattgtattttcatggcagtgatactctgttgttgattacctggtttttcaggaacagaatgcttggttatatagtaggtgcccaataaatatttgttgagttattgaataccctgatggttattttttgtgagctctggtgttggaaaagtgttttaaattgacatcagtatttgtttgggagctttttaagattatt

SEQ ID NO: 373183 - DNA, 432 bp, Homo sapiens
atatttgatgatgctgttaactgaatcagcattgatccaaggtatatgcatagttttataatttttttttagtacatgagctttaataccttttgaaaacttacttacacttataaaactattaatttgccataaaattgtcccggttgacagttggaaatattaaacataaaggtatctttttctccctagggtatagaacttgaccagttagacttacgaagagatattgcctacaacttgtctctcatctatcagagcagtgggaataccggaatggctcaaacgcttttgtatacctattgttctatataaagcaccgcaactgagaacagagcaatggcagctgctgtgtgaggaccagtgtcttctgtctcagggcttattatttgtaactccaaaatagaaatgacaatttcagaattacctaac

SEQ ID NO: 373184 - DNA, 451 bp, Homo sapiens
ctaaggtgagaggatcacttgagcttaggagttcaaatccagcctgagccaacataacaagactttgtctctaaacaaaacagttattgtttaaagaatctgaaatcttcatctttaattcaggtagcaatgaatcgagcccaagtttgtttgatatccagttccaagtctggagagaggcatctttatcttattaaagtatcgagagacaaaatatcagacagcaatgaccaagagtcagcaaattgtgatgcaaaaggtaataacttcatttgcattatgttatataaaatttggctgaattgaaaaagactcatgaagtaacactggacagcaatctaattgaaaatatacttttcaaataaaatgaaattttccaatctaaatctctcaagtgtaataaactcattcgatgttaaaaaggaaaggctaaatgtaaatactttaaatt

SEQ ID NO: 373185 - DNA, 270 bp, Homo sapiens
cttccggttctctgtcccggttcctggggttgcacagacagaccctgtaaacatgtcagggttcagtccggaactcatcgactacttggaagggaaaatctcctttgaggagttcgaacggcggagagaagagagaaaaacccgcgagaagaaagtgaggcgatgctaggccacggtgcccttcactcttgttgccttcatacccttaggtgtgggggacccagacgaccgctttcactgtgatggggcgggctgggaactttcagcagc

SEQ ID NO: 373186 - DNA, 750 bp, Homo sapiens
cggtgctggccccggcgaggtagcttctggaaggcgctgctcttccggttctctgtcccggttcctggggttgcacagacagaccctgtaaacatgtcagggttcagtccggaactcatcgactacttggaagggaaaatctcctttgaggagttcgaacggcggagagaagagagaaaaacccgcgagaagaaagtgaggcgatgctaggccacggtgcccttcactcttgttgccttcatacccttagagtcttcaggaaaaaggcaagttatcagctgaagaaaatcccgatgactctgaagttccatcatcatcaggaattaactctaccaaatcccaagacaaagatgtcaatgaaggagaaacatcagatggagtgaggaagtcagttcacaaggtctttgcttccatgcttggagagaatgaagatgatgaggaggaagaggaagaagaggaggaggaggaggaggaggaagaaacacctgagcaacccactgcgggcgatgtatttgtattggagatggttctcaatcgtgaaaccaagaaaatgatgaaaaaaaaaaaacaaaaaaaaacacctgtgtttgggccggcatctgggcccttgaaaaaagtttttataacaccattcggttgggcgcgccggggcccccagtaggggtaggtagacctggggcaataggcggtgttcccaaggagaaactcgggcgcaagacaaaggggcgtgaggttctcacccatataaag

SEQ ID NO: 373187 - DNA, 3748 bp, Homo sapiens
cggtgctggccccggcgaggtagcttctggaaggcgctgctcttccggttctctgtcccggttcctggggttgcacagacagaccctgtaaacatgtcagggttcagtccggaactcatcgactacttggaagggaaaatctcctttgaggagttcgaacggcggagagaagagagaaaaacccgcgagaagaaaagtcttcaggaaaaaggcaagttatcagctgaagaaaatcccgatgactctgaagttccatcatcatcaggaattaactctaccaaatcccaagacaaagatgtcaatgaaggagaaacatcagatggagtgaggaagtcagttcacaaggtctttgcttccatgcttggagagaatgaagatgatgaggaggaagaggaagaagaggaggaggaggaggaggaggaagaaacacctgagcaacccactgcgggcgatgtatttgtattggagatggttctcaatcgtgaaaccaagaaaatgatgaaagagaaaaggcctcggagtaaacttcccagagctctgagaggtctcatgggtgaagccaacattcgttttgctcgaggagaacgtgaagaggcgatattgatgtgcatggaaatcataagacaagctcctctggcttatgagccattctctactctagccatgatatatgaggaccaaggtgacatggaaaaatcattgcagtttgagttgattgctgcgcatttaaatcccagtgacacagaagaatgggttagactggcagaaatgtctctggaacaagacaatattaagcaggctattttttgctatacaaaagctcttaaatatgaacctactaatgtccgttatctgtgggagcgatcaagcctttatgaacagatgggtgatcataaaatggccatggatggttataggcgtattttaaaccttttgtctccatctgatggcgaacgttttatgcagctggctagagatatggcaaagagttactatgaagccaatgatgttacttctgctattaacataattgatgaagctttctcaaaacaccagggcctagtctccatggaagatgttaacatagcagctgaactatatatttctaacaaacagtatgacaaagctttggagataattacagatttttctggaattgtgctggaaaaaaaaacttcagaagaaggcacctcagaagagaataaagctcctgagaatgttacctgcactatacctgatggcgtgccaatagatatcacagtgaagttgatggtctgccttgtacatctcaacattcttgaaccacttaatcctctcttgacaacactagtagaacagaatcctgaagatatgggagacctatacctagatgttgctgaagcttttctggatgttggtgaatataattctgcacttcccctcctcagtgctcttgtttgctctgaaagatacaaccttgcagtagtttggcttcgtcatgcagaatgtttaaaggccttaggctatatggagcgagctgctgaaagctatggcaaggtggttgatctggccccactccatttggatgcaaggatttcactttctacccttcagcagcagctgggccagcctgagaaagctctggaagctctggaaccaatgtatgatccagatactttagcacaggatgcaaatgctgcacagcaggaactgaagttattgcttcatcgttctactctgttgttttcacaaggcaaaatgtatggttatgtggataccttacttactatgttagccatgcttttaaaggtagcaatgaatcgagcccaagtttgtttgatatccagttccaagtctggagagaggcatctttatcttattaaagtatcgagagacaaaatatcagacagcaatgaccaagagtcagcaaattgtgatgcaaaagcaatatttgctgtgctcacaagcgtcttgacaaaggatgactggtggaatcttctgttgaaggccatatactccttatgtgacctatcccgatttcaagaggctgagttgcttgtagattcctcattggaatattactcattttatgatgacaggcaaaaacgcaaagaactagaatactttggtctgtctgctgcaattctggacaaaaatttcagaaaggcatacaactatatcaggataatggtaatggaaaatgtcaataaaccccagctctggaacattttcaatcaagttaccatgcactcccaagatgtacgacatcatcgcttctgtctccgtttgatgctgaaaaacccagaaaatcatgccctatgtgtcttaaatggacacaatgcatttgtatctggtagttttaagcatgcgcttggacagtatgtgcaagcctttcgcactcaccctgacgaacctctctatagcttctgtataggcctaacctttattcatatggcatctcagaagtatgtgttacggagacatgctcttattgtacagggcttttcctttcttaatcgatacctcagtttacgtgggccctgccaggaatcattctacaatttgggccgtggccttcatcagttggggctgattcatcttgcaatccactattatcagaaggccctggagctccctccacttgtggtagagggtatagaacttgaccagttagacttacgaagagatattgcctacaacttgtctctcatctatcagagcagtgggaataccggaatggctcaaacgcttttgtatacctattgttctatataaagcaccgcaactgagaacagagcaatggcagctgctgtgtgaggaccagtgtcttctgtctcagggcttattatttgtaactccaaaatagaaatgacaatttcagaattacctaacaaacagtgtatttatttttaatatgtgataatgatcttgtggtatatatgcaaaattattcctacaaaaatttgtatattggtctgtcattttcctttcacattctatagtgaattgttcccaatgttgaaatggacgtgtaagcctttgagctagcttggagtcgaatacactatttttcactcacaccatttattcatctttgtatttaatactatagctctgtcaatatcacatgaggcagtttttcaaatacgtataaacagaggttgcttattattaaaggaaagacaaagtgggactctttatgatgtcatgaccatgataactaagcacctaagaaaattatttaaaatagttatgtggtaggcagaaagacaaataatttagttttttacttttcaccagcatgtatcttagctacctaaactgaaacatgggaggctgggcttaattcaaaatatattgctccaaggcaaataaaaaaatgctttatctatatttgtggctttctgatgaaaaaatagagaagagcttgttcaataacaggacatggtttccatttcaagatcacaagtaatataagactgggcaagtagtacgtatggaataaaggacatactgctgattgataaagtaaaaaactttttttttgtttgtttactcatctccactatttattatatgttcttgaatttaagttaacagtactttttagatgatatactgttagcttaataacaactttttagggaaaaataaatgctgtaattaatgtgcacatgggttagtaacacccagcccaattgtgggagggaaacaagtagaggcttaggatcaaagaaataaaattgggacttattagaaattcttacca

SEQ ID NO: 373188 - DNA, 3100 bp, Homo sapiens
ctgaggatccccaactctgccacccacagcggcacagtcacacggtactgagtaggttttcagtgagggtcagcaggaaccaggaaaatgaggaaagagaaaaggcctcggagtaaacttcccagagctctgagaggtctcatgggtgaagccaacattcgttttgctcgaggagaacgtgaagaggcgatattgatgtgcatggaaatcataagacaagctcctctggcttatgagccattctctactctagccatgatatatgaggaccaaggtgacatggaaaaatcattgcagtttgagttgattgctgcgcatttaaatcccagtgacacagaagaatgggttagactggcagaaatgtctctggaacaagacaatattaagcaggctattttttgctatacaaaagctcttaaatatgaacctactaatgtccgttatctgtgggagcgatcaagcctttatgaacagatgggtgatcataaaatggccatggatggttataggcgtattttaaaccttttgtctccatctgatggcgaacgttttatgcagctggctagagatatggcaaagagttactatgaagccaatgatgttacttctgctattaacataattgatgaagctttctcaaaacaccagggcctagtctccatggaagatgttaacatagcagctgaactatatatttctaacaaacagtatgacaaagctttggagataattacagatttttctggaattgtgctggaaaaaaaaacttcagaagaaggcacctcagaagagaataaagctcctgagaatgttacctgcactatacctgatggcgtgccaatagatatcacagtgaagttgatggtctgccttgtacatctcaacattcttgaaccacttaatcctctcttgacaacactagtagaacagaatcctgaagatatgggagacctatacctagatgttgctgaagcttttctggatgttggtgaatataattctgcacttcccctcctcagtgctcttgtttgctctgaaagatacaaccttgcagtagtttggcttcgtcatgcagaatgtttaaaggccttaggctatatggagcgagctgctgaaagctatggcaaggtggttgatctggccccactccatttggatgcaaggatttcactttctacccttcagcagcagctgggccagcctgagaaagctctggaagctctggaaccaatgtatgatccagatactttagcacaggatgcaaatgctgcacagcaggaactgaagttattgcttcatcgttctactctgttgttttcacaaggcaaaatgtatggttatgtggataccttacttactatgttagccatgcttttaaaggtagcaatgaatcgagcccaagtttgtttgatatccagttccaagtctggagagaggcatctttatcttattaaagtatcgagagacaaaatatcagacagcaatgaccaagagtcagcaaattgtgatgcaaaagcaatatttgctgtgctcacaagcgtcttgacaaaggatgactggtggaatcttctgttgaaggccatatactccttatgtgacctatcccgatttcaagaggctgagttgcttgtagattcctcattggaatattactcattttatgatgacaggcaaaaacgcaaagaactagaatactttggtctgtctgctgcaattctggacaaaaatttcagaaaggcatacaactatatcaggataatggtaatggaaaatgtcaataaaccccagctctggaacattttcaatcaagttaccatgcactcccaagatgtacgacatcatcgcttctgtctccgtttgatgctgaaaaacccagaaaatcatgccctatgtgtcttaaatggacacaatgcatttgtatctggtagttttaagcatgcgcttggacagtatgtgcaagcctttcgcactcaccctgacgaacctctctatagcttctgtataggcctaacctttattcatatggcatctcagaagtatgtgttacggagacatgctcttattgtacagggcttttcctttcttaatcgatacctcagtttacgtgggccctgccaggaatcattctacaatttgggccgtggccttcatcagttggggctgattcatcttgcaatccactattatcagaaggccctggagctccctccacttgtggtagagggtatagaacttgaccagttagacttacgaagagatattgcctacaacttgtctctcatctatcagagcagtgggaataccggaatggctcaaacgcttttgtatacctattgttctatataaagcaccgcaactgagaacagagcaatggcagctgctgtgtgaggaccagtgtcttctgtctcagggcttattatttgtaactccaaaatagaaatgacaatttcagaattacctaacaaacagtgtatttatttttaatatgtgataatgatcttgtggtatatatgcaaaattattcctacaaaaatttgtatattggtctgtcattttcctttcacattctatagtgaattgttcccaatgttgaaatggacgtgtaagcctttgagctagcttggagtcgaatacactatttttcactcacaccatttattcatctttgtatttaatactatagctctgtcaatatcacatgaggcagtttttcaaatacgtataaacagaggttgcttattattaaaggaaagacaaagtgggactctttatgatgtcatgaccatgataactaagcacctaagaaaattatttaaaatagttatgtggtaggcagaaagacaaataatttagttttttacttttcaccagcatgtatcttagctacctaaactgaaacatgggaggctgggcttaattcaaaatatattgctccaaggcaaataaaaaaatgctttatctatatttgtggctttctgatgaaaaaatagagaagagcttgttcaataacaggacatggtttccatttcaagatcacaagtaatataagactgggcaagtagtacgtatggaataaaggacatactgctgattgataaag

SEQ ID NO: 373189 - DNA, 3033 bp, Homo sapiens
cggtgctggccccggcgaggtagcttctggaaggcgctgctcttccggttctctgtcccggttcctggggttgcacagacagaccctgtaaacatgtcagggttcagtccggaactcatcgactacttggaagggaaaatctcctttgaggagttcgaacggcggagagaagagagaaaaacccgcgagaagaaaagtcttcaggaaaaaggcaagttatcagctgaagaaaatcccgatgactctgaagttccatcatcatcaggaattaactctaccaaatcccaagacaaagatgtcaatgaaggagaaacatcagatggagtgaggaagtcagttcacaaggtctttgcttccatgcttggagagaatgaagatgatgaggaggaagaggaagaagaggaggaggaggaggaggaggaagaaacacctgagcaacccactgcgggcgatgtatttgtattggagatggttctcaatcgtgaaaccaagaaaatgatgaaagagaaaaggcctcggagtaaacttcccagagctctgagaggtctcatgggtgaagccaacattcgttttgctcgaggagaacgtgaagaggcgatattgatgtgcatggaaatcataagacaagctcctctggcttatgagccattctctactctagccatgatatatgaggaccaaggtgacatggaaaaatcattgcagtttgagttgattgctgcgcatttaaatcccagtgacacagaagaatgggttagactggcagaaatgtctctggaacaagacaatattaagcaggctattttttgctatacaaaagctcttaaatatgaacctactaatgtccgttatctgtgggagcgatcaagcctttatgaacagatgggtgatcataaaatggccatggatggttataggcgtattttaaaccttttgtctccatctgatggcgaacgttttatgcagctggctagagatatggcaaagagttactatgaagccaatgatgttacttctgctattaacataattgatgaagctttctcaaaacaccagggcctagtctccatggaagatgttaacatagcagctgaactatatatttctaacaaacagtatgacaaagctttggagataattacagatttttctggaattgtgctggaaaaaaaaacttcagaagaaggcacctcagaagagaataaagctcctgagaatgttacctgcactatacctgatggcgtgccaatagatatcacagtgaagttgatggtctgccttgtacatctcaacattcttgaaccacttaatcctctcttgacaacactagtagaacagaatcctgaagatatgggagacctatacctagatgttgctgaagcttttctggatgttggtgaatataattctgcacttcccctcctcagtgctcttgtttgctctgaaagatacaaccttgcagtagtttggcttcgtcatgcagaatgtttaaaggccttaggctatatggagcgagctgctgaaagctatggcaaggtggttgatctggccccactccatttggatgcaaggatttcactttctacccttcagcagcagctgggccagcctgagaaagctctggaagctctggaaccaatgtatgatccagatactttagcacaggatgcaaatgctgcacagcaggaactgaagttattgcttcatcgttctactctgttgttttcacaaggcaaaatgtatggttatgtggataccttacttactatgttagccatgcttttaaaggtagcaatgaatcgagcccaagtttgtttgatatccagttccaagtctggagagaggcatctttatcttattaaagtatcgagagacaaaatatcagacagcaatgaccaagagtcagcaaattgtgatgcaaaagcaatatttgctgtgctcacaagcgtcttgacaaaggatgactggtggaatcttctgttgaaggccatatactccttatgtgacctatcccgatttcaagaggctgagttgcttgtagattcctcattggaatattactcattttatgatgacaggcaaaaacgcaaagaactagaatactttggtctgtctgctgcaattctggacaaaaatttcagaaaggcatacaactatatcaggataatggtaatggaaaatgtcaataaaccccagctctggaacattttcaatcaagttaccatgcactcccaagatgtacgacatcatcgcttctgtctccgtttgatgctgaaaaacccagaaaatcatgccctatgtgtcttaaatggacacaatgcatttgtatctggtagttttaagcatgcgcttggacagtatgtgcaagcctttcgcactcaccctgacgaacctctctatagcttctgtataggcctaacctttattcatatggcatctcagaagtatgtgttacggagacatgctcttattgtacagggcttttcctttcttaatcgatacctcagtttacgtgggccctgccaggaatcattctacaatttgggccgtggccttcatcagttggggctgattcatcttgcaatccactattatcagaaggccctggagctccctccacttgtggtagagggtatagaacttgaccagttagacttacgaagagatattgcctacaacttgtctctcatctatcagagcagtgggaataccggaatggctcaaacgcttttgtatacctattgttctatataaagcaccgcaactgagaacagagcaatggcagctgctgtgtgaggaccagtgtcttctgtctcagggcttattatttgtaactccaaaaaaaaaaaaacaaaaaaaaacacctgtgtttgggccggcatctgggcccttgaaaaaagtttttataacaccattcggttgggcgcgccggggcccccagtaggggtaggtagacctggggcaataggcggtgttcccaaggagaaactcgggcgcaagacaaaggggcgtgaggttctcacccatataaag

SEQ ID NO: 373190 - DNA, 2116 bp, Homo sapiens
cggtgctggccccggcgaggtagcttctggaaggcgctgctcttccggttctctgtcccggttcctggggttgcacagacagaccctgtaaacatgtcagggttcagtccggaactcatcgactacttggaagggaaaatctcctttgaggagttcgaacggcggagagaagagagaaaaacccgcgagaagaaaagtcttcaggaaaaaggcaagttatcagctgaagaaaatcccgatgactctgaagttccatcatcatcaggaattaactctaccaaatcccaagacaaagatgtcaatgaaggagaaacatcagatggagtgaggaagtcagttcacaaggtctttgcttccatgcttggagagaatgaagatgatgaggaggaagaggaagaagaggaggaggaggaggaggaggaagaaacacctgagcaacccactgcgggcgatgtatttgtattggagatggttctcaatcgtgaaaccaagaaaatgatgaaagagaaaaggcctcggagtaaacttcccagagctctgagaggtctcatgggtgaagccaacattcgttttgctcgaggagaacgtgaagaggcgatattgatgtgcatggaaatcataagacaagctcctctggcttatgagccattctctactctagccatgatatatgaggaccaaggtgacatggaaaaatcattgcagtttgagttgattgctgcgcatttaaatcccagtgacacagaagaatgggttagactggcagaaatgtctctggaacaagacaatattaagcaggctattttttgctatacaaaagctcttaaatatgaacctactaatgtccgttatctgtgggagcgatcaagcctttatgaacagatgggtgatcataaaatggccatggatggttataggcgtattttaaaccttttgtctccatctgatggcgaacgttttatgcagctggctagagatatggcaaagagttactatgaagccaatgatgttacttctgctattaacataattgatgaagctttctcaaaacaccagggcctagtctccatggaagatgttaacatagcagctgaactatatatttctaacaaacagtatgacaaagctttggagataattacagatttttctggaattgtgctggaaaaaaaaacttcagaagaaggcacctcagaagagaataaagctcctgagaatgttacctgcactatacctgatggcgtgccaatagatatcacagtgaagttgatggtctgccttgtacatctcaacattcttgaaccacttaatcctctcttgacaacactagtagaacagaatcctgaagatatgggagacctatacctagatgttgctgaagcttttctggatgttggtgaatataattctgcacttcccctcctcagtgctcttgtttgctctgaaagatacaaccttgcagtagtttggcttcgtcatgcagaatgtttaaaggccttaggctatatggagcgagctgctgaaagctatggcaaggtggttgatctggccccactccatttggatgcaaggatttcactttctacccttcagcagcagctgggccagcctgagaaagctctggaagctctggaaccaatgtatgatccagatactttagcacaggatgcaaatgctgcacagcaggaactgaagttattgcttcatcgttctactctgttgttttcacaaggcaaaatgtatggttatgtggataccttacttactatgttagccatgcttttaaaggtagcaatgaatcgagcccaagtttgtttgatatccagttccaagtctggagagaggcatctttatcttattaaagtatcgagagacaaaatatcagacagcaatgaccaagagtcagcaaattgtgatgcaaaaggtaataacttcatttgcattatgttatataaaatttggctgaattgaaaaagactcatgaagtaacactggacagcaatctaattgaaaatatacttttcaaataaaatgaaattttccaatctaaatctctcaagtgtaataaactcattcgatgttaaaaaggaaaggctaaatgtaaatactttaaatt

SEQ ID NO: 373191 - DNA, 634 bp, Homo sapiens
ttttttttttaatttaagtggtctcactctgttacccaggatggagtgcagtggtgtgatcacggctcactgcagcctcaacctcccaatctcaagcaatcctcccacctcagcctcccgagaagctaggactacaggcgtgtgccaccatgcccaactcttaaaaaaacttttttttttttttttgtagctatgggggtctcactttgttgtccaggctgacagaactgcatttttaattctatagaaatataattctttataggacttcctggtcaatacagtaatgtaagtttgagctcttgattcttcatcgccataattcccttctgcatatactgcatatggaaacatataattgagcatctgtgttccaggcattgtggctctaacccaagttgtctgagtatatcctagaagtctctgaagtactgtttatcttctttccctttttgttacttcttcacactttccttttggccacctttacagtgagtaaagtaggtggatagagacctttgaaaaagtatatctgtgttcctcaaacaagtcagttttagtgactattacctttggagataaagtccagttccttagagtggcttctgcagccatccatgatctctgaatctca

SEQ ID NO: 373192 - DNA, 452 bp, Homo sapiens
cctctactgagactgcatcacagctctccctcctccctgcgctgagtcctctccctttcctcctcctcctgcaggtcttgacctgggagcacccctaacaaacctcttacgtgccgacctccacctccattggcttcctggagactcaacctgccacgtatcatgtttctcacaaggactaaattgcatagaacataaagttctaagctgggcgctgtggctcacgcctgtaatcccaacactttgggaggcagaggtggacagatcacttgagggcaggagttcgagaccagcctggccaacatggtgaaaccctgtttctactaaaaatacaaaaattagccaggcatgcctgtaatcccagctatttgggaagaggatgcatgaaaattgtttgaatcctggaaggcagaggttgcagtgagccaagattgcaccactgcactccagcc

SEQ ID NO: 373193 - DNA, 837 bp, Homo sapiens
tgaggaaaggcaaggggccgatttgcctgttctcacgccccaccctcagacctagccggagcaaagtttcacttatagaagggagaggagcgaacatggcagcgcgttggcggttttggtgtgtctctgtgaccatggtggtggcgctgctcatcgtttgcgacgttccctcagcctctgcccaaagaaagaaggagatggtgttatctgaaaaggttagtcagctgatggaatggactaacaaaagacctgtaataagaatgaatggagacaagttccgtcgccttgtgaaagccccaccgagaaattactccgttatcgtcatgttcactgctctccaactgcatagacagtgtgtcgtttgcaagcaagctgatgaagaattccagatcctggcaaactcctggcgatactccagtgcattcaccaacaggatattttttgccatggtggattttgatgaaggctctgatgtatttcagatgtttcaggttttttgagatggagtctcgctctgttgcccagactagagtgcagtggcttgatctcggctcactgcaacctctgcctcctggattcaagtgattcttctgcctcagcctcctgaatagctggaattacaggtgcccaccaccacgcctggctactttttgtattttgagtacagatggggtttcaccgtattggccaggctggtctcaaactcctgacctcagatgatccacccacctcagcctcccaaagtgctgggattacaggcgtgagccaccacacctggtccatttttagcttcagcatctctactagttctttccccttgcatataaatacttaagg

SEQ ID NO: 373194 - DNA, 2984 bp, Homo sapiens
tgaggaaaggcaaggggccgatttgcctgttctcacgccccaccctcagacctagccggagcaaagtttcacttatagaagggagaggagcgaacatggcagcgcgttggcggttttggtgtgtctctgtgaccatggtggtggcgctgctcatcgtttgcgacgttccctcagcctctgcccaaagaaagaaggagatggtgttatctgaaaaggttagtcagctgatggaatggactaacaaaagacctgtaataagaatgaatggagacaagttccgtcgccttgtgaaagccccaccgagaaattactccgttatcgtcatgttcactgctctccaactgcatagacagtgtgtcgtttgcaagcaagctgatgaagaattccagatcctggcaaactcctggcgatactccagtgcattcaccaacaggatattttttgccatggtggattttgatgaaggctctgatgtatttcagatgctaaacatgaattcagctccaactttcatcaactttcctgcaaaagggaaacccaaacggggtgatacatatgagttacaggtgcggggtttttcagctgagcagattgcccggtggatcgccgacagaactgatgtcaatattagagtgattagacccccaaattatgctggtccccttatgttgggattgcttttggctgttattggtggacttgtgtatcttcgaagaagtaatatggaatttctctttaataaaactggatgggcttttgcagctttgtgttttgtgcttgctatgacatctggtcaaatgtggaaccatataagaggaccaccatatgcccataagaatccccacacgggacatgtgaattatatccatggaagcagtcaagcccagtttgtagctgaaacacacattgttcttctgtttaatggtggagttaccttaggaatggtgcttttatgtgaagctgctacctctgacatggatattggaaagcgaaagataatgtgtgtggctggtattggacttgttgtattattcttcagttggatgctctctatttttagatctaaatatcatggctacccatacagctttctgatgagttaaaaaggtcccagagatatatagacactggagtactggaaattgaaaaacgaaaatcgtgtgtgtttgaaaagaagaatgcaacttgtatattttgtattacctctttttttcaagtgatttaaatagttaatcatttaaccaaagaagatgtgtagtgccttaacaagcaatcctctgtcaaaatctgaggtatttgaaaataattatcctcttaaccttctcttcccagtgaactttatggaacatttaatttagtacaattaagtatattataaaaattgtaaaactactactttgttttagttagaacaaagctcaaaactactttagttaacttggtcatctgattttatattgccttatccaaagatggggaaagtaagtcctgaccaggtgttcccacatatgcctgttacagataactacattaggaattcattcttagcttcttcatctttgtgtggatgtgtatactttacgcatctttccttttgagtagagaaattatgtgtgtcatgtggtcttctgaaaatggaacaccattcttcagagcacacgtctagccctcagcaagacagttgtttctcctcctccttgcatatttcacgctactgcgctccagcctgagtgatagagtgagactctgtctcaaaaaaaagtatctctaaatacaggattataatttctgcttgagtatggtgttaactaccttgtatttagaaagatttcagattcattccatctccttagttttcttttaaggtgacccatctgtgataaaaatatagcttagtgctaaaatcagtgtaacttatacatggcctaaaatgtttctacaaattagagtttgtcacttattccatttgtacctaagagaaaaataggctcagttagaaaaggactccctggccaggcgcagtgacttacgcctgtaatctcagcactttgggaggccaaggcaggcagatcacgaggtcaggagttcgagaccatcctggccaacatggtgaaaccccgtctctactaaaaatataaaaattagctgggtgtggtggcaggagcctgtaatcccagctacacaggaggctgaggcacgagaatcacttgaactcaggagatggaggtttcagtgagccaagatcacaccactgcactccagcctggcaacagagcgagactccatctcaaaaaaaaaaaaaaaaagtaagaaagaaaaggactcccttagaatgggaaagaaaaatcataaaatattgagctgatgcctgtatatagaaattaagcgtttctcgaaagctgttctatgttttgctgttattttagtctttattctcttcctttaggtggagaaacaaagtaccaatttgaagggattttttttattttgtcttttggtttctgtcagtagaaataaccatatgtgctaaccaaatttctgtgaagaatgttttcatggttatcattatatctaactataacctcccccatagttatgaagagtaacctgaaatgccactattgtggaaataggataattgtaattgtgaaaaaataattttaaggaaatcttacaagtattacattaaaaagatactatgactgccacctgccatttaccttctaataaccctgccatgtggtttgcagaaagagatggatatagtagcctcagaagaaatattttatgtgggttttttgtttttcgttactagatttcatggatgaggggatatggttgaccttttttcttataatgggggccaaccaatatttgtcactatacttcatttgaaaaaatgtaagaaatctgaaattacttagaactgatttctcaggtactggtctataagcaaaattaatgctgtgagtagttttctaaaa

SEQ ID NO: 373195 - DNA, 3681 bp, Homo sapiens
catggatcaaggccgggggtgaatcggcaccgaggcgaacatggcagcgcgttggcggttttggtgtgtctctgtgaccatggtggtggcgctgctcatcgtttgcgacgttccctcagcctctgcccaaagaaagaaggagatggtgttatctgaaaaggttagtcagctgatggaatggactaacaaaagacctgtaataagaatgaatggagacaagttccgtcgccttgtgaaagccccaccgagaaattactccgttatcgtcatgttcactgctctccaactgcatagacagtgtgtcgtttgcaagcaagctgatgaagaattccagatcctggcaaactcctggcgatactccagtgcattcaccaacaggatattttttgccatggtggattttgatgaaggctctgatgtatttcagatgctaaacatgaattcagctccaactttcatcaactttcctgcaaaagggaaacccaaacggggtgatacatatgagttacaggtgcggggtttttcagctgagcagattgcccggtggatcgccgacagaactgatgtcaatattagagtgattagacccccaaattatgctggtccccttatgttgggattgcttttggctgttattggtggacttgtgtatcttcgaagaagtaatatggaatttctctttaataaaactggatgggcttttgcagctttgtgttttgtgcttgctatgacatctggtcaaatgtggaaccatataagaggaccaccatatgcccataagaatccccacacgggacatgtgaattatatccatggaagcagtcaagcccagtttgtagctgaaacacacattgttcttctgtttaatggtggagttaccttaggaatggtgcttttatgtgaagctgctacctctgacatggatattggaaagcgaaagataatgtgtgtggctggtattggacttgttgtattattcttcagttggatgctctctatttttagatctaaatatcatggctacccatacagctttctgatgagttaaaaaggtcccagagatatatagacactggagtactggaaattgaaaaacgaaaatcgtgtgtgtttgaaaagaagaatgcaacttgtatattttgtattacctctttttttcaagtgatttaaatagttaatcatttaaccaaagaagatgtgtagtgccttaacaagcaatcctctgtcaaaatctgaggtatttgaaaataattatcctcttaaccttctcttcccagtgaactttatggaacatttaatttagtacaattaagtatattataaaaattgtaaaactactactttgttttagttagaacaaagctcaaaactactttagttaacttggtcatctgattttatattgccttatccaaagatggggaaagtaagtcctgaccaggtgttcccacatatgcctgttacagataactacattaggaattcattcttagcttcttcatctttgtgtggatgtgtatactttacgcatctttccttttgagtagagaaattatgtgtgtcatgtggtcttctgaaaatggaacaccattcttcagagcacacgtctagccctcagcaagacagttgtttctcctcctccttgcatatttcctactgaaatacagtgctgtctatgattgtttttgttttgttgtttttttgagacgctactgcgctccagcctgagtgatagagtgagactctgtctcaaaaaaaagtatctctaaatacaggattataatttctgcttgagtatggtgttaactaccttgtatttagaaagatttcagattcattccatctccttagttttcttttaaggtgacccatctgtgataaaaatatagcttagtgctaaaatcagtgtaacttatacatggcctaaaatgtttctacaaattagagtttgtcacttattccatttgtacctaagagaaaaataggctcagttagaaaaggactccctggccaggcgcagtgacttacgcctgtaatctcagcactttgggaggccaaggcaggcagatcacgaggtcaggagttcgagaccatcctggccaacatggtgaaaccccgtctctactaaaaatataaaaattagctgggtgtggtggcaggagcctgtaatcccagctacacaggaggctgaggcacgagaatcacttgaactcaggagatggaggtttcagtgagccaagatcacaccactgcactccagcctggcaacagagcgagactccatctcaaaaaaaaaaaaaaaaagtaagaaagaaaaggactcccttagaatgggaaagaaaaatcataaaatattgagctgatgcctgtatatagaaattaagcgtttctcgaaagctgttctatgttttgctgttattttagtctttattctcttcctttaggtggagaaacaaagtaccaatttgaagggattttttttattttgtcttttggtttctgtcagtagaaataaccatatgtgctaaccaaatttctgtgaagaatgttttcatggttatcattatatctaactataacctcccccatagttatgaagagtaacctgaaatgccactattgtggaaataggataattgtaattgtgaaaaaataattttaaggaaatcttacaagtattacattaaaaagatactatgactgccacctgccatttaccttctaataaccctgccatgtggtttgcagaaagagatggatatagtagcctcagaagaaatattttatgtgggttttttgtttttcgttactagatttcatggatgaggggatatggttgaccttttactttttaatggagcagccagtttttgttaattactcacttgtaaattgtgagattctgaattccttacctgctattcttgtacttgtctcaggccaaatctatgctgtggttcttatgagacttgtatgaagatgccctgatttgtacagattgaccacgggaatactactgccatgtaatctgtatagttccagataatttgtcatgaacattgacagaatgacaattttttgtatttgctttttctccctttaagagcacattcttctgtaaggagaaaggcagcattctggctaaaatgtgtagaaggtaatttactacacttataaaatagtgtgacttttgtgaaaattttgaattagctttcatatgaagtgccttaagtagactcttcatttacttttctggtaatggtttaaatatcatttgttatgcatttttaagatacagttcagaatgacacattgtagtggcaaagataaccaaatgtctggctgtttgctttttgaccatatcaataaacttttacaaaaaaaaaaaaaaagaaaggaacagcgagcaccaacacctagccactgcaagtaggaagcgcagggacgccgcgtagaatgaaacacacgagacaggagacgccgcagcaagccgccagaccacaccacaagaggcaccgccagccgagtaaacaaagtaaatggagacgcggcccggccccagtgggagaaagaaccaaacagggagcgcgggacaaccacactggtgaggacggggcaaacaccaacggaacgccacaacgcaatgtcgggagtcccacgcggcgaagcacgccctagaac

SEQ ID NO: 373196 - DNA, 2506 bp, Homo sapiens
tgaggaaaggcaaggggccgatttgcctgttctcacgccccaccctcagacctagccggagcaaagtttcacttatagaagggagaggagcgaacatggcagcgcgttggcggttttggtgtgtctctgtgaccatggtggtggcgctgctcatcgtttgcgacgttccctcagcctctgcccaaagaaagaaggagatggtgttatctgaaaaggttagtcagctgatggaatggactaacaaaagacctgtaataagaatgaatggagacaagttccgtcgccttgtgaaagccccaccgagaaattactccgttatcgtcatgttcactgctctccaactgcatagacagtgtgtcgtttgcaagcaagctgatgaagaattccagatcctggcaaactcctggcgatactccagtgcattcaccaacaggatattttttgccatggtggattttgatgaaggctctgatgtatttcagatgctaaacatgaattcagctccaactttcatcaactttcctgcaaaagggaaacccaaacggggtgatacatatgagttacaggtgcggggtttttcagctgagcagattgcccggtggatcgccgacagaactgatgtcaatattagagtgattagacccccaaattatgctggtccccttatgttgggattgcttttggctgttattggtggacttgtgtatcttcgaagaagtaatatggaatttctctttaataaaactggatgggcttttgcagctttgtgttttgtgcttgctatgacatctggtcaaatgtggaaccatataagaggaccaccatatgcccataagaatccccacacgggacatgtgaattatatccatggaagcagtcaagcccagtttgtagctgaaacacacattgttcttctgtttaatggtggagttaccttaggaatggtgcttttatgtgaagctgctacctctgacatggatattggaaagcgaaagataatgtgtgtggctggtattggacttgttgtattattcttcagttggatgctctctatttttagatctaaatatcatggctacccatacagctttctgatgagttaaaaaggtcccagagatatatagacactggagtactggaaattgaaaaacgaaaatcgtgtgtgtttgaaaagaagaatgcaacttgtatattttgtattacctctttttttcaagtgatttaaatagttaatcatttaaccaaagaagatgtgtagtgccttaacaagcaatcctctgtcaaaatctgaggtatttgaaaataattatcctcttaaccttctcttcccagtgaactttatggaacatttaatttagtacaattaagtatattataaaaattgtaaaactactactttgttttagttagaacaaagctcaaaactactttagttaacttggtcatctgattttatattgccttatccaaagatggggaaagtaagtcctgaccaggtgttcccacatatgcctgttacagataactacattaggaattcattcttagcttcttcatctttgtgtggatgtgtatactttacgcatctttccttttgagtagagaaattatgtgtgtcatgtggtcttctgaaaatggaacaccattcttcagagcacacgtctagccctcagcaagacagttgtttctcctcctccttgcatatttcacgctactgcgctccagcctgagtgatagagtgagactctgtctcaaaaaaaagtatctctaaatacaggattataatttctgcttgagtatggtgttaactaccttgtatttagaaagatttcagattcattccatctccttagttttcttttaaggtgacccatctgtgataaaaatatagcttagtgctaaaatcagtgtaacttatacatggcctaaaatgtttctacaaattagagtttgtcacttattccatttgtacctaagagaaaaataggctcagttagaaaaggactccctggccaggcgcagtgacttacgcctgtaatctcagcactttgggaggccaaggcaggcagatcacgaggtcaggagttcgagaccatcctggccaacatggtgaaaccccgtctctactaaaaatataaaaattagctgggtgtggtggcaggagcctgtaatcccagctacacaggaggctgaggcacgagaatcacttgaactcaggagatggaggtttcagtgagccaagatcacaccactgcactccagcctggcaacagagcgagactccatctcaaaaaaaaaaaggggccgctaaattacctcggggcagttcgctaccgtttttttcacggggctttggggggttaagaagacagcgggtaaaagccgaggacatggctggtcttgggaccactctcggtggcagggccccactaagccgcgcaaatattattgaaagttggattttttatccaataaaaaaaggaacgaatatgactaaaaagaacct

SEQ ID NO: 373197 - DNA, 4256 bp, Homo sapiens
tgaggaaaggcaaggggccgatttgcctgttctcacgccccaccctcagacctagccggagcaaagtttcacttatagaagggagaggagcgaacatggcagcgcgttggcggttttggtgtgtctctgtgaccatggtggtggcgctgctcatcgtttgcgacgttccctcagcctctgcccaaagaaagaaggagatggtgttatctgaaaaggttagtcagctgatggaatggactaacaaaagacctgtaataagaatgaatggagacaagttccgtcgccttgtgaaagccccaccgagaaattactccgttatcgtcatgttcactgctctccaactgcatagacagtgtgtcgtttgcaagcaagctgatgaagaattccagatcctggcaaactcctggcgatactccagtgcattcaccaacaggatattttttgccatggtggattttgatgaaggctctgatgtatttcagatgctaaacatgaattcagctccaactttcatcaactttcctgcaaaagggaaacccaaacggggtgatacatatgagttacaggtgcggggtttttcagctgagcagattgcccggtggatcgccgacagaactgatgtcaatattagagtgattagacccccaaattatgctggtccccttatgttgggattgcttttggctgttattggtggacttgtgtatcttcgaagaagtaatatggaatttctctttaataaaactggatgggcttttgcagctttgtgttttgtgcttgctatgacatctggtcaaatgtggaaccatataagaggaccaccatatgcccataagaatccccacacgggacatgtgaattatatccatggaagcagtcaagcccagtttgtagctgaaacacacattgttcttctgtttaatggtggagttaccttaggaatggtgcttttatgtgaagctgctacctctgacatggatattggaaagcgaaagataatgtgtgtggctggtattggacttgttgtattattcttcagttggatgctctctatttttagatctaaatatcatggctacccatacagctttctgatgagttaaaaaggtcccagagatatatagacactggagtactggaaattgaaaaacgaaaatcgtgtgtgtttgaaaagaagaatgcaacttgtatattttgtattacctctttttttcaagtgatttaaatagttaatcatttaaccaaagaagatgtgtagtgccttaacaagcaatcctctgtcaaaatctgaggtatttgaaaataattatcctcttaaccttctcttcccagtgaactttatggaacatttaatttagtacaattaagtatattataaaaattgtaaaactactactttgttttagttagaacaaagctcaaaactactttagttaacttggtcatctgattttatattgccttatccaaagatggggaaagtaagtcctgaccaggtgttcccacatatgcctgttacagataactacattaggaattcattcttagcttcttcatctttgtgtggatgtgtatactttacgcatctttccttttgagtagagaaattatgtgtgtcatgtggtcttctgaaaatggaacaccattcttcagagcacacgtctagccctcagcaagacagttgtttctcctcctccttgcatatttcctactgaaatacagtgctgtctatgattgtttttgttttgttgtttttttgagacggtctcgctgtgtcacacaggctggagtgcagtggcgtgagctcggctgactgcaaactctgcctcccaggtttaagcgattctcctgtcacagcttcccaagtagctgggatttacaggtgtgcaccgccatgccaggctaatttttgtgtttttagtagagacagggtttcgccaagttgtccaggctggtcttgaactcctgggctcaagtgatccgcccgcctcagtctcccaaagtgcgaggatgacatgtgtgagctaccacaccagcaatgtctatgcttctcgatagctgtgaacatgaaaagacatctattgggagtccgaggcaggtggattgcttgaggccaggagttagagaccagcctggccaacaaggcaaaaccccgtctctactaaaaatatgaaaattagctgggcttggtggctcatgcctataatcctagctacttgggaggctgaggcacgagacttgcttaatacctgggaggcggagattgcagtgagccgagatcacgctactgcgctccagcctgagtgatagagtgagactctgtctcaaaaaaaagtatctctaaatacaggattataatttctgcttgagtatggtgttaactaccttgtatttagaaagatttcagattcattccatctccttagttttcttttaaggtgacccatctgtgataaaaatatagcttagtgctaaaatcagtgtaacttatacatggcctaaaatgtttctacaaattagagtttgtcacttattccatttgtacctaagagaaaaataggctcagttagaaaaggactccctggccaggcgcagtgacttacgcctgtaatctcagcactttgggaggccaaggcaggcagatcacgaggtcaggagttcgagaccatcctggccaacatggtgaaaccccgtctctactaaaaatataaaaattagctgggtgtggtggcaggagcctgtaatcccagctacacaggaggctgaggcacgagaatcacttgaactcaggagatggaggtttcagtgagccaagatcacaccactgcactccagcctggcaacagagcgagactccatctcaaaaaaaaaaaaaaaaagtaagaaagaaaaggactcccttagaatgggaaagaaaaatcataaaatattgagctgatgcctgtatatagaaattaagcgtttctcgaaagctgttctatgttttgctgttattttagtctttattctcttcctttaggtggagaaacaaagtaccaatttgaagggattttttttattttgtcttttggtttctgtcagtagaaataaccatatgtgctaaccaaatttctgtgaagaatgttttcatggttatcattatatctaactataacctcccccatagttatgaagagtaacctgaaatgccactattgtggaaataggataattgtaattgtgaaaaaataattttaaggaaatcttacaagtattacattaaaaagatactatgactgccacctgccatttaccttctaataaccctgccatgtggtttgcagaaagagatggatatagtagcctcagaagaaatattttatgtgggttttttgtttttcgttactagatttcatggatgaggggatatggttgaccttttactttttaatggagcagccagtttttgttaattactcacttgtaaattgtgagattctgaattccttacctgctattcttgtacttgtctcaggccaaatctatgctgtggttcttatgagacttgtatgaagatgccctgatttgtacagattgaccacgggaatactactgccatgtaatctgtatagttccagataatttgtcatgaacattgacagaatgacaattttttgtatttgctttttctccctttaagagcacattcttctgtaaggagaaaggcagcattctggctaaaatgtgtagaaggtaatttactacacttataaaatagtgtgacttttgtgaaaattttgaattagctttcatatgaagtgccttaagtagactcttcatttacttttctggtaatggtttaaatatcatttgttatgcatttttaagatacagttcagaatgacacattgtagtggcaaagataaccaaatgtctggctgtttgctttttgaccatatcaataaacttttacaaaaaaaaaaaaaaagaaaggaacagcgagcaccaacacctagccactgcaagtaggaagcgcagggacgccgcgtagaatgaaacacacgagacaggagacgccgcagcaagccgccagaccacaccacaagaggcaccgccagccgagtaaacaaagtaaatggagacgcggcccggccccagtgggagaaagaaccaaacagggagcgcgggacaaccacactggtgaggacggggcaaacaccaacggaacgccacaacgcaatgtcgggagtcccacgcggcgaagcacgccctagaac

SEQ ID NO: 373198 - DNA, 3832 bp, Homo sapiens
tgaggaaaggcaaggggccgatttgcctgttctcacgccccaccctcagacctagccggagcaaagtttcacttatagaagggagaggagcgaacatggcagcgcgttggcggttttggtgtgtctctgtgaccatggtggtggcgctgctcatcgtttgcgacgttccctcagcctctgcccaaagaaagaaggagtagagacggggtttcacgatgttggccaggctgttctcaaactcctgacatcaagtgatccatccgacttgacctcccaaagcactgagatgacagatggtgttatctgaaaaggttagtcagctgatggaatggactaacaaaagacctgtaataagaatgaatggagacaagttccgtcgccttgtgaaagccccaccgagaaattactccgttatcgtcatgttcactgctctccaactgcatagacagtgtgtcgtttgcaagcaagctgatgaagaattccagatcctggcaaactcctggcgatactccagtgcattcaccaacaggatattttttgccatggtggattttgatgaaggctctgatgtatttcagatgctaaacatgaattcagctccaactttcatcaactttcctgcaaaagggaaacccaaacggggtgatacatatgagttacaggtgcggggtttttcagctgagcagattgcccggtggatcgccgacagaactgatgtcaatattagagtgattagacccccaaattatgctggtccccttatgttgggattgcttttggctgttattggtggacttgtgtatcttcgaagaagtaatatggaatttctctttaataaaactggatgggcttttgcagctttgtgttttgtgcttgctatgacatctggtcaaatgtggaaccatataagaggaccaccatatgcccataagaatccccacacgggacatgtgaattatatccatggaagcagtcaagcccagtttgtagctgaaacacacattgttcttctgtttaatggtggagttaccttaggaatggtgcttttatgtgaagctgctacctctgacatggatattggaaagcgaaagataatgtgtgtggctggtattggacttgttgtattattcttcagttggatgctctctatttttagatctaaatatcatggctacccatacagctttctgatgagttaaaaaggtcccagagatatatagacactggagtactggaaattgaaaaacgaaaatcgtgtgtgtttgaaaagaagaatgcaacttgtatattttgtattacctctttttttcaagtgatttaaatagttaatcatttaaccaaagaagatgtgtagtgccttaacaagcaatcctctgtcaaaatctgaggtatttgaaaataattatcctcttaaccttctcttcccagtgaactttatggaacatttaatttagtacaattaagtatattataaaaattgtaaaactactactttgttttagttagaacaaagctcaaaactactttagttaacttggtcatctgattttatattgccttatccaaagatggggaaagtaagtcctgaccaggtgttcccacatatgcctgttacagataactacattaggaattcattcttagcttcttcatctttgtgtggatgtgtatactttacgcatctttccttttgagtagagaaattatgtgtgtcatgtggtcttctgaaaatggaacaccattcttcagagcacacgtctagccctcagcaagacagttgtttctcctcctccttgcatatttcctactgaaatacagtgctgtctatgattgtttttgttttgttgtttttttgagacgctactgcgctccagcctgagtgatagagtgagactctgtctcaaaaaaaagtatctctaaatacaggattataatttctgcttgagtatggtgttaactaccttgtatttagaaagatttcagattcattccatctccttagttttcttttaaggtgacccatctgtgataaaaatatagcttagtgctaaaatcagtgtaacttatacatggcctaaaatgtttctacaaattagagtttgtcacttattccatttgtacctaagagaaaaataggctcagttagaaaaggactccctggccaggcgcagtgacttacgcctgtaatctcagcactttgggaggccaaggcaggcagatcacgaggtcaggagttcgagaccatcctggccaacatggtgaaaccccgtctctactaaaaatataaaaattagctgggtgtggtggcaggagcctgtaatcccagctacacaggaggctgaggcacgagaatcacttgaactcaggagatggaggtttcagtgagccaagatcacaccactgcactccagcctggcaacagagcgagactccatctcaaaaaaaaaaaaaaaaagtaagaaagaaaaggactcccttagaatgggaaagaaaaatcataaaatattgagctgatgcctgtatatagaaattaagcgtttctcgaaagctgttctatgttttgctgttattttagtctttattctcttcctttaggtggagaaacaaagtaccaatttgaagggattttttttattttgtcttttggtttctgtcagtagaaataaccatatgtgctaaccaaatttctgtgaagaatgttttcatggttatcattatatctaactataacctcccccatagttatgaagagtaacctgaaatgccactattgtggaaataggataattgtaattgtgaaaaaataattttaaggaaatcttacaagtattacattaaaaagatactatgactgccacctgccatttaccttctaataaccctgccatgtggtttgcagaaagagatggatatagtagcctcagaagaaatattttatgtgggttttttgtttttcgttactagatttcatggatgaggggatatggttgaccttttactttttaatggagcagccagtttttgttaattactcacttgtaaattgtgagattctgaattccttacctgctattcttgtacttgtctcaggccaaatctatgctgtggttcttatgagacttgtatgaagatgccctgatttgtacagattgaccacgggaatactactgccatgtaatctgtatagttccagataatttgtcatgaacattgacagaatgacaattttttgtatttgctttttctccctttaagagcacattcttctgtaaggagaaaggcagcattctggctaaaatgtgtagaaggtaatttactacacttataaaatagtgtgacttttgtgaaaattttgaattagctttcatatgaagtgccttaagtagactcttcatttacttttctggtaatggtttaaatatcatttgttatgcatttttaagatacagttcagaatgacacattgtagtggcaaagataaccaaatgtctggctgtttgctttttgaccatatcaataaacttttacaaaaaaaaaaaaaaagaaaggaacagcgagcaccaacacctagccactgcaagtaggaagcgcagggacgccgcgtagaatgaaacacacgagacaggagacgccgcagcaagccgccagaccacaccacaagaggcaccgccagccgagtaaacaaagtaaatggagacgcggcccggccccagtgggagaaagaaccaaacagggagcgcgggacaaccacactggtgaggacggggcaaacaccaacggaacgccacaacgcaatgtcgggagtcccacgcggcgaagcacgccctagaac

SEQ ID NO: 373199 - DNA, 3362 bp, Homo sapiens
tgaggaaaggcaaggggccgatttgcctgttctcacgccccaccctcagacctagccggagcaaagtttcacttatagaagggagaggagcgaacatggcagcgcgttggcggttttggtgtgtctctgtgaccatggtggtggcgctgctcatcgtttgcgacgttccctcagcctctgcccaaagaaagaaggagatggtgttatctgaaaaggttagtcagctgatggaatggactaacaaaagacctgtaataagaatgaatggagacaagttccgtcgccttgtgaaagccccaccgagaaattactccgttatcgtcatgttcactgctctccaactgcatagacagtgtgtcgtttgcaagcaagctgatgaagaattccagatcctggcaaactcctggcgatactccagtgcattcaccaacaggatattttttgccatggtggattttgatgaaggctctgatgtatttcagatgctaaacatgaattcagctccaactttcatcaactttcctgcaaaagggaaacccaaacggggtgatacatatgagttacaggtgcggggtttttcagctgagcagattgcccggtggatcgccgacagaactgatgtcaatattagagtgattagacccccaaattatgctggtccccttatgttgggattgcttttggctgttattggtggacttgtgtatcttcgaagaagtaatatggaatttctctttaataaaactggatgggcttttgcagctttgtgttttgtgcttgctatgacatctggtcaaatgtggaaccatataagaggaccaccatatgcccataagaatccccacacgggacatgtgaattatatccatggaagcagtcaagcccagtttgtagctgaaacacacattgttcttctgtttaatggtggagttaccttaggaatggtgcttttatgtgaagctgctacctctgacatggatattggaaagcgaaagataatgtgtgtggctggtattggacttgttgtattattcttcagttggatgctctctatttttagatctaaatatcatggctacccatacagctttctgatgagttaaaaaggtcccagagatatatagacactggagtactggaaattgaaaaacgaaaatcgtgtgtgtttgaaaagaagaatgcaacttgtatattttgtattacctctttttttcaagtgatttaaatagttaatcatttaaccaaagaagatgtgtagtgccttaacaagcaatcctctgtcaaaatctgaggtatttgaaaataattatcctcttaaccttctcttcccagtgaactttatggaacatttaatttagtacaattaagtatattataaaaattgtaaaactactactttgttttagttagaacaaagctcaaaactactttagttaacttggtcatctgattttatattgccttatccaaagatggggaaagtaagtcctgaccaggtgttcccacatatgcctgttacagataactacattaggaattcattcttagcttcttcatctttgtgtggatgtgtatactttacgcatctttccttttgagtagagaaattatgtgtgtcatgtggtcttctgaaaatggaacaccattcttcagagcacacgtctagccctcagcaagacagttgtttctcctcctccttgcatatttcctactgaaatacagtgctgtctatgattgtttttgttttgttgtttttttgagacggtctcgctgtgtcacacaggctggagtgcagtggcgtgagctcggctgactgcaaactctgcctcccaggtttaagcgattctcctgtcacagtacacaggaggctgaggcacgagaatcacttgaactcaggagatggaggtttcagtgagccaagatcacaccactgcactccagcctggcaacagagcgagactccatctcaaaaaaaaaaaaaaaaagtaagaaagaaaaggactcccttagaatgggaaagaaaaatcataaaatattgagctgatgcctgtatatagaaattaagcgtttctcgaaagctgttctatgttttgctgttattttagtctttattctcttcctttaggtggagaaacaaagtaccaatttgaagggattttttttattttgtcttttggtttctgtcagtagaaataaccatatgtgctaaccaaatttctgtgaagaatgttttcatggttatcattatatctaactataacctcccccatagttatgaagagtaacctgaaatgccactattgtggaaataggataattgtaattgtgaaaaaataattttaaggaaatcttacaagtattacattaaaaagatactatgactgccacctgccatttaccttctaataaccctgccatgtggtttgcagaaagagatggatatagtagcctcagaagaaatattttatgtgggttttttgtttttcgttactagatttcatggatgaggggatatggttgaccttttactttttaatggagcagccagtttttgttaattactcacttgtaaattgtgagattctgaattccttacctgctattcttgtacttgtctcaggccaaatctatgctgtggttcttatgagacttgtatgaagatgccctgatttgtacagattgaccacgggaatactactgccatgtaatctgtatagttccagataatttgtcatgaacattgacagaatgacaattttttgtatttgctttttctccctttaagagcacattcttctgtaaggagaaaggcagcattctggctaaaatgtgtagaaggtaatttactacacttataaaatagtgtgacttttgtgaaaattttgaattagctttcatatgaagtgccttaagtagactcttcatttacttttctggtaatggtttaaatatcatttgttatgcatttttaagatacagttcagaatgacacattgtagtggcaaagataaccaaatgtctggctgtttgctttttgaccatatcaataaacttttacaaaaaaaaaaaaaaagaaaggaacagcgagcaccaacacctagccactgcaagtaggaagcgcagggacgccgcgtagaatgaaacacacgagacaggagacgccgcagcaagccgccagaccacaccacaagaggcaccgccagccgagtaaacaaagtaaatggagacgcggcccggccccagtgggagaaagaaccaaacagggagcgcgggacaaccacactggtgaggacggggcaaacaccaacggaacgccacaacgcaatgtcgggagtcccacgcggcgaagcacgccctagaac

SEQ ID NO: 373200 - DNA, 3699 bp, Homo sapiens
tgaggaaaggcaaggggccgatttgcctgttctcacgccccaccctcagacctagccggagcaaagtttcacttatagaagggagaggagcgaacatggcagcgcgttggcggttttggtgtgtctctgtgaccatggtggtggcgctgctcatcgtttgcgacgttccctcagcctctgcccaaagaaagaaggagatggtgttatctgaaaaggttagtcagctgatggaatggactaacaaaagacctgtaataagaatgaatggagacaagttccgtcgccttgtgaaagccccaccgagaaattactccgttatctcaagcccagtttgtagctgaaacacacattgttcttctgtttaatggtggagttaccttaggaatggtgcttttatgtgaagctgctacctctgacatggatattggaaagcgaaagataatgtgtgtggctggtattggacttgttgtattattcttcagttggatgctctctatttttagatctaaatatcatggctacccatacagctttctgatgagttaaaaaggtcccagagatatatagacactggagtactggaaattgaaaaacgaaaatcgtgtgtgtttgaaaagaagaatgcaacttgtatattttgtattacctctttttttcaagtgatttaaatagttaatcatttaaccaaagaagatgtgtagtgccttaacaagcaatcctctgtcaaaatctgaggtatttgaaaataattatcctcttaaccttctcttcccagtgaactttatggaacatttaatttagtacaattaagtatattataaaaattgtaaaactactactttgttttagttagaacaaagctcaaaactactttagttaacttggtcatctgattttatattgccttatccaaagatggggaaagtaagtcctgaccaggtgttcccacatatgcctgttacagataactacattaggaattcattcttagcttcttcatctttgtgtggatgtgtatactttacgcatctttccttttgagtagagaaattatgtgtgtcatgtggtcttctgaaaatggaacaccattcttcagagcacacgtctagccctcagcaagacagttgtttctcctcctccttgcatatttcctactgaaatacagtgctgtctatgattgtttttgttttgttgtttttttgagacggtctcgctgtgtcacacaggctggagtgcagtggcgtgagctcggctgactgcaaactctgcctcccaggtttaagcgattctcctgtcacagcttcccaagtagctgggatttacaggtgtgcaccgccatgccaggctaatttttgtgtttttagtagagacagggtttcgccaagttgtccaggctggtcttgaactcctgggctcaagtgatccgcccgcctcagtctcccaaagtgcgaggatgacatgtgtgagctaccacaccagcaatgtctatgcttctcgatagctgtgaacatgaaaagacatctattgggagtccgaggcaggtggattgcttgaggccaggagttagagaccagcctggccaacaaggcaaaaccccgtctctactaaaaatatgaaaattagctgggcttggtggctcatgcctataatcctagctacttgggaggctgaggcacgagacttgcttaatacctgggaggcggagattgcagtgagccgagatcacgctactgcgctccagcctgagtgatagagtgagactctgtctcaaaaaaaagtatctctaaatacaggattataatttctgcttgagtatggtgttaactaccttgtatttagaaagatttcagattcattccatctccttagttttcttttaaggtgacccatctgtgataaaaatatagcttagtgctaaaatcagtgtaacttatacatggcctaaaatgtttctacaaattagagtttgtcacttattccatttgtacctaagagaaaaataggctcagttagaaaaggactccctggccaggcgcagtgacttacgcctgtaatctcagcactttgggaggccaaggcaggcagatcacgaggtcaggagttcgagaccatcctggccaacatggtgaaaccccgtctctactaaaaatataaaaattagctgggtgtggtggcaggagcctgtaatcccagctacacaggaggctgaggcacgagaatcacttgaactcaggagatggaggtttcagtgagccaagatcacaccactgcactccagcctggcaacagagcgagactccatctcaaaaaaaaaaaaaaaaagtaagaaagaaaaggactcccttagaatgggaaagaaaaatcataaaatattgagctgatgcctgtatatagaaattaagcgtttctcgaaagctgttctatgttttgctgttattttagtctttattctcttcctttaggtggagaaacaaagtaccaatttgaagggattttttttattttgtcttttggtttctgtcagtagaaataaccatatgtgctaaccaaatttctgtgaagaatgttttcatggttatcattatatctaactataacctcccccatagttatgaagagtaacctgaaatgccactattgtggaaataggataattgtaattgtgaaaaaataattttaaggaaatcttacaagtattacattaaaaagatactatgactgccacctgccatttaccttctaataaccctgccatgtggtttgcagaaagagatggatatagtagcctcagaagaaatattttatgtgggttttttgtttttcgttactagatttcatggatgaggggatatggttgaccttttactttttaatggagcagccagtttttgttaattactcacttgtaaattgtgagattctgaattccttacctgctattcttgtacttgtctcaggccaaatctatgctgtggttcttatgagacttgtatgaagatgccctgatttgtacagattgaccacgggaatactactgccatgtaatctgtatagttccagataatttgtcatgaacattgacagaatgacaattttttgtatttgctttttctccctttaagagcacattcttctgtaaggagaaaggcagcattctggctaaaatgtgtagaaggtaatttactacacttataaaatagtgtgacttttgtgaaaattttgaattagctttcatatgaagtgccttaagtagactcttcatttacttttctggtaatggtttaaatatcatttgttatgcatttttaagatacagttcagaatgacacattgtagtggcaaagataaccaaatgtctggctgtttgctttttgaccatatcaataaacttttacaaaaaaaaaaaaaaagaaaggaacagcgagcaccaacacctagccactgcaagtaggaagcgcagggacgccgcgtagaatgaaacacacgagacaggagacgccgcagcaagccgccagaccacaccacaagaggcaccgccagccgagtaaacaaagtaaatggagacgcggcccggccccagtgggagaaagaaccaaacagggagcgcgggacaaccacactggtgaggacggggcaaacaccaacggaacgccacaacgcaatgtcgggagtcccacgcggcgaagcacgccctagaac

SEQ ID NO: 373201 - DNA, 1011 bp, Homo sapiens
tgaggaaaggcaaggggccgatttgcctgttctcacgccccaccctcagacctagccggagcaaagtttcacttatagaagggagaggagcgaacatggcagcgcgttggcggttttggtgtgtctctgtgaccatggtggtggcgctgctcatcgtttgcgacgttccctcagcctctgcccaaagaaagaaggagatggtgttatctgaaaaggttagtcagctgatggaatggactaacaaaagacctgtaataagaatgaatggagacaagttccgtcgccttgtgaaagccccaccgagaaattactccgttatcgtcatgttcactgctctccaactgcatagacagtgtgtcgtttgcaagcaagctgatgaagaattccagatcctggcaaactcctggcgatactccagtgcattcaccaacaggatattttttgccatggtggattttgatgaaggctctgatgtatttcagatgctaaacatgaattcagctccaactttcatcaactttcctgcaaaagggaaacccaaacggggtgatacatatgagttacaggtgcggggtttttcagctgagcagattgcccggtggatcgccgacagaactgatgtcaatattagagtgattagacccccaaattatgctggtccccttatgttgggattgcttttggctgttattggtggacttgtgtatcttcgaagaagtaatatggaatttctctttaataaaactggatgggcttttgcagctttggtgagtgaatttcagaagacaaaaaattatttgaataaaattcctaatagtgtatttttaggtaagcttttatttatgtgagaagtagcattttatttcttacctgaggaaaatagttttatatattttaattttctgtcttaaaatcagtttgtttcattcattatctcataaggatggccagaacttcaaggaactgattgtacctgccttttattcaacctaaatgacagactgtcatctc

SEQ ID NO: 373202 - DNA, 3683 bp, Homo sapiens
tgaggaaaggcaaggggccgatttgcctgttctcacgccccaccctcagacctagccggagcaaagtttcacttatagaagggagaggagcgaacatggcagcgcgttggcggttttggtgtgtctctgtgaccatggtggtggcgctgctcatcgtttgcgacgttccctcagcctctgcccaaagaaagaaggagatggtgttatctgaaaaggttagtcagctgatggaatggactaacaaaagacctgtaataagaatgaatggagacaagttccgtcgccttgtgaaagccccaccgagaaattactccgttatcgtcatgttcactgctctccaactgcatagacagtgtgtcgtttgcaagcaagctgatgaagaattccagatcctggcaaactcctggcgatactccagtgcattcaccaacaggatattttttgccatggtggattttgatgaaggctctgatgtatttcagatgctaaacatgaattcagctccaactttcatcaactttcctgcaaaagggaaacccaaacggggtgatacatatgagttacaggtgcggggtttttcagctgagcagattgcccggtggatcgccgacagaactgatgtcaatattagagtgattagacccccaaattatgctggtccccttatgttgggattgcttttggctgttattggtggacttgtgtatcttcgaagaagtaatatggaatttctctttaataaaactggatgggcttttgcagctttgtgttttgtgcttgctatgacatctggtcaaatgtggaaccatataagaggaccaccatatgcccataagaatccccacacgggacatgtgaattatatccatggaagcagtcaagcccagtttgtagctgaaacacacattgttcttctgtttaatggtggagttaccttaggaatggtgcttttatgtgaagctgctacctctgacatggatattggaaagcgaaagataatgtgtgtggctggtattggacttgttgtattattcttcagttggatgctctctatttttagatctaaatatcatggctacccatacagctttctgatgagttaaaaaggtcccagagatatatagacactggagtactggaaattgaaaaacgaaaatcgtgtgtgtttgaaaagaagaatgcaacttgtatattttgtattacctctttttttcaagtgatttaaatagttaatcatttaaccaaagaagatgtgtagtgccttaacaagcaatcctctgtcaaaatctgaggtatttgaaaataattatcctcttaaccttctcttcccagtgaactttatggaacatttaatttagtacaattaagtatattataaaaattgtaaaactactactttgttttagttagaacaaagctcaaaactactttagttaacttggtcatctgattttatattgccttatccaaagatggggaaagtaagtcctgaccaggtgttcccacatatgcctgttacagataactacattaggaattcattcttagcttcttcatctttgtgtggatgtgtatactttacgcatctttccttttgagtagagaaattatgtgtgtcatgtggtcttctgaaaatggaacaccattcttcagagcacacgtctagccctcagcaagacagttgtttctcctcctccttgcatatttcacgctactgcgctccagcctgagtgatagagtgagactctgtctcaaaaaaaagtatctctaaatacaggattataatttctgcttgagtatggtgttaactaccttgtatttagaaagatttcagattcattccatctccttagttttcttttaaggtgacccatctgtgataaaaatatagcttagtgctaaaatcagtgtaacttatacatggcctaaaatgtttctacaaattagagtttgtcacttattccatttgtacctaagagaaaaataggctcagttagaaaaggactccctggccaggcgcagtgacttacgcctgtaatctcagcactttgggaggccaaggcaggcagatcacgaggtcaggagttcgagaccatcctggccaacatggtgaaaccccgtctctactaaaaatataaaaattagctgggtgtggtggcaggagcctgtaatcccagctacacaggaggctgaggcacgagaatcacttgaactcaggagatggaggtttcagtgagccaagatcacaccactgcactccagcctggcaacagagcgagactccatctcaaaaaaaaaaaaaaaaagtaagaaagaaaaggactcccttagaatgggaaagaaaaatcataaaatattgagctgatgcctgtatatagaaattaagcgtttctcgaaagctgttctatgttttgctgttattttagtctttattctcttcctttaggtggagaaacaaagtaccaatttgaagggattttttttattttgtcttttggtttctgtcagtagaaataaccatatgtgctaaccaaatttctgtgaagaatgttttcatggttatcattatatctaactataacctcccccatagttatgaagagtaacctgaaatgccactattgtggaaataggataattgtaattgtgaaaaaataattttaaggaaatcttacaagtattacattaaaaagatactatgactgccacctgccatttaccttctaataaccctgccatgtggtttgcagaaagagatggatatagtagcctcagaagaaatattttatgtgggttttttgtttttcgttactagatttcatggatgaggggatatggttgaccttttactttttaatggagcagccagtttttgttaattactcacttgtaaattgtgagattctgaattccttacctgctattcttgtacttgtctcaggccaaatctatgctgtggttcttatgagacttgtatgaagatgccctgatttgtacagattgaccacgggaatactactgccatgtaatctgtatagttccagataatttgtcatgaacattgacagaatgacaattttttgtatttgctttttctccctttaagagcacattcttctgtaaggagaaaggcagcattctggctaaaatgtgtagaaggtaatttactacacttataaaatagtgtgacttttgtgaaaattttgaattagctttcatatgaagtgccttaagtagactcttcatttacttttctggtaatggtttaaatatcatttgttatgcatttttaagatacagttcagaatgacacattgtagtggcaaagataaccaaatgtctggctgtttgctttttgaccatatcaataaacttttacaaaaaaaaaaaaaaagaaaggaacagcgagcaccaacacctagccactgcaagtaggaagcgcagggacgccgcgtagaatgaaacacacgagacaggagacgccgcagcaagccgccagaccacaccacaagaggcaccgccagccgagtaaacaaagtaaatggagacgcggcccggccccagtgggagaaagaaccaaacagggagcgcgggacaaccacactggtgaggacggggcaaacaccaacggaacgccacaacgcaatgtcgggagtcccacgcggcgaagcacgccctagaac

SEQ ID NO: 373203 - DNA, 3736 bp, Homo sapiens
tgaggaaaggcaaggggccgatttgcctgttctcacgccccaccctcagacctagccggagcaaagtttcacttatagaagggagaggagcgaacatggcagcgcgttggcggttttggtgtgtctctgtgaccatggtggtggcgctgctcatcgtttgcgacgttccctcagcctctgcccaaagaaagaaggagatggtgttatctgaaaaggttagtcagctgatggaatggactaacaaaagacctgtaataagaatgaatggagacaagttccgtcgccttgtgaaagccccaccgagaaattactccgttatcgtcatgttcactgctctccaactgcatagacagtgtgtcgtttgcaagcaagctgatgaagaattccagatcctggcaaactcctggcgatactccagtgcattcaccaacaggatattttttgccatggtggattttgatgaaggctctgatgtatttcagatgctaaacatgaattcagctccaactttcatcaactttcctgcaaaagggaaacccaaacggggtgatacatatgagttacaggtgcggggtttttcagctgagcagattgcccggtggatcgccgacagaactgatgtcaatattagagtgattagacccccaaattatgctggtccccttatgttgggattgcttttggctgttattggtggacttgtgtatcttcgaagaagtaatatggaatttctctttaataaaactggatgggcttttgcagctttgtgttttgtgcttgctatgacatctggtcaaatgtggaaccatataagaggaccaccatatgcccataagaatccccacacgggacatgtgaattatatccatggaagcagtcaagcccagtttgtagctgaaacacacattgttcttctgtttaatggtggagttaccttaggaatggtgcttttatgtgaagctgctacctctgacatggatattggaaagcgaaagataatgtgtgtggctggtattggacttgttgtattattcttcagttggatgctctctatttttagatctaaatatcatggctacccatacagctttctgatgagttaaaaaggtcccagagatatatagacactggagtactggaaattgaaaaacgaaaatcgtgtgtgtttgaaaagaagaatgcaacttgtatattttgtattacctctttttttcaagtgatttaaatagttaatcatttaaccaaagaagatgtgtagtgccttaacaagcaatcctctgtcaaaatctgaggtatttgaaaataattatcctcttaaccttctcttcccagtgaactttatggaacatttaatttagtacaattaagtatattataaaaattgtaaaactactactttgttttagttagaacaaagctcaaaactactttagttaacttggtcatctgattttatattgccttatccaaagatggggaaagtaagtcctgaccaggtgttcccacatatgcctgttacagataactacattaggaattcattcttagcttcttcatctttgtgtggatgtgtatactttacgcatctttccttttgagtagagaaattatgtgtgtcatgtggtcttctgaaaatggaacaccattcttcagagcacacgtctagccctcagcaagacagttgtttctcctcctccttgcatatttcctactgaaatacagtgctgtctatgattgtttttgttttgttgtttttttgagacgctactgcgctccagcctgagtgatagagtgagactctgtctcaaaaaaaagtatctctaaatacaggattataatttctgcttgagtatggtgttaactaccttgtatttagaaagatttcagattcattccatctccttagttttcttttaaggtgacccatctgtgataaaaatatagcttagtgctaaaatcagtgtaacttatacatggcctaaaatgtttctacaaattagagtttgtcacttattccatttgtacctaagagaaaaataggctcagttagaaaaggactccctggccaggcgcagtgacttacgcctgtaatctcagcactttgggaggccaaggcaggcagatcacgaggtcaggagttcgagaccatcctggccaacatggtgaaaccccgtctctactaaaaatataaaaattagctgggtgtggtggcaggagcctgtaatcccagctacacaggaggctgaggcacgagaatcacttgaactcaggagatggaggtttcagtgagccaagatcacaccactgcactccagcctggcaacagagcgagactccatctcaaaaaaaaaaaaaaaaagtaagaaagaaaaggactcccttagaatgggaaagaaaaatcataaaatattgagctgatgcctgtatatagaaattaagcgtttctcgaaagctgttctatgttttgctgttattttagtctttattctcttcctttaggtggagaaacaaagtaccaatttgaagggattttttttattttgtcttttggtttctgtcagtagaaataaccatatgtgctaaccaaatttctgtgaagaatgttttcatggttatcattatatctaactataacctcccccatagttatgaagagtaacctgaaatgccactattgtggaaataggataattgtaattgtgaaaaaataattttaaggaaatcttacaagtattacattaaaaagatactatgactgccacctgccatttaccttctaataaccctgccatgtggtttgcagaaagagatggatatagtagcctcagaagaaatattttatgtgggttttttgtttttcgttactagatttcatggatgaggggatatggttgaccttttactttttaatggagcagccagtttttgttaattactcacttgtaaattgtgagattctgaattccttacctgctattcttgtacttgtctcaggccaaatctatgctgtggttcttatgagacttgtatgaagatgccctgatttgtacagattgaccacgggaatactactgccatgtaatctgtatagttccagataatttgtcatgaacattgacagaatgacaattttttgtatttgctttttctccctttaagagcacattcttctgtaaggagaaaggcagcattctggctaaaatgtgtagaaggtaatttactacacttataaaatagtgtgacttttgtgaaaattttgaattagctttcatatgaagtgccttaagtagactcttcatttacttttctggtaatggtttaaatatcatttgttatgcatttttaagatacagttcagaatgacacattgtagtggcaaagataaccaaatgtctggctgtttgctttttgaccatatcaataaacttttacaaaaaaaaaaaaaaagaaaggaacagcgagcaccaacacctagccactgcaagtaggaagcgcagggacgccgcgtagaatgaaacacacgagacaggagacgccgcagcaagccgccagaccacaccacaagaggcaccgccagccgagtaaacaaagtaaatggagacgcggcccggccccagtgggagaaagaaccaaacagggagcgcgggacaaccacactggtgaggacggggcaaacaccaacggaacgccacaacgcaatgtcgggagtcccacgcggcgaagcacgccctagaac

SEQ ID NO: 373204 - DNA, 3625 bp, Homo sapiens
tgaggaaaggcaaggggccgatttgcctgttctcacgccccaccctcagacctagccggagcaaagtttcacttatagaagggagaggagcgaacatggcagcgcgttggcggttttggtgtgtctctgtgaccatggtggtggcgctgctcatcgtttgcgacgttccctcagcctctgcccaaagaaagaaggagatggtgttatctgaaaaggttagtcagctgatggaatggactaacaaaagacctgtaataagaatgaatggagacaagttccgtcgccttgtgaaagccccaccgagaaattactccgttatcgtcatgttcactgctctccaactgcatagacagtgtgtcgtttgcaagcaagctgatgaagaattccagatcctggcaaactcctggcgatactccagtgcattcaccaacaggatattttttgccatggtggattttgatgaaggctctgatgtatttcagatgctaaacatgaattcagctccaactttcatcaactttcctgcaaaagggaaacccaaacggggtgatacatatgagttacaggtgcggggtttttcagctgagcagattgcccggtggatcgccgacagaactgatgtcaatattagagtgattagacccccaaattatgctggtccccttatgttgggattgcttttggctgttattggtggacttgtgtatcttcgaagaagtaatatggaatttctctttaataaaactggatgggcttttgcagctttgtgttttgtgcttgctatgacatctggtcaaatgtggaaccatataagaggaccaccatatgcccataagaatccccacacgggacatgtgaattatatccatggaagcagtcaagcccagtttgtagctgaaacacacattgttcttctgtttaatggtggagttaccttaggaatggtgcttttatgtgaagctgctacctctgacatggatattggaaagcgaaagataatgtgtgtggctggtattggacttgttgtattattcttcagttggatgctctctatttttagatctaaatatcatggctacccatacagctttctgatgagttaaaaaggtcccagagatatatagacactggagtactggaaattgaaaaacgaaaatcgtgtgtgtttgaaaagaagaatgcaacttgtatattttgtattacctctttttttcaagtgatttaaatagttaatcatttaaccaaagaagatgtgtagtgccttaacaagcaatcctctgtcaaaatctgaggtatttgaaaataattatcctcttaaccttctcttcccagtgaactttatggaacatttaatttagtacaattaagtatattataaaaattgtaaaactactactttgttttagttagaacaaagctcaaaactactttagttaacttggtcatctgattttatattgccttatccaaagatggggaaagtaagtcctgaccaggtgttcccacatatgcctgttacagataactacattaggaattcattcttagcttcttcatctttgtgtggatgtgtatactttacgcatctttccttttgagtagagaaattatgtgtgtcatgtggtcttctgaaaatggaacaccattcttcagagcacacgtctagccctcagcaagacagttgtttctcctcctccttgcatatttcacgctactgcgctccagcctgagtgatagagtgagactctgtctcaaaaaaaagtatctctaaatacaggattataatttctgcttgagtatggtgttaactaccttgtatttagaaagatttcagattcattccatctccttagttttcttttaaggtgacccatctgtgataaaaatatagcttagtgctaaaatcagtgtaacttatacatggcctaaaatgtttctacaaattagagtttgtcacttattccatttgtacctaagagaaaaataggctcagttagaaaaggactccctggccaggcgcagtgacttacgcctgtaatctcagcactttgggaggccaaggcaggcagatcacgaggtcaggagttcgagaccatcctggccaacatggtgaaaccccgtctctactaaaaatataaaaattagctgggtgtggtggcaggagcctgtaatcccagctacacaggaggctgaggcacgagaatcacttgaactcaggagatggaggtttcagtgagccaagatcacaccactgcactccagcctggcaacagagcgagactccatctcaaaaaaaaaaaaaaaaagtaagaaagaaaaggactcccttagaatgggaaagatgttctatgttttgctgttattttagtctttattctcttcctttaggtggagaaacaaagtaccaatttgaagggattttttttattttgtcttttggtttctgtcagtagaaataaccatatgtgctaaccaaatttctgtgaagaatgttttcatggttatcattatatctaactataacctcccccatagttatgaagagtaacctgaaatgccactattgtggaaataggataattgtaattgtgaaaaaataattttaaggaaatcttacaagtattacattaaaaagatactatgactgccacctgccatttaccttctaataaccctgccatgtggtttgcagaaagagatggatatagtagcctcagaagaaatattttatgtgggttttttgtttttcgttactagatttcatggatgaggggatatggttgaccttttactttttaatggagcagccagtttttgttaattactcacttgtaaattgtgagattctgaattccttacctgctattcttgtacttgtctcaggccaaatctatgctgtggttcttatgagacttgtatgaagatgccctgatttgtacagattgaccacgggaatactactgccatgtaatctgtatagttccagataatttgtcatgaacattgacagaatgacaattttttgtatttgctttttctccctttaagagcacattcttctgtaaggagaaaggcagcattctggctaaaatgtgtagaaggtaatttactacacttataaaatagtgtgacttttgtgaaaattttgaattagctttcatatgaagtgccttaagtagactcttcatttacttttctggtaatggtttaaatatcatttgttatgcatttttaagatacagttcagaatgacacattgtagtggcaaagataaccaaatgtctggctgtttgctttttgaccatatcaataaacttttacaaaaaaaaaaaaaaagaaaggaacagcgagcaccaacacctagccactgcaagtaggaagcgcagggacgccgcgtagaatgaaacacacgagacaggagacgccgcagcaagccgccagaccacaccacaagaggcaccgccagccgagtaaacaaagtaaatggagacgcggcccggccccagtgggagaaagaaccaaacagggagcgcgggacaaccacactggtgaggacggggcaaacaccaacggaacgccacaacgcaatgtcgggagtcccacgcggcgaagcacgccctagaac

SEQ ID NO: 373205 - DNA, 2362 bp, Homo sapiens
tgaggaaaggcaaggggccgatttgcctgttctcacgccccaccctcagacctagccggagcaaagtttcacttatagaagggagaggagcgaacatggcagcgcgttggcggttttggtgtgtctctgtgaccatggtggtggcgctgctcatcgtttgcgacgttccctcagcctctgcccaaagaaagaaggagatggtgttatctgaaaaggttagtcagctgatggaatggactaacaaaagacctgtaataagaatgaatggagacaagttccgtcgccttgtgaaagccccaccgagaaattactccgttatcgtcatgttcactgctctccaactgcatagacagtgtgtcgtttgcaagcaagctgatgaagaattccagatcctggcaaactcctggcgatactccagtgcattcaccaacaggatattttttgccatggtggattttgatgaaggctctgatgtatttcagatgctaaacatgaattcagctccaactttcatcaactttcctgcaaaagggaaacccaaacggggtgatacatatgagttacaggtgcggggtttttcagctgagcagattgcccggtggatcgccgacagaactgatgtcaatattagagtgattagacccccaaattatgctggtccccttatgttgggattgcttttggctgttattggtggacttgtgtatcttcgaagaagtaatatggaatttctctttaataaaactggatgggcttttgcagctttgtgttttgtgcttgctatgacatctggtcaaatgtggaaccatataagaggaccaccatatgcccataagaatccccacacgggacatgtgaattatatccatggaagcagtcaagcccagtttgtagctgaaacacacattgttcttctgtttaatggtggagttaccttaggaatggtgcttttatgtgaagctgctacctctgacatggatattggaaagcgaaagataatgtgtgtggctggtattggacttgttgtattattcttcagttggatgctctctatttttagatctaaatatcatggctacccatacagctttctgatgagttaaaaaggtcccagagatatatagacactggagtactggaaattgaaaaacgaaaatcgtgtgtgtttgaaaagaagaatgcaacttgtatattttgtattacctctttttttcaagtgatttaaatagttaatcatttaaccaaagaagatgtgtagtgccttaacaagcaatcctctgtcaaaatctgaggtatttgaaaataattatcctcttaaccttctcttcccagtgaactttatggaacatttaatttagtacaaattaaaaagatactatgactgccacctgccatttaccttctaataaccctgccatgtggtttgcagaaagagatggatatagtagcctcagaagaaatattttatgtgggttttttgtttttcgttactagatttcatggatgaggggatatggttgaccttttactttttaatggagcagccagtttttgttaattactcacttgtaaattgtgagattctgaattccttacctgctattcttgtacttgtctcaggccaaatctatgctgtggttcttatgagacttgtatgaagatgccctgatttgtacagattgaccacgggaatactactgccatgtaatctgtatagttccagataatttgtcatgaacattgacagaatgacaattttttgtatttgctttttctccctttaagagcacattcttctgtaaggagaaaggcagcattctggctaaaatgtgtagaaggtaatttactacacttataaaatagtgtgacttttgtgaaaattttgaattagctttcatatgaagtgccttaagtagactcttcatttacttttctggtaatggtttaaatatcatttgttatgcatttttaagatacagttcagaatgacacattgtagtggcaaagataaccaaatgtctggctgtttgctttttgaccatatcaataaacttttacaaaaaaaaaaaaaaagaaaggaacagcgagcaccaacacctagccactgcaagtaggaagcgcagggacgccgcgtagaatgaaacacacgagacaggagacgccgcagcaagccgccagaccacaccacaagaggcaccgccagccgagtaaacaaagtaaatggagacgcggcccggccccagtgggagaaagaaccaaacagggagcgcgggacaaccacactggtgaggacggggcaaacaccaacggaacgccacaacgcaatgtcgggagtcccacgcggcgaagcacgccctagaac

SEQ ID NO: 373206 - DNA, 1772 bp, Homo sapiens
tgaggaaaggcaaggggccgatttgcctgttctcacgccccaccctcagacctagccggagcaaagtttcacttatagaagggagaggagcgaacatggcagcgcgttggcggttttggtgtgtctctgtgaccatggtggtggcgctgctcatcgtttgcgacgttccctcagcctctgcccaaagaaagaaggagatggtgttatctgaaaaggttagtcagctgatggaatggactaacaaaagacctgtaataagaatgaatggagacaagttccgtcgccttgtgaaagccccaccgagaaattactccgttatcgtcatgttcactgctctccaatgcactccagcctggcaacagagcgagactccatctcaaaaaaaaaaaaaaaaagtaagaaagaaaaggactcccttagaatgggaaagaaaaatcataaaatattgagctgatgcctgtatatagaaattaagcgtttctcgaaagctgttctatgttttgctgttattttagtctttattctcttcctttaggtggagaaacaaagtaccaatttgaagggattttttttattttgtcttttggtttctgtcagtagaaataaccatatgtgctaaccaaatttctgtgaagaatgttttcatggttatcattatatctaactataacctcccccatagttatgaagagtaacctgaaatgccactattgtggaaataggataattgtaattgtgaaaaaataattttaaggaaatcttacaagtattacattaaaaagatactatgactgccacctgccatttaccttctaataaccctgccatgtggtttgcagaaagagatggatatagtagcctcagaagaaatattttatgtgggttttttgtttttcgttactagatttcatggatgaggggatatggttgaccttttactttttaatggagcagccagtttttgttaattactcacttgtaaattgtgagattctgaattccttacctgctattcttgtacttgtctcaggccaaatctatgctgtggttcttatgagacttgtatgaagatgccctgatttgtacagattgaccacgggaatactactgccatgtaatctgtatagttccagataatttgtcatgaacattgacagaatgacaattttttgtatttgctttttctccctttaagagcacattcttctgtaaggagaaaggcagcattctggctaaaatgtgtagaaggtaatttactacacttataaaatagtgtgacttttgtgaaaattttgaattagctttcatatgaagtgccttaagtagactcttcatttacttttctggtaatggtttaaatatcatttgttatgcatttttaagatacagttcagaatgacacattgtagtggcaaagataaccaaatgtctggctgtttgctttttgaccatatcaataaacttttacaaaaaaaaaaaaaaagaaaggaacagcgagcaccaacacctagccactgcaagtaggaagcgcagggacgccgcgtagaatgaaacacacgagacaggagacgccgcagcaagccgccagaccacaccacaagaggcaccgccagccgagtaaacaaagtaaatggagacgcggcccggccccagtgggagaaagaaccaaacagggagcgcgggacaaccacactggtgaggacggggcaaacaccaacggaacgccacaacgcaatgtcgggagtcccacgcggcgaagcacgccctagaac

SEQ ID NO: 373207 - DNA, 913 bp, Homo sapiens
cggccagagactgaacatccccttggttttatttctgctctcagactgaggaccatttagatctggtaagtgaggctgtgagctctttgctgtggctttgaattctgggtattgctctgcggtcccccagcatgaagtacgtgtgcgtccttggcctctcgcctgtgcgtgaactgttgctgtttctttgcttagttgccaggagctgtgcttaggtgccaagtgggattcaaaggtgaatggggtgggggtgagaggtcagacgtgtgtgtgtgtgcctgtgtgtacatgaatgtctgcatgtggtattatgttcattcagacacacctttctctgtatgtacgtgtgcgagggggagtgggccagcccagggctcagaggtcccaccctgatgcctggactaggccctggactagggggctggatcccactagtcctctgactccactcaggcccacactgcattcttgggatccaggacaggatccttcttaggagggaggtcagctggaaggagaagctggtgtttcaggggaagccaaggcccaggcccaggctggacttgtccttcttggtggcagcttcccacctcccctgtctccctgtgctccctcctgaacttaagtccatgacacgggcactcagaggcatgcacagctgctcattttcctcctctgtctcacacacttacatactcacccccagccaggagtggggcgggggctcctccctccctaactccctgacgggaggccagagaggctggaaaaggcaggcaggctttggcggccaacacggcggcagtttcggccccagcatggagttggaataaacaagtgactcagcggcagatggagctgacagccccacacacgtgtgtgcatacgcgcaggcacacgccacgccaggccc

SEQ ID NO: 373208 - DNA, 559 bp, Homo sapiens
  misc_feature (552)..(552): n is a, c, g, or t
aggttgctgttgctcaacccagcaccgtacgtatgagcagactcataggatcaccaaccatgtgccgcacccccagatagagggaaataaccaaaaaactaccaaacaacagaaacccacactctagactgaaaccccaaagtgggcttgatgggtgggtttgtgtttcaaggggaaagtgaggcagaggttctgaaaagggtctctgtttttgtgttcatgtagccataggcacatggagcagaatacttaagcctggcccccaaatgcccctgcacacacacgtgccacacctgcgctgattcttgtgtgtgctgcacccccaaggtgtgtgggtgctggctgagctttgggccgggaaggcagcctgggaatctgaggctggagacaggggtttgaggtgggggcctctctggaagcacatttggagggaaagacaagagagccatgaggagagggctgaggagggcagaagggctaggcagggagcggcacatgggttgggggatccaaagagtctgctgctgcgtacggcagtaagttgagaaagcngataccg

SEQ ID NO: 373209 - DNA, 562 bp, Homo sapiens
gatggatggagagtgggctccagagagacaggggatggacgatgtctcccttccctcactctgcactgggaggctgggcgagtgttggtgctggggccacagggccagtacacgtgccttcatctttgcacgtgtgttggtgtcagtgaatctgtgtgtgcatgtttccctccatggatctgagtgtctctgtgaatgcaccaacgtgtgtttgtatatctgtgggggcctccgtgctaaggcaccccgccttggctttgggattcaggaaccccaccttggccttgggatggagggccaacataaagctgcccacctgtcagccacctcctgacggacagttttctcctacagaacaatgcccagcgccttggggtctcccagtctactcattcgctcaccaccccagtggtttctgtggcaacgccgagtttactcagccagggcctccccttctcttccatgcccactgcctacaacacaggtgagtgttcatgtgacatgtgcatgtgtgcacttgggcttggggcaggcaagtgaccagacaaggtagaccgaggta

SEQ ID NO: 373210 - DNA, 5954 bp, Homo sapiens
agctgtgcctacgtcggcctcgactcccgggggctggaggagttacctttggagcccgaaaggaggaaggaagcaaaatatcaacaacagccgaggcggctcaggcgctcggccccggttccccgcttgcctgccgcccgcctgctggcccccgcgcccacgacgggggcccaggcctcacggcgccgcccagggcccgcgcggacgccggcctcatttattattctccccgcccggagctgcggcttcccggtgttgaagatcccccggaccaggggcgagggctacccgctctttgccgtgacaacaccgttcccccagccgggctggaggctgtgcagaaggtatcctgcagaccatgaactgagcactgttcccagaccgttcatgagcacagtgtaaggtgtgccgagacccaccacccagcgagcccctcccctccgtagcactgaggacccccggagaagatggggaggaaaaagattcagatccagcgaatcaccgacgagcggaaccgacaggtgactttcaccaagcggaagtttggcctgatgaagaaggcgtatgagctgagcgtgctatgtgactgcgagatcgcactcatcatcttcaaccactccaacaagctgttccagtacgccagcaccgacatggacaaggtgctgctcaagtacacggagtacaatgagccacacgagagccgcaccaacgccgacatcatcgagaccctgaggaagaagggcttcaacggctgcgacagccccgagcccgacggggaggactcgctggaacagagccccctgctggaggacaagtaccgacgcgccagcgaggagctcgacgggctcttccggcgctatgggtcaactgtcccggcccccaactttgccatgcctgtcacggtgcccgtgtccaatcagagctcactgcagttcagcaatcccagcggctccctggtcaccccttccctggtgacatcatccctcacggacccgcggctcctgtccccccagcagccagcactacagaggaacagtgtgtctcctggcctgccccagcggccagctagtgcgggggccatgctggggggtgacctgaacagtgctaacggagcctgccccagccctgttgggaatggctacgtcagtgctcgggcttcccctggcctcctccctgtggccaatggcaacagcctaaacaaggtcatccctgccaagtctccgcccccacctacccacagcacccagcttggagcccccagccgcaagcccgacctgcgagtcatcacttcccaggcaggaaaggggttaatgcatcacttgactgaggaccatttagatctgaacaatgcccagcgccttggggtctcccagtctactcattcgctcaccaccccagtggtttctgtggcaacgccgagtttactcagccagggcctccccttctcttccatgcccactgcctacaacacagattaccagttgaccagtgcagagctctcctccttaccagcctttagttcacctggggggctgtcgctaggcaatgtcactgcctggcaacagccacagcagccccagcagccgcagcagccacagcctccacagcagcagccaccgcagccacagcagccacagccacagcagcctcagcagccgcaacagccacctcagcaacagtcccacctggtccctgtatctctcagcaacctcatcccgggcagccccctgccccacgtgggtgctgccctcacagtcaccacccacccccacatcagcatcaagtcagaaccggtgtccccaagccgtgagcgcagccctgcgcctccccctccagctgtgttcccagctgcccgccctgagcctggcgatggtctcagcagcccagccgggggatcctatgagacgggagaccgggatgacggacggggggacttcgggcccacactgggcctgctgcgcccagccccagagcctgaggctgagggctcagctgtgaagaggatgcggcttgatacctggacattaaagtgacgattcccactcccctcctctcagcctccctgatgaagagttgacaatctcaccgcccgcccttccctgccccgggctcctcccgctcgacccccacttcctttcttgtgcttcgtgtcctgttgacggttacatttgtgtataattattatattattattattattattatattttttttaatttggattctcgctttggagagggggatgctctcatcccctctttctgtaccccccaccattttcactggctggggggctctctttttcgcgggaaggggggacactttgcacgttgtacacatatgctgcaggaagggggtggggggcccaataaggcctttgggaaaggacaggtgccgagccctgcatgtggagccctcccaccccacccccagatagagggaaataaccaaaaaactaccaaacaacagaaacccacactctagactgaaaccccaaagtgggcttgatgggtgggtttgtgtttcaaggggaaagtgaggcagaggttctgaaaagggtctctgtttttgtgttcatgtagccataggcacatggagcagaatacttaagcctggcccccaaatgcccctgcacacacacgtgccacacctgcgctgattcttgtgtgtgctgcacccccaaggtgtgtgggtgctggctgagctttgggccgggaaggcagcctgggaatctgaggctggagacaggggtttgaggtgggggcctctctggaagcacatttggagggaaagacaagagagccatgaggagagggctgaggagggcagaagggctaggcagggggcaaattgagcccctcccttccccagtttttctctaagatatacagtgcaatagctccccacccctcagttgacgccagccctgtaaagctggccacagtgtgcagggagaatggggagagggtcttcagtgaggtggctggggcgagagtcggcctggacttccctggggtgctccaggccagagctctttcattggggcgagtgtggtgaggggacgtccttggtcttgcacgcacactacctgggggagtcaacactgggatggtctgtggggtgggagggcctacggatgggtccgtagaggtcccacctccctcattcctccttggcccctctccctagcttctcctgttagctccttctgctcctgaccccacctccttgctcttggcgcccctattgtctctggctacctccttgtcccaccacctccaggctgcatcccaccttccctcttggctactgtaattgtaaatagcgacctttggaaaacgttagcggtgtaacagtccaggaaactgtttttttttgttgttgttgtattgatatgaaatgagattctatttttgtcaaagtatattgtaataataatgactcaaacggcccgtactgtacagacgagattcttctgctgttgttcttgctcccctcccctcctctgagtccgcccctccctgctgcctcctcagtggggcagtgggcaaggggcccaggggcagccgaagcacggggtcctgagacctcaggcaggattggagatcaaaccagagggggcaggcccccagcctgctctctaggatcaccccccgccctaaggggcctggcctggggtgacgtggccaggcagactgtctgccccactccttcacacaagcccagctcctctgcccaaggggtgcggcgcccccttggggtttcctcccagttggagagtagagttaagacaaggcccagttttgtgttagccgaccgtctttgcccacctctatgacccagcctcttgcagtattcccatacttgatgcagggaaggaaccagaagcagaggggcctctacgcaggtacacacgtgtacctgagtgtgttcatgagggcatctggtgtttatgtgtctgagtgtagctttgtatttatgtgtgtgtgtgtgtgtatgtctgattgcacgggtgtacttttgtatttatgtgtgtgtgtggttgcacgggtgtgcctctgtgtgtctctgaccctggctgggtgtgtgtgcaaatctgtgtgactggagctctaggggcatctctgtgtctgagtgtgcctggtgtgtgtttacaaagggagagttggctgctccagctccacagccctgggaccccaactcctgtcttccctgctcctttccctgtgttcaccctcagctctgacacattgaactgcagttggggggattggcagttagccctctgtgcttctccctgcagccctacctctgccaaggtctctccctccagggacctctgcttccacccacatatgtccacttagtcacccacacttgacacagttcctggagtaccctcttcccccaaccccagacctgctttcagagcaaaactcaagtccctcttcctccgtgaagcttctccctcagctgagcagtgatcacttactcactcttaaccccaatccgctgactgggtggggacagcacgtccagccttcccacctctcctgcaggcttctagacggagtttcaaaaactgatgagcctcgatccagggcttgaaagaagccagggtgtaatcttgttcatgcatgcgtccccagagcctcgcccagtgcctggcacatagtaggcactcaataaatgctgaatgggtgaatagttgaatgataggtgctcaataaatgaatgaatggccttcccttctcaggctattcccaacattagtctgcccacctttctaggctgggcttggccaccattaaacacggggtgggggtgagggcccctgcaattcacggtgcaatattcaccagttttgccctctgcctcataaaggcaaacctggcttttgattaccatgtgtggatgtttcagtgtcctttcttctctgtccctggggatggggtggtctgtgaatatgtgacatttctgcagttcagtatccgaaggtttctcttgggggtaggggctcctgggcggccagatgaatgggtccctgggaacccagacctcagatgaggacttaatgtcttcttcctctcaagccaaattcgcctccacccactccctctgaagaactgggcatttgccaaagtaaccactggagtcatctaatggccctccccctccccaggtttcccacagctttcagggacagtgggcaagaggacacccccccccaccacctcagtggaacacaccattctccccccctcaacagcacactcagtgcagcaagactgacccctgaccccctcccagccctccctaccttggacaggaaggaagtaatgcaccttctcttgctgattatttatttgtttggagagacagaaatgtaaaagtgtatctagaaatatctatatctctatatatttttaactgactctttggaatcccctggggtggggtgaggggtaagtttaggctttcgcggaggggaggagacatggagcctgggaactccttgttctcccctctgctgcctctccccaccccttaaagcagttggtagaaggaatggtatttgtatggggggagggaggctggaatggagaatctggattctctcctcttccccattctccagagggagggaggtggtgaggaagaggaagggaggggcaggatgggccatggaggtgccccacccccacacctgacaatcacccacactcctggggctcttcctgggtcctggggcagggcgagtccaagtgtgaggctgttgatttgttttcaatatttcttttcgtgctgtatggtgatgctttcttagtattctacacaataagaaaagacaaagtcctcgagattcttatgagttttgtttgaaaactctttcactatatttgttgtaaagaggtttactattaaaagaaaaagaatacacgtttctgatactt

SEQ ID NO: 373211 - DNA, 5923 bp, Homo sapiens
agcaggctgtactggcccgagggcttagatggaggaaggaagcaaaatatcaacaacagccgaggcggctcaggcgctcggccccggttccccgcttgcctgccgcccgcctgctggcccccgcgcccacgacgggggcccaggcctcacggcgccgcccagggcccgcgcggacgccggcctcatttattattctccccgcccggagctgcggcttcccggtgttgaagatcccccggaccaggggcgagggctacccgctctttgccgtgacaacaccgttcccccagccgggctggaggctgtgcagaaggtatcctgcagaccatgaactgagcactgttcccagaccgttcatgagcacagtgtaaggtgtgccgagacccaccacccagcgagcccctcccctccgtagcactgaggacccccggagaagatggggaggaaaaagattcagatccagcgaatcaccgacgagcggaaccgacaggtgactttcaccaagcggaagtttggcctgatgaagaaggcgtatgagctgagcgtgctatgtgactgcgagatcgcactcatcatcttcaaccactccaacaagctgttccagtacgccagcaccgacatggacaaggtgctgctcaagtacacggagtacaatgagccacacgagagccgcaccaacgccgacatcatcgagaccctgaggaagaagggcttcaacggctgcgacagccccgagcccgacggggaggactcgctggaacagagccccctgctggaggacaagtaccgacgcgccagcgaggagctcgacgggctcttccggcgctatgggtcaactgtcccggcccccaactttgccatgcctgtcacggtgcccgtgtccaatcagagctcactgcagttcagcaatcccagcggctccctggtcaccccttccctggtgacatcatccctcacggacccgcggctcctgtccccccagcagccagcactacagaggaacagtgtgtctcctggcctgccccagcggccagctagtgcgggggccatgctggggggtgacctgaacagtgctaacggagcctgccccagccctgttgggaatggctacgtcagtgctcgggcttcccctggcctcctccctgtggccaatggcaacagcctaaacaaggtcatccctgccaagtctccgcccccacctacccacagcacccagcttggagcccccagccgcaagcccgacctgcgagtcatcacttcccaggcaggaaaggggttaatgcatcacttgactgaggaccatttagatctgaacaatgcccagcgccttggggtctcccagtctactcattcgctcaccaccccagtggtttctgtggcaacgccgagtttactcagccagggcctccccttctcttccatgcccactgcctacaacacagattaccagttgaccagtgcagagctctcctccttaccagcctttagttcacctggggggctgtcgctaggcaatgtcactgcctggcaacagccacagcagccccagcagccgcagcagccacagcctccacagcagcagccaccgcagccacagcagccacagccacagcagcctcagcagccgcaacagccacctcagcaacagtcccacctggtccctgtatctctcagcaacctcatcccgggcagccccctgccccacgtgggtgctgccctcacagtcaccacccacccccacatcagcatcaagtcagaaccggtgtccccaagccgtgagcgcagccctgcgcctccccctccagctgtgttcccagctgcccgccctgagcctggcgatggtctcagcagcccagccgggggatcctatgagacgggagaccgggatgacggacggggggacttcgggcccacactgggcctgctgcgcccagccccagagcctgaggctgagggctcagctgtgaagaggatgcggcttgatacctggacattaaagtgacgattcccactcccctcctctcagcctccctgatgaagagttgacaatctcaccgcccgcccttccctgccccgggctcctcccgctcgacccccacttcctttcttgtgcttcgtgtcctgttgacggttacatttgtgtataattattatattattattattattattatattttttttaatttggattctcgctttggagagggggatgctctcatcccctctttctgtaccccccaccattttcactggctggggggctctctttttcgcgggaaggggggacactttgcacgttgtacacatatgctgcaggaagggggtggggggcccaataaggcctttgggaaaggacaggtgccgagccctgcatgtggagccctcccaccccacccccagatagagggaaataaccaaaaaactaccaaacaacagaaacccacactctagactgaaaccccaaagtgggcttgatgggtgggtttgtgtttcaaggggaaagtgaggcagaggttctgaaaagggtctctgtttttgtgttcatgtagccataggcacatggagcagaatacttaagcctggcccccaaatgcccctgcacacacacgtgccacacctgcgctgattcttgtgtgtgctgcacccccaaggtgtgtgggtgctggctgagctttgggccgggaaggcagcctgggaatctgaggctggagacaggggtttgaggtgggggcctctctggaagcacatttggagggaaagacaagagagccatgaggagagggctgaggagggcagaagggctaggcagggggcaaattgagcccctcccttccccagtttttctctaagatatacagtgcaatagctccccacccctcagttgacgccagccctgtaaagctggccacagtgtgcagggagaatggggagagggtcttcagtgaggtggctggggcgagagtcggcctggacttccctggggtgctccaggccagagctctttcattggggcgagtgtggtgaggggacgtccttggtcttgcacgcacactacctgggggagtcaacactgggatggtctgtggggtgggagggcctacggatgggtccgtagaggtcccacctccctcattcctccttggcccctctccctagcttctcctgttagctccttctgctcctgaccccacctccttgctcttggcgcccctattgtctctggctacctccttgtcccaccacctccaggctgcatcccaccttccctcttggctactgtaattgtaaatagcgacctttggaaaacgttagcggtgtaacagtccaggaaactgtttttttttgttgttgttgtattgatatgaaatgagattctatttttgtcaaagtatattgtaataataatgactcaaacggcccgtactgtacagacgagattcttctgctgttgttcttgctcccctcccctcctctgagtccgcccctccctgctgcctcctcagtggggcagtgggcaaggggcccaggggcagccgaagcacggggtcctgagacctcaggcaggattggagatcaaaccagagggggcaggcccccagcctgctctctaggatcaccccccgccctaaggggcctggcctggggtgacgtggccaggcagactgtctgccccactccttcacacaagcccagctcctctgcccaaggggtgcggcgcccccttggggtttcctcccagttggagagtagagttaagacaaggcccagttttgtgttagccgaccgtctttgcccacctctatgacccagcctcttgcagtattcccatacttgatgcagggaaggaaccagaagcagaggggcctctacgcaggtacacacgtgtacctgagtgtgttcatgagggcatctggtgtttatgtgtctgagtgtagctttgtatttatgtgtgtgtgtgtgtgtatgtctgattgcacgggtgtacttttgtatttatgtgtgtgtgtggttgcacgggtgtgcctctgtgtgtctctgaccctggctgggtgtgtgtgcaaatctgtgtgactggagctctaggggcatctctgtgtctgagtgtgcctggtgtgtgtttacaaagggagagttggctgctccagctccacagccctgggaccccaactcctgtcttccctgctcctttccctgtgttcaccctcagctctgacacattgaactgcagttggggggattggcagttagccctctgtgcttctccctgcagccctacctctgccaaggtctctccctccagggacctctgcttccacccacatatgtccacttagtcacccacacttgacacagttcctggagtaccctcttcccccaaccccagacctgctttcagagcaaaactcaagtccctcttcctccgtgaagcttctccctcagctgagcagtgatcacttactcactcttaaccccaatccgctgactgggtggggacagcacgtccagccttcccacctctcctgcaggcttctagacggagtttcaaaaactgatgagcctcgatccagggcttgaaagaagccagggtgtaatcttgttcatgcatgcgtccccagagcctcgcccagtgcctggcacatagtaggcactcaataaatgctgaatgggtgaatagttgaatgataggtgctcaataaatgaatgaatggccttcccttctcaggctattcccaacattagtctgcccacctttctaggctgggcttggccaccattaaacacggggtgggggtgagggcccctgcaattcacggtgcaatattcaccagttttgccctctgcctcataaaggcaaacctggcttttgattaccatgtgtggatgtttcagtgtcctttcttctctgtccctggggatggggtggtctgtgaatatgtgacatttctgcagttcagtatccgaaggtttctcttgggggtaggggctcctgggcggccagatgaatgggtccctgggaacccagacctcagatgaggacttaatgtcttcttcctctcaagccaaattcgcctccacccactccctctgaagaactgggcatttgccaaagtaaccactggagtcatctaatggccctccccctccccaggtttcccacagctttcagggacagtgggcaagaggacacccccccccaccacctcagtggaacacaccattctccccccctcaacagcacactcagtgcagcaagactgacccctgaccccctcccagccctccctaccttggacaggaaggaagtaatgcaccttctcttgctgattatttatttgtttggagagacagaaatgtaaaagtgtatctagaaatatctatatctctatatatttttaactgactctttggaatcccctggggtggggtgaggggtaagtttaggctttcgcggaggggaggagacatggagcctgggaactccttgttctcccctctgctgcctctccccaccccttaaagcagttggtagaaggaatggtatttgtatggggggagggaggctggaatggagaatctggattctctcctcttccccattctccagagggagggaggtggtgaggaagaggaagggaggggcaggatgggccatggaggtgccccacccccacacctgacaatcacccacactcctggggctcttcctgggtcctggggcagggcgagtccaagtgtgaggctgttgatttgttttcaatatttcttttcgtgctgtatggtgatgctttcttagtattctacacaataagaaaagacaaagtcctcgagattcttatgagttttgtttgaaaactctttcactatatttgttgtaaagaggtttactattaaaagaaaaagaatacacgtttctgatactt

SEQ ID NO: 373212 - DNA, 5054 bp, Homo sapiens
agctgtgcctacgtcggcctcgactcccgggggctggaggagttacctttggagcccgaaaggaggaaggaagcaaaatatcaacaacagccgaggcggctcaggcgctcggccccggttccccgcttgcctgccgcccgcctgctggcccccgcgcccacgacgggggcccaggcctcacggcgccgcccagggcccgcgcggacgccggcctcatttattattctccccgcccggagctgcggcttcccggtgttgaagatcccccggaccaggggcgagggctacccgctctttgccgtgacaacaccgttcccccagccgggctggaggctgtgcagaaggtatcctgcagaccatgaactgagcactgttcccagaccgttcatgagcacagtgtaaggtgtgccgagacccaccacccagcgagcccctcccctccgtagcactgaggacccccggagaagatggggaggaaaaagattcagatccagcgaatcaccgacgagcggaaccgacaggtgactttcaccaagcggaagtttggcctgatgaagaaggcgtatgagctgagcgtgctatgtgactgcgagatcgcactcatcatcttcaaccactccaacaagctgttccagtacgccagcaccgacatggacaaggtgctgctcaagtacacggagtacaatgagccacacgagagccgcaccaacgccgacatcatcgagaccctgaggaagaagggcttcaacggctgcgacagccccgagcccgacggggaggactcgctggaacagagccccctgctggaggacaagtaccgacgcgccagcgaggagctcgacgggctcttccggcgctatgggtcaactgtcccggcccccaactttgccatgcctgtcacggtgcccgtgtccaatcagagctcactgcagttcagcaatcccagcggctccctggtcaccccttccctggtgacatcatccctcacggacccgcggctcctgtccccccagcagccagcactacagaggaacagtgtgtctcctggcctgccccagcggccagctagtgcgggggccatgctggggggtgacctgaacagtgctaacggagcctgccccagccctgttgggaatggctacgtcagtgctcgggcttcccctggcctcctccctgtggccaatggcaacagcctaaacaaggtcatccctgccaagtctccgcccccacctacccacagcacccagcttggagcccccagccgcaagcccgacctgcgagtcatcacttcccaggcaggaaaggggttaatgcatcacttgactgaggaccatttagatctgaacaatgcccagcgccttggggtctcccagtctactcattcgctcaccaccccagtggtttctgtggcaacgccgagtttactcagccagggcctccccttctcttccatgcccactgcctacaacacagattaccagttgaccagtgcagagctctcctccttaccagcctttagttcacctggggggctgtcgctaggcaatgtcactgcctggcaacagccacagcagccccagcagccgcagcagccacagcctccacagcagcagccaccgcagccacagcagccacagccacagcagcctcagcagccgcaacagccacctcagcaacagtcccacctggtccctgtatctctcagcaacctcatcccgggcagccccctgccccacgtgggtgctgccctcacagtcaccacccacccccacatcagcatcaagtcagaaccggtgtccccaagccgtgagcgcagccctgcgcctccccctccagctgtgttcccagctgcccgccctgagcctggcgatggtctcagcagcccagccgggggatcctatgagacgggagaccgggatgacggacggggggacttcgggcccacactgggcctgctgcgcccagccccagagcctgaggctgagggctcagctgtgaagaggatgcggcttgatacctggacattaaagtgacgattcccactcccctcctctcagcctccctgatgaagagttgacaatctcaccgcccgcccttccctgccccgggctcctcccgctcgacccccacttcctttcttgtgcttcgtgtcctgttgacggttacatttgtgtataattattatattattattattattattatattttttttaatttggattctcgctttggagagggggatgctctcatcccctctttctgtaccccccaccattttcactggctggggggctctctttttcgcgggaaggggggacactttgcacgttgtacacatatgctgcaggaagggggtggggggcccaataaggcctttgggaaaggacaggtgccgagccctgcatgtggagccctcccaccccacccccagatagagggaaataaccaaaaaactaccaaacaacagaaacccacactctagactgaaaccccaaagtgggcttgatgggtgggtttgtgtttcaaggggaaagtgaggcagaggttctgaaaagggtctctgtttttgtgttcatgtagccataggcacatggagcagaatacttaagcctggcccccaaatgcccctgcacacacacgtgccacacctgcgctgattcttgtgtgtgctgcacccccaaggtgtgtgggtgctggctgagctttgggccgggaaggcagcctgggaatctgaggctggagacaggggtttgaggtgggggcctctctggaagcacatttggagggaaagacaagagagccatgaggagagggctgaggagggcagaagggctaggcagggggcaaattgagcccctcccttccccagtttttctctaagatatacagtgcaatagctccccacccctcagttgacgccagccctgtaaagctggccacagtgtgcagggagaatggggagagggtcttcagtgaggtggctggggcgagagtcggcctggacttccctggggtgctccaggccagagctctttcattggggcgagtgtggtgaggggacgtccttggtcttgcacgcacactacctgggggagtcaacactgggatggtctgtggggtgggagggcctacggatgggtccgtagaggtcccacctccctcattcctccttggcccctctccctagcttctcctgttagctccttctgctcctgaccccacctccttgctcttggcgcccctattgtctctggctacctccttgtcccaccacctccaggctgcatcccaccttccctcttggctactgtaattgtaaatagcgacctttggaaaacgttagcggtgtaacagtccaggaaactgtttttttttgttgttgttgtattgatatgaaatgagattctatttttgtcaaagtatattgtaataataatgactcaaacggcccgtactgtacagacgagattcttctgctgttgttcttgctcccctcccctcctctgagtccgcccctccctgctgcctcctcagtggggcagtgggcaaggggcccaggggcagccgaagcacggggtcctgagacctcaggcaggattggagatcaaaccagagggggcaggcccccagcctgctctctaggatcaccccccgccctaaggggcctggcctggggtgacgtggccaggcagactgtctgccccactccttcacacaagcccagctcctctgcccaaggggtgcggcgcccccttggggtttcctcccagttggagagtagagttaagacaaggcccagttttgtgttagccgaccgtctttgcccacctctatgacccagcctcttgcagtattcccatacttgatgcagggaaggaaccagaagcagaggggcctctacgcaggtacacacgtgtacctgagtgtgttcatgagggcatctggtgtttatgtgtctgagtgtagctttgtatttatgtgtgtgtgtgtgtgtatgtctgattgcacgggtgtacttttgtatttatgtgtgtgtgtggttgcacgggtgtgcctctgtgtgtctctgaccctggctgggtgtgtgtgcaaatctgtgtgactggagctctaggggcatctctgtgtctgagtgtgcctggtgtgtgtttacaaagggagagttggctgctccagctccacagccctgggaccccaactcctgtcttccctgctcctttccctgtgttcaccctcagctctgacacattgaactgcagttggggggattggcagttagccctctgtgcttctccctgcagccctacctctgccaaggtctctccctccagggacctctgcttccacccacatatgtccacttagtcacccacacttgacacagttcctggagtaccctcttcccccaaccccagacctgctttcagagcaaaactcaagtccctcttcctccgtgaagcttctccctcagctgagcagtgatcacttactcactcttaaccccaatccgctgactgggtggggacagcacgtccagccttcccacctctcctgcaggcttctagacggagtttcaaaaactgatgagcctcgatccagggcttgaaagaagccagggtgtaatcttgttcatgcatgcgtccccagagcctcgcccagtgcctggcacatagtaggcactcaataaatgctgaatgggtgaatagttgaatgataggtgctcaataaatgaatgaatggccttcccttctcaggctattcccaacattagtctgcccacctttctaggctgggcttggccacacctgacaatcacccacactcctggggctcttcctgggtcctggggcagggcgagtccaagtgtgaggctgttgatttgttttcaatatttcttttcgtgctgtatggtgatgctttcttagtattctacacaataagaaaagacaaagtcctcgagattcttatgagttttgtttgaaaactctttcactatatttgttgtaaagaggtttactattaaaagaaaaagaatacacgtttctgatactt

SEQ ID NO: 373213 - DNA, 4894 bp, Homo sapiens
tctgtgatactctcagccatccttgcctgtatgctaagccactgtgtcaagaaggacttgccagtaaggaaacgccttgtccccttgtttcagagcattcatgtggctggggaacctgggctatttccagcctgggcaatagagtgagactccatctcaaaaaaacaaaacaaaaccaaaaccacatcttttcatcctgttaaaacacagcacctcatggttattatgacttaggtttctttaactctgagtaccgtcttcactgaatttttgtggtcttcttgaattccttacatctgtcattacacactccctgtcccctcatccccacagtcctcctggaggcagctccctcataggagcctgtgtgctctccccaactccaggttcatcctcacttttcctccatgcagattaccagttgaccagtgcagagctctcctccttaccagcctttagttcacctggggggctgtcgctaggcaatgtcactgcctggcaacagccacagcagccccagcagccgcagcagccacagcctccacagcagcagccaccgcagccacagcagccacagccacagcagcctcagcagccgcaacagccacctcagcaacagtcccacctggtccctgtatctctcagcaacctcatcccgggcagccccctgccccacgtgggtgctgccctcacagtcaccacccacccccacatcagcatcaagtcagaaccggtgtccccaagccgtgagcgcagccctgcgcctccccctccagctgtgttcccagctgcccgccctgagcctggcgatggtctcagcagcccagccgggggatcctatgagacgggagaccgggatgacggacggggggacttcgggcccacactgggcctgctgcgcccagccccagagcctgaggctgagggctcagctgtgaagaggatgcggcttgatacctggacattaaagtgacgattcccactcccctcctctcagcctccctgatgaagagttgacaatctcaccgcccgcccttccctgccccgggctcctcccgctcgacccccacttcctttcttgtgcttcgtgtcctgttgacggttacatttgtgtataattattatattattattattattattatattttttttaatttggattctcgctttggagagggggatgctctcatcccctctttctgtaccccccaccattttcactggctggggggctctctttttcgcgggaaggggggacactttgcacgttgtacacatatgctgcaggaagggggtggggggcccaataaggcctttgggaaaggacaggtgccgagccctgcatgtggagccctcccaccccacccccagatagagggaaataaccaaaaaactaccaaacaacagaaacccacactctagactgaaaccccaaagtgggcttgatgggtgggtttgtgtttcaaggggaaagtgaggcagaggttctgaaaagggtctctgtttttgtgttcatgtagccataggcacatggagcagaatacttaagcctggcccccaaatgcccctgcacacacacgtgccacacctgcgctgattcttgtgtgtgctgcacccccaaggtgtgtgggtgctggctgagctttgggccgggaaggcagcctgggaatctgaggctggagacaggggtttgaggtgggggcctctctggaagcacatttggagggaaagacaagagagccatgaggagagggctgaggagggcagaagggctaggcagggggcaaattgagcccctcccttccccagtttttctctaagatatacagtgcaatagctccccacccctcagttgacgccagccctgtaaagctggccacagtgtgcagggagaatggggagagggtcttcagtgaggtggctggggcgagagtcggcctggacttccctggggtgctccaggccagagctctttcattggggcgagtgtggtgaggggacgtccttggtcttgcacgcacactacctgggggagtcaacactgggatggtctgtggggtgggagggcctacggatgggtccgtagaggtcccacctccctcattcctccttggcccctctccctagcttctcctgttagctccttctgctcctgaccccacctccttgctcttggcgcccctattgtctctggctacctccttgtcccaccacctccaggctgcatcccaccttccctcttggctactgtaattgtaaatagcgacctttggaaaacgttagcggtgtaacagtccaggaaactgtttttttttgttgttgttgtattgatatgaaatgagattctatttttgtcaaagtatattgtaataataatgactcaaacggcccgtactgtacagacgagattcttctgctgttgttcttgctcccctcccctcctctgagtccgcccctccctgctgcctcctcagtggggcagtgggcaaggggcccaggggcagccgaagcacggggtcctgagacctcaggcaggattggagatcaaaccagagggggcaggcccccagcctgctctctaggatcaccccccgccctaaggggcctggcctggggtgacgtggccaggcagactgtctgccccactccttcacacaagcccagctcctctgcccaaggggtgcggcgcccccttggggtttcctcccagttggagagtagagttaagacaaggcccagttttgtgttagccgaccgtctttgcccacctctatgacccagcctcttgcagtattcccatacttgatgcagggaaggaaccagaagcagaggggcctctacgcaggtacacacgtgtacctgagtgtgttcatgagggcatctggtgtttatgtgtctgagtgtagctttgtatttatgtgtgtgtgtgtgtgtatgtctgattgcacgggtgtacttttgtatttatgtgtgtgtgtggttgcacgggtgtgcctctgtgtgtctctgaccctggctgggtgtgtgtgcaaatctgtgtgactggagctctaggggcatctctgtgtctgagtgtgcctggtgtgtgtttacaaagggagagttggctgctccagctccacagccctgggaccccaactcctgtcttccctgctcctttccctgtgttcaccctcagctctgacacattgaactgcagttggggggattggcagttagccctctgtgcttctccctgcagccctacctctgccaaggtctctccctccagggacctctgcttccacccacatatgtccacttagtcacccacacttgacacagttcctggagtaccctcttcccccaaccccagacctgctttcagagcaaaactcaagtccctcttcctccgtgaagcttctccctcagctgagcagtgatcacttactcactcttaaccccaatccgctgactgggtggggacagcacgtccagccttcccacctctcctgcaggcttctagacggagtttcaaaaactgatgagcctcgatccagggcttgaaagaagccagggtgtaatcttgttcatgcatgcgtccccagagcctcgcccagtgcctggcacatagtaggcactcaataaatgctgaatgggtgaatagttgaatgataggtgctcaataaatgaatgaatggccttcccttctcaggctattcccaacattagtctgcccacctttctaggctgggcttggccaccattaaacacggggtgggggtgagggcccctgcaattcacggtgcaatattcaccagttttgccctctgcctcataaaggcaaacctggcttttgattaccatgtgtggatgtttcagtgtcctttcttctctgtccctggggatggggtggtctgtgaatatgtgacatttctgcagttcagtatccgaaggtttctcttgggggtaggggctcctgggcggccagatgaatgggtccctgggaacccagacctcagatgaggacttaatgtcttcttcctctcaagccaaattcgcctccacccactccctctgaagaactgggcatttgccaaagtaaccactggagtcatctaatggccctccccctccccaggtttcccacagctttcagggacagtgggcaagaggacacccccccccaccacctcagtggaacacaccattctccccccctcaacagcacactcagtgcagcaagactgacccctgaccccctcccagccctccctaccttggacaggaaggaagtaatgcaccttctcttgctgattatttatttgtttggagagacagaaatgtaaaagtgtatctagaaatatctatatctctatatatttttaactgactctttggaatcccctggggtggggtgaggggtaagtttaggctttcgcggaggggaggagacatggagcctgggaactccttgttctcccctctgctgcctctccccaccccttaaagcagttggtagaaggaatggtatttgtatggggggagggaggctggaatggagaatctggattctctcctcttccccattctccagagggagggaggtggtgaggaagaggaagggaggggcaggatgggccatggaggtgccccacccccacacctgacaatcacccacactcctggggctcttcctgggtcctggggcagggcgagtccaagtgtgaggctgttgatttgttttcaatatttcttttcgtgctgtatggtgatgctttcttagtattctacacaataagaaaagacaaagtcctcgagattcttatgagttttgtttgaaaactctttcactatatttgttgtaaagaggtttactattaaaagaaaaagaatacacgtttctgatactt

SEQ ID NO: 373214 - DNA, 4707 bp, Homo sapiens
agcaggctgtactggcccgagggcttagatggaggaaggaagcaaaatatcaacaacagccgaggcggctcaggcgctcggccccggttccccgcttgcctgccgcccgcctgctggcccccgcgcccacgacgggggcccaggcctcacggcgccgcccagggcccgcgcggacgccggcctcatttattattctccccgcccggagctgcggcttcccggtgttgaagatcccccggaccaggggcgagggctacccgctctttgccgtgacaacaccgttcccccagccgggctggaggctgtgcagaaggtatcctgcagaccatgaactgagcactgttcccagaccgttcatgagcacagtgtaaggtgtgccgagacccacagccacagcagcctcagcagccgcaacagccacctcagcaacagtcccacctggtccctgtatctctcagcaacctcatcccgggcagccccctgccccacgtgggtgctgccctcacagtcaccacccacccccacatcagcatcaagtcagaaccggtgtccccaagccgtgagcgcagccctgcgcctccccctccagctgtgttcccagctgcccgccctgagcctggcgatggtctcagcagcccagccgggggatcctatgagacgggagaccgggatgacggacggggggacttcgggcccacactgggcctgctgcgcccagccccagagcctgaggctgagggctcagctgtgaagaggatgcggcttgatacctggacattaaagtgacgattcccactcccctcctctcagcctccctgatgaagagttgacaatctcaccgcccgcccttccctgccccgggctcctcccgctcgacccccacttcctttcttgtgcttcgtgtcctgttgacggttacatttgtgtataattattatattattattattattattatattttttttaatttggattctcgctttggagagggggatgctctcatcccctctttctgtaccccccaccattttcactggctggggggctctctttttcgcgggaaggggggacactttgcacgttgtacacatatgctgcaggaagggggtggggggcccaataaggcctttgggaaaggacaggtgccgagccctgcatgtggagccctcccaccccacccccagatagagggaaataaccaaaaaactaccaaacaacagaaacccacactctagactgaaaccccaaagtgggcttgatgggtgggtttgtgtttcaaggggaaagtgaggcagaggttctgaaaagggtctctgtttttgtgttcatgtagccataggcacatggagcagaatacttaagcctggcccccaaatgcccctgcacacacacgtgccacacctgcgctgattcttgtgtgtgctgcacccccaaggtgtgtgggtgctggctgagctttgggccgggaaggcagcctgggaatctgaggctggagacaggggtttgaggtgggggcctctctggaagcacatttggagggaaagacaagagagccatgaggagagggctgaggagggcagaagggctaggcagggggcaaattgagcccctcccttccccagtttttctctaagatatacagtgcaatagctccccacccctcagttgacgccagccctgtaaagctggccacagtgtgcagggagaatggggagagggtcttcagtgaggtggctggggcgagagtcggcctggacttccctggggtgctccaggccagagctctttcattggggcgagtgtggtgaggggacgtccttggtcttgcacgcacactacctgggggagtcaacactgggatggtctgtggggtgggagggcctacggatgggtccgtagaggtcccacctccctcattcctccttggcccctctccctagcttctcctgttagctccttctgctcctgaccccacctccttgctcttggcgcccctattgtctctggctacctccttgtcccaccacctccaggctgcatcccaccttccctcttggctactgtaattgtaaatagcgacctttggaaaacgttagcggtgtaacagtccaggaaactgtttttttttgttgttgttgtattgatatgaaatgagattctatttttgtcaaagtatattgtaataataatgactcaaacggcccgtactgtacagacgagattcttctgctgttgttcttgctcccctcccctcctctgagtccgcccctccctgctgcctcctcagtggggcagtgggcaaggggcccaggggcagccgaagcacggggtcctgagacctcaggcaggattggagatcaaaccagagggggcaggcccccagcctgctctctaggatcaccccccgccctaaggggcctggcctggggtgacgtggccaggcagactgtctgccccactccttcacacaagcccagctcctctgcccaaggggtgcggcgcccccttggggtttcctcccagttggagagtagagttaagacaaggcccagttttgtgttagccgaccgtctttgcccacctctatgacccagcctcttgcagtattcccatacttgatgcagggaaggaaccagaagcagaggggcctctacgcaggtacacacgtgtacctgagtgtgttcatgagggcatctggtgtttatgtgtctgagtgtagctttgtatttatgtgtgtgtgtgtgtgtatgtctgattgcacgggtgtacttttgtatttatgtgtgtgtgtggttgcacgggtgtgcctctgtgtgtctctgaccctggctgggtgtgtgtgcaaatctgtgtgactggagctctaggggcatctctgtgtctgagtgtgcctggtgtgtgtttacaaagggagagttggctgctccagctccacagccctgggaccccaactcctgtcttccctgctcctttccctgtgttcaccctcagctctgacacattgaactgcagttggggggattggcagttagccctctgtgcttctccctgcagccctacctctgccaaggtctctccctccagggacctctgcttccacccacatatgtccacttagtcacccacacttgacacagttcctggagtaccctcttcccccaaccccagacctgctttcagagcaaaactcaagtccctcttcctccgtgaagcttctccctcagctgagcagtgatcacttactcactcttaaccccaatccgctgactgggtggggacagcacgtccagccttcccacctctcctgcaggcttctagacggagtttcaaaaactgatgagcctcgatccagggcttgaaagaagccagggtgtaatcttgttcatgcatgcgtccccagagcctcgcccagtgcctggcacatagtaggcactcaataaatgctgaatgggtgaatagttgaatgataggtgctcaataaatgaatgaatggccttcccttctcaggctattcccaacattagtctgcccacctttctaggctgggcttggccaccattaaacacggggtgggggtgagggcccctgcaattcacggtgcaatattcaccagttttgccctctgcctcataaaggcaaacctggcttttgattaccatgtgtggatgtttcagtgtcctttcttctctgtccctggggatggggtggtctgtgaatatgtgacatttctgcagttcagtatccgaaggtttctcttgggggtaggggctcctgggcggccagatgaatgggtccctgggaacccagacctcagatgaggacttaatgtcttcttcctctcaagccaaattcgcctccacccactccctctgaagaactgggcatttgccaaagtaaccactggagtcatctaatggccctccccctccccaggtttcccacagctttcagggacagtgggcaagaggacacccccccccaccacctcagtggaacacaccattctccccccctcaacagcacactcagtgcagcaagactgacccctgaccccctcccagccctccctaccttggacaggaaggaagtaatgcaccttctcttgctgattatttatttgtttggagagacagaaatgtaaaagtgtatctagaaatatctatatctctatatatttttaactgactctttggaatcccctggggtggggtgaggggtaagtttaggctttcgcggaggggaggagacatggagcctgggaactccttgttctcccctctgctgcctctccccaccccttaaagcagttggtagaaggaatggtatttgtatggggggagggaggctggaatggagaatctggattctctcctcttccccattctccagagggagggaggtggtgaggaagaggaagggaggggcaggatgggccatggaggtgccccacccccacacctgacaatcacccacactcctggggctcttcctgggtcctggggcagggcgagtccaagtgtgaggctgttgatttgttttcaatatttcttttcgtgctgtatggtgatgctttcttagtattctacacaataagaaaagacaaagtcctcgagattcttatgagttttgtttgaaaactctttcactatatttgttgtaaagaggtttactattaaaagaaaaagaatacacgtttctgatactt

SEQ ID NO: 373215 - DNA, 4103 bp, Homo sapiens
agctgtgcctacgtcggcctcgactcccgggggctggaggagttacctttggagcccgaaaggaggaaggaagcaaaatatcaacaacagccgaggcggctcaggcgctcggccccggttccccgcttgcctgccgcccgcctgctggcccccgcgcccacgacgggggcccaggcctcacggcgccgcccagggcccgcgcggacgccggcctcatttattattctccccgcccggagctgcggcttcccggtgttgaagatcccccggaccaggggcgagggctacccgctctttgccgtgacaacaccgttcccccagccgggctggaggctgtgcagaaggtatcctgcagaccatgaactgagcactgttcccagaccgttcatgagcacagtgtaaggtgtgccgagacccaccacccagcgagcccctcccctccgtagcactgaggacccccggagaagatggggaggaaaaagattcagatccagcgaatcaccgacgagcggaaccgacaggtgactttcaccaagcggaagtttggcctgatgaagaaggcgtatgagctgagcgtgctatgtgactgcgagatcgcactcatcatcttcaaccactccaacaagctgttccagtacgccagcaccgacatggacaaggtgctgctcaagtacacggagtacaatgagccacacgagagccgcaccaacgccgacatcatcgagaccctgaggaagaagggcttcaacggctgcgacagccccgagcccgacggggaggactcgctggaacagagccccctgctggaggacaagtaccgacgcgccagcgaggagctcgacgggctcttccggcgctatgggtcaactgtcccggcccccaactttgccatgcctgtcacggtgcccgtgtccaatcagagctcactgcagttcagcaatcccagcggctccctggtcaccccttccctggtgacatcatccctcacggacccgcggctcctgtccccccagcagccagcactacagaggaacagtgtgtctcctggcctgccccagcggccagctagtgcgggggccatgctggggggtgacctgaacagtgctaacggagcctgccccagccctgttgggaatggctacgtcagtgctcgggcttcccctggcctcctccctgtggccaatggcaacagcctaaacaaggtcatccctgccaagtctccgcccccacctacccacagcacccagcttggagcccccagccgcaagcccgacctgcgagtcatcacttcccaggcaggaaaggggttaatgcatcacttgactgaggaccatttagatctgaacaatgcccagcgccttggggtctcccagtctactcattcgctcaccaccccagtggtttctgtggcaacgccgagtttactcagccagggcctccccttctcttccatgcccactgcctacaacacagattaccagttgaccagtgcagagctctcctccttaccagcctttagttcacctggggggctgtcgctaggcaatgtcactgcctggcaacagccacagcagccccagcagccgcagcagccacagcctccacagcagcagccaccgcagccacagcagccacagccacagcagcctcagcagccgcaacagccacctcagcaacagtcccacctggtccctgtatctctcagcaacctcatcccgggcagccccctgccccacgtgggtgctgccctcacagtcaccacccacccccacatcagcatcaagtcagaaccggtgtccccaagccgtgagcgcagccctgcgcctccccctccagctgtgttcccagctgcccgccctgagcctggcgatggtctcagcagcccagccgggggatcctatgagacgggagaccgggatgacggacggggggacttcgggcccacactgggcctgctgcgcccagccccagagcctgaggctgagggctcagctgtgaagaggatgcggcttgatacctggacattaaagtgacgattcccactcccctcctctcagcctccctgatgaagagttgacaatctcaccgcccgcccttccctgccccgggctcctcccgctcgacccccacttcctttcttgtgcttcgtgtcctgttgacggttacatttgtgtataattattatattattattattattattatattttttttaatttggattctcgctttggagagggggatgctctcatcccctctttctgtaccccccaccattttcactggctggggggctctctttttcgcgggaaggggggacactttgcacgttgtacacatatgctgcaggaagggggtggggggcccaataaggcctttgggaaaggacaggtgccgagccctgcatgtggagccctcccaccccacccccagatagagggaaataaccaaaaaactaccaaacaacagaaacccacactctagactgaaaccccaaagtgggcttgatgggtgggtttgtgtttcaaggggaaagtgaggcagaggttctgaaaagggtctctgtttttgtgttcatgtagccataggcacatggagcagaatacttaagcctggcccccaaatgcccctgcacacacacgtgccacacctgcgctgattcttgtgtgtgctgcacccccaaggtgtgtgggtgctggctgagctttgggccgggaaggcagcctgggaatctgaggctggagacaggggtttgaggtgggggcctctctggaagcacatttggagggaaagacaagagagccatgaggagagggctgaggagggcagaagggctaggcagggggcaaattgagcccctcccttccccagtttttctctaagatatacagtgcaatagctccccacccctcagttgacgccagccctgtaaagctggccacagtgtgcagggagaatggggagagggtcttcagtgaggtggctggggcgagagtcggcctggacttccctggggtgctccaggccagagctctttcattggggcgagtgtggtgaggggacgtccttggtcttgcacgcacactacctgggggagtcaacactgggatggtctgtggggtgggagggcctacggatgggtccgtagaggtcccacctccctcattcctccttggcccctctccctagcttctcctgttagctccttctgctcctgaccccacctccttgctcttggcgcccctattgtctctggctacctccttgtcccaccacctccaggctgcatcccaccttccctcttggctactgtaattgtaaatagcgacctttggaaaacgttagcggtgtaacagtccaggaaactgtttttttttgttgttgttgtattgatatgaaatgagattctatttttgtcaaagtatattgtaataataatgactcaaacggcccgtactgtacagacgagattcttctgctgttgttcttgctcccctcccctcctctgagtccgcccctccctgctgcctcctcagtggggcagtgggcaaggggcccaggggcagccgaagcacggggtcctgagacctcaggcaggattggagatcaaaccagagggggcaggcccccagcctgctctctaggatcaccccccgccctaaggggcctggcctggggtgacgtggccaggcagactgtctgccccactccttcacacaagcccagctcctctgcccaaggggtgcggcgcccccttggggtttcctcccagttggagagtagagttaagacaaggcccagttttgtgttagccgaccgtctttgcccacctctatgacccagcctcttgcagtattcccatacttgatgcagggaaggaaccagaagcagaggggcctctacgcaggtacacacgtgtacctgagtgtgttctgtgtgtgagcttcgtggtgatggggccgtgtagcgggtgctgttctgtgtctgagcttcgtggtgatggggccgtgtagcgggtgctgttctgtgtctgagcttcgtggtgatggggccgtgtagcgggtgctgttctgtgtctgagcttcgtgatcgtggggttgtaa

SEQ ID NO: 373216 - DNA, 3597 bp, Homo sapiens
aggttgctgttgctcaacccagcaccgtacgtatgagcagactcataggatcaccaaccatgtgccgcacccccagatagagggaaataaccaaaaaactaccaaacaacagaaacccacactctagactgaaaccccaaagtgggcttgatgggtgggtttgtgtttcaaggggaaagtgaggcagaggttctgaaaagggtctctgtttttgtgttcatgtagccataggcacatggagcagaatacttaagcctggcccccaaatgcccctgcacacacacgtgccacacctgcgctgattcttgtgtgtgctgcacccccaaggtgtgtgggtgctggctgagctttgggccgggaaggcagcctgggaatctgaggctggagacaggggtttgaggtgggggcctctctggaagcacatttggagggaaagacaagagagccatgaggagagggctgaggagggcagaagggctaggcagggggcaaattgagcccctcccttccccagtttttctctaagatatacagtgcaatagctccccacccctcagttgacgccagccctgtaaagctggccacagtgtgcagggagaatggggagagggtcttcagtgaggtggctggggcgagagtcggcctggacttccctggggtgctccaggccagagctctttcattggggcgagtgtggtgaggggacgtccttggtcttgcacgcacactacctgggggagtcaacactgggatggtctgtggggtgggagggcctacggatgggtccgtagaggtcccacctccctcattcctccttggcccctctccctagcttctcctgttagctccttctgctcctgaccccacctccttgctcttggcgcccctattgtctctggctacctccttgtcccaccacctccaggctgcatcccaccttccctcttggctactgtaattgtaaatagcgacctttggaaaacgttagcggtgtaacagtccaggaaactgtttttttttgttgttgttgtattgatatgaaatgagattctatttttgtcaaagtatattgtaataataatgactcaaacggcccgtactgtacagacgagattcttctgctgttgttcttgctcccctcccctcctctgagtccgcccctccctgctgcctcctcagtggggcagtgggcaaggggcccaggggcagccgaagcacggggtcctgagacctcaggcaggattggagatcaaaccagagggggcaggcccccagcctgctctctaggatcaccccccgccctaaggggcctggcctggggtgacgtggccaggcagactgtctgccccactccttcacacaagcccagctcctctgcccaaggggtgcggcgcccccttggggtttcctcccagttggagagtagagttaagacaaggcccagttttgtgttagccgaccgtctttgcccacctctatgacccagcctcttgcagtattcccatacttgatgcagggaaggaaccagaagcagaggggcctctacgcaggtacacacgtgtacctgagtgtgttcatgagggcatctggtgtttatgtgtctgagtgtagctttgtatttatgtgtgtgtgtgtgtgtatgtctgattgcacgggtgtacttttgtatttatgtgtgtgtgtggttgcacgggtgtgcctctgtgtgtctctgaccctggctgggtgtgtgtgcaaatctgtgtgactggagctctaggggcatctctgtgtctgagtgtgcctggtgtgtgtttacaaagggagagttggctgctccagctccacagccctgggaccccaactcctgtcttccctgctcctttccctgtgttcaccctcagctctgacacattgaactgcagttggggggattggcagttagccctctgtgcttctccctgcagccctacctctgccaaggtctctccctccagggacctctgcttccacccacatatgtccacttagtcacccacacttgacacagttcctggagtaccctcttcccccaaccccagacctgctttcagagcaaaactcaagtccctcttcctccgtgaagcttctccctcagctgagcagtgatcacttactcactcttaaccccaatccgctgactgggtggggacagcacgtccagccttcccacctctcctgcaggcttctagacggagtttcaaaaactgatgagcctcgatccagggcttgaaagaagccagggtgtaatcttgttcatgcatgcgtccccagagcctcgcccagtgcctggcacatagtaggcactcaataaatgctgaatgggtgaatagttgaatgataggtgctcaataaatgaatgaatggccttcccttctcaggctattcccaacattagtctgcccacctttctaggctgggcttggccaccattaaacacggggtgggggtgagggcccctgcaattcacggtgcaatattcaccagttttgccctctgcctcataaaggcaaacctggcttttgattaccatgtgtggatgtttcagtgtcctttcttctctgtccctggggatggggtggtctgtgaatatgtgacatttctgcagttcagtatccgaaggtttctcttgggggtaggggctcctgggcggccagatgaatgggtccctgggaacccagacctcagatgaggacttaatgtcttcttcctctcaagccaaattcgcctccacccactccctctgaagaactgggcatttgccaaagtaaccactggagtcatctaatggccctccccctccccaggtttcccacagctttcagggacagtgggcaagaggacacccccccccaccacctcagtggaacacaccattctccccccctcaacagcacactcagtgcagcaagactgacccctgaccccctcccagccctccctaccttggacaggaaggaagtaatgcaccttctcttgctgattatttatttgtttggagagacagaaatgtaaaagtgtatctagaaatatctatatctctatatatttttaactgactctttggaatcccctggggtggggtgaggggtaagtttaggctttcgcggaggggaggagacatggagcctgggaactccttgttctcccctctgctgcctctccccaccccttaaagcagttggtagaaggaatggtatttgtatggggggagggaggctggaatggagaatctggattctctcctcttccccattctccagagggagggaggtggtgaggaagaggaagggaggggcaggatgggccatggaggtgccccacccccacacctgacaatcacccacactcctggggctcttcctgggtcctggggcagggcgagtccaagtgtgaggctgttgatttgttttcaatatttcttttcgtgctgtatggtgatgctttcttagtattctacacaataagaaaagacaaagtcctcgagattcttatgagttttgtttgaaaactctttcactatatttgttgtaaagaggtttactattaaaagaaaaagaatacacgtttctgatactt

SEQ ID NO: 373217 - DNA, 4377 bp, Homo sapiens
agctgtgcctacgtcggcctcgactcccgggggctggaggagttacctttggagcccgaaaggaggaaggaagcaaaatatcaacaacagccgaggcggctcaggcgctcggccccggttccccgcttgcctgccgcccgcctgctggcccccgcgcccacgacgggggcccaggcctcacggcgccgcccagggcccgcgcggacgccggcctcatttattattctccccgcccggagctgcggcttcccggtgttgaagatcccccggaccaggggcgagggctacccgctctttgccgtgacaacaccgttcccccagccgggctggaggctgtgcagaaggtatcctgcagaccatgaactgagcactgttcccagaccgttcatgagcacagtgtaaggtgtgccgagacccaccacccagcgagcccctcccctccgtagcactgaggacccccggagaagatggggaggaaaaagattcagatccagcgaatcaccgacgagcggaaccgacaggtgactttcaccaagcggaagtttggcctgatgaagaaggcgtatgagctgagcgtgctatgtgactgcgagatcgcactcatcatcttcaaccactccaacaagctgttccagtacgccagcaccgacatggacaaggtgctgctcaagtacacggagtacaatgagccacacgagagccgcaccaacgccgacatcatcgagaccctgaggaagaagggcttcaacggctgcgacagccccgagcccgacggggaggactcgctggaacagagccccctgctggaggacaagtaccgacgcgccagcgaggagctcgacgggctcttccggcgctatgggtcaactgtcccggcccccaactttgccatgcctgtcacggtgcccgtgtccaatcagagctcactgcagttcagcaatcccagcggctccctggtcaccccttccctggtgacatcatccctcacggacccgcggctcctgtccccccagcagccagcactacagaggaacagtgtgtctcctggcctgccccagcggccagctagtgcgggggccatgctggggggtgacctgaacagtgctaacggagcctgccccagccctgttgggaatggctacgtcagtgctcgggcttcccctggcctcctccctgtggccaatggcaacagcctaaacaaggtcatccctgccaagtctccgcccccacctacccacagcacccagcttggagcccccagccgcaagcccgacctgcgagtcatcacttcccaggcaggaaaggggttaatgcatcacttgaacaatgcccagcgccttggggtctcccagtctactcattcgctcaccaccccagtggtttctgtggcaacgccgagtttactcagccagggcctccccttctcttccatgcccactgcctacaacacagattaccagttgaccagtgcagagctctcctccttaccagcctttagttcacctggggggctgtcgctaggcaatgtcactgcctggcaacagccacagcagccccagcagccgcagcagccacagcctccacagcagcagccaccgcagccacagcagccacagccacagcagcctcagcagccgcaacagccacctccttgctcttggcgcccctattgtctctggctacctccttgtcccaccacctccaggctgcatcccaccttccctcttggctactgtaattgtaaatagcgacctttggaaaacgttagcggtgtaacagtccaggaaactgtttttttttgttgttgttgtattgatatgaaatgagattctatttttgtcaaagtatattgtaataataatgactcaaacggcccgtactgtacagacgagattcttctgctgttgttcttgctcccctcccctcctctgagtccgcccctccctgctgcctcctcagtggggcagtgggcaaggggcccaggggcagccgaagcacggggtcctgagacctcaggcaggattggagatcaaaccagagggggcaggcccccagcctgctctctaggatcaccccccgccctaaggggcctggcctggggtgacgtggccaggcagactgtctgccccactccttcacacaagcccagctcctctgcccaaggggtgcggcgcccccttggggtttcctcccagttggagagtagagttaagacaaggcccagttttgtgttagccgaccgtctttgcccacctctatgacccagcctcttgcagtattcccatacttgatgcagggaaggaaccagaagcagaggggcctctacgcaggtacacacgtgtacctgagtgtgttcatgagggcatctggtgtttatgtgtctgagtgtagctttgtatttatgtgtgtgtgtgtgtgtatgtctgattgcacgggtgtacttttgtatttatgtgtgtgtgtggttgcacgggtgtgcctctgtgtgtctctgaccctggctgggtgtgtgtgcaaatctgtgtgactggagctctaggggcatctctgtgtctgagtgtgcctggtgtgtgtttacaaagggagagttggctgctccagctccacagccctgggaccccaactcctgtcttccctgctcctttccctgtgttcaccctcagctctgacacattgaactgcagttggggggattggcagttagccctctgtgcttctccctgcagccctacctctgccaaggtctctccctccagggacctctgcttccacccacatatgtccacttagtcacccacacttgacacagttcctggagtaccctcttcccccaaccccagacctgctttcagagcaaaactcaagtccctcttcctccgtgaagcttctccctcagctgagcagtgatcacttactcactcttaaccccaatccgctgactgggtggggacagcacgtccagccttcccacctctcctgcaggcttctagacggagtttcaaaaactgatgagcctcgatccagggcttgaaagaagccagggtgtaatcttgttcatgcatgcgtccccagagcctcgcccagtgcctggcacatagtaggcactcaataaatgctgaatgggtgaatagttgaatgataggtgctcaataaatgaatgaatggccttcccttctcaggctattcccaacattagtctgcccacctttctaggctgggcttggccaccattaaacacggggtgggggtgagggcccctgcaattcacggtgcaatattcaccagttttgccctctgcctcataaaggcaaacctggcttttgattaccatgtgtggatgtttcagtgtcctttcttctctgtccctggggatggggtggtctgtgaatatgtgacatttctgcagttcagtatccgaaggtttctcttgggggtaggggctcctgggcggccagatgaatgggtccctgggaacccagacctcagatgaggacttaatgtcttcttcctctcaagccaaattcgcctccacccactccctctgaagaactgggcatttgccaaagtaaccactggagtcatctaatggccctccccctccccaggtttcccacagctttcagggacagtgggcaagaggacacccccccccaccacctcagtggaacacaccattctccccccctcaacagcacactcagtgcagcaagactgacccctgaccccctcccagccctccctaccttggacaggaaggaagtaatgcaccttctcttgctgattatttatttgtttggagagacagaaatgtaaaagtgtatctagaaatatctatatctctatatatttttaactgactctttggaatcccctggggtggggtgaggggtaagtttaggctttcgcggaggggaggagacatggagcctgggaactccttgttctcccctctgctgcctctccccaccccttaaagcagttggtagaaggaatggtatttgtatggggggagggaggctggaatggagaatctggattctctcctcttccccattctccagagggagggaggtggtgaggaagaggaagggaggggcaggatgggccatggaggtgccccacccccacacctgacaatcacccacactcctggggctcttcctgggtcctggggcagggcgagtccaagtgtgaggctgttgatttgttttcaatatttcttttcgtgctgtatggtgatgctttcttagtattctacacaataagaaaagacaaagtcctcgagattcttatgagttttgtttgaaaactctttcactatatttgttgtaaagaggtttactattaaaagaaaaagaatacacgtttctgatactt

SEQ ID NO: 373218 - DNA, 3111 bp, Homo sapiens
  misc_feature (1)..(1): n is a, c, g, or t
nccgggctgcatgaattcggcaccagagtttttctctaagatatacagtgcaatagctccccacccctcagttgacgccagccctgtaaagctggccacagtgtgcagggagaatggggagagggtcttcagtgaggtggctggggcgagagtcggcctggacttccctggggtgctccaggccagagctctttcattggggcgagtgtggtgaggggacgtccttggtcttgcacgcacactacctgggggagtcaacactgggatggtctgtggggtgggagggcctacggatgggtccgtagaggtcccacctccctcattcctccttggcccctctccctagcttctcctgttagctccttctgctcctgaccccacctccttgctcttggcgcccctattgtctctggctacctccttgtcccaccacctccaggctgcatcccaccttccctcttggctactgtaattgtaaatagcgacctttggaaaacgttagcggtgtaacagtccaggaaactgtttttttttgttgttgttgtattgatatgaaatgagattctatttttgtcaaagtatattgtaataataatgactcaaacggcccgtactgtacagacgagattcttctgctgttgttcttgctcccctcccctcctctgagtccgcccctccctgctgcctcctcagtggggcagtgggcaaggggcccaggggcagccgaagcacggggtcctgagacctcaggcaggattggagatcaaaccagagggggcaggcccccagcctgctctctaggatcaccccccgccctaaggggcctggcctggggtgacgtggccaggcagactgtctgccccactccttcacacaagcccagctcctctgcccaaggggtgcggcgcccccttggggtttcctcccagttggagagtagagttaagacaaggcccagttttgtgttagccgaccgtctttgcccacctctatgacccagcctcttgcagtattcccatacttgatgcagggaaggaaccagaagcagaggggcctctacgcaggtacacacgtgtacctgagtgtgttcatgagggcatctggtgtttatgtgtctgagtgtagctttgtatttatgtgtgtgtgtgtgtgtatgtctgattgcacgggtgtacttttgtatttatgtgtgtgtgtggttgcacgggtgtgcctctgtgtgtctctgaccctggctgggtgtgtgtgcaaatctgtgtgactggagctctaggggcatctctgtgtctgagtgtgcctggtgtgtgtttacaaagggagagttggctgctccagctccacagccctgggaccccaactcctgtcttccctgctcctttccctgtgttcaccctcagctctgacacattgaactgcagttggggggattggcagttagccctctgtgcttctccctgcagccctacctctgccaaggtctctccctccagggacctctgcttccacccacatatgtccacttagtcacccacacttgacacagttcctggagtaccctcttcccccaaccccagacctgctttcagagcaaaactcaagtccctcttcctccgtgaagcttctccctcagctgagcagtgatcacttactcactcttaaccccaatccgctgactgggtggggacagcacgtccagccttcccacctctcctgcaggcttctagacggagtttcaaaaactgatgagcctcgatccagggcttgaaagaagccagggtgtaatcttgttcatgcatgcgtccccagagcctcgcccagtgcctggcacatagtaggcactcaataaatgctgaatgggtgaatagttgaatgataggtgctcaataaatgaatgaatggccttcccttctcaggctattcccaacattagtctgcccacctttctaggctgggcttggccaccattaaacacggggtgggggtgagggcccctgcaattcacggtgcaatattcaccagttttgccctctgcctcataaaggcaaacctggcttttgattaccatgtgtggatgtttcagtgtcctttcttctctgtccctggggatggggtggtctgtgaatatgtgacatttctgcagttcagtatccgaaggtttctcttgggggtaggggctcctgggcggccagatgaatgggtccctgggaacccagacctcagatgaggacttaatgtcttcttcctctcaagccaaattcgcctccacccactccctctgaagaactgggcatttgccaaagtaaccactggagtcatctaatggccctccccctccccaggtttcccacagctttcagggacagtgggcaagaggacacccccccccaccacctcagtggaacacaccattctccccccctcaacagcacactcagtgcagcaagactgacccctgaccccctcccagccctccctaccttggacaggaaggaagtaatgcaccttctcttgctgattatttatttgtttggagagacagaaatgtaaaagtgtatctagaaatatctatatctctatatatttttaactgactctttggaatcccctggggtggggtgaggggtaagtttaggctttcgcggaggggaggagacatggagcctgggaactccttgttctcccctctgctgcctctccccaccccttaaagcagttggtagaaggaatggtatttgtatggggggagggaggctggaatggagaatctggattctctcctcttccccattctccagagggagggaggtggtgaggaagaggaagggaggggcaggatgggccatggaggtgccccacccccacacctgacaatcacccacactcctggggctcttcctgggtcctggggcagggcgagtccaagtgtgaggctgttgatttgttttcaatatttcttttcgtgctgtatggtgatgctttcttagtattctacacaataagaaaagacaaagtcctcgagattcttatgagttttgtttgaaaactctttcactatatttgttgtaaagaggtttactattaaaagaaaaagaatacacgtttctgatactt

SEQ ID NO: 373219 - DNA, 3203 bp, Homo sapiens
tacttgagtaaggggacgggcttcctttcatgtggtggccgttcggccacccccagatagagggaaataaccaaaaaactaccaaacaacagaaacccacactctagactgaaaccccaaagtgggcttgatgggtgggtttgtgtttcaaggggaaagtgaggcagaggttctgaaaagggtctctgtttttgtgttcatgtagccataggcacatggagcagaatacttaagcctggcccccaaatgcccctgcacacacacgtgccacacctgcgctgattcttgtgtgtgctgcacccccaaggtgtgtgggtgctggctgagctttgggccgggaaggcagcctgggaatctgaggctggagacaggggtttgaggtgggggcctctctggaagcacatttggagggaaagacaagagagcccctctccctagcttctcctgttagctccttctgctcctgaccccacctccttgctcttggcgcccctattgtctctggctacctccttgtcccaccacctccaggctgcatcccaccttccctcttggctactgtaattgtaaatagcgacctttggaaaacgttagcggtgtaacagtccaggaaactgtttttttttgttgttgttgtattgatatgaaatgagattctatttttgtcaaagtatattgtaataataatgactcaaacggcccgtactgtacagacgagattcttctgctgttgttcttgctcccctcccctcctctgagtccgcccctccctgctgcctcctcagtggggcagtgggcaaggggcccaggggcagccgaagcacggggtcctgagacctcaggcaggattggagatcaaaccagagggggcaggcccccagcctgctctctaggatcaccccccgccctaaggggcctggcctggggtgacgtggccaggcagactgtctgccccactccttcacacaagcccagctcctctgcccaaggggtgcggcgcccccttggggtttcctcccagttggagagtagagttaagacaaggcccagttttgtgttagccgaccgtctttgcccacctctatgacccagcctcttgcagtattcccatacttgatgcagggaaggaaccagaagcagaggggcctctacgcaggtacacacgtgtacctgagtgtgttcatgagggcatctggtgtttatgtgtctgagtgtagctttgtatttatgtgtgtgtgtgtgtgtatgtctgattgcacgggtgtacttttgtatttatgtgtgtgtgtggttgcacgggtgtgcctctgtgtgtctctgaccctggctgggtgtgtgtgcaaatctgtgtgactggagctctaggggcatctctgtgtctgagtgtgcctggtgtgtgtttacaaagggagagttggctgctccagctccacagccctgggaccccaactcctgtcttccctgctcctttccctgtgttcaccctcagctctgacacattgaactgcagttggggggattggcagttagccctctgtgcttctccctgcagccctacctctgccaaggtctctccctccagggacctctgcttccacccacatatgtccacttagtcacccacacttgacacagttcctggagtaccctcttcccccaaccccagacctgctttcagagcaaaactcaagtccctcttcctccgtgaagcttctccctcagctgagcagtgatcacttactcactcttaaccccaatccgctgactgggtggggacagcacgtccagccttcccacctctcctgcaggcttctagacggagtttcaaaaactgatgagcctcgatccagggcttgaaagaagccagggtgtaatcttgttcatgcatgcgtccccagagcctcgcccagtgcctggcacatagtaggcactcaataaatgctgaatgggtgaatagttgaatgataggtgctcaataaatgaatgaatggccttcccttctcaggctattcccaacattagtctgcccacctttctaggctgggcttggccaccattaaacacggggtgggggtgagggcccctgcaattcacggtgcaatattcaccagttttgccctctgcctcataaaggcaaacctggcttttgattaccatgtgtggatgtttcagtgtcctttcttctctgtccctggggatggggtggtctgtgaatatgtgacatttctgcagttcagtatccgaaggtttctcttgggggtaggggctcctgggcggccagatgaatgggtccctgggaacccagacctcagatgaggacttaatgtcttcttcctctcaagccaaattcgcctccacccactccctctgaagaactgggcatttgccaaagtaaccactggagtcatctaatggccctccccctccccaggtttcccacagctttcagggacagtgggcaagaggacacccccccccaccacctcagtggaacacaccattctccccccctcaacagcacactcagtgcagcaagactgacccctgaccccctcccagccctccctaccttggacaggaaggaagtaatgcaccttctcttgctgattatttatttgtttggagagacagaaatgtaaaagtgtatctagaaatatctatatctctatatatttttaactgactctttggaatcccctggggtggggtgaggggtaagtttaggctttcgcggaggggaggagacatggagcctgggaactccttgttctcccctctgctgcctctccccaccccttaaagcagttggtagaaggaatggtatttgtatggggggagggaggctggaatggagaatctggattctctcctcttccccattctccagagggagggaggtggtgaggaagaggaagggaggggcaggatgggccatggaggtgccccacccccacacctgacaatcacccacactcctggggctcttcctgggtcctggggcagggcgagtccaagtgtgaggctgttgatttgttttcaatatttcttttcgtgctgtatggtgatgctttcttagtattctacacaataagaaaagacaaagtcctcgagattcttatgagttttgtttgaaaactctttcactatatttgttgtaaagaggtttactattaaaagaaaaagaatacacgtttctgatactt

SEQ ID NO: 373220 - DNA, 2835 bp, Homo sapiens
  misc_feature (1)..(2): n is a, c, g, or t
nnggggttccccccgggtttaaaaaggaaaggtcccacctccctcattcctccttggcccctctccctagcttctcctgttagctccttctgctcctgaccccacctccttgctcttggcgcccctattgtctctggctacctccttgtcccaccacctccaggctgcatcccaccttccctcttggctactgtaattgtaaatagcgacctttggaaaacgttagcggtgtaacagtccaggaaactgtttttttttgttgttgttgtattgatatgaaatgagattctatttttgtcaaagtatattgtaataataatgactcaaacggcccgtactgtacagacgagattcttctgctgttgttcttgctcccctcccctcctctgagtccgcccctccctgctgcctcctcagtggggcagtgggcaaggggcccaggggcagccgaagcacggggtcctgagacctcaggcaggattggagatcaaaccagagggggcaggcccccagcctgctctctaggatcaccccccgccctaaggggcctggcctggggtgacgtggccaggcagactgtctgccccactccttcacacaagcccagctcctctgcccaaggggtgcggcgcccccttggggtttcctcccagttggagagtagagttaagacaaggcccagttttgtgttagccgaccgtctttgcccacctctatgacccagcctcttgcagtattcccatacttgatgcagggaaggaaccagaagcagaggggcctctacgcaggtacacacgtgtacctgagtgtgttcatgagggcatctggtgtttatgtgtctgagtgtagctttgtatttatgtgtgtgtgtgtgtgtatgtctgattgcacgggtgtacttttgtatttatgtgtgtgtgtggttgcacgggtgtgcctctgtgtgtctctgaccctggctgggtgtgtgtgcaaatctgtgtgactggagctctaggggcatctctgtgtctgagtgtgcctggtgtgtgtttacaaagggagagttggctgctccagctccacagccctgggaccccaactcctgtcttccctgctcctttccctgtgttcaccctcagctctgacacattgaactgcagttggggggattggcagttagccctctgtgcttctccctgcagccctacctctgccaaggtctctccctccagggacctctgcttccacccacatatgtccacttagtcacccacacttgacacagttcctggagtaccctcttcccccaaccccagacctgctttcagagcaaaactcaagtccctcttcctccgtgaagcttctccctcagctgagcagtgatcacttactcactcttaaccccaatccgctgactgggtggggacagcacgtccagccttcccacctctcctgcaggcttctagacggagtttcaaaaactgatgagcctcgatccagggcttgaaagaagccagggtgtaatcttgttcatgcatgcgtccccagagcctcgcccagtgcctggcacatagtaggcactcaataaatgctgaatgggtgaatagttgaatgataggtgctcaataaatgaatgaatggccttcccttctcaggctattcccaacattagtctgcccacctttctaggctgggcttggccaccattaaacacggggtgggggtgagggcccctgcaattcacggtgcaatattcaccagttttgccctctgcctcataaaggcaaacctggcttttgattaccatgtgtggatgtttcagtgtcctttcttctctgtccctggggatggggtggtctgtgaatatgtgacatttctgcagttcagtatccgaaggtttctcttgggggtaggggctcctgggcggccagatgaatgggtccctgggaacccagacctcagatgaggacttaatgtcttcttcctctcaagccaaattcgcctccacccactccctctgaagaactgggcatttgccaaagtaaccactggagtcatctaatggccctccccctccccaggtttcccacagctttcagggacagtgggcaagaggacacccccccccaccacctcagtggaacacaccattctccccccctcaacagcacactcagtgcagcaagactgacccctgaccccctcccagccctccctaccttggacaggaaggaagtaatgcaccttctcttgctgattatttatttgtttggagagacagaaatgtaaaagtgtatctagaaatatctatatctctatatatttttaactgactctttggaatcccctggggtggggtgaggggtaagtttaggctttcgcggaggggaggagacatggagcctgggaactccttgttctcccctctgctgcctctccccaccccttaaagcagttggtagaaggaatggtatttgtatggggggagggaggctggaatggagaatctggattctctcctcttccccattctccagagggagggaggtggtgaggaagaggaagggaggggcaggatgggccatggaggtgccccacccccacacctgacaatcacccacactcctggggctcttcctgggtcctggggcagggcgagtccaagtgtgaggctgttgatttgttttcaatatttcttttcgtgctgtatggtgatgctttcttagtattctacacaataagaaaagacaaagtcctcgagattcttatgagttttgtttgaaaactctttcactatatttgttgtaaagaggtttactattaaaagaaaaagaatacacgtttctgatactt

SEQ ID NO: 373221 - DNA, 2670 bp, Homo sapiens
agctaggtacgaggcggtgtaatcggagaggatgtaaatagcgacctttggaaaacgttagcggtgtaacagtccaggaaactgtttttttttgttgttgttgtattgatatgaaatgagattctatttttgtcaaagtatattgtaataataatgactcaaacggcccgtactgtacagacgagattcttctgctgttgttcttgctcccctcccctcctctgagtccgcccctccctgctgcctcctcagtggggcagtgggcaaggggcccaggggcagccgaagcacggggtcctgagacctcaggcaggattggagatcaaaccagagggggcaggcccccagcctgctctctaggatcaccccccgccctaaggggcctggcctggggtgacgtggccaggcagactgtctgccccactccttcacacaagcccagctcctctgcccaaggggtgcggcgcccccttggggtttcctcccagttggagagtagagttaagacaaggcccagttttgtgttagccgaccgtctttgcccacctctatgacccagcctcttgcagtattcccatacttgatgcagggaaggaaccagaagcagaggggcctctacgcaggtacacacgtgtacctgagtgtgttcatgagggcatctggtgtttatgtgtctgagtgtagctttgtatttatgtgtgtgtgtgtgtgtatgtctgattgcacgggtgtacttttgtatttatgtgtgtgtgtggttgcacgggtgtgcctctgtgtgtctctgaccctggctgggtgtgtgtgcaaatctgtgtgactggagctctaggggcatctctgtgtctgagtgtgcctggtgtgtgtttacaaagggagagttggctgctccagctccacagccctgggaccccaactcctgtcttccctgctcctttccctgtgttcaccctcagctctgacacattgaactgcagttggggggattggcagttagccctctgtgcttctccctgcagccctacctctgccaaggtctctccctccagggacctctgcttccacccacatatgtccacttagtcacccacacttgacacagttcctggagtaccctcttcccccaaccccagacctgctttcagagcaaaactcaagtccctcttcctccgtgaagcttctccctcagctgagcagtgatcacttactcactcttaaccccaatccgctgactgggtggggacagcacgtccagccttcccacctctcctgcaggcttctagacggagtttcaaaaactgatgagcctcgatccagggcttgaaagaagccagggtgtaatcttgttcatgcatgcgtccccagagcctcgcccagtgcctggcacatagtaggcactcaataaatgctgaatgggtgaatagttgaatgataggtgctcaataaatgaatgaatggccttcccttctcaggctattcccaacattagtctgcccacctttctaggctgggcttggccaccattaaacacggggtgggggtgagggcccctgcaattcacggtgcaatattcaccagttttgccctctgcctcataaaggcaaacctggcttttgattaccatgtgtggatgtttcagtgtcctttcttctctgtccctggggatggggtggtctgtgaatatgtgacatttctgcagttcagtatccgaaggtttctcttgggggtaggggctcctgggcggccagatgaatgggtccctgggaacccagacctcagatgaggacttaatgtcttcttcctctcaagccaaattcgcctccacccactccctctgaagaactgggcatttgccaaagtaaccactggagtcatctaatggccctccccctccccaggtttcccacagctttcagggacagtgggcaagaggacacccccccccaccacctcagtggaacacaccattctccccccctcaacagcacactcagtgcagcaagactgacccctgaccccctcccagccctccctaccttggacaggaaggaagtaatgcaccttctcttgctgattatttatttgtttggagagacagaaatgtaaaagtgtatctagaaatatctatatctctatatatttttaactgactctttggaatcccctggggtggggtgaggggtaagtttaggctttcgcggaggggaggagacatggagcctgggaactccttgttctcccctctgctgcctctccccaccccttaaagcagttggtagaaggaatggtatttgtatggggggagggaggctggaatggagaatctggattctctcctcttccccattctccagagggagggaggtggtgaggaagaggaagggaggggcaggatgggccatggaggtgccccacccccacacctgacaatcacccacactcctggggctcttcctgggtcctggggcagggcgagtccaagtgtgaggctgttgatttgttttcaatatttcttttcgtgctgtatggtgatgctttcttagtattctacacaataagaaaagacaaagtcctcgagattcttatgagttttgtttgaaaactctttcactatatttgttgtaaagaggtttactattaaaagaaaaagaatacacgtttctgatactt

SEQ ID NO: 373222 - DNA, 1167 bp, Homo sapiens
  misc_feature (11)..(11): n is a, c, g, or t
ggatcttgtcntagccgcgccagtgagagaaatgagagaaatgactgctccagcagcagagtctgcccttctgccactgtgctttctttggggacattcctctgctctagtgtcacctatgaggaaaccctgtgctgtggggatggtgggggagggagaatcaggttagaggacctgggtcagtactggctgcaaaagcccttggttttgaccaggaagaggggtcaaaggtaccggagagccagatgaatgggtccctgggaacccagacctcagatgaggacttaatgtcttcttcctctcaagccaaattcgcctccacccactccctctgaagaactgggcatttgccaaagtaaccactggagtcatctaatggccctccccctccccaggtttcccacagctttcagggacagtgggcaagaggacacccccccccaccacctcagtggaacacaccattctccccccctcaacagcacactcagtgcagcaagactgacccctgaccccctcccagccctccctaccttggacaggaaggaagtaatgcaccttctcttgctgattatttatttgtttggagagacagaaatgtaaaagtgtatctagaaatatctatatctctatatatttttaactgactctttggaatcccctggggtggggtgaggggtaagtttaggctttcgcggaggggaggagacatggagcctgggaactccttgttctcccctctgctgcctctccccaccccttaaagcagttggtagaaggaatggtatttgtatggggggagggaggctggaatggagaatctggattctctcctcttccccattctccagagggagggaggtggtgaggaagaggaagggaggggcaggatgggccatggaggtgccccacccccacacctgacaatcacccacactcctggggctcttcctgggtcctggggcagggcgagtccaagtgtgaggctgttgatttgttttcaatatttcttttcgtgctgtatggtgatgctttcttagtattctacacaataagaaaagacaaagtcctcgagattcttatgagttttgtttgaaaactctttcactatatttgttgtaaagaggtttactattaaaagaaaaagaatacacgtttctgatactt

SEQ ID NO: 373223 - DNA, 1071 bp, Homo sapiens
agctgtgcctacgtcggcctcgactcccgggggctggaggagttacctttggagcccgaaaggaggaaggaagcaaaatatcaacaacagccgaggcggctcaggcgctcggccccggttccccgcttgcctgccgcccgcctgctggcccccgcgcccacgacgggggcccaggcctcacggcgccgcccagggcccgcgcggacgccggcctcatttattattctccccgcccggagctgcggcttcccggtgttgaagatcccccggaccaggggcgagggctacccgctctttgccgtgacaacaccgttcccccagccgggctggaggctgtgcagaaggtatcctgcagaccatgaactgagcactgttcccagaccgttcatgagcacagtgtaaggtgtgccgagacccaccacccagcgagcccctcccctccgtagcactgaggacccccggagaagatggggaggaaaaagattcagatccagcgaatcaccgacgagcggaaccgacaggtgactttcaccaagcggaagtttggcctgatgaagaaggcgtatgagctgagcgtgctatgtgactgcgagatcgcactcatcatcttcaaccactccaacaagctgttccagtacgccagcaccgacatggacaaggtgctgctcaagtacacggagtacaatgagccacacgagagccgcaccaacgccgacatcatcgaggtgggcccatacacacaggcaccaggatatacccccgcctgcatccacatggacacgtgcccacgttgcatgtacacgcagacctgcctatgcacacacactggtatacatgccccttgtagcccctcacctgtgcgcacacacatgcaaaccctccttctgtcatacaaacccagggtctgaggaggaaggaagggcagttcaagtgaacaggccagtgccaggctgccagcccacacccaccctgccctcacaggcagggtgcctgccaccaagcagtcagacagggggtaaccaagagctcccagccagaaaaacatggggcagggagccaaacaaaagcact

SEQ ID NO: 373224 - DNA, 205 bp, Homo sapiens
ggtgacctgaacagtgctaacggagcctgccccagccctgttggtgagtgcagtcatccttctacctggaggtggggaggggtgcccgctcagtggcctcagggggtccaaggatcaggaacgacctagatgagaggagaggaagatcccagggccaggactggatgaagagtcagtcagagatttttaagcccctggattttgt

SEQ ID NO: 373225 - DNA, 660 bp, Homo sapiens
gaactgctgaaggggaaggcagcgaggtgggggtgagctctctctgcagcaggccagatgggtggagactgcaagtgaaatgatgtccctacccgtggtgcaagcctttaacagccgtgtgtgaatttgagtctgttatcagggcctctaacctgctccccgtgtgtcctgcctggctgaggactaacccacctccactagggggtgtccctggtcctgtctgcagtgagcagagccttgttctcattctgtgggccagaaatggacccagagtatggacccagagtttctccccaaagttcttccttggtgggactggcaggcaggactccacaagggcacagggcagggagcttgaactgctggccctaggatgcgtagcccagaaatgagaagaacccttgcctgccctcccaggaaaagtggactccatggaaggggtcaacctggcctgatcctgcccctccatctttctgtctagtcaactgtcccggcccccaactttgccatgcctgtcacggtgcccgtgtccaatcagagctcactgcagttcagcaatcccagcggctccctggtcaccccttccctggtgacatcatccctcacggacccgcggctcctgtccccccagcagccagcactacagaggaacagtgtgtc

SEQ ID NO: 373226 - DNA, 5933 bp, Homo sapiens
agctgtgcctacgtcggcctcgactcccgggggctggaggagttacctttggagcccgaaaggaggaaggaagcaaaatatcaacaacagccgaggcggctcaggcgctcggccccggttccccgcttgcctgccgcccgcctgctggcccccgcgcccacgacgggggcccaggcctcacggcgccgcccagggcccgcgcggacgccggcctcatttattattctccccgcccggagctgcggcttcccggtgttgaagatcccccggaccaggggcgagggctacccgctctttgccgtgacaacaccgttcccccagccgggctggaggctgtgcagaaggtatcctgcagaccatgaactgagcactgttcccagaccgttcatgagcacagtgtaaggtgtgccgagacccaccacccagcgagcccctcccctccgtagcactgaggacccccggagaagatggggaggaaaaagattcagatccagcgaatcaccgacgagcggaaccgacaggtgactttcaccaagcggaagtttggcctgatgaagaaggcgtatgagctgagcgtgctatgtgactgcgagatcgcactcatcatcttcaaccactccaacaagctgttccagtacgccagcaccgacatggacaaggtgctgctcaagtacacggagtacaatgagccacacgagagccgcaccaacgccgacatcatcgagaccctgaggaagaagggcttcaacggctgcgacagccccgagcccgacggggaggactcgctggaacagagccccctgctggaggacaagtaccgacgcgccagcgaggagctcgacgggctcttccggcgctatgggtcaactgtcccggcccccaactttgccatgcctgtcacggtgcccgtgtccaatcagagctcactgcagttcagcaatcccagcggctccctggtcaccccttccctggtgacatcatccctcacggacccgcggctcctgtccccccagcagccagcactacagaggaacagtgtgtctcctggcctgccccagcggccagctagtgcgggggccatgctggggggtgacctgaacagtgctaacggagcctgccccagccctgttgggaatggctacgtcagtgctcgggcttcccctggcctcctccctgtggccaatggcaacagcctaaacaaggtcatccctgccaagtctccgcccccacctacccacagcacccagcttggagcccccagccgcaagcccgacctgcgagtcatcacttcccaggcaggaaaggggttaatgcatcacttgaacaatgcccagcgccttggggtctcccagtctactcattcgctcaccaccccagtggtttctgtggcaacgccgagtttactcagccagggcctccccttctcttccatgcccactgcctacaacacagattaccagttgaccagtgcagagctctcctccttaccagcctttagttcacctggggggctgtcgctaggcaatgtcactgcctggcaacagccacagcagccccagcagccgcagcagccacagcctccacagcagcagccaccgcagccacagcagccacagccacagcagcctcagcagccgcaacagccacctcagcaacagtcccacctggtccctgtatctctcagcaacctcatcccgggcagccccctgccccacgtgggtgctgccctcacagtcaccacccacccccacatcagcatcaagtcagaaccggtgtccccaagccgtgagcgcagccctgcgcctccccctccagctgtgttcccagctgcccgccctgagcctggcgatggtctcagcagcccagccgggggatcctatgagacgggagaccgggatgacggacggggggacttcgggcccacactgggcctgctgcgcccagccccagagcctgaggctgagggctcagctgtgaagaggatgcggcttgatacctggacattaaagtgacgattcccactcccctcctctcagcctccctgatgaagagttgacaatctcaccgcccgcccttccctgccccgggctcctcccgctcgacccccacttcctttcttgtgcttcgtgtcctgttgacggttacatttgtgtataattattatattattattattattattatattttttttaatttggattctcgctttggagagggggatgctctcatcccctctttctgtaccccccaccattttcactggctggggggctctctttttcgcgggaaggggggacactttgcacgttgtacacatatgctgcaggaagggggtggggggcccaataaggcctttgggaaaggacaggtgccgagccctgcatgtggagccctcccaccccacccccagatagagggaaataaccaaaaaactaccaaacaacagaaacccacactctagactgaaaccccaaagtgggcttgatgggtgggtttgtgtttcaaggggaaagtgaggcagaggttctgaaaagggtctctgtttttgtgttcatgtagccataggcacatggagcagaatacttaagcctggcccccaaatgcccctgcacacacacgtgccacacctgcgctgattcttgtgtgtgctgcacccccaaggtgtgtgggtgctggctgagctttgggccgggaaggcagcctgggaatctgaggctggagacaggggtttgaggtgggggcctctctggaagcacatttggagggaaagacaagagagccatgaggagagggctgaggagggcagaagggctaggcagggggcaaattgagcccctcccttccccagtttttctctaagatatacagtgcaatagctccccacccctcagttgacgccagccctgtaaagctggccacagtgtgcagggagaatggggagagggtcttcagtgaggtggctggggcgagagtcggcctggacttccctggggtgctccaggccagagctctttcattggggcgagtgtggtgaggggacgtccttggtcttgcacgcacactacctgggggagtcaacactgggatggtctgtggggtgggagggcctacggatgggtccgtagaggtcccacctccctcattcctccttggcccctctccctagcttctcctgttagctccttctgctcctgaccccacctccttgctcttggcgcccctattgtctctggctacctccttgtcccaccacctccaggctgcatcccaccttccctcttggctactgtaattgtaaatagcgacctttggaaaacgttagcggtgtaacagtccaggaaactgtttttttttgttgttgttgtattgatatgaaatgagattctatttttgtcaaagtatattgtaataataatgactcaaacggcccgtactgtacagacgagattcttctgctgttgttcttgctcccctcccctcctctgagtccgcccctccctgctgcctcctcagtggggcagtgggcaaggggcccaggggcagccgaagcacggggtcctgagacctcaggcaggattggagatcaaaccagagggggcaggcccccagcctgctctctaggatcaccccccgccctaaggggcctggcctggggtgacgtggccaggcagactgtctgccccactccttcacacaagcccagctcctctgcccaaggggtgcggcgcccccttggggtttcctcccagttggagagtagagttaagacaaggcccagttttgtgttagccgaccgtctttgcccacctctatgacccagcctcttgcagtattcccatacttgatgcagggaaggaaccagaagcagaggggcctctacgcaggtacacacgtgtacctgagtgtgttcatgagggcatctggtgtttatgtgtctgagtgtagctttgtatttatgtgtgtgtgtgtgtgtatgtctgattgcacgggtgtacttttgtatttatgtgtgtgtgtggttgcacgggtgtgcctctgtgtgtctctgaccctggctgggtgtgtgtgcaaatctgtgtgactggagctctaggggcatctctgtgtctgagtgtgcctggtgtgtgtttacaaagggagagttggctgctccagctccacagccctgggaccccaactcctgtcttccctgctcctttccctgtgttcaccctcagctctgacacattgaactgcagttggggggattggcagttagccctctgtgcttctccctgcagccctacctctgccaaggtctctccctccagggacctctgcttccacccacatatgtccacttagtcacccacacttgacacagttcctggagtaccctcttcccccaaccccagacctgctttcagagcaaaactcaagtccctcttcctccgtgaagcttctccctcagctgagcagtgatcacttactcactcttaaccccaatccgctgactgggtggggacagcacgtccagccttcccacctctcctgcaggcttctagacggagtttcaaaaactgatgagcctcgatccagggcttgaaagaagccagggtgtaatcttgttcatgcatgcgtccccagagcctcgcccagtgcctggcacatagtaggcactcaataaatgctgaatgggtgaatagttgaatgataggtgctcaataaatgaatgaatggccttcccttctcaggctattcccaacattagtctgcccacctttctaggctgggcttggccaccattaaacacggggtgggggtgagggcccctgcaattcacggtgcaatattcaccagttttgccctctgcctcataaaggcaaacctggcttttgattaccatgtgtggatgtttcagtgtcctttcttctctgtccctggggatggggtggtctgtgaatatgtgacatttctgcagttcagtatccgaaggtttctcttgggggtaggggctcctgggcggccagatgaatgggtccctgggaacccagacctcagatgaggacttaatgtcttcttcctctcaagccaaattcgcctccacccactccctctgaagaactgggcatttgccaaagtaaccactggagtcatctaatggccctccccctccccaggtttcccacagctttcagggacagtgggcaagaggacacccccccccaccacctcagtggaacacaccattctccccccctcaacagcacactcagtgcagcaagactgacccctgaccccctcccagccctccctaccttggacaggaaggaagtaatgcaccttctcttgctgattatttatttgtttggagagacagaaatgtaaaagtgtatctagaaatatctatatctctatatatttttaactgactctttggaatcccctggggtggggtgaggggtaagtttaggctttcgcggaggggaggagacatggagcctgggaactccttgttctcccctctgctgcctctccccaccccttaaagcagttggtagaaggaatggtatttgtatggggggagggaggctggaatggagaatctggattctctcctcttccccattctccagagggagggaggtggtgaggaagaggaagggaggggcaggatgggccatggaggtgccccacccccacacctgacaatcacccacactcctggggctcttcctgggtcctggggcagggcgagtccaagtgtgaggctgttgatttgttttcaatatttcttttcgtgctgtatggtgatgctttcttagtattctacacaataagaaaagacaaagtcctcgagattcttatgagttttgtttgaaaactctttcactatatttgttgtaaagaggtttactattaaaagaaaaagaatacacgtttctgatactt

SEQ ID NO: 373227 - DNA, 5528 bp, Homo sapiens
agctgtgcctacgtcggcctcgactcccgggggctggaggagttacctttggagcccgaaaggaggaaggaagcaaaatatcaacaacagccgaggcggctcaggcgctcggccccggttccccgcttgcctgccgcccgcctgctggcccccgcgcccacgacgggggcccaggcctcacggcgccgcccagggcccgcgcggacgccggcctcatttattattctccccgcccggagctgcggcttcccggtgttgaagatcccccggaccaggggcgagggctacccgctctttgccgtgacaacaccgttcccccagccgggctggaggctgtgcagaaggtatcctgcagaccatgaactgagcactgttcccagaccgttcatgagcacagtgtaaggtgtgccgagacccaccacccagcgagcccctcccctccgtagcactgaggacccccggagaagatggggaggaaaaagattcagatccagcgaatcaccgacgagcggaaccgacaggtgactttcaccaagcggaagtttggcctgatgaagaaggcgtatgagctgagcgtgctatgtgactgcgagatcgcactcatcatcttcaaccactccaacaagctgttccagtacgccagcaccgacatggacaaggtgctgctcaagtacacggagtacaatgagccacacgagagccgcaccaacgccgacatcatcgagaccctgaggaagaagggcttcaacggctgcgacagccccgagcccgacggggaggactcgctggaacagagccccctgctggaggacaagtaccgacgcgccagcgaggagctcgacgggctcttccggcgctatgggtcaactgtcccggcccccaactttgccatgcctgtcacggtgcccgtgtccaatcagagctcactgcagttcagcaatcccagcggctccctggtcaccccttccctggtgacatcatccctcacggacccgcggctcctgtccccccagcagccagcactacagaggaacagtgtgtctcctggcctgccccagcggccagctagtgcgggggccatgctggggggtgacctgaacagtgctaacggagcctgccccagccctgttgggaatggctacgtcagtgctcgggcttcccctggcctcctccctgtggccaatggcaacagcctaaacaaggtcatccctgccaagtctccgcccccacctacccacagcacccagcttggagcccccagccgcaagcccgacctgcgagtcatcacttcccaggcaggaaaggggttaatgcatcacttgactgaggaccatttagatctgaacaatgcccagcgccttggggtctcccagtctactcattcgctcaccaccccagtggtttctgtggcaacgccgagtttactcagccagggcctccccttctcttccatgcccactgcctacaacacagattaccagttgaccagtgcagagctctcctccttaccagcctttagttcacctggggggctgtcgctaggcaatgtcactgcctggcaacagccacagcagccccagcagccgcagcagccacagcctccacagcagcagccaccgcagccacagcagccacagccacagcagcctcagcagccgcaacagccacctcagcaacagtcccacctggtccctgtatctctcagcaacctcatcccgggcagccccctgccccacgtgggtgctgccctcacagtcaccacccacccccacatcagcatcaagtcagaaccggtgtccccaagccgtgagcgcagccctgcgcctccccctccagctgtgttcccagctgcccgccctgagcctggcgatggtctcagcagcccagccgggggatcctatgagacgggagaccgggatgacggacggggggacttcgggcccacactgggcctgctgcgcccagccccagagcctgaggctgagggctcagctgtgaagaggatgcggcttgatacctggacattaaagtgacgattcccactcccctcctctcagcctccctgatgaagagttgacaatctcaccgcccgcccttccctgccccgggctcctcccgctcgacccccacttcctttcttgtgcttcgtgtcctgttgacggttacatttgtgtataattattatattattattattattattatattttttttaatttggattctcgctttggagagggggatgctctcatcccctctttctgtaccccccaccattttcactggctggggggctctctttttcgcgggaaggggggacactttgcacgttgtacacatatgctgcaggaagggggtggggggcccaataaggcctttgggaaaggacaggtgccgagccctgcatgtggagccctcccaccccacccccagatagagggaaataaccaaaaaactaccaaacaacagaaacccacactctagactgaaaccccaaagtgggcttgatgggtgggtttgtgtttcaaggggaaagtgaggcagaggttctgaaaagggtctctgtttttgtgttcatgtagccataggcacatggagcagaatacttaagcctggcccccaaatgcccctgcacacacacgtgccacacctgcgctgattcttgtgtgtgctgcacccccaaggtgtgtgggtgctggctgagctttgggccgggaaggcagcctgggaatctgaggctggagacaggggtttgaggtgggggcctctctgttagctccttctgctcctgaccccacctccttgctcttggcgcccctattgtctctggctacctccttgtcccaccacctccaggctgcatcccaccttccctcttggctactgtaattgtaaatagcgacctttggaaaacgttagcggtgtaacagtccaggaaactgtttttttttgttgttgttgtattgatatgaaatgagattctatttttgtcaaagtatattgtaataataatgactcaaacggcccgtactgtacagacgagattcttctgctgttgttcttgctcccctcccctcctctgagtccgcccctccctgctgcctcctcagtggggcagtgggcaaggggcccaggggcagccgaagcacggggtcctgagacctcaggcaggattggagatcaaaccagagggggcaggcccccagcctgctctctaggatcaccccccgccctaaggggcctggcctggggtgacgtggccaggcagactgtctgccccactccttcacacaagcccagctcctctgcccaaggggtgcggcgcccccttggggtttcctcccagttggagagtagagttaagacaaggcccagttttgtgttagccgaccgtctttgcccacctctatgacccagcctcttgcagtattcccatacttgatgcagggaaggaaccagaagcagaggggcctctacgcaggtacacacgtgtacctgagtgtgttcatgagggcatctggtgtttatgtgtctgagtgtagctttgtatttatgtgtgtgtgtgtgtgtatgtctgattgcacgggtgtacttttgtatttatgtgtgtgtgtggttgcacgggtgtgcctctgtgtgtctctgaccctggctgggtgtgtgtgcaaatctgtgtgactggagctctaggggcatctctgtgtctgagtgtgcctggtgtgtgtttacaaagggagagttggctgctccagctccacagccctgggaccccaactcctgtcttccctgctcctttccctgtgttcaccctcagctctgacacattgaactgcagttggggggattggcagttagccctctgtgcttctccctgcagccctacctctgccaaggtctctccctccagggacctctgcttccacccacatatgtccacttagtcacccacacttgacacagttcctggagtaccctcttcccccaaccccagacctgctttcagagcaaaactcaagtccctcttcctccgtgaagcttctccctcagctgagcagtgatcacttactcactcttaaccccaatccgctgactgggtggggacagcacgtccagccttcccacctctcctgcaggcttctagacggagtttcaaaaactgatgagcctcgatccagggcttgaaagaagccagggtgtaatcttgttcatgcatgcgtccccagagcctcgcccagtgcctggcacatagtaggcactcaataaatgctgaatgggtgaatagttgaatgataggtgctcaataaatgaatgaatggccttcccttctcaggctattcccaacattagtctgcccacctttctaggctgggcttggccaccattaaacacggggtgggggtgagggcccctgcaattcacggtgcaatattcaccagttttgccctctgcctcataaaggcaaacctggcttttgattaccatgtgtggatgtttcagtgtcctttcttctctgtccctggggatggggtggtctgtgaatatgtgacatttctgcagttcagtatccgaaggtttctcttgggggtaggggctcctgggcggccagatgaatgggtccctgggaacccagacctcagatgaggacttaatgtcttcttcctctcaagccaaattcgcctccacccactccctctgaagaactgggcatttgccaaagtaaccactggagtcatctaatggccctccccctccccaggtttcccacagctttcagggacagtgggcaagaggacacccccccccaccacctcagtggaacacaccattctccccccctcaacagcacactcagtgcagcaagactgacccctgaccccctcccagccctccctaccttggacaggaaggaagtaatgcaccttctcttgctgattatttatttgtttggagagacagaaatgtaaaagtgtatctagaaatatctatatctctatatatttttaactgactctttggaatcccctggggtggggtgaggggtaagtttaggctttcgcggaggggaggagacatggagcctgggaactccttgttctcccctctgctgcctctccccaccccttaaagcagttggtagaaggaatggtatttgtatggggggagggaggctggaatggagaatctggattctctcctcttccccattctccagagggagggaggtggtgaggaagaggaagggaggggcaggatgggccatggaggtgccccacccccacacctgacaatcacccacactcctggggctcttcctgggtcctggggcagggcgagtccaagtgtgaggctgttgatttgttttcaatatttcttttcgtgctgtatggtgatgctttcttagtattctacacaataagaaaagacaaagtcctcgagattcttatgagttttgtttgaaaactctttcactatatttgttgtaaagaggtttactattaaaagaaaaagaatacacgtttctgatactt

SEQ ID NO: 373228 - DNA, 5856 bp, Homo sapiens
agctgtgcctacgtcggcctcgactcccgggggctggaggagttacctttggagcccgaaaggaggaaggaagcaaaatatcaacaacagccgaggcggctcaggcgctcggccccggttccccgcttgcctgccgcccgcctgctggcccccgcgcccacgacgggggcccaggcctcacggcgccgcccagggcccgcgcggacgccggcctcatttattattctccccgcccggagctgcggcttcccggtgttgaagatcccccggaccaggggcgagggctacccgctctttgccgtgacaacaccgttcccccagccgggctggaggctgtgcagaaggtatcctgcagaccatgaactgagcactgttcccagaccgttcatgagcacagtgtaaggtgtgccgagacccaccacccagcgagcccctcccctccgtagcactgaggacccccggagaagatggggaggaaaaagattcagatccagcgaatcaccgacgagcggaaccgacaggtgactttcaccaagcggaagtttggcctgatgaagaaggcgtatgagctgagcgtgctatgtgactgcgagatcgcactcatcatcttcaaccactccaacaagctgttccagtacgccagcaccgacatggacaaggtgctgctcaagtacacggagtacaatgagccacacgagagccgcaccaacgccgacatcatcgagaccctgaggaagaagggcttcaacggctgcgacagccccgagcccgacggggaggactcgctggaacagagccccctgctggaggacaagtaccgacgcgccagcgaggagctcgacgggctcttccggcgctatgggtcaactgtcccggcccccaactttgccatgcctgtcacggtgcccgtgtccaatcagagctcactgcagttcagcaatcccagcggctccctggtcaccccttccctggtgacatcatccctcacggacccgcggctcctgtccccccagcagccagcactacagaggaacagtgtgtctcctggcctgccccagcggccagctagtgcgggggccatgctggggggtgacctgaacagtgctaacggagcctgccccagccctgttgggaatggctacgtcagtgctcgggcttcccctggcctcctccctgtggccaatggcaacagcctaaacaaggtcatccctgccaagtctccgcccccacctacccacagcacccagcttggagcccccagccgcaagcccgacctgcgagtcatcacttcccaggcaggaaaggggttaatgcatcacttgactgaggaccatttagatctgaacaatgcccagcgccttggggtctcccagtctactcattcgctcaccaccccagtggtttctgtggcaacgccgagtttactcagccagggcctccccttctcttccatgcccactgcctacaacacagattaccagttgaccagtgcagagctctcctccttaccagcctttagttcacctggggggctgtcgctaggcaatgtcactgcctggcaacagccacagcagccccagcagccgcagcagccacagcctccacagcagcagccaccgcagccacagcagccacagccacagcagcctcagcagccgcaacagccacctcagcaacagtcccacctggtccctgtatctctcagcaacctcatcccgggcagccccctgccccacgtgggtgctgccctcacagtcaccacccacccccacatcagcatcaagtcagaaccggtgtccccaagccgtgagcgcagccctgcgcctccccctccagctgtgttcccagctgcccgccctgagcctggcgatggtctcagcagcccagccgggggatcctatgagacgggagaccgggatgacggacggggggacttcgggcccacactgggcctgctgcgcccagccccagagcctgaggctgagggctcagctgtgaagaggatgcggcttgatacctggacattaaagtgacgattcccactcccctcctctcagcctccctgatgaagagttgacaatctcaccgcccgcccttccctgccccgggctcctcccgctcgacccccacttcctttcttgtgcttcgtgtcctgttgacggttacatttgtgtataattattatattattattattattattatattttttttaatttggattctcgctttggagagggggatgctctcatcccctctttctgtaccccccaccattttcactggctggggggctctctttttcgcgggaaggggggacactttgcacgttgtacacatatgctgcaggaagggggtggggggcccaataaggcctttgggaaaggacaggtgccgagccctgcatgtggagccctcccaccccacccccagatagagggaaataaccaaaaaactaccaaacaacagaaacccacactctagactgaaaccccaaagtgggcttgatgggtgggtttgtgtttcaaggggaaagtgaggcagaggttctgaaaagggtctctgtttttgtgttcatgtagccataggcacatggagcagaatacttaagcctggcccccaaatgcccctgcacacacacgtgccacacctgcgctgattcttgtgtgtgctgcacccccaaggtgtgtgggtgctggctgagctttgggccgggaaggcagcctgggaatctgaggctggagacaggggtttgaggtgggggcctctctggaagcacatttggagggaaagacaagagagccatgaggagagggctgaggagggcagaagggctaggcagggggcaaattgagcccctcccttccccagtttttctctaagatatacagtgcaatagctccccacccctcagttgacgccagccctgtaaagctggccacagtgtgcagggagaatggggagagggtcttcagtgaggtggctggggcgagagtcggcctggacttccctggggtgctccaggccagagctctttcattggggcgagtgtggtgaggggacgtccttggtcttgcacgcacactacctgggggagtcaacactgggatggtctgtggggtgggagggcctacggatgggtccgtagaggtcccacctccctcattcctccttggcccctctccctagcttctcctgttagctccttctgctcctgaccccacctccttgctcttggcgcccctattgtctctggctacctccttgtcccaccacctccaggctgcatcccaccttccctcttggctactgtaattgtaaatagcgacctttggaaaacgttagcggtgtaacagtccaggaaactgtttttttttgttgttgttgtattgatatgaaatgagattctatttttgtcaaagtatattgtaataataatgactcaaacggcccgtactgtacagacgagattcttctgctgttgttcttgctcccctcccctcctctgagtccgcccctccctgctgcctcctcagtggggcagtgggcaaggggcccaggggcagccgaagcacggggtcctgagacctcaggcaggattggagatcaaaccagagggggcaggcccccagcctgctctctaggatcaccccccgccctaaggggcctggcctggggtgacgtggccaggcagactgtctgccccactccttcacacaagcccagctcctctgcccaaggggtgcggcgcccccttggggtttcctcccagttggagagtagagttaagacaaggcccagttttgtgttagccgaccgtctttgcccacctctatgacccagcctcttgcagtattcccatacttgatgcagggaaggaaccagaagcagaggggcctctacgcaggtacacacgtgtacctgagtgtgttcatgagggcatctggtgtttatgtgtctgagtgtagctttgtatttatgtgtgtgtgtgtgtgtatgtctgattgcacgggtgtacttttgtatttatgtgtgtgtgtggttgcacgggtgtgcctctgtgtgtctctgaccctggctgggtgtgtgtgcaaatctgtgtgactggagctctaggggcatctctgtgtctgagtgtgcctggtgtgtgtttacaaagggagagttggctgctccagctccacagccctgggaccccaactcctgtcttccctgctcctttccctgtgttcaccctcagctctgacacattgaactgcagttggggggattggcagttagccctctgtgcttctccctgcagccctacctctgccaaggtctctccctccagggacctctgcttccacccacatatgtccacttagtcacccacacttgacacagttcctggagtaccctcttcccccaaccccagacctgctttcagagcaaaactcaagtccctcttcctccgtgaagcttctccctcagctgagcagtgatcacttactcactcttaaccccaatccgctgactgggtggggacagcacgtccagccttcccacctctcctgcaggcttctagacggagtttcaaaaactgatgagcctcgatccagggcttgaaagaagccagggtgtaatcttgttcatgcatgcgtccccagagcctcgcccagtgcctggcacatagtaggcactcaataaatgctgaatgggtgaatagttgaatgataggtgctcaataaatgaatgaatggccttcccttctcaggctattcccaacattagtctgcccacctttctaggctgggcttggccaccattaaacacggggtgggggtgagggcccctgcaattcacggtgcaatattcaccagttttgccctctgcctcataaaggcaaacctggcttttgattaccatgtgtggatgtttcagtgtcctttcttctctgtccctggggatggggtggtctgtgaatatgtgacatttctgcagttcagtatccgaaggtttctcttgggggtaggggctcctgggcggccagatgaatgggtccctgggaacccagacctcagatgaggacttaatgtcttcttcctctcaagccaaattcgcctccacccactccctctgaagaactgggcatttgccaaagtaaccactggagtcatctaatggccctccccctccccaggtttcccacagctttcagggacagtgggcaagaggacacccccccccaccacctcagtggaacacaccattctccccccctcaacagcacactcagtgcagcaagactgacccctgaccccctcccagccctccctaccttggacaggaaggaagtaatgcaccttctcttgctgattatttatttgtttggagagacagaaatgtaaaagtgtatctagaaatatctatatctctatatatttttaactgactctttggaatccccttaaagcagttggtagaaggaatggtatttgtatggggggagggaggctggaatggagaatctggattctctcctcttccccattctccagagggagggaggtggtgaggaagaggaagggaggggcaggatgggccatggaggtgccccacccccacacctgacaatcacccacactcctggggctcttcctgggtcctggggcagggcgagtccaagtgtgaggctgttgatttgttttcaatatttcttttcgtgctgtatggtgatgctttcttagtattctacacaataagaaaagacaaagtcctcgagattcttatgagttttgtttgaaaactctttcactatatttgttgtaaagaggtttactattaaaagaaaaagaatacacgtttctgatactt

SEQ ID NO: 373229 - DNA, 5633 bp, Homo sapiens
agctgtgcctacgtcggcctcgactcccgggggctggaggagttacctttggagcccgaaaggaggaaggaagcaaaatatcaacaacagccgaggcggctcaggcgctcggccccggttccccgcttgcctgccgcccgcctgctggcccccgcgcccacgacgggggcccaggcctcacggcgccgcccagggcccgcgcggacgccggcctcatttattattctccccgcccggagctgcggcttcccggtgttgaagatcccccggaccaggggcgagggctacccgctctttgccgtgacaacaccgttcccccagccgggctggaggctgtgcagaaggtatcctgcagaccatgaactgagcactgttcccagaccgttcatgagcacagtgtaaggtgtgccgagacccaccacccagcgagcccctcccctccgtagcactgaggacccccggagaagatggggaggaaaaagattcagatccagcgaatcaccgacgagcggaaccgacaggtgactttcaccaagcggaagtttggcctgatgaagaaggcgtatgagctgagcgtgctatgtgactgcgagatcgcactcatcatcttcaaccactccaacaagctgttccagtacgccagcaccgacatggacaaggtgctgctcaagtacacggagtacaatgagccacacgagagccgcaccaacgccgacatcatcgagaccctgaggaagaagggcttcaacggctgcgacagccccgagcccgacggggaggactcgctggaacagagccccctgctggaggacaagtaccgacgcgccagcgaggagctcgacgggctcttccggcgctatgggtcaactgtcccggcccccaactttgccatgcctgtcacggtgcccgtgtccaatcagagctcactgcagttcagcaatcccagcggctccctggtcaccccttccctggtgacatcatccctcacggacccgcggctcctgtccccccagcagccagcactacagaggaacagtgtgtctcctggcctgccccagcggccagctagtgcgggggccatgctggggggtgacctgaacagtgctaacggagcctgccccagccctgttgggaatggctacgtcagtgctcgggcttcccctggcctcctccctgtggccaatggcaacagcctaaacaaggtcatccctgccaagtctccgcccccacctacccacagcacccagcttggagcccccagccgcaagcccgacctgcgagtcatcacttcccaggcaggaaaggggttaatgcatcacttgactgaggaccatttagatctgaacaatgcccagcgccttggggtctcccagtctactcattcgctcaccaccccagtggtttctgtggcaacgccgagtttactcagccagggcctccccttctcttccatgcccactgcctacaacacagattaccagttgaccagtgcagagctctcctccttaccagcctttagttcacctggggggctgtcgctaggcaatgtcactgcctggcaacagccacagcagccccagcagccgcagcagccacagcctccacagcagcagccaccgcagccacagcagccacagccacagcagcctcagcagccgcaacagccacctcagcaacagtcccacctggtccctgtatctctcagcaacctcatcccgggcagccccctgccccacgtgggtgctgccctcacagtcaccacccacccccacatcagcatcaagtcagaaccggtgtccccaagccgtgagcgcagccctgcgcctccccctccagctgtgttcccagctgcccgccctgagcctggcgatggtctcagcagcccagccgggggatcctatgagacgggagaccgggatgacggacggggggacttcgggcccacactgggcctgctgcgcccagccccagagcctgaggctgagggctcagctgtgaagaggatgcggcttgatacctggacattaaagtgacgattcccactcccctcctctcagcctccctgatgaagagttgacaatctcaccgcccgcccttccctgccccgggctcctcccgctcgacccccacttcctttcttgtgcttcgtgtcctgttgacggttacatttgtgtataattattatattattattattattattatattttttttaatttggattctcgctttggagagggggatgctctcatcccctctttctgtaccccccaccattttcactggctggggggctctctttttcgcgggaaggggggacactttgcacgttgtacacatatgctgcaggaagggggtggggggcccaataaggcctttgggaaaggacaggtgccgagccctgcatgtggagccctcccaccccacccccagatagagggaaataaccaaaaaactaccaaacaacagaaacccacactctagactgaaaccccaaagtgggcttgatgggtgggtttgtgtttcaaggggaaagtgaggcagaggttctgaaaagggtctctgtttttgtgttcatgtagccataggcacatggagcagaatacttaagcctggcccccaaatgcccctgcacacacacgtgccacacctgcgctgattcttgtgtgtgctgcacccccaaggtgtgtgggtgctggctgagctttgggccgggaaggcagcctgggaatctgaggctggagacaggggtttgaggtgggggcctctctggaagcacatttggagggaaagacaagagagccatgaggagagggctgaggagggcagaagggctaggcagggggcaaattgagcccctcccttccccagtttttctctaagatatacagtgcaatagctccccacccctcagttgacgccagccctgtaaagctggccacagtgtgcagggagaatggggagagggtcttcagtgaggtggctggggcgagagtcggcctggacttccctggggtgctccaggccagagctctttcattggggcgagtgtggtgaggggacgtccttggtcttgcacgcacactacctgggggagtcaacactgggatggtctgtggggtgggagggcctacggatgggtccgtagaggtcccacctccctcattcctccttggcccctctccctagcttctcctgttagctccttctgctcctgaccccacctccttgctcttggcgcccctattgtctctggctacctccttgtcccaccacctccaggctgcatcccaccttccctcttggctactgtaattgtaaatagcgacctttggaaaacgttagcggtgtaacagtccaggaaactgtttttttttgttgttgttgtattgatatgaaatgagattctatttttgtcaaagtatattgtaataataatgactcaaacggcccgtactgtacagacgagattcttctgctgttgttcttgctcccctcccctcctctgagtccgcccctccctgctgcctcctcagtggggcagtgggcaaggggcccaggggcagccgaagcacggggtcctgagacctcaggcaggattggagatcaaaccagagggggcaggcccccagcctgctctctaggatcaccccccgccctaaggggcctggcctggggtgacgtggccaggcagactgtctgccccactccttcacacaagcccagctcctctgcccaaggggtgcggcgcccccttggggtttcctcccagttggagagtagagttaagacaaggcccagttttgtgttagccgaccgtctttgcccacctctatgacccagcctcttgcagtattcccatacttgatgcagggaaggaaccagaagcagaggggcctctacgcaggtacacacgtgtacctgagtgtgttcatgagggcatctggtgtttatgtgtctgagtgtagctttgtatttatgtgtgtgtgtgtgtgtatgtctgattgcacgggtgtacttttgtatttatgtgtgtgtgtggttgcacgggtgtgcctctgtgtgtctctgaccctggctgggtgtgtgtgcaaatctgtgtgactggagctctaggggcatctctgtgtctgagtgtgcctggtgtgtgtttacaaagggagagttggctgctccagctccacagccctgggaccccaactcctgtcttccctgctcctttccctgtgttcaccctcagctctgacacattgaactgcagttggggggattggcagttagccctctgtgcttctccctgcagccctacctctgccaaggtctctccctccagggacctctgcttccacccacatatgtccacttagtcacccacacttgacacagttcctggagtaccctcttcccccaaccccagacctgctttcagagcaaaactcaagtccctcttcctccgtgaagcttctccctcagctgagcagtgatcacttactcactcttaaccccaatccgctgactgggtggggacagcacgtccagccttcccacctctcctgcaggcttctagacggagtttcaaaaactgatgagcctcgatccagggcttgaaagaagccagggtgtaatcttgttcatgcatgcgtccccagagcctcgcccagtgcctggcacatagtaggcactcaataaatgctgaatgggtgaatagttgaatgataggtgctcaataaatgaatgaatggccttcccttctcaggctattcccaacattagtctgcccacctttctaggctgggcttggccaccattaaacacggggtgggggtgagggcccctgcaattcacggtgcaatattcaccagttttgccctctgcctcataaaggcaaacctggcttttgattaccatgtgtggatgtttcagtgtcctttcttctctgtccctggggatggggtggtctgtgaatatgtgacatttctgcagttcagtatccgaaggtttctcttgggggtaggggctcctgggcggccagatgaatgggtccctgggaacccagacctcagatgaggacttaatgtcttcttcctctcaagccaaattcgcctccacccactccctctgaagaactgggcatttgccaaagtaaccactggagtcatctaatggccctccccctccccaggtttcccacagctttcagggacagtgggcaagaggacacccccccccaccacctcagtggaacacaccattctccccccctcaacagcacactcagtgcagcaagactgacccctgaccccctcccagccctccctaccttggacaggaaggaagtaatgcaccttctcttgctgattatttatttgtttggagagacagaaatgtaaaagtgtatctagaaatatctatatctctatatatttttaactgactctttggaatcccctggggtggggtgaggggtatagtgaacacaacagacctagaaatgtagcaataacctactgaggacctttcatttactgatcatctggtgtgactgcggccctgcctggagggtactacgttttgagatttacagcaatgcattctgtagacagaaccagcaaaacaggcatttttaaattttt

SEQ ID NO: 373230 - DNA, 4965 bp, Homo sapiens
gatggatggagagtgggctccagagagacaggggatggacgatgtctcccttccctcactctgcactgggaggctgggcgagtgttggtgctggggccacagggccagtacacgtgccttcatctttgcacgtgtgttggtgtcagtgaatctgtgtgtgcatgtttccctccatggatctgagtgtctctgtgaatgcaccaacgtgtgtttgtatatctgtgggggcctccgtgctaaggcaccccgccttggctttgggattcaggaaccccaccttggccttgggatggagggccaacataaagctgcccacctgtcagccacctcctgacggacagttttctcctacagaacaatgcccagcgccttggggtctcccagtctactcattcgctcaccaccccagtggtttctgtggcaacgccgagtttactcagccagggcctccccttctcttccatgcccactgcctacaacacagattaccagttgaccagtgcagagctctcctccttaccagcctttagttcacctggggggctgtcgctaggcaatgtcactgcctggcaacagccacagcagccccagcagccgcagcagccacagcctccacagcagcagccaccgcagccacagcagccacagccacagcagcctcagcagccgcaacagccacctcagcaacagtcccacctggtccctgtatctctcagcaacctcatcccgggcagccccctgccccacgtgggtgctgccctcacagtcaccacccacccccacatcagcatcaagtcagaaccggtgtccccaagccgtgagcgcagccctgcgcctccccctccagctgtgttcccagctgcccgccctgagcctggcgatggtctcagcagcccagccgggggatcctatgagacgggagaccgggatgacggacggggggacttcgggcccacactgggcctgctgcgcccagccccagagcctgaggctgagggctcagctgtgaagaggatgcggcttgatacctggacattaaagtgacgattcccactcccctcctctcagcctccctgatgaagagttgacaatctcaccgcccgcccttccctgccccgggctcctcccgctcgacccccacttcctttcttgtgcttcgtgtcctgttgacggttacatttgtgtataattattatattattattattattattatattttttttaatttggattctcgctttggagagggggatgctctcatcccctctttctgtaccccccaccattttcactggctggggggctctctttttcgcgggaaggggggacactttgcacgttgtacacatatgctgcaggaagggggtggggggcccaataaggcctttgggaaaggacaggtgccgagccctgcatgtggagccctcccaccccacccccagatagagggaaataaccaaaaaactaccaaacaacagaaacccacactctagactgaaaccccaaagtgggcttgatgggtgggtttgtgtttcaaggggaaagtgaggcagaggttctgaaaagggtctctgtttttgtgttcatgtagccataggcacatggagcagaatacttaagcctggcccccaaatgcccctgcacacacacgtgccacacctgcgctgattcttgtgtgtgctgcacccccaaggtgtgtgggtgctggctgagctttgggccgggaaggcagcctgggaatctgaggctggagacaggggtttgaggtgggggcctctctggaagcacatttggagggaaagacaagagagccatgaggagagggctgaggagggcagaagggctaggcagggggcaaattgagcccctcccttccccagtttttctctaagatatacagtgcaatagctccccacccctcagttgacgccagccctgtaaagctggccacagtgtgcagggagaatggggagagggtcttcagtgaggtggctggggcgagagtcggcctggacttccctggggtgctccaggccagagctctttcattggggcgagtgtggtgaggggacgtccttggtcttgcacgcacactacctgggggagtcaacactgggatggtctgtggggtgggagggcctacggatgggtccgtagaggtcccacctccctcattcctccttggcccctctccctagcttctcctgttagctccttctgctcctgaccccacctccttgctcttggcgcccctattgtctctggctacctccttgtcccaccacctccaggctgcatcccaccttccctcttggctactgtaattgtaaatagcgacctttggaaaacgttagcggtgtaacagtccaggaaactgtttttttttgttgttgttgtattgatatgaaatgagattctatttttgtcaaagtatattgtaataataatgactcaaacggcccgtactgtacagacgagattcttctgctgttgttcttgctcccctcccctcctctgagtccgcccctccctgctgcctcctcagtggggcagtgggcaaggggcccaggggcagccgaagcacggggtcctgagacctcaggcaggattggagatcaaaccagagggggcaggcccccagcctgctctctaggatcaccccccgccctaaggggcctggcctggggtgacgtggccaggcagactgtctgccccactccttcacacaagcccagctcctctgcccaaggggtgcggcgcccccttggggtttcctcccagttggagagtagagttaagacaaggcccagttttgtgttagccgaccgtctttgcccacctctatgacccagcctcttgcagtattcccatacttgatgcagggaaggaaccagaagcagaggggcctctacgcaggtacacacgtgtacctgagtgtgttcatgagggcatctggtgtttatgtgtctgagtgtagctttgtatttatgtgtgtgtgtgtgtgtatgtctgattgcacgggtgtacttttgtatttatgtgtgtgtgtggttgcacgggtgtgcctctgtgtgtctctgaccctggctgggtgtgtgtgcaaatctgtgtgactggagctctaggggcatctctgtgtctgagtgtgcctggtgtgtgtttacaaagggagagttggctgctccagctccacagccctgggaccccaactcctgtcttccctgctcctttccctgtgttcaccctcagctctgacacattgaactgcagttggggggattggcagttagccctctgtgcttctccctgcagccctacctctgccaaggtctctccctccagggacctctgcttccacccacatatgtccacttagtcacccacacttgacacagttcctggagtaccctcttcccccaaccccagacctgctttcagagcaaaactcaagtccctcttcctccgtgaagcttctccctcagctgagcagtgatcacttactcactcttaaccccaatccgctgactgggtggggacagcacgtccagccttcccacctctcctgcaggcttctagacggagtttcaaaaactgatgagcctcgatccagggcttgaaagaagccagggtgtaatcttgttcatgcatgcgtccccagagcctcgcccagtgcctggcacatagtaggcactcaataaatgctgaatgggtgaatagttgaatgataggtgctcaataaatgaatgaatggccttcccttctcaggctattcccaacattagtctgcccacctttctaggctgggcttggccaccattaaacacggggtgggggtgagggcccctgcaattcacggtgcaatattcaccagttttgccctctgcctcataaaggcaaacctggcttttgattaccatgtgtggatgtttcagtgtcctttcttctctgtccctggggatggggtggtctgtgaatatgtgacatttctgcagttcagtatccgaaggtttctcttgggggtaggggctcctgggcggccagatgaatgggtccctgggaacccagacctcagatgaggacttaatgtcttcttcctctcaagccaaattcgcctccacccactccctctgaagaactgggcatttgccaaagtaaccactggagtcatctaatggccctccccctccccaggtttcccacagctttcagggacagtgggcaagaggacacccccccccaccacctcagtggaacacaccattctccccccctcaacagcacactcagtgcagcaagactgacccctgaccccctcccagccctccctaccttggacaggaaggaagtaatgcaccttctcttgctgattatttatttgtttggagagacagaaatgtaaaagtgtatctagaaatatctatatctctatatatttttaactgactctttggaatcccctggggtggggtgaggggtaagtttaggctttcgcggaggggaggagacatggagcctgggaactccttgttctcccctctgctgcctctccccaccccttaaagcagttggtagaaggaatggtatttgtatggggggagggaggctggaatggagaatctggattctctcctcttccccattctccagagggagggaggtggtgaggaagaggaagggaggggcaggatgggccatggaggtgccccacccccacacctgacaatcacccacactcctggggctcttcctgggtcctggggcagggcgagtccaagtgtgaggctgttgatttgttttcaatatttcttttcgtgctgtatggtgatgctttcttagtattctacacaataagaaaagacaaagtcctcgagattcttatgagttttgtttgaaaactctttcactatatttgttgtaaagaggtttactattaaaagaaaaagaatacacgtttctgatactt

SEQ ID NO: 373231 - DNA, 2531 bp, Homo sapiens
agctgtgcctacgtcggcctcgactcccgggggctggaggagttacctttggagcccgaaaggaggaaggaagcaaaatatcaacaacagccgaggcggctcaggcgctcggccccggttccccgcttgcctgccgcccgcctgctggcccccgcgcccacgacgggggcccaggcctcacggcgccgcccagggcccgcgcggacgccggcctcatttattattctccccgcccggagctgcggcttcccggtgttgaagatcccccggaccaggggcgagggctacccgctctttgccgtgacaacaccgttcccccagccgggctggaggctgtgcagaaggtatcctgcagaccatgaactgagcactgttcccagaccgttcatgagcacagtgtaaggtgtgccgagacccaccacccagcgagcccctcccctccgtagcactgaggacccccggagaagatggggaggaaaaagattcagatccagcgaatcaccgacgagcggaaccgacaggtgactttcaccaagcggaagtttggcctgatgaagaaggcgtatgagctgagcgtgctatgtgactgcgagatcgcactcatcatcttcaaccactccaacaagctgttccagtacgccagcaccgacatggacaaggtgctgctcaagtacacggagtacaatgagccacacgagagccgcaccaacgccgacatcatcgagaccctgaggaagaagggcttcaacggctgcgacagccccgagcccgacggggaggactcgctggaacagagccccctgctggaggacaagtaccgacgcgccagcgaggagctcgacgggctcttccggcgctatgggtcaactgtcccggcccccaactttgccatgcctgtcacggtgcccgtgtccaatcagagctcactgcagttcagcaatcccagcggctccctggtcaccccttccctggtgacatcatccctcacggacccgcggctcctgtccccccagcagccagcactacagaggaacagtgtgtctcctggcctgccccagcggccagctagtgcgggggccatgctggggggtgacctgaacagtgctaacggagcctgccccagccctgttgggaatggctacgtcagtgctcgggcttcccctggcctcctccctgtggccaatggcaacagcctaaacaaggtcatccctgccaagtctccgcccccacctacccacagcacccagcttggagcccccagccgcaagcccgacctgcgagtcatcacttcccaggcaggaaaggggttaatgcatcacttgactgaggaccatttagatctgaacaatgcccagcgccttggggtctcccagtctactcattcgctcaccaccccagtggtttctgtggcaacgccgagtttactcagccagggcctccccttctcttccatgcccactgcctacaacacagattaccagttgaccagtgcagagctctcctccttaccagcctttagttcacctggggggctgtcgctaggcaatgtcactgcctggcaacagccacagcagccccagcagccgcagcagccacagcctccacagcagcagccaccgcagccacagcagccacagccacagcagcctcagcagccgcaacagccacctcagcaacagtcccacctggtccctgtatctctcagcaacctcatcccgggcagccccctgccccacgtgggtgctgccctcacagtcaccacccacccccacatcagcatcaagtcagaaccggtgtccccaagccgtgagcgcagccctgcgcctccccctccagctgtgttcccagctgcccgccctgagcctggcgatggtctcagcagcccagccgggggatcctatgagacgggagaccgggatgacggacggggggacttcgggcccacactgggcctgctgcgcccagccccagagcctgaggctgagggctcagctgtgaagaggatgcggcttgatacctggacattaaagtgacgattcccactcccctcctctcagcctccctgatgaagagttgacaatctcaccgcccgcccttccctgccccgggctcctcccgctcgacccccacttcctttcttgtgcttcgtgtcctgttgacggttacatttgtgtataattattatattattattattattattatattttttttaatttggattctcgctttggagagggggatgctctcatcccctctttctgtaccccccaccattttcactggctggggggctctctttttcgcgggaaggggggacactttgcacgttgtacacatatgctgcaggaagggggtggggttacctcttacctctttaatatatgctcgcttattttcttccatcctctttcctctttctatcttgaggttttcttcattatttttacttactctttatttctctttcctattgtctatctcaccgtttactatattctcttcctttcttcattattttccacgttctc

SEQ ID NO: 373232 - DNA, 2191 bp, Homo sapiens
agctgtgcctacgtcggcctcgactcccgggggctggaggagttacctttggagcccgaaaggaggaaggaagcaaaatatcaacaacagccgaggcggctcaggcgctcggccccggttccccgcttgcctgccgcccgcctgctggcccccgcgcccacgacgggggcccaggcctcacggcgccgcccagggcccgcgcggacgccggcctcatttattattctccccgcccggagctgcggcttcccggtgttgaagatcccccggaccaggggcgagggctacccgctctttgccgtgacaacaccgttcccccagccgggctggaggctgtgcagaaggtatcctgcagaccatgaactgagcactgttcccagaccgttcatgagcacagtgtaaggtgtgccgagacccaccacccagcgagcccctcccctccgtagcactgaggacccccggagaagatggggaggaaaaagattcagatccagcgaatcaccgacgagcggaaccgacaggtgactttcaccaagcggaagtttggcctgatgaagaaggcgtatgagctgagcgtgctatgtgactgcgagatcgcactcatcatcttcaaccactccaacaagctgttccagtacgccagcaccgacatggacaaggtgctgctcaagtacacggagtacaatgagccacacgagagccgcaccaacgccgacatcatcgagaccctgaggaagaagggcttcaacggctgcgacagccccgagcccgacggggaggactcgctggaacagagccccctgctggaggacaagtaccgacgcgccagcgaggagctcgacgggctcttccggcgctatgggtcaactgtcccggcccccaactttgccatgcctgtcacggtgcccgtgtccaatcagagctcactgcagttcagcaatcccagcggctccctggtcaccccttccctggtgacatcatccctcacggacccgcggctcctgtccccccagcagccagcactacagaggaacagtgtgtctcctggcctgccccagcggccagctagtgcgggggccatgctggggggtgacctgaacagtgctaacggagcctgccccagccctgttgggaatggctacgtcagtgctcgggcttcccctggcctcctccctgtggccaatggcaacagcctaaacaaggtcatccctgccaagtctccgcccccacctacccacagcacccagcttggagcccccagccgcaagcccgacctgcgagtcatcacttcccaggcaggaaaggggttaatgcatcacttgactgaggaccatttagatctggtaagtgaggctgtgagctctttgctgtggctttgaattctgggtattgctctgcggtcccccagcatgaagtacgtgtgcgtccttggcctctcgcctgtgcgtgaactgttgctgtttctttgcttagttgccaggagctgtgcttaggtgccaagtgggattcaaaggtgaatggggtgggggtgagaggtcagacgtgtgtgtgtgtgcctgtgtgtacatgaatgtctgcatgtggtattatgttcattcagacacacctttctctgtatgtacgtgtgcgagggggagtgggccagcccagggctcagaggtcccaccctgatgcctggactaggccctggactagggggctggatcccactagtcctctgactccactcaggcccacactgcattcttgggatccaggacaggatccttcttaggagggaggtcagctggaaggagaagctggtgtttcaggggaagccaaggcccaggcccaggctggacttgtccttcttggtggcagcttcccacctcccctgtctccctgtgctccctcctgaacttaagtccatgacacgggcactcagaggcatgcacagctgctcattttcctcctctgtctcacacacttacatactcacccccagccaggagtggggcgggggctcctccctccctaactccctgacgggaggccagagaggctggaaaaggcaggcaggctttggcggccaacacggcggcagtttcggccccagcatggagttggaataaacaagtgactcagcggcagatggagctgacagccccacacacgtgtgtgcatacgcgcaggcacacgccacgccaggccc

SEQ ID NO: 373233 - DNA, 1405 bp, Homo sapiens
agctgtgcctacgtcggcctcgactcccgggggctggaggagttacctttggagcccgaaaggaggaaggaagcaaaatatcaacaacagccgaggcggctcaggcgctcggccccggttccccgcttgcctgccgcccgcctgctggcccccgcgcccacgacgggggcccaggcctcacggcgccgcccagggcccgcgcggacgccggcctcatttattattctccccgcccggagctgcggcttcccggtgttgaagatcccccggaccaggggcgagggctacccgctctttgccgtgacaacaccgttcccccagccgggctggaggctgtgcagaaggtatcctgcagaccatgaactgagcactgttcccagaccgttcatgagcacagtgtaaggtgtgccgagacccaccacccagcgagcccctcccctccgtagcactgaggacccccggagaagatggggaggaaaaagattcagatccagcgaatcaccgacgagcggaaccgacaggtgactttcaccaagcggaagtttggcctgatgaagaaggcgtatgagctgagcgtgctatgtgactgcgagatcgcactcatcatcttcaaccactccaacaagctgttccagtacgccagcaccgacatggacaaggtgctgctcaagtacacggagtacaatgagccacacgagagccgcaccaacgccgacatcatcgagaccctgaggaagaagggcttcaacggctgcgacagccccgagcccgacggggaggactcgctggaacagagccccctgctggaggacaagtaccgacgcgccagcgaggagctcgacgggctcttccggcgctatgggtcaactgtcccggcccccaactttgccatgcctgtcacggtgcccgtgtccaatcagagctcactgcagttcagcaatcccagcggctccctggtcaccccttccctggtgacatcatccctcacggacccgcggctcctgtccccccagcagccagcactacagaggaacagtgtgtctcctggcctgccccagcggccagctagtgcgggggccatgctggggggtgacctgaacagtgctaacggagcctgccccagccctgttgggaatggctacgtcagtgctcgggcttcccctggcctcctccctgtggccaatggcaacagcctaaacaaggtcatccctgccaagtctccgcccccacctacccacagcacccagcttggagcccccagccgcaagcccgacctgcgagtcatcacttcccaggcaggaaaggggttaatgcatcacttggtaagtgggtgtctgggccaagggtgggggctggggaatggaagagtagggacaggggaaagagcagacctctagcaggagag

SEQ ID NO: 373234 - DNA, 706 bp, Homo sapiens
cagcagtcattttctagactgaaataatgtcttcctgaaagcggacagacccaccacccagcgagcccctcccctccgtagcactgaggacccccggagaagatggggaggaaaaagattcagatccagcgaatcaccgacgagcggaaccgacaggtgactttcaccaagcggaagtttggcctgatgaagaaggcgtatgagctgagcgtgctatgtgactgcgagatcgcactcatcatcttcaaccactccaacaagctgttccagtacgccagcaccgacatggacaaggtgctgctcaagtacacggagtacaatgagccacacgagagccgcaccaacgccgacatcatcgaggtgggcccatacacacaggcaccaggatatacccccgcctgcatccacatggacacgtgcccacgttgcatgtacacgcagacctgcctatgcacacacactggtatacatgccccttgtagcccctcacctgtgcgcacacacatgcaaaccctccttctgtcatacaaacccagggtctgaggaggaaggaagggcagttcaagtgaacaggccagtgccaggctgccagcccacacccaccctgccctcacaggcagggtgcctgccaccaagcagtcagacagggggtaaccaagagctcccagccagaaaaacatggggcagggagccaaacaaaagcact

SEQ ID NO: 373235 - DNA, 2533 bp, Homo sapiens
acagcctgtccctgcgctgcgcctccaggctggaccagcggagttccaggcggcatggaggggccccggagctccacccatgtccccttggtgctgccgcttcttgtacttctgctgctggccccggctaggcaggccgccgcccagcgctgcccacaggcctgcatctgtgacaactccaggcgacacgttgcctgccggtaccagaacctcactgaggtgccagacgccatccctgagctgacccagcggctggacctgcagggcaatttgctgaaggtgatccccgcagccgccttccagggcgtgcctcacctcacacacctggacctgcgccactgcgaggtggagctggtggccgagggcgccttccgtggcctgggccgcctgctcctgctcaacctggcctccaaccacctgcgtgagctgccccaggaggcgctggacgggctgggctcgttgcggcggctggagctggaggggaacgcactggaggagctgcggccggggacgttcggggcactgggtgcgctggccacgctaaacctggcccacaacgccctggtttacctgcccgccatggccttccaggggctactgcgcgtccgctggctgcggctgtcgcacaacgcgctcagcgtgctggcccccgaggccctggctggcctgcccgccctgagacggctcagcctacaccacaacgagctccaggctctgcccgggcctgtcttgtcccaggcccgcggcctggcccgtctggagctgggccacaacccgctcacctacgcgggcgaggaggacgggctggcgctgcccggcctgcgggagctgctgctggacggcggggccctgcaggccctgggtcccagggccttcgcacactgtccgcgcctgcacaccctcgacctccgcgggaaccagctagacaccctgcccccgctgcagggcccgggccagctgcgccggctgcggctgcaggggaatccgctgtggtgcggctgccaggcgcggcccctactcgagtggctggcgcgggcgcgcgtgcgctcggacggcgcgtgccagggccgcggcgcctgcggggcgaggctctggacgccctgcggccctgggacctgcgctgccctggggacgcggcgcaggaagaggaagagctggaagagcgggctgtggccgggccccgcgcccctccgcgcggccctccgcgcggccccggggaggagcgggcagtcgcgccttgccctcgcgcctgcgtgtgcgtccccgagtcccggcacagcagctgcgagggctgcggcctgcaggcggtgccccgcggcttccccagcgacacccagctcctggacctgaggcggaaccacttcccctcggtgccccgagcggccttccccggcctgggccacctggtgtcgctgcacctgcagcactgcggcatcgcggagctggaagcgggcgccctggccgggctgggccgcctgatctacctgtacctctccgacaaccagctcgcaggcctcagcgctgctgcccttgaaggggctccccgcctcggctacctgtacctagaacgcaaccgtttcctgcaggtgccaggggctgccctgcgcgccctgcccagcctcttctccctgcacctgcaggacaacgctgtggaccgcctggcacctggggacctggggagaacacgggccttgcgctgggtctacctgagtggaaaccgcatcaccgaagtgtcccttggggcgctgggcccagctcgggagctggagaagctgcacctggacaggaatcagctgcgagaggtgcccactggggccttggaggggctgcctgccctcctggagctgcagctctcgggcaacccactcagggccttgcgtgacggagccttccagcctgtgggcaggtcgctgcagcacctcttcctgaacagcagtggcctggagcagatttgtcctggggccttttcaggcctggggcccgggctccagagcctgcacctgcagaagaaccagcttcgggccctgcctgccctgcccagtctcagccagctggagctcatcgacctcagcagcaatcccttccactgtgactgccagctgcttccgctgcacaggtggcttactgggctgaacctgcgggtgggggccacctgcgccacccctcccaatgcccgtggccagagggtgaaggctgcagctgctgtctttgaagactgcccgggctgggctgccagaaaggccaagcggacaccagcctccaggcccagtgccaggagaacccccatcaaaggaagacagtgtggagcagataaggtggggaaggagaagggtcgtctctgagcacggagcaggctggtcctgccttgacccagcccggtggctcttactctcgccaggaacaggctccgacgagatcttcctggcaccctgagggtcgtcctccagcaggggcttcttggacccctgtctgaggggtcgcgtcttagtgggcgggattcttttccctttgaataaaaatggattcaaaccca

SEQ ID NO: 373236 - DNA, 1012 bp, Homo sapiens
acagcctgtccctgcgctgcgcctccaggctggaccagcggagttccaggcggcatggaggggtgagtctttgggcccgatggtgcaaggggggattcagagcagctcagtggcctcaggacaacgctgtggaccgcctggcacctggggacctggggagaacacgggccttgcgctgggtctacctgagtggaaaccgcatcaccgaagtgtcccttggggcgctgggcccagctcgggagctggagaagctgcacctggacaggaatcagctgcgagaggtgcccactggggccttggaggggctgcctgccctcctggagctgcagctctcgggcaacccactcagggccttgcgtgacggagccttccagcctgtgggcaggtcgctgcagcacctcttcctgaacagcagtggcctggagcagatttgtcctggggccttttcaggcctggggcccgggctccagagcctgcacctgcagaagaaccagcttcgggccctgcctgccctgcccagtctcagccagctggagctcatcgacctcagcagcaatcccttccactgtgactgccagctgcttccgctgcacaggtggcttactgggctgaacctgcgggtgggggccacctgcgccacccctcccaatgcccgtggccagagggtgaaggctgcagctgctgtctttgaagactgcccgggctgggctgccagaaaggccaagcggacaccagcctccaggcccagtgccaggagaacccccatcaaaggaagacagtgtggagcagataaggtggggaaggagaagggtcgtctctgagcacggagcaggctggtcctgccttgacccagcccggtggctcttactctcgccaggaacaggctccgacgagatcttcctggcaccctgagggtcgtcctccagcaggggcttcttggacccctgtctgaggggtcgcgtcttagtgggcgggattcttttccctttgaataaaaatggattcaaaccca

SEQ ID NO: 373237 - DNA, 770 bp, Homo sapiens
ccctgggaacaagtccttggtccctggggcctggtgtcttgagtgagaggctgtaattaggaaaccacacgctcagggcagacagctcttggggactctgccgttagccccttccttacaaacacatcacctcatccctcggggcacttgatagcagacaagaagttccagaaaggcttacatttactaaaagtttatttcaaatctgcctccaagtccatgtgttctgaaaaggacagagggggccttggagtgcagccagatggaaggactttgaaggctgtccaagtgctgctttcagagtgcaccaagtttttattgtccctgactgtggctccctgcctgtttgtcaggcgggagcctggagcctgcacagggacagagctggtttcatccggcactccctagccctggacaccctccttgtctcgcctgccctcctgcaggccttcactctcccctgaggctgtcctggcccggactgtggggagcacctccaccccccggagcaggtgcacacccagggatgccctggacctaagtgacatcaactcagagcctcctcggggctccttcccctcctttgagcctcggaacctcctcagcctgtttgaggacaccctagacccaacctgagccccagactctgcctctgcacttttaaccttttatcctgtgtctctcccgtcgcccttgaaagctggggcccctcgggaactcccatggtcttctctgcctggccgtgtctaataaaaagtatttgaaccttg

SEQ ID NO: 373238 - DNA, 843 bp, Homo sapiens
ccctgggaacaagtccttggtccctggggcctggtgtcttgagtgagaggctgtaattaggaaaccacacgctcagggcagacagctcttggggactctgccgttagccccttccttacaaacacatcacctcatccctcggggcacttgatagcagacaagaagttccagaaaggcttacatttactaaaagtttatttcaaatctgcctccaagtccatgtgttctgaaaaggacagagggggccttggagtgcagccagatggaaggactttgaaggctgtccaagtgctgctttcagagtgcaccaagtttttattgtccctgactgtggctccctgcctgtttgtcaggcgggagcctggagcctgcacagggacagagctggtttcatccggcactccctagccctggacaccctccttgtctcgcctgccctcctgcaggccttcactctcccctgaggctgtcctggcccggactgtggggagcacctccaccccccggagcaggtgcacacccaggtaagcaggtccaggggctggggtgggcagggctagcttttggatcctgagtgtcactactctctcctcccagggatgccctggacctaagtgacatcaactcagagcctcctcggggctccttcccctcctttgagcctcggaacctcctcagcctgtttgaggacaccctagacccaacctgagccccagactctgcctctgcacttttaaccttttatcctgtgtctctcccgtcgcccttgaaagctggggcccctcgggaactcccatggtcttctctgcctggccgtgtctaataaaaagtatttgaaccttg

SEQ ID NO: 373239 - DNA, 3254 bp, Homo sapiens
cgaggccggtttggaatttttggcgcgagcagctccgcgcgcgttcacgggccgttccccctcacgggagtcctccgcccgggcgtccggaacagtcgacggcagactccggcccgctgagccacccgaggggtcccgtggcctccgcggacccggaatctgggccctcgcggacccgcgccccgcccagtcgccccagggcttccccacacccacggagtgaagtcagccgcggccctgcctgggaggaacttaccgtctaccgggaaaggtggccagcagatgtgtcgggcctggtgagagggtgaggcgagacggcccgatcgcccagggccccggaagctgcggaggtcacccccgcctggccttagctcagggacaccctggattcacgtgggagcccctgctcctgcctcccccgtcccaccactgaggctgttgggccaggccagtcatgctagaacggcctcctgcactggccatgcccatgcccacggagggcaccccgccacctctgagtggcacccccatcccagtcccagcctacttccgccacgcagaacctggattctccctcaagaggcccagggggctcagccggagcctcccacctccgccccctgccaagggcagcattcccatcagccgcctcttccctcctcggaccccaggctggcaccagctgcagccccggcgggtgtcattccggggcgaggcctcagagactctgcagagccctgggtatgacccaagccggccagagtccttcttccagcagagcttccagaggctcagccgcctgggccatggctcctacggagaggtcttcaaggtgcgctccaaggaggacggccggctctatgcggtaaagcgttccatgtcaccattccggggccccaaggaccgggcccgcaagttggccgaggtgggcagccacgagaaggtggggcagcacccatgctgcgtgcggctggagcaggcctgggaggagggcggcatcctgtacctgcagacggagctgtgcgggcccagcctgcagcaacactgtgaggcctggggtgccagcctgcctgaggcccaggtctggggctacctgcgggacacgctgcttgccctggcccatctgcacagccagggcctggtgcaccttgatgtcaagcctgccaacatcttcctggggccccggggccgctgcaagctgggtgacttcggactgctggtggagctgggtacagcaggagctggtgaggtccaggagggagacccccgctacatggcccccgagctgctgcagggctcctatgggacagcagcggatgtgttcagtctgggcctcaccatcctggaagtggcatgcaacatggagctgccccacggtggggagggctggcagcagctgcgccagggctacctgccccctgagttcactgccggtctgtcttccgagctgcgttctgtccttgtcatgatgctggagccagaccccaagctgcgggccacggccgaggccctgctggcactgcctgtgttgaggcagccgcgggcctggggtgtgctgtggtgcatggcagcggaggccctgagccgagggtgggccctgtggcaggccctgcttgccctgctctgctggctctggcatgggctggctcaccctgccagctggctacagcccctgggcccgccagccaccccgcctggctcaccaccctgcagtttgctcctggacagcagcctctccagcaactgggatgacgacagcctagggccttcactctcccctgaggctgtcctggcccggactgtggggagcacctccaccccccggagcaggtgcacacccagggatgccctggacctaagtgacatcaactcagagcctcctcggggctccttcccctcctttgagcctcggaacctcctcagcctgtttgaggacaccctagacccaacctgagccccagactctgcctctgcacttttaaccttttatcctgtgtctctcccgtcgcccttgaaagctggggcccctcgggaactcccatggtcttctctgcctggccgtgtctaataaaaagtatttgaaccttgggagcacccaagcttgctcatgtggcaacatggcccttcctgtccctttattgatgtcatccagggtcttaacgcccctgaggctgagccctgctgcagaacccagcgctcctggccttgggccagcagctgaagccccatgctgtgtggagcaaagaggtttcctgagcaggcacatcccccggtgggtacctggagctgttgggagtatggcactcaaggtggagggcaggcacggcccaggggtcccaggatctgaggccgctgagctccctgtgtcagtttcctggaagaagcagctgcagcccttgtgcctgtggccagctggtacaagacgggtccacgcccccttggtccttttgtcctgaatgccttactccatagtctctgggcagagggagccagggcgggcaagcttgtggctgctgggagggctggtatgcagggcagaaagatggagatcaggaagactggccacaggcctggtgggaggaacaggatagggtgaggaggctctgggctggcggcctggcaggacttgaactctcagagcaagacatgaccccagagtccctctctggtctaaccccacaggtcacagagggtaaagaggtcccaagagggaaaggtttccttccagctgacacagtaaaataggagcttggagggaaaaggcagggaaggaagttggagcgccacggcgtgggtggaagaggtcagtccacagggaagaacgggtgaacagggctcctgctgagacatctcatgagctggaagcatccaaggagccagccccttgcagacgagttgggaggaacacctggtgttgctaactctaggaggctgctgtgggcaggctggcatggcagctcagtcccggggacaggcgtggtgggcagcccagagcaggtcgggcacgacgccggcgtgcagctgcaggatggagcccacgctcagcaggtgcatgatctggtgggagttgccccagtagtcaaagcggccaggtccccagcgctcgggcagacgggctacatttaccagtcccccaagcagcgccagtgcgtccatgcgcaggtagcagggcagggagcctggagcccctgaacccagacccactccccgggccccaaataccagtaggcgggcagcagcctgccatccaaatg

SEQ ID NO: 373240 - DNA, 2624 bp, Homo sapiens
  misc_feature (2114)..(2114): n is a, c, g, or t
  misc_feature (2116)..(2116): n is a, c, g, or t
  misc_feature (2606)..(2606): n is a, c, g, or t
  misc_feature (2608)..(2608): n is a, c, g, or t
cgaggccggtttggaatttttggcgcgagcagctccgcgcgcgttcacgggccgttccccctcacgggagtcctccgcccgggcgtccggaacagtcgacggcagactccggcccgctgagccacccgaggggtcccgtggcctccgcggacccggaatctgggccctcgcggacccgcgccccgcccagtcgccccagggcttccccacacccacggagtgaagtcagccgcggccctgcctgggaggaacttaccgtctaccgggaaaggtggccagcagatgtgtcgggcctggtgagagggtgaggcgagacggcccgatcgcccagggccccggaagctgcggaggtcacccccgcctggccttagctcagggacaccctggattcacgtgggagcccctgctcctgcctcccccgtcccaccactgaggctgttgggccaggccagtcatgctagaacggcctcctgcactggccatgcccatgcccacggagggcaccccgccacctctgagtggcacccccatcccagtcccagcctacttccgccacgcagaacctggattctccctcaagaggcccagggggctcagccggagcctcccacctccgccccctgccaagggcagcattcccatcagccgcctcttccctcctcggaccccaggctggcaccagctgcagccccggcgggtgtcattccggggcgaggcctcagagactctgcagagccctgggtatgacccaagccggccagagtccttcttccagcagagcttccagaggctcagccgcctgggccatggctcctacggagaggtcttcaaggtgcgctccaaggaggacggccggctctatgcggtaaagcgttccatgtcaccattccggggccccaaggaccgggcccgcaagttggccgaggtgggcagccacgagaaggtggggcagcacccatgctgcgtgcggctggagcaggcctgggaggagggcggcatcctgtacctgcagacggagctgtgcgggcccagcctgcagcaacactgtgaggcctggggtgccagcctgcctgaggcccaggtctggggctacctgcgggacacgctgcttgccctggcccatctgcacagccagggcctggtgcaccttgatgtcaagcctgccaacatcttcctggggccccggggccgctgcaagctgggtgacttcggactgctggtggagctgggtacagcaggagctggtgaggtccaggagggagacccccgctacatggcccccgagctgctgcagggctcctatgggacagcagcggatgtgttcagtctgggcctcaccatcctggaagtggcatgcaacatggagctgccccacggtggggagggctggcagcagctgcgccagggctacctgccccctgagttcactgccggtctgtcttccgagctgcgttctgtccttgtcatgatgctggagccagaccccaagctgcgggccacggccgaggccctgctggcactgcctgtgttgaggcagccgcgggcctggggtgtgctgtggtgcatggcagcggaggccctgagccgagggtgggccctgtggcaggccctgcttgccctgctctgctggctctggcatgggctggctcaccctgccagctggctacagcccctgggcccgccagccaccccgcctggctcaccaccctgcagtttgctcctggacagcagcctctccagcaactgggatgacgacagcctagggccttcactctcccctgaggctgtcctggcccggactgtggggagcacctccaccccccggagcaggtgcacacccagggatgccctggacctaagtgacatcaactcagagcctcctcggggctccttcccctcctttgagcctcggaacctcctcagcctgtttgaggacaccctagacccaacctgagccccagactctgcctctgcacttttaaccttttatcctgtgtctctcccgtcgcccttgaaagctggggcccctcgggaactcccatggtcttctctgcctggccgtgtctaataaaaagtatttgaaccttgggagcacccaagcttgcaaaaaaaanancaaaaaaaaaaaaaacacaaagacgaaaacaaaaaaaaaaacacacaaaacccaaacaaaaaagaaacacacagcagagggaccgagccagccagcaagcacacacacgcaaagaagaaaccgaaaaaagagagaagaagcgacgagggagacacagaacagacagacggaaagacagaaacgcgacacagcacagccaagcagaaggagaaaaacacagcaagaggagcgccgccacgcaggcggcgacacgacggaggggaggagacaaaaaagacgagaggatagcgcagccgagagaggatgagcgagagatagagtcgaggacaagggacggcggaagagacgggaggaactacaggggaagacacaggcgagagagagaagtcagggaaggggcggggtgaagagccggagaaaggagacagagaaacgagagcgaggagaggaagccgaaagacgcacactgtcgtgccgcgggtgcgggagnangaagaggggaggggga

SEQ ID NO: 373241 - DNA, 2088 bp, Homo sapiens
cgaggccggtttggaatttttggcgcgagcagctccgcgcgcgttcacgggccgttccccctcacgggagtcctccgcccgggcgtccggaacagtcgacggcagactccggcccgctgagccacccgaggggtcccgtggcctccgcggacccggaatctgggccctcgcggacccgcgccccgcccagtcgccccagggcttccccacacccacggagtgaagtcagccgcggccctgcctgggaggaacttaccgtctaccgggaaaggtggccagcagatgtgtcgggcctggtgagagggtgaggcgagacggcccgatcgcccagggccccggaagctgcggaggtcacccccgcctggccttagctcagggacaccctggattcacgtgggagcccctgctcctgcctcccccgtcccaccactgaggctgttgggccaggccagtcatgctagaacggcctcctgcactggccatgcccatgcccacggagggcaccccgccacctctgagtggcacccccatcccagtcccagcctacttccgccacgcagaacctggattctccctcaagaggcccagggggctcagccggagcctcccacctccgccccctgccaagggcagcattcccatcagccgcctcttccctcctcggaccccaggctggcaccagctgcagccccggcgggtgtcattccggggcgaggcctcagagactctgcagagccctgggtatgacccaagccggccagagtccttcttccagcagagcttccagaggctcagccgcctgggccatggctcctacggagaggtcttcaaggtgcgctccaaggaggacggccggctctatgcggtaaagcgttccatgtcaccattccggggccccaaggaccgggcccgcaagttggccgaggtgggcagccacgagaaggtggggcagcacccatgctgcgtgcggctggagcaggcctgggaggagggcggcatcctgtacctgcagacggagctgtgcgggcccagcctgcagcaacactgtgaggcctggggtgccagcctgcctgaggcccaggtctggggctacctgcgggacacgctgcttgccctggcccatctgcacagccagggcctggtgcaccttgatgtcaagcctgccaacatcttcctggggccccggggccgctgcaagctgggtgacttcggactgctggtggagctgggtacagcaggagctggtgaggtccaggagggagacccccgctacatggcccccgagctgctgcagggctcctatgggacagcagcggatgtgttcagtctgggcctcaccatcctggaagtggcatgcaacatggagctgccccacggtggggagggctggcagcagctgcgccagggctacctgccccctgagttcactgccggtctgtcttccgagctgcgttctgtccttgtcatgatgctggagccagaccccaagctgcgggccacggccgaggccctgctggcactgcctgtgttgaggcagccgcgggcctggggtgtgctgtggtgcatggcagcggaggccctgagccgagggtgggccctgtggcaggccctgcttgccctgctctgctggctctggcatgggctggctcaccctgccagctggctacagcccctgggcccgccagccaccccgcctggctcaccaccctgcagtttgctcctggacagcagcctctccagcaactgggatgacgacagcctagggccttcactctcccctgaggctgtcctggcccggactgtggggagcacctccaccccccggagcaggtgcacacccagggatgccctggacctaagtgacatcaactcagagcctcctcggggctccttcccctcctttgagcctcggaacctcctcagcctgtttgaggacaccctagacccaacctgagccccagactctgcctctgcacttttaaccttttatcctgtgtctctcccgtcgcccttgaaagctggggcccctcgggaactcccatggtcttctctgcctggccgtgtctaataaaaagtatttgaaccttg

SEQ ID NO: 373242 - DNA, 3123 bp, Homo sapiens
caggactcccgtgagggggaacggcccgtgaacgcgcgcggagctgctcgcgccccgcccagtcgcccggcttccccacacccacggagtgaagtcagccgcggccctgcctgggaggaacttaccgtctaccgggaaaggtggccagcagatgtgtcgggcctggtgagagggtgaggcgagacggcccgatcgcccagggccccggaagctgcggaggtcacccccgcctggccttagctcagggacaccctggattcacgtgggagcccctgctcctgcctcccccgtcccaccactgaggctgttgggccaggccagtcatgctagaacggcctcctgcactggccatgcccatgcccacggagggcaccccgccacctctgagtggcacccccatcccagtcccagcctacttccgccacgcagaacctggattctccctcaagaggcccagggggctcagccggagcctcccacctccgccccctgccaagggcagcattcccatcagccgcctcttccctcctcggaccccaggctggcaccagctgcagccccggcgggtgtcattccggggcgaggcctcagagactctgcagagccctgggtatgacccaagccggccagagtccttcttccagcagagcttccagaggctcagccgcctgggccatggctcctacggagaggtcttcaaggtgcgctccaaggaggacggccggctctatgcggtaaagcgttccatgtcaccattccggggccccaaggaccgggcccgcaagttggccgaggtgggcagccacgagaaggtggggcagcacccatgctgcgtgcggctggagcaggcctgggaggagggcggcatcctgtacctgcagacggagctgtgcgggcccagcctgcagcaacactgtgaggcctggggtgccagcctgcctgaggcccaggtctggggctacctgcgggacacgctgcttgccctggcccatctgcacagccagggcctggtgcaccttgatgtcaagcctgccaacatcttcctggggccccggggccgctgcaagctgggtgacttcggactgctggtggagctgggtacagcaggagctggtgaggtccaggagggagacccccgctacatggcccccgagctgctgcagggctcctatgggacagcagcggatgtgttcagtctgggcctcaccatcctggaagtggcatgcaacatggagctgccccacggtggggagggctggcagcagctgcgccagggctacctgccccctgagttcactgccggtctgtcttccgagctgcgttctgtccttgtcatgatgctggagccagaccccaagctgcgggccacggccgaggccctgctggcactgcctgtgttgaggcagccgcgggcctggggtgtgctgtggtgcatggcagcggaggccctgagccgagggtgggccctgtggcaggccctgcttgccctgctctgctggctctggcatgggctggctcaccctgccagctggctacagcccctgggcccgccagccaccccgcctggctcaccaccctgcagtttgctcctggacagcagcctctccagcaactgggatgacgacagcctagggccttcactctcccctgaggctgtcctggcccggactgtggggagcacctccaccccccggagcaggtgcacacccagggatgccctggacctaagtgacatcaactcagagcctcctcggggctccttcccctcctttgagcctcggaacctcctcagcctgtttgaggacaccctagacccaacctgagccccagactctgcctctgcacttttaaccttttatcctgtgtctctcccgtcgcccttgaaagctggggcccctcgggaactcccatggtcttctctgcctggccgtgtctaataaaaagtatttgaaccttgggagcacccaagcttgctcatgtggcaacatggcccttcctgtccctttattgatgtcatccagggtcttaacgcccctgaggctgagccctgctgcagaacccagcgctcctggccttgggccagcagctgaagccccatgctgtgtggagcaaagaggtttcctgagcaggcacatcccccggtgggtacctggagctgttgggagtatggcactcaaggtggagggcaggcacggcccaggggtcccaggatctgaggccgctgagctccctgtgtcagtttcctggaagaagcagctgcagcccttgtgcctgtggccagctggtacaagacgggtccacgcccccttggtccttttgtcctgaatgccttactccatagtctctgggcagagggagccagggcgggcaagcttgtggctgctgggagggctggtatgcagggcagaaagatggagatcaggaagactggccacaggcctggtgggaggaacaggatagggtgaggaggctctgggctggcggcctggcaggacttgaactctcagagcaagacatgaccccagagtccctctctggtctaaccccacaggtcacagagggtaaagaggtcccaagagggaaaggtttccttccagctgacacagtaaaataggagcttggagggaaaaggcagggaaggaagttggagcgccacggcgtgggtggaagaggtcagtccacagggaagaacgggtgaacagggctcctgctgagacatctcatgagctggaagcatccaaggagccagccccttgcagacgagttgggaggaacacctggtgttgctaactctaggaggctgctgtgggcaggctggcatggcagctcagtcccggggacaggcgtggtgggcagcccagagcaggtcgggcacgacgccggcgtgcagctgcaggatggagcccacgctcagcaggtgcatgatctggtgggagttgccccagtagtcaaagcggccaggtccccagcgctcgggcagacgggctacatttaccagtcccccaagcagcgccagtgcgtccatgcgcaggtagcagggcagggagcctggagcccctgaacccagacccactccccgggccccaaataccagtaggcgggcagcagcctgccatccaaatg

SEQ ID NO: 373243 - DNA, 3277 bp, Homo sapiens
cgaggccggtttggaatttttggcgcgagcagctccgcgcgcgttcacgggccgttccccctcacgggagtcctccgcccgggcgtccggaacagtcgacggcagactccggcccgctgagccacccgaggggtcccgtggcctccgcggacccggaatctgggccctcgcggacccgcgccccgcccagtcgccccagcccgtccactgctctgttcgccaggcttccccacacccacggagtgaagtcagccgcggccctgcctgggaggaacttaccgtctaccgggaaaggtggccagcagatgtgtcgggcctggtgagagggtgaggcgagacggcccgatcgcccagggccccggaagctgcggaggtcacccccgcctggccttagctcagggacaccctggattcacgtgggagcccctgctcctgcctcccccgtcccaccactgaggctgttgggccaggccagtcatgctagaacggcctcctgcactggccatgcccatgcccacggagggcaccccgccacctctgagtggcacccccatcccagtcccagcctacttccgccacgcagaacctggattctccctcaagaggcccagggggctcagccggagcctcccacctccgccccctgccaagggcagcattcccatcagccgcctcttccctcctcggaccccaggctggcaccagctgcagccccggcgggtgtcattccggggcgaggcctcagagactctgcagagccctgggtatgacccaagccggccagagtccttcttccagcagagcttccagaggctcagccgcctgggccatggctcctacggagaggtcttcaaggtgcgctccaaggaggacggccggctctatgcggtaaagcgttccatgtcaccattccggggccccaaggaccgggcccgcaagttggccgaggtgggcagccacgagaaggtggggcagcacccatgctgcgtgcggctggagcaggcctgggaggagggcggcatcctgtacctgcagacggagctgtgcgggcccagcctgcagcaacactgtgaggcctggggtgccagcctgcctgaggcccaggtctggggctacctgcgggacacgctgcttgccctggcccatctgcacagccagggcctggtgcaccttgatgtcaagcctgccaacatcttcctggggccccggggccgctgcaagctgggtgacttcggactgctggtggagctgggtacagcaggagctggtgaggtccaggagggagacccccgctacatggcccccgagctgctgcagggctcctatgggacagcagcggatgtgttcagtctgggcctcaccatcctggaagtggcatgcaacatggagctgccccacggtggggagggctggcagcagctgcgccagggctacctgccccctgagttcactgccggtctgtcttccgagctgcgttctgtccttgtcatgatgctggagccagaccccaagctgcgggccacggccgaggccctgctggcactgcctgtgttgaggcagccgcgggcctggggtgtgctgtggtgcatggcagcggaggccctgagccgagggtgggccctgtggcaggccctgcttgccctgctctgctggctctggcatgggctggctcaccctgccagctggctacagcccctgggcccgccagccaccccgcctggctcaccaccctgcagtttgctcctggacagcagcctctccagcaactgggatgacgacagcctagggccttcactctcccctgaggctgtcctggcccggactgtggggagcacctccaccccccggagcaggtgcacacccagggatgccctggacctaagtgacatcaactcagagcctcctcggggctccttcccctcctttgagcctcggaacctcctcagcctgtttgaggacaccctagacccaacctgagccccagactctgcctctgcacttttaaccttttatcctgtgtctctcccgtcgcccttgaaagctggggcccctcgggaactcccatggtcttctctgcctggccgtgtctaataaaaagtatttgaaccttgggagcacccaagcttgctcatgtggcaacatggcccttcctgtccctttattgatgtcatccagggtcttaacgcccctgaggctgagccctgctgcagaacccagcgctcctggccttgggccagcagctgaagccccatgctgtgtggagcaaagaggtttcctgagcaggcacatcccccggtgggtacctggagctgttgggagtatggcactcaaggtggagggcaggcacggcccaggggtcccaggatctgaggccgctgagctccctgtgtcagtttcctggaagaagcagctgcagcccttgtgcctgtggccagctggtacaagacgggtccacgcccccttggtccttttgtcctgaatgccttactccatagtctctgggcagagggagccagggcgggcaagcttgtggctgctgggagggctggtatgcagggcagaaagatggagatcaggaagactggccacaggcctggtgggaggaacaggatagggtgaggaggctctgggctggcggcctggcaggacttgaactctcagagcaagacatgaccccagagtccctctctggtctaaccccacaggtcacagagggtaaagaggtcccaagagggaaaggtttccttccagctgacacagtaaaataggagcttggagggaaaaggcagggaaggaagttggagcgccacggcgtgggtggaagaggtcagtccacagggaagaacgggtgaacagggctcctgctgagacatctcatgagctggaagcatccaaggagccagccccttgcagacgagttgggaggaacacctggtgttgctaactctaggaggctgctgtgggcaggctggcatggcagctcagtcccggggacaggcgtggtgggcagcccagagcaggtcgggcacgacgccggcgtgcagctgcaggatggagcccacgctcagcaggtgcatgatctggtgggagttgccccagtagtcaaagcggccaggtccccagcgctcgggcagacgggctacatttaccagtcccccaagcagcgccagtgcgtccatgcgcaggtagcagggcagggagcctggagcccctgaacccagacccactccccgggccccaaataccagtaggcgggcagcagcctgccatccaaatg

SEQ ID NO: 373244 - DNA, 3321 bp, Homo sapiens
cgaggccggtttggaatttttggcgcgagcagctccgcgcgcgttcacgggccgttccccctcacgggagtcctccgcccgggcgtccggaacagtcgacggcagactccggcccgctgagccacccgaggggtcccgtggcctccgcggacccggaatctgggccctcgcggacccgcgccccgcccagtcgccccaggtgagcccagaccccgccgtgaggggcctcggcgtggccacctcgccgctcccctccgcctcgccagggcttccccacacccacggagtgaagtcagccgcggccctgcctgggaggaacttaccgtctaccgggaaaggtggccagcagatgtgtcgggcctggtgagagggtgaggcgagacggcccgatcgcccagggccccggaagctgcggaggtcacccccgcctggccttagctcagggacaccctggattcacgtgggagcccctgctcctgcctcccccgtcccaccactgaggctgttgggccaggccagtcatgctagaacggcctcctgcactggccatgcccatgcccacggagggcaccccgccacctctgagtggcacccccatcccagtcccagcctacttccgccacgcagaacctggattctccctcaagaggcccagggggctcagccggagcctcccacctccgccccctgccaagggcagcattcccatcagccgcctcttccctcctcggaccccaggctggcaccagctgcagccccggcgggtgtcattccggggcgaggcctcagagactctgcagagccctgggtatgacccaagccggccagagtccttcttccagcagagcttccagaggctcagccgcctgggccatggctcctacggagaggtcttcaaggtgcgctccaaggaggacggccggctctatgcggtaaagcgttccatgtcaccattccggggccccaaggaccgggcccgcaagttggccgaggtgggcagccacgagaaggtggggcagcacccatgctgcgtgcggctggagcaggcctgggaggagggcggcatcctgtacctgcagacggagctgtgcgggcccagcctgcagcaacactgtgaggcctggggtgccagcctgcctgaggcccaggtctggggctacctgcgggacacgctgcttgccctggcccatctgcacagccagggcctggtgcaccttgatgtcaagcctgccaacatcttcctggggccccggggccgctgcaagctgggtgacttcggactgctggtggagctgggtacagcaggagctggtgaggtccaggagggagacccccgctacatggcccccgagctgctgcagggctcctatgggacagcagcggatgtgttcagtctgggcctcaccatcctggaagtggcatgcaacatggagctgccccacggtggggagggctggcagcagctgcgccagggctacctgccccctgagttcactgccggtctgtcttccgagctgcgttctgtccttgtcatgatgctggagccagaccccaagctgcgggccacggccgaggccctgctggcactgcctgtgttgaggcagccgcgggcctggggtgtgctgtggtgcatggcagcggaggccctgagccgagggtgggccctgtggcaggccctgcttgccctgctctgctggctctggcatgggctggctcaccctgccagctggctacagcccctgggcccgccagccaccccgcctggctcaccaccctgcagtttgctcctggacagcagcctctccagcaactgggatgacgacagcctagggccttcactctcccctgaggctgtcctggcccggactgtggggagcacctccaccccccggagcaggtgcacacccagggatgccctggacctaagtgacatcaactcagagcctcctcggggctccttcccctcctttgagcctcggaacctcctcagcctgtttgaggacaccctagacccaacctgagccccagactctgcctctgcacttttaaccttttatcctgtgtctctcccgtcgcccttgaaagctggggcccctcgggaactcccatggtcttctctgcctggccgtgtctaataaaaagtatttgaaccttgggagcacccaagcttgctcatgtggcaacatggcccttcctgtccctttattgatgtcatccagggtcttaacgcccctgaggctgagccctgctgcagaacccagcgctcctggccttgggccagcagctgaagccccatgctgtgtggagcaaagaggtttcctgagcaggcacatcccccggtgggtacctggagctgttgggagtatggcactcaaggtggagggcaggcacggcccaggggtcccaggatctgaggccgctgagctccctgtgtcagtttcctggaagaagcagctgcagcccttgtgcctgtggccagctggtacaagacgggtccacgcccccttggtccttttgtcctgaatgccttactccatagtctctgggcagagggagccagggcgggcaagcttgtggctgctgggagggctggtatgcagggcagaaagatggagatcaggaagactggccacaggcctggtgggaggaacaggatagggtgaggaggctctgggctggcggcctggcaggacttgaactctcagagcaagacatgaccccagagtccctctctggtctaaccccacaggtcacagagggtaaagaggtcccaagagggaaaggtttccttccagctgacacagtaaaataggagcttggagggaaaaggcagggaaggaagttggagcgccacggcgtgggtggaagaggtcagtccacagggaagaacgggtgaacagggctcctgctgagacatctcatgagctggaagcatccaaggagccagccccttgcagacgagttgggaggaacacctggtgttgctaactctaggaggctgctgtgggcaggctggcatggcagctcagtcccggggacaggcgtggtgggcagcccagagcaggtcgggcacgacgccggcgtgcagctgcaggatggagcccacgctcagcaggtgcatgatctggtgggagttgccccagtagtcaaagcggccaggtccccagcgctcgggcagacgggctacatttaccagtcccccaagcagcgccagtgcgtccatgcgcaggtagcagggcagggagcctggagcccctgaacccagacccactccccgggccccaaataccagtaggcgggcagcagcctgccatccaaatg

SEQ ID NO: 373245 - DNA, 3047 bp, Homo sapiens
cgaggccggtttggaatttttggcgcgagcagctccgcgcgcgttcacgggccgttccccctcacgggagtcctccgcccgggcgtccggaacagtcgacggcagactccggcccgctgagccacccgaggggtcccgtggcctccgcggacccggaatctgggccctcgcggacccgcgccccgcccagtcgccccagggcttccccacacccacggagtgaagtcagccgcggccctgcctgggaggaacttaccgtctaccgggaaaggtggccagcagatgtgtcgggcctggtgagagggtgaggcgagacggcccgatcgcccagggccccggaagctgcggaggtcacccccgcctggccttagctcagggacaccctggattcacgtgggagcccctgctcctgcctcccccgtcccaccactgaggctgttgggccaggccagtcatgctagaacgctggcaccagctgcagccccggcgggtgtcattccggggcgaggcctcagagactctgcagagccctgggtatgacccaagccggccagagtccttcttccagcagagcttccagaggctcagccgcctgggccatggctcctacggagaggtcttcaaggtgcgctccaaggaggacggccggctctatgcggtaaagcgttccatgtcaccattccggggccccaaggaccgggcccgcaagttggccgaggtgggcagccacgagaaggtggggcagcacccatgctgcgtgcggctggagcaggcctgggaggagggcggcatcctgtacctgcagacggagctgtgcgggcccagcctgcagcaacactgtgaggcctggggtgccagcctgcctgaggcccaggtctggggctacctgcgggacacgctgcttgccctggcccatctgcacagccagggcctggtgcaccttgatgtcaagcctgccaacatcttcctggggccccggggccgctgcaagctgggtgacttcggactgctggtggagctgggtacagcaggagctggtgaggtccaggagggagacccccgctacatggcccccgagctgctgcagggctcctatgggacagcagcggatgtgttcagtctgggcctcaccatcctggaagtggcatgcaacatggagctgccccacggtggggagggctggcagcagctgcgccagggctacctgccccctgagttcactgccggtctgtcttccgagctgcgttctgtccttgtcatgatgctggagccagaccccaagctgcgggccacggccgaggccctgctggcactgcctgtgttgaggcagccgcgggcctggggtgtgctgtggtgcatggcagcggaggccctgagccgagggtgggccctgtggcaggccctgcttgccctgctctgctggctctggcatgggctggctcaccctgccagctggctacagcccctgggcccgccagccaccccgcctggctcaccaccctgcagtttgctcctggacagcagcctctccagcaactgggatgacgacagcctagggccttcactctcccctgaggctgtcctggcccggactgtggggagcacctccaccccccggagcaggtgcacacccagggatgccctggacctaagtgacatcaactcagagcctcctcggggctccttcccctcctttgagcctcggaacctcctcagcctgtttgaggacaccctagacccaacctgagccccagactctgcctctgcacttttaaccttttatcctgtgtctctcccgtcgcccttgaaagctggggcccctcgggaactcccatggtcttctctgcctggccgtgtctaataaaaagtatttgaaccttgggagcacccaagcttgctcatgtggcaacatggcccttcctgtccctttattgatgtcatccagggtcttaacgcccctgaggctgagccctgctgcagaacccagcgctcctggccttgggccagcagctgaagccccatgctgtgtggagcaaagaggtttcctgagcaggcacatcccccggtgggtacctggagctgttgggagtatggcactcaaggtggagggcaggcacggcccaggggtcccaggatctgaggccgctgagctccctgtgtcagtttcctggaagaagcagctgcagcccttgtgcctgtggccagctggtacaagacgggtccacgcccccttggtccttttgtcctgaatgccttactccatagtctctgggcagagggagccagggcgggcaagcttgtggctgctgggagggctggtatgcagggcagaaagatggagatcaggaagactggccacaggcctggtgggaggaacaggatagggtgaggaggctctgggctggcggcctggcaggacttgaactctcagagcaagacatgaccccagagtccctctctggtctaaccccacaggtcacagagggtaaagaggtcccaagagggaaaggtttccttccagctgacacagtaaaataggagcttggagggaaaaggcagggaaggaagttggagcgccacggcgtgggtggaagaggtcagtccacagggaagaacgggtgaacagggctcctgctgagacatctcatgagctggaagcatccaaggagccagccccttgcagacgagttgggaggaacacctggtgttgctaactctaggaggctgctgtgggcaggctggcatggcagctcagtcccggggacaggcgtggtgggcagcccagagcaggtcgggcacgacgccggcgtgcagctgcaggatggagcccacgctcagcaggtgcatgatctggtgggagttgccccagtagtcaaagcggccaggtccccagcgctcgggcagacgggctacatttaccagtcccccaagcagcgccagtgcgtccatgcgcaggtagcagggcagggagcctggagcccctgaacccagacccactccccgggccccaaataccagtaggcgggcagcagcctgccatccaaatg

SEQ ID NO: 373246 - DNA, 2005 bp, Homo sapiens
ccaagaggcagccctggactgggtctgtgtcccagggccaaccctgcccctttctgtccccatcccgtccctgccagtctgggcctcaccatcctggaagtggcatgcaacatggagctgccccacggtggggagggctggcagcagctgcgccagggctacctgccccctgagttcactgccggtctgtcttccgagctgcgttctgtccttgtcatgatgctggagccagaccccaagctgcgggccacggccgaggccctgctggcactgcctgtgttgaggcagccgcgggcctggggtgtgctgtggtgcatggcagcggaggccctgagccgagggtgggccctgtggcaggccctgcttgccctgctctgctggctctggcatgggctggctcaccctgccagctggctacagcccctgggcccgccagccaccccgcctggctcaccaccctgcagtttgctcctggacagcagcctctccagcaactgggatgacgacagcctagggccttcactctcccctgaggctgtcctggcccggactgtggggagcacctccaccccccggagcaggtgcacacccagggatgccctggacctaagtgacatcaactcagagcctcctcggggctccttcccctcctttgagcctcggaacctcctcagcctgtttgaggacaccctagacccaacctgagccccagactctgcctctgcacttttaaccttttatcctgtgtctctcccgtcgcccttgaaagctggggcccctcgggaactcccatggtcttctctgcctggccgtgtctaataaaaagtatttgaaccttgggagcacccaagcttgctcatgtggcaacatggcccttcctgtccctttattgatgtcatccagggtcttaacgcccctgaggctgagccctgctgcagaacccagcgctcctggccttgggccagcagctgaagccccatgctgtgtggagcaaagaggtttcctgagcaggcacatcccccggtgggtacctggagctgttgggagtatggcactcaaggtggagggcaggcacggcccaggggtcccaggatctgaggccgctgagctccctgtgtcagtttcctggaagaagcagctgcagcccttgtgcctgtggccagctggtacaagacgggtccacgcccccttggtccttttgtcctgaatgccttactccatagtctctgggcagagggagccagggcgggcaagcttgtggctgctgggagggctggtatgcagggcagaaagatggagatcaggaagactggccacaggcctggtgggaggaacaggatagggtgaggaggctctgggctggcggcctggcaggacttgaactctcagagcaagacatgaccccagagtccctctctggtctaaccccacaggtcacagagggtaaagaggtcccaagagggaaaggtttccttccagctgacacagtaaaataggagcttggagggaaaaggcagggaaggaagttggagcgccacggcgtgggtggaagaggtcagtccacagggaagaacgggtgaacagggctcctgctgagacatctcatgagctggaagcatccaaggagccagccccttgcagacgagttgggaggaacacctggtgttgctaactctaggaggctgctgtgggcaggctggcatggcagctcagtcccggggacaggcgtggtgggcagcccagagcaggtcgggcacgacgccggcgtgcagctgcaggatggagcccacgctcagcaggtgcatgatctggtgggagttgccccagtagtcaaagcggccaggtccccagcgctcgggcagacgggctacatttaccagtcccccaagcagcgccagtgcgtccatgcgcaggtagcagggcagggagcctggagcccctgaacccagacccactccccgggccccaaataccagtaggcgggcagcagcctgccatccaaatg

SEQ ID NO: 373247 - DNA, 581 bp, Homo sapiens
acagtttccagtcatttatattttcttttagagaggagttttcccttgtatgagtcctgtatgaagacaattttgttaaaaagtacaaacaacattggcccccaggtcagctttctcacaggggagcccacttttcacaccacagcctgggctgcctgtgttgctctgcagctgctttttccacctcgtgacacatccaagaggtcccctggggtcagtgcaggtcggccctggctcctccgtcgctgggtctccacagacccagcccgagggatggaggtttgtctggttttgttattaccctgggcaggggtctgagacagatgccagctacaccaccgtgccccgtgtgtgaacccttaatggggtctgccaggttgtccccctatgtgattgtgccacttgtggctcaccctcactgtgtgcgtgggtaccacctcccttccaggtgcgctccaaggaggacggccggctctatgcggtaaagcgttccatgtcaccattccggggccccaaggaccgggcccgcaagttggccgaggtgggcagccacgagaaggtggggcagcacccatgctgcg

SEQ ID NO: 373248 - DNA, 397 bp, Homo sapiens
cgggaaaggtggccagcagatgtgtcgggcctggtgagagggtgaggcgagacggcccgatcgcccagggccccggaagctgcggaggtcacccccgcctggccttagctcagggacaccctggattcacgtgggagcccctgctcctgcctcccccgtcccaccactgaggctgttgggccaggccagtcatgctagaacgtaagtcgtagggcagggacggtgggagaactgggttaagatgcacaggcccaggtccccgagtgtgccagggttgggcctggaggctgtgcttgtgaccagtgacctccaggatcccaacaccctggctcctgacttggagaaaccctgggctgggactctgaggtagttagagtcagaggaagagtctccacaa

SEQ ID NO: 373249 - DNA, 2009 bp, Homo sapiens
ccctgggaacaagtccttggtccctggggcctggtgtcttgagtgagaggctgtaattaggaaaccacacgctcagggcagacagctcttggggactctgccgttagccccttccttacaaacacatcacctcatccctcggggcacttgatagcagacaagaagttccagaaaggcttacatttactaaaagtttatttcaaatctgcctccaagtccatgtgttctgaaaaggacagagggggccttggagtgcagccagatggaaggactttgaaggctgtccaagtgctgctttcagagtgcaccaagtttttattgtccctgactgtggctccctgcctgtttgtcaggcgggagcctggagcctgcacagggacagagctggtttcatccggcactccctagccctggacaccctccttgtctcgcctgccctcctgcaggccttcactctcccctgaggctgtcctggcccggactgtggggagcacctccaccccccggagcaggtgcacacccaggtaagcaggtccaggggctggggtgggcagggctagcttttggatcctgagtgtcactactctctcctcccagggatgccctggacctaagtgacatcaactcagagcctcctcggggctccttcccctcctttgagcctcggaacctcctcagcctgtttgaggacaccctagacccaacctgagccccagactctgcctctgcacttttaaccttttatcctgtgtctctcccgtcgcccttgaaagctggggcccctcgggaactcccatggtcttctctgcctggccgtgtctaataaaaagtatttgaaccttgggagcacccaagcttgctcatgtggcaacatggcccttcctgtccctttattgatgtcatccagggtcttaacgcccctgaggctgagccctgctgcagaacccagcgctcctggccttgggccagcagctgaagccccatgctgtgtggagcaaagaggtttcctgagcaggcacatcccccggtgggtacctggagctgttgggagtatggcactcaaggtggagggcaggcacggcccaggggtcccaggatctgaggccgctgagctccctgtgtcagtttcctggaagaagcagctgcagcccttgtgcctgtggccagctggtacaagacgggtccacgcccccttggtccttttgtcctgaatgccttactccatagtctctgggcagagggagccagggcgggcaagcttgtggctgctgggagggctggtatgcagggcagaaagatggagatcaggaagactggccacaggcctggtgggaggaacaggatagggtgaggaggctctgggctggcggcctggcaggacttgaactctcagagcaagacatgaccccagagtccctctctggtctaaccccacaggtcacagagggtaaagaggtcccaagagggaaaggtttccttccagctgacacagtaaaataggagcttggagggaaaaggcagggaaggaagttggagcgccacggcgtgggtggaagaggtcagtccacagggaagaacgggtgaacagggctcctgctgagacatctcatgagctggaagcatccaaggagccagccccttgcagacgagttgggaggaacacctggtgttgctaactctaggaggctgctgtgggcaggctggcatggcagctcagtcccggggacaggcgtggtgggcagcccagagcaggtcgggcacgacgccggcgtgcagctgcaggatggagcccacgctcagcaggtgcatgatctggtgggagttgccccagtagtcaaagcggccaggtccccagcgctcgggcagacgggctacatttaccagtcccccaagcagcgccagtgcgtccatgcgcaggtagcagggcagggagcctggagcccctgaacccagacccactccccgggccccaaataccagtaggcgggcagcagcctgccatccaaatg

SEQ ID NO: 373250 - DNA, 2358 bp, Homo sapiens
cgaggccggtttggaatttttggcgcgagcagctccgcgcgcgttcacgggccgttccccctcacgggagtcctccgcccgggcgtccggaacagtcgacggcagactccggcccgctgagccacccgaggggtcccgtggcctccgcggacccggaatctgggccctcgcggacccgcgccccgcccagtcgccccagggcttccccacacccacggagtgaagtcagccgcggccctgcctgggaggaacttaccgtctaccgggaaaggtggccagcagatgtgtcgggcctggtgagagggtgaggcgagacggcccgatcgcccagggccccggaagctgcggaggtcacccccgcctggccttagctcagggacaccctggattcacgtgggagcccctgctcctgcctcccccgtcccaccactgaggctgttgggccaggccagtcatgctagaacggcctcctgcactggccatgcccatgcccacggagggcaccccgccacctctgagtggcacccccatcccagtcccagcctacttccgccacgcagaacctggattctccctcaagaggcccagggggctcagccggagcctcccacctccgccccctgccaagggcagcattcccatcagccgcctcttccctcctcggaccccaggctggcaccagctgcagccccggcgggtgtcattccggggcgaggcctcagagactctgcagagccctgggtatgacccaagccggccagagtccttcttccagcagagcttccagaggctcagccgcctgggccatggctcctacggagaggtcttcaaggtgcgctccaaggaggacggccggctctatgcggtaaagcgttccatgtcaccattccggggccccaaggaccgggcccgcaagttggccgaggtgggcagccacgagaaggtggggcagcacccatgctgcgtgcggctggagcaggcctgggaggagggcggcatcctgtacctgcagacggagctgtgcgggcccagcctgcagcaacactgtgaggcctggggtgccagcctgcctgaggcccaggtctggggctacctgcgggacacgctgcttgccctggcccatctgcacagccagggcctggtgcaccttgatgtcaagcctgccaacatcttcctggggccccggggccgctgcaagctgggtgacttcggactgctggtggagctgggtacagcaggagctggtgaggtccaggagggagacccccgctacatggcccccgagctgctgcagggctcctatgggacagcagcggatgtgttcagtctgggcctcaccatcctggaagtggcatgcaacatggagctgccccacggtggggagggctggcagcagctgcgccagggctacctgccccctgagttcactgccggtctgtcttccgagctgcgttctgtccttgtcatgatgctggagccagaccccaagctgcgggccacggccgaggccctgctggcactgcctgtgttgaggcagccgcgggcctggggtgtgctgtggtgcatggcagcggaggccctgagccgagggtgggccctgtggcaggccctgcttgccctgctctgctggctctggcatgggctggctcaccctgccagctggctacagcccctgggcccgccagccaccccgcctggctcaccaccctgcagtttgctcctggacagcagcctctccagcaactgggatgacgacagcctagggccttcactctcccctgaggctgtcctggcccggactgtggggagcacctccaccccccggagcaggtgcacacccagggatgccctggacctaagtgacatcaactcagagcctcctcggggctccttcccctcctttgagcctcggaacctcctcagcctgtttgaggacaccctagacccaacctgagccccagactctgcctctgcacttttaaccttttatcctgtgtctctcccgtcgcccttgaaagctggggcccctcgggaactcccatggtcttctctgcctggccgtgtctaataaaaagtatttgaaccttgggagcacccaagcttgctaaaagaagcacaccaaacaacggacaaaccaaaaggttttcggggcgaccggcacgcacaggaaaaagtcttctaaaccccatccgtcggggcgcccagcccgtgaagctagctcacctgccgaaccaggtgcccaggagaaccccggcagcaaaagtgtggaattccccaaataaaaaggccgcgaacccgagtgtttgggaaaccccaggggttcaggacatcggtctacaccgggccgggacgataatc

SEQ ID NO: 373251 - DNA, 3013 bp, Homo sapiens
gatatcgaattccggaattccccgggaaaggtggccagcagatgtgtcgggcctggtgagagggtgaggcgagacggcccgatcgcccagggccccggaagctgcggaggtcacccccgcctggccttagctcagggacaccctggattcacgtgggagcccctgctcctgcctcccccgtcccaccactgaggctgttgggccaggccagtcatgctagaacggcctcctgcactggccatgcccatgcccacggagggcaccccgccacctctgagtggcacccccatcccagtcccagcctacttccgccacgcagaacctggattctccctcaagaggcccagggggctcagccggagcctcccacctccgccccctgccaagggcagcattcccatcagccgcctcttccctcctcggaccccaggctggcaccagctgcagccccggcgggtgtcattccggggcgaggcctcagagactctgcagagccctgggtatgacccaagccggccagagtccttcttccagcagagcttccagaggctcagccgcctgggccatggctcctacggagaggtcttcaaggtgcgctccaaggaggacggccggctctatgcggtaaagcgttccatgtcaccattccggggccccaaggaccgggcccgcaagttggccgaggtgggcagccacgagaaggtggggcagcacccatgctgcgtgcggctggagcaggcctgggaggagggcggcatcctgtacctgcagacggagctgtgcgggcccagcctgcagcaacactgtgaggcctggggtgccagcctgcctgaggcccaggtctggggctacctgcgggacacgctgcttgccctggcccatctgcacagccagggcctggtgcaccttgatgtcaagcctgccaacatcttcctggggccccggggccgctgcaagctgggtgacttcggactgctggtggagctgggtacagcaggagctggtgaggtccaggagggagacccccgctacatggcccccgagctgctgcagggctcctatgggacagcagcggatgtgttcagtctgggcctcaccatcctggaagtggcatgcaacatggagctgccccacggtggggagggctggcagcagctgcgccagggctacctgccccctgagttcactgccggtctgtcttccgagctgcgttctgtccttgtcatgatgctggagccagaccccaagctgcgggccacggccgaggccctgctggcactgcctgtgttgaggcagccgcgggcctggggtgtgctgtggtgcatggcagcggaggccctgagccgagggtgggccctgtggcaggccctgcttgccctgctctgctggctctggcatgggctggctcaccctgccagctggctacagcccctgggcccgccagccaccccgcctggctcaccaccctgcagtttgctcctggacagcagcctctccagcaactgggatgacgacagcctagggccttcactctcccctgaggctgtcctggcccggactgtggggagcacctccaccccccggagcaggtgcacacccagggatgccctggacctaagtgacatcaactcagagcctcctcggggctccttcccctcctttgagcctcggaacctcctcagcctgtttgaggacaccctagacccaacctgagccccagactctgcctctgcacttttaaccttttatcctgtgtctctcccgtcgcccttgaaagctggggcccctcgggaactcccatggtcttctctgcctggccgtgtctaataaaaagtatttgaaccttgggagcacccaagcttgctcatgtggcaacatggcccttcctgtccctttattgatgtcatccagggtcttaacgcccctgaggctgagccctgctgcagaacccagcgctcctggccttgggccagcagctgaagccccatgctgtgtggagcaaagaggtttcctgagcaggcacatcccccggtgggtacctggagctgttgggagtatggcactcaaggtggagggcaggcacggcccaggggtcccaggatctgaggccgctgagctccctgtgtcagtttcctggaagaagcagctgcagcccttgtgcctgtggccagctggtacaagacgggtccacgcccccttggtccttttgtcctgaatgccttactccatagtctctgggcagagggagccagggcgggcaagcttgtggctgctgggagggctggtatgcagggcagaaagatggagatcaggaagactggccacaggcctggtgggaggaacaggatagggtgaggaggctctgggctggcggcctggcaggacttgaactctcagagcaagacatgaccccagagtccctctctggtctaaccccacaggtcacagagggtaaagaggtcccaagagggaaaggtttccttccagctgacacagtaaaataggagcttggagggaaaaggcagggaaggaagttggagcgccacggcgtgggtggaagaggtcagtccacagggaagaacgggtgaacagggctcctgctgagacatctcatgagctggaagcatccaaggagccagccccttgcagacgagttgggaggaacacctggtgttgctaactctaggaggctgctgtgggcaggctggcatggcagctcagtcccggggacaggcgtggtgggcagcccagagcaggtcgggcacgacgccggcgtgcagctgcaggatggagcccacgctcagcaggtgcatgatctggtgggagttgccccagtagtcaaagcggccaggtccccagcgctcgggcagacgggctacatttaccagtcccccaagcagcgccagtgcgtccatgcgcaggtagcagggcagggagcctggagcccctgaacccagacccactccccgggccccaaataccagtaggcgggcagcagcctgccatccaaatg

SEQ ID NO: 373252 - DNA, 3327 bp, Homo sapiens
cgaggccggtttggaatttttggcgcgagcagctccgcgcgcgttcacgggccgttccccctcacgggagtcctccgcccgggcgtccggaacagtcgacggcagactccggcccgctgagccacccgaggggtcccgtggcctccgcggacccggaatctgggccctcgcggacccgcgccccgcccagtcgccccagggcttccccacacccacggagtgaagtcagccgcggccctgcctgggaggaacttaccgtctaccgggaaaggtggccagcagatgtgtcgggcctggtgagagggtgaggcgagacggcccgatcgcccagggccccggaagctgcggaggtcacccccgcctggccttagctcagggacaccctggattcacgtgggagcccctgctcctgcctcccccgtcccaccactgaggctgttgggccaggccagtcatgctagaacggcctcctgcactggccatgcccatgcccacggagggcaccccgccacctctgagtggcacccccatcccagtcccagcctacttccgccacgcagaacctggattctccctcaagaggcccagggggctcagccggagcctcccacctccgccccctgccaagggcagcattcccatcagccgcctcttccctcctcggaccccaggctggcaccagctgcagccccggcgggtgtcattccggggcgaggcctcagagactctgcagagccctgggtatgacccaagccggccagagtccttcttccagcagagcttccagaggctcagccgcctgggccatggctcctacggagaggtcttcaaggtgcgctccaaggaggacggccggctctatgcggtaaagcgttccatgtcaccattccggggccccaaggaccgggcccgcaagttggccgaggtgggcagccacgagaaggtggggcagcacccatgctgcgtgcggctggagcaggcctgggaggagggcggcatcctgtacctgcagacggagctgtgcgggcccagcctgcagcaacactgtgaggcctggggtgccagcctgcctgaggcccaggtctggggctacctgcgggacacgctgcttgccctggcccatctgcacagccagggcctggtgcaccttgatgtcaagcctgccaacatcttcctggggccccggggccgctgcaagctgggtgacttcggactgctggtggagctgggtacagcaggagctggtgaggtccaggagggagacccccgctacatggcccccgagctgctgcagggctcctatgggacagcagcggatgtgttcagtctgggcctcaccatcctggaagtggcatgcaacatggagctgccccacggtggggagggctggcagcagctgcgccagggctacctgccccctgagttcactgccggtctgtcttccgagctgcgttctgtccttgtcatgatgctggagccagaccccaagctgcgggccacggccgaggccctgctggcactgcctgtgttgaggcagccgcgggcctggggtgtgctgtggtgcatggcagcggaggccctgagccgagggtgggccctgtggcaggccctgcttgccctgctctgctggctctggcatgggctggctcaccctgccagctggctacagcccctgggcccgccagccaccccgcctggctcaccaccctgcagtttgctcctggacagcagcctctccagcaactgggatgacgacagcctagggccttcactctcccctgaggctgtcctggcccggactgtggggagcacctccaccccccggagcaggtgcacacccaggtaagcaggtccaggggctggggtgggcagggctagcttttggatcctgagtgtcactactctctcctcccagggatgccctggacctaagtgacatcaactcagagcctcctcggggctccttcccctcctttgagcctcggaacctcctcagcctgtttgaggacaccctagacccaacctgagccccagactctgcctctgcacttttaaccttttatcctgtgtctctcccgtcgcccttgaaagctggggcccctcgggaactcccatggtcttctctgcctggccgtgtctaataaaaagtatttgaaccttgggagcacccaagcttgctcatgtggcaacatggcccttcctgtccctttattgatgtcatccagggtcttaacgcccctgaggctgagccctgctgcagaacccagcgctcctggccttgggccagcagctgaagccccatgctgtgtggagcaaagaggtttcctgagcaggcacatcccccggtgggtacctggagctgttgggagtatggcactcaaggtggagggcaggcacggcccaggggtcccaggatctgaggccgctgagctccctgtgtcagtttcctggaagaagcagctgcagcccttgtgcctgtggccagctggtacaagacgggtccacgcccccttggtccttttgtcctgaatgccttactccatagtctctgggcagagggagccagggcgggcaagcttgtggctgctgggagggctggtatgcagggcagaaagatggagatcaggaagactggccacaggcctggtgggaggaacaggatagggtgaggaggctctgggctggcggcctggcaggacttgaactctcagagcaagacatgaccccagagtccctctctggtctaaccccacaggtcacagagggtaaagaggtcccaagagggaaaggtttccttccagctgacacagtaaaataggagcttggagggaaaaggcagggaaggaagttggagcgccacggcgtgggtggaagaggtcagtccacagggaagaacgggtgaacagggctcctgctgagacatctcatgagctggaagcatccaaggagccagccccttgcagacgagttgggaggaacacctggtgttgctaactctaggaggctgctgtgggcaggctggcatggcagctcagtcccggggacaggcgtggtgggcagcccagagcaggtcgggcacgacgccggcgtgcagctgcaggatggagcccacgctcagcaggtgcatgatctggtgggagttgccccagtagtcaaagcggccaggtccccagcgctcgggcagacgggctacatttaccagtcccccaagcagcgccagtgcgtccatgcgcaggtagcagggcagggagcctggagcccctgaacccagacccactccccgggccccaaataccagtaggcgggcagcagcctgccatccaaatg

SEQ ID NO: 373253 - DNA, 3094 bp, Homo sapiens
cgaggccggtttggaatttttggcgcgagcagctccgcgcgcgttcacgggccgttccccctcacgggagtcctccgcccgggcgtccggaacagtcgacggcagactccggcccgctgagccacccgaggggtcccgtggcctccgcggacccggaatctgggccctcgcggacccgcgccccgcccagtcgccccagggcttccccacacccacggagtgaagtcagccgcggccctgcctgggaggaacttaccgtctaccgggaaaggtggccagcagatgtgtcgggcctggtgagaggggcctcctgcactggccatgcccatgcccacggagggcaccccgccacctctgagtggcacccccatcccagtcccagcctacttccgccacgcagaacctggattctccctcaagaggcccagggggctcagccggagcctcccacctccgccccctgccaagggcagcattcccatcagccgcctcttccctcctcggaccccaggctggcaccagctgcagccccggcgggtgtcattccggggcgaggcctcagagactctgcagagccctgggtatgacccaagccggccagagtccttcttccagcagagcttccagaggctcagccgcctgggccatggctcctacggagaggtcttcaaggtgcgctccaaggaggacggccggctctatgcggtaaagcgttccatgtcaccattccggggccccaaggaccgggcccgcaagttggccgaggtgggcagccacgagaaggtggggcagcacccatgctgcgtgcggctggagcaggcctgggaggagggcggcatcctgtacctgcagacggagctgtgcgggcccagcctgcagcaacactgtgaggcctggggtgccagcctgcctgaggcccaggtctggggctacctgcgggacacgctgcttgccctggcccatctgcacagccagggcctggtgcaccttgatgtcaagcctgccaacatcttcctggggccccggggccgctgcaagctgggtgacttcggactgctggtggagctgggtacagcaggagctggtgaggtccaggagggagacccccgctacatggcccccgagctgctgcagggctcctatgggacagcagcggatgtgttcagtctgggcctcaccatcctggaagtggcatgcaacatggagctgccccacggtggggagggctggcagcagctgcgccagggctacctgccccctgagttcactgccggtctgtcttccgagctgcgttctgtccttgtcatgatgctggagccagaccccaagctgcgggccacggccgaggccctgctggcactgcctgtgttgaggcagccgcgggcctggggtgtgctgtggtgcatggcagcggaggccctgagccgagggtgggccctgtggcaggccctgcttgccctgctctgctggctctggcatgggctggctcaccctgccagctggctacagcccctgggcccgccagccaccccgcctggctcaccaccctgcagtttgctcctggacagcagcctctccagcaactgggatgacgacagcctagggccttcactctcccctgaggctgtcctggcccggactgtggggagcacctccaccccccggagcaggtgcacacccagggatgccctggacctaagtgacatcaactcagagcctcctcggggctccttcccctcctttgagcctcggaacctcctcagcctgtttgaggacaccctagacccaacctgagccccagactctgcctctgcacttttaaccttttatcctgtgtctctcccgtcgcccttgaaagctggggcccctcgggaactcccatggtcttctctgcctggccgtgtctaataaaaagtatttgaaccttgggagcacccaagcttgctcatgtggcaacatggcccttcctgtccctttattgatgtcatccagggtcttaacgcccctgaggctgagccctgctgcagaacccagcgctcctggccttgggccagcagctgaagccccatgctgtgtggagcaaagaggtttcctgagcaggcacatcccccggtgggtacctggagctgttgggagtatggcactcaaggtggagggcaggcacggcccaggggtcccaggatctgaggccgctgagctccctgtgtcagtttcctggaagaagcagctgcagcccttgtgcctgtggccagctggtacaagacgggtccacgcccccttggtccttttgtcctgaatgccttactccatagtctctgggcagagggagccagggcgggcaagcttgtggctgctgggagggctggtatgcagggcagaaagatggagatcaggaagactggccacaggcctggtgggaggaacaggatagggtgaggaggctctgggctggcggcctggcaggacttgaactctcagagcaagacatgaccccagagtccctctctggtctaaccccacaggtcacagagggtaaagaggtcccaagagggaaaggtttccttccagctgacacagtaaaataggagcttggagggaaaaggcagggaaggaagttggagcgccacggcgtgggtggaagaggtcagtccacagggaagaacgggtgaacagggctcctgctgagacatctcatgagctggaagcatccaaggagccagccccttgcagacgagttgggaggaacacctggtgttgctaactctaggaggctgctgtgggcaggctggcatggcagctcagtcccggggacaggcgtggtgggcagcccagagcaggtcgggcacgacgccggcgtgcagctgcaggatggagcccacgctcagcaggtgcatgatctggtgggagttgccccagtagtcaaagcggccaggtccccagcgctcgggcagacgggctacatttaccagtcccccaagcagcgccagtgcgtccatgcgcaggtagcagggcagggagcctggagcccctgaacccagacccactccccgggccccaaataccagtaggcgggcagcagcctgccatccaaatg

SEQ ID NO: 373254 - DNA, 2453 bp, Homo sapiens
ggcacgaggctcgagtcctccccgacgcgtcctctaggccagcgagccccgcgctctccggtgacggaccatgtcggcggcgggagcgggcgcgggcgtagaggcgggcttctccagcgaggagctgctctcgctccgtttcccgctgcaccgcgcctgccgcgacggggacctggccacgctctgctcgctgctgcagcagacaccccacgcccacctggcctctgaggactccttctatggctggacgcccgtgcactgggccgcgcatttcggcaagttggagtgcttagtgcagttggtgagagcgggagccacactcaacgtctccaccacacggtacgcgcagacgccagcccacattgcagcctttgggggacatcctcagtgcctggtctggctgattcaagcaggagccaacattaacaaaccggattgtgagggtgaaactcccattcacaaggcagctcgctctgggagcctagaatgcatcagtgcccttgtggcgaatggggctcacgtcgatctgggcctcaccatcctggaagtggcatgcaacatggagctgccccacggtggggagggctggcagcagctgcgccagggctacctgccccctgagttcactgccggtctgtcttccgagctgcgttctgtccttgtcatgatgctggagccagaccccaagctgcgggccacggccgaggccctgctggcactgcctgtgttgaggcagccgcgggcctggggtgtgctgtggtgcatggcagcggaggccctgagccgagggtgggccctgtggcaggccctgcttgccctgctctgctggctctggcatgggctggctcaccctgccagctggctacagcccctgggcccgccagccaccccgcctggctcaccaccctgcagtttgctcctggacagcagcctctccagcaactgggatgacgacagcctagggccttcactctcccctgaggctgtcctggcccggactgtggggagcacctccaccccccggagcaggtgcacacccagggatgccctggacctaagtgacatcaactcagagcctcctcggggctccttcccctcctttgagcctcggaacctcctcagcctgtttgaggacaccctagacccaacctgagccccagactctgcctctgcacttttaaccttttatcctgtgtctctcccgtcgcccttgaaagctggggcccctcgggaactcccatggtcttctctgcctggccgtgtctaataaaaagtatttgaaccttgggagcacccaagcttgctcatgtggcaacatggcccttcctgtccctttattgatgtcatccagggtcttaacgcccctgaggctgagccctgctgcagaacccagcgctcctggccttgggccagcagctgaagccccatgctgtgtggagcaaagaggtttcctgagcaggcacatcccccggtgggtacctggagctgttgggagtatggcactcaaggtggagggcaggcacggcccaggggtcccaggatctgaggccgctgagctccctgtgtcagtttcctggaagaagcagctgcagcccttgtgcctgtggccagctggtacaagacgggtccacgcccccttggtccttttgtcctgaatgccttactccatagtctctgggcagagggagccagggcgggcaagcttgtggctgctgggagggctggtatgcagggcagaaagatggagatcaggaagactggccacaggcctggtgggaggaacaggatagggtgaggaggctctgggctggcggcctggcaggacttgaactctcagagcaagacatgaccccagagtccctctctggtctaaccccacaggtcacagagggtaaagaggtcccaagagggaaaggtttccttccagctgacacagtaaaataggagcttggagggaaaaggcagggaaggaagttggagcgccacggcgtgggtggaagaggtcagtccacagggaagaacgggtgaacagggctcctgctgagacatctcatgagctggaagcatccaaggagccagccccttgcagacgagttgggaggaacacctggtgttgctaactctaggaggctgctgtgggcaggctggcatggcagctcagtcccggggacaggcgtggtgggcagcccagagcaggtcgggcacgacgccggcgtgcagctgcaggatggagcccacgctcagcaggtgcatgatctggtgggagttgccccagtagtcaaagcggccaggtccccagcgctcgggcagacgggctacatttaccagtcccccaagcagcgccagtgcgtccatgcgcaggtagcagggcagggagcctggagcccctgaacccagacccactccccgggccccaaataccagtaggcgggcagcagcctgccatccaaatg

SEQ ID NO: 373255 - DNA, 1936 bp, Homo sapiens
ccctgggaacaagtccttggtccctggggcctggtgtcttgagtgagaggctgtaattaggaaaccacacgctcagggcagacagctcttggggactctgccgttagccccttccttacaaacacatcacctcatccctcggggcacttgatagcagacaagaagttccagaaaggcttacatttactaaaagtttatttcaaatctgcctccaagtccatgtgttctgaaaaggacagagggggccttggagtgcagccagatggaaggactttgaaggctgtccaagtgctgctttcagagtgcaccaagtttttattgtccctgactgtggctccctgcctgtttgtcaggcgggagcctggagcctgcacagggacagagctggtttcatccggcactccctagccctggacaccctccttgtctcgcctgccctcctgcaggccttcactctcccctgaggctgtcctggcccggactgtggggagcacctccaccccccggagcaggtgcacacccagggatgccctggacctaagtgacatcaactcagagcctcctcggggctccttcccctcctttgagcctcggaacctcctcagcctgtttgaggacaccctagacccaacctgagccccagactctgcctctgcacttttaaccttttatcctgtgtctctcccgtcgcccttgaaagctggggcccctcgggaactcccatggtcttctctgcctggccgtgtctaataaaaagtatttgaaccttgggagcacccaagcttgctcatgtggcaacatggcccttcctgtccctttattgatgtcatccagggtcttaacgcccctgaggctgagccctgctgcagaacccagcgctcctggccttgggccagcagctgaagccccatgctgtgtggagcaaagaggtttcctgagcaggcacatcccccggtgggtacctggagctgttgggagtatggcactcaaggtggagggcaggcacggcccaggggtcccaggatctgaggccgctgagctccctgtgtcagtttcctggaagaagcagctgcagcccttgtgcctgtggccagctggtacaagacgggtccacgcccccttggtccttttgtcctgaatgccttactccatagtctctgggcagagggagccagggcgggcaagcttgtggctgctgggagggctggtatgcagggcagaaagatggagatcaggaagactggccacaggcctggtgggaggaacaggatagggtgaggaggctctgggctggcggcctggcaggacttgaactctcagagcaagacatgaccccagagtccctctctggtctaaccccacaggtcacagagggtaaagaggtcccaagagggaaaggtttccttccagctgacacagtaaaataggagcttggagggaaaaggcagggaaggaagttggagcgccacggcgtgggtggaagaggtcagtccacagggaagaacgggtgaacagggctcctgctgagacatctcatgagctggaagcatccaaggagccagccccttgcagacgagttgggaggaacacctggtgttgctaactctaggaggctgctgtgggcaggctggcatggcagctcagtcccggggacaggcgtggtgggcagcccagagcaggtcgggcacgacgccggcgtgcagctgcaggatggagcccacgctcagcaggtgcatgatctggtgggagttgccccagtagtcaaagcggccaggtccccagcgctcgggcagacgggctacatttaccagtcccccaagcagcgccagtgcgtccatgcgcaggtagcagggcagggagcctggagcccctgaacccagacccactccccgggccccaaataccagtaggcgggcagcagcctgccatccaaatg

SEQ ID NO: 373256 - DNA, 250 bp, Homo sapiens
gatgtaaggtaggtaggtcactacttcagaaagggtagtctaataagggtctttctaaggaagtgacatttgagtagagatgtgaatgaggtaagggacttatgtggatacctcagggcagagccttccaggcagaagaaacagtaagtgtttggtatgctaggaagatggtgagaagacgattataggtataggagagtgaatgagggggtaagtaatcagtgatgccacctgagagggcatatcacag

SEQ ID NO: 373257 - DNA, 885 bp, Homo sapiens
ccagttcatttcgaagacatgaaagaattcacactggggagagaccctataagtgtaaactatgtgggaaaggcttcaggtcttccagttacattcaactacatgaaaggactcacactggagagaaaccctatggttgtcagcaatgtgggaaagcattatctgatctctcaagctttcgaagacacatgataacacatactggaaatggacctcataaatgtaagatatgtgggaaaggctttgattatcccagttcagtgcaaagacatgaaagaactcacactggagagaaaccctatgaatgcaaggaatgtggtaaagccttcagtcattcaagttacttacgaatacacgaaagagttcatactggagagaagccgtataaatgtaaggaatgtgggaaaccattccattgtcccagtgcctttcataaacatgaaaggacccacagtatggagaaaccctataagtgtaaagaatgtggggaagcatttcattgtatcagttcctttcataaacatgaaatgactcactagagaaaacccctatgagtgttgaacatgtgagaaagccttaagtactttcagcttcttacaaatacataagagactcacactgaaaaaagttgtatgaatataaaaatgtactaaaaccttccatttttttcagtaccttttgaaaacatgaccaaactcatacttcaaaaatatatatataatgaatgtgaggaatatgaaaaaactttctttgtctagcaaactttcaaaggtggttattataacatactagcaatggaccttactactgtaaggaatgtagaaatgcatttactagtcctaattcatttcagttacatgaaagatttcaaactgcagagaacca

SEQ ID NO: 373258 - DNA, 458 bp, Homo sapiens
gaacaccaaaagtacccaaggaaaggagtaatggtggcactgagtatttggaggtgggattcaaccagaatacgtgattgttaattggccctggactaaggttttattgcaagaaagggttctttagcttaaaagtgtttagaaatgatttcaatacaattagtgaaatgtctaaatgttcaacaaagatggcaagtgatgccagtcatccttttcaatgcctatggcagacattgctaattgaacacagaacttcctgtggcagattcagatttactctccatacagctctccatttagtcactaccgatcaatcagagtgttatgtgagtcaaaacccatttactatctataacaggggtatccaatcttttggcttccctgggccacattggaagaagaagaattgtcttgggccacacataaaatacactaacactaacgatagctgatgaact

SEQ ID NO: 373259 - DNA, 441 bp, Homo sapiens
gaaaccccatatctactaaaaatacaaacaattagcaggatgtggtggcaggtgcctgtaatcccagctacttgggaggctgaggcaggagaatcacttgaacccgggaagaggagcttgcagtgagccgagatcgcgccactgcactccagcctgggtgacagagcgagactcggtctcagaaaaaaaaaaaaaaaaacgactcaccaagtccataggcacctcagccttccctcattgcagtgagaaagcagatcttgctatgtttgtaacatgcagaggcaattttctgtcccttcaatttgaaggcaggatggcgttttctgcctttcacgtttcctccaggacgccccgactttacagacagcagaaattccagatacttttcttgtcgttaccattttgttggctgttgctggcgccttcctcctgtctgaaggg

SEQ ID NO: 373260 - DNA, 1437 bp, Homo sapiens
tccttgtacctattccatgagctacaaggaacatctgaggctctgaaacaagctcacacttttcccccaaatgagacgaggaagccccttgggtgagggaggagcagctcagactctgcttcctgctctgctccatgcttctctggtgactgggcctgcctcactcaacctggggtgggaccagcatgtgtggagaaagagtcctggtggcctgtcctgaatttggctaaatcgagctgccagttgaagccaagcctcccccgggccaggctgcagggaaataagaagagagggagccctcagggaagactcctgcgttgcgtcctggctctgaagtcaccggttgtatgaggttgtgggcacagcatgtgggacacagcacggaggatagtgactgatgcagagctggagaaatagagagattcacccctggggctctgcatggcaggaaaggggcagtgccaaaaagtgtgtaattatagagagggtaagactaccagacactttatatatatctaatataagacttaccattaactatttctatgtgtgcaatttagtgttgtgtaaccatcacactatccatttccagaactttttcctcttaccatattaaacctctgtacccaataaacagtaactcactccttctccccataacccttagcacacaccattctacattctgtctctatgtaactggctattctaactatcttttataaatggaattatatgataattatccttttgtgtctggtttatttcagttagcataatatcttcaaggttcatccattttgcatgatgtattggaattttattccttgttaaggttgaataacatttcaatgtatagatacacctcatttgcctacccacttatctttcaatggacttttcagttgtttccattttttcgctagtgtgagtaatgcttctctgaacatcagtgtacaaatatttgttcaaatttctttcaattctatggggagtatgtccagaagtggaattgctggatcaaatggtaatttattgtttaattttttgagaaacagccacaccactttttacagtggctataacatttcccattcccatcagcaatgcactagagctccaatttttccatctacttgaaaacacctgttgttttgtgttgttgtcattgttgttgtttatcaaagccatcctaaattgtgtgaggtggtgtagcattgtggttttgatttgcatatctctaagtattcgtgatgctgaggaactttgcatgggcttattggatatttgtatatcttccttggagaaaactccattttaatcctttgttcattttttaattgggtttttggatgtttgctgttgttgacttgtagcttttcatgtattctggaaattaatttcttatcacacatataatttgcaaatatttttatc

SEQ ID NO: 373261 - DNA, 967 bp, Homo sapiens
tgcaaatatttttatcatttcgtgggttgcctttttactttcttgataatgttcttcgacatataaaagctttgatttttgtgaagtccgatttatccattttatttgttgcctatgcttttgttgttacaaccaagaaatcattgggaaatccagtatcatgaagcttttcttctaagagttgtgtagtttttctcttacatttagatctttgatctattgtgggttaatttttgtacatggtgttaggtaaaggttccaatcttcttgcccttggatatccagctttcccaatatcctttggtgagaacactgtcccttccccattgtaaatgctgaaatcaggaagtgtgagtcctccagcttcattcttcctcttcaaagctgtgtgtctatttagagtcatgagatacaatataaattttaggacagatttttctttttctgcaaaaatgccactgagaatctgataggaattgtattgaatctgcagtcactttgggtagcactgttctcctaacaatattgagtcttccaattcatgaaaacaaaatgtctttcaatttattgatgtcatctttcatttctttcagcaatattttgtagatttcaggtataatcatttcacctctttgattaaacttattcctaaatattttattctttttgatgttaatataaattgaaatttttttcttaatttcccttcagattgttcatggttagtgtattgaaatacaacagatgtttgaatgttgattttgtattgtgcaacattactgaatttatttattaattctaattaggtttgttcaatctttaggattttctacatataagttcaagttatctataaacagaaataattttactccttccttccaatttgaatgtctttttttcaattcttgcctaatttttctgactagacctttcaatactacgttgaataaaagtgtcaaaagca

SEQ ID NO: 373262 - DNA, 415 bp, Homo sapiens
  misc_feature (13)..(13): n is a, c, g, or t
  misc_feature (27)..(27): n is a, c, g, or t
  misc_feature (58)..(58): n is a, c, g, or t
tggccagggaaanccccccaaaccccnggacagtcaaagtcctctggtcccccgcccngggagaccctgacagagtcctcagtcatgactgcaacaactgagacactgagaaaaagaacaggctgataccttcatgaaattcaagacaaagaagaaaaaaactcaatgttattggactaaataatcaaaaggataatgttttcataattttttattggaaaatgtgctgattctttgaatgttttattctccagatttatgaactttttttcttcagcaattggtaaagtatacttttgtaaacaaaaattgaaatatttgcttttgctgtctatctgaatgccccagaattgtgaaactattcatgagtattcataggtttatggtaataaagttatttgcacatgttccgtaa

SEQ ID NO: 373263 - DNA, 673 bp, Homo sapiens
tagcatcacttttaaacttctggaatccgcccacaactgcccaagtcacgattgaagcccagccacccaaagtttctgaggggaaggatgttcttctacttgtccacaatttgccccagaatcttgctggctacatttggtacaaagggcaaatgacatacctctaccattacattacatcatatgtagtagacggtcaaagaattatatatgggcctgcatacagtggaagagaaagagtatattccaatgcatccctgctgatccagaatgtcacgcaggaggatgcaggatcctacaccttacacatcataaagcgacgcgatgagactagagaagaaattcgacatttcaccttcaccttatacttggagactcccaagccctacatctccagcagcaacttaaaccccagggaggccatggaggctgtgcgcttaatctgtgatcctgagactctggacgcaagctacctatggtggatgaatggtcagagcctccctgtgactcacaggttgcagctgtccaaaaccaacaggaccctctatctatttggtgtcacaaagtatattgcaggaccctatgaatgtgaaatacggaacccagtgagtgccagtcgcagtgacccagtcaccctgaatctcctccgtgagtatcctctgttcctctgtga

SEQ ID NO: 373264 - DNA, 2135 bp, Homo sapiens
aggacagcacagctgacagccgtgctcagacagcttctggatcctaggctcatctccacagaggagaacacgcaggcagcagagaccatggggcccctcccagccccttcctgcacacagcgcatcacctggaaggggctcctgctcacagcatcacttttaaacttctggaacccgcccaccactgccgaagtcacgattgaagcccagccacccaaagtttctgaggggaaggatgttcttctacttgtccacaatttgccccagaatcttcctggctacttctggtacaaaggggaaatgacggacctctaccattacattatatcgtatatagttgatggtaaaataattatatatgggcctgcatacagtggaagagaaacagtatattccaatgcatccctgctgatccagaatgtcacgccggaaggatgcaggaacctacaccttacacatcataaagcgaggtgatgagactagagaagaaattcgacatttcaccttcaccttatacttggagactcccaagccctacatctccagcagcaacttaaaccccagggaggccatggaggctgtgcgcttaatctgtgatcctgagactctggacgcaagctacctagtggtggatgaatggtcagagcctccctgtgactcacaggttgcagctgtccaaaaccaacaggaccctctatctatttggtgtcacaaagtatattgcaggaccctatgaatgtgaaatacggaacccagtgagtgccagtcgcagtgacccagtcaccctgaatctcctcccgaagctgcccatcccctacatcaccatcaacaacttaaaccccagggagaataaggatgtcttagccttcacctgtgaacctaagagtgagaactacacctacatttggtggctaaacggtcagagcctccccgtcagtcccggggtaaagcgacccattgaaaacaggatactcattctacccagtgtcacgagaaatgaaacaggaccctatcaatgtgaaatacgggaccgatatggtggcctccgcagtaacccagtcatcctaaatgtcctctatggtccagacctccccagaatttacccttcattcacctattaccgttcaggagaaaacctcgacttgtcctgcttcacggaatctaacccaccggcagagtatttttggacaattaatgggaagtttcagcaatcaggacaaaagctctttatcccccaaattactagaaatcatagcgggctctatgcttgctctgttcataactcagccactggcaaggaaatctccaaatccatgacagtcaaagtctctgggtccctgccatggagacctgacagagtctcagtcatgactgcaacaactgagacactgagaaaaagaacaggctgataccttcatgaaattcaagacaaagaagaaaaaaactcaatgttattggactaaataatcaaaaggataatgttttcataattttttattggaaaatgtgctgattctttgaatgttttattctccagatttatgaactttttttcttcagcaattggtaaagtatacttttgtaaacaaaaattgaaatatttgcttttgctgtctatctgaatgccccagaattgtgaaactattcatgagtattcataggtttatggtaataaagttatttgcacatgttccgtaaaaaaaaaaaaaaaaaaaaaaaaaaaaaaaaaagcgcgcacaaaacaaaaaaaaaaaaaaaaaaaaaaaaaagtgtggggggcgcagcaggggcgccaaggaaaaagtgtttataaaacacaagcctggatggagggacgacgcgcggacacaccaagagatgataagagcacaccgaacgggacaaacacgccgctcacacgaagaaaaaaggggaaaacgaaaaaaagagagggagaagcaactcgcccaacgaatagaaaaaacaccaccccggggggggacaaacaaggaagcgcaccgctgagaaacaaacaacaaaaacggagaagaccacccgaagcgagcacaacacagggaagacaataacaaagagagaggagagaaagagagacacgcagaacatcacaaaaagacccccacagcaccgcgaggaac

SEQ ID NO: 373265 - DNA, 2061 bp, Homo sapiens
aggacagcacagctgacagccgtgctcagacagcttctggatcctaggctcatctccacagaggagaacacgcaggcagcagagaccatggggcccctcccagccccttcctgcacacagcgcatcacctggaaggggctcctgctcacagcatcacttttaaacttctggaacccgcccaccactgccgaagtcacgattgaagcccagccacccaaagtttctgaggggaaggatgttcttctacttgtccacaatttgccccagaatcttcctggctacttctggtacaaaggggaaatgacggacctctaccattacattatatcgtatatagttgatggtaaaataattatatatgggcctgcatacagtggaagagaaacagtatattccaatgcatccctgctgatccagaatgtcacgccggaaggatgcaggaacctacaccttacacatcataaagcgaggtgatgagactagagaagaaattcgacatttcaccttcaccttatacttggagactcccaagccctacatctccagcagcaacttaaaccccagggaggccatggaggctgtgcgcttaatctgtgatcctgagactctggacgcaagctacctagtggtggatgaatggtcagagcctccctgtgactcacaggttgcagctgtccaaaaccaacaggaccctctatctatttggtgtcacaaagtatattgcaggaccctatgaatgtgaaatacggaacccagtgagtgccagtcgcagtgacccagtcaccctgaatctcctcccgaagctgcccatcccctacatcaccatcaacaacttaaaccccagggagaataaggatgtcttagccttcacctgtgaacctaagagtgagaactacacctacatttggtggctaaacggtcagagcctccccgtcagtcccggggtaaagcgacccattgaaaacaggatactcattctacccagtgtcacgagaaatgaaacaggaccctatcaatgtgaaatacgggaccgatatggtggcctccgcagtaacccagtcatcctaaatgtcctctatggtccagacctccccagaatttacccttcattcacctattaccgttcaggagaaaacctcgacttgtcctgcttcacggaatctaacccaccggcagagtatttttggacaattaatgggaagtttcagcaatcaggacaaaagctctttatcccccaaattactagaaatcatagcgggctctatgcttgctctgttcataactcagccactggcaaggaaatctccaaatccatgacagtcaaagtctctgggtccctgccatggagacctgacagagtctcagtcatgactgcaacaactgagacactgagaaaaagaacaggctgataccttcatgaaattcaagacaaagaagaaaaaaactcaatgttattggactaaataatcaaaaggataatgttttcataattttttattggaaaatgtgctgattctttgaatgttttattctccagatttatgaactttttttcttcagcaattggtaaagtatacttttgtaaacaaaaattgaaatatttgcttttgctgtctatctgaatgccccagaattgtgaaactattcatgagtattcataggtttatggtaataaagttatttgcacatgttccgtaaccaaaaaaaaacaaaaaaaaaaaaaaaaaactctgtgtgggcgcgcgcgccccgggcccccggagaaaagcttttcgagaacccttgcgggtggggcgcgcgcgcggggccccagtgaggtacagggcgaacacggggcgcacaaaagcgggttccccagaggaaacaccggggccaagagaaccagagggccggggaattcctcacacagaaaaaaaaaacgccgcgggggggaaaaaccgcgaacgcgtttcgtgggaaaaagatcccgaaagaggagggtctgcgggaggagcaaaaagagggggaacaccaccaccaagggagtctcagaggagagaaccagaatataaaaatagagcc

SEQ ID NO: 373266 - DNA, 2182 bp, Homo sapiens
  misc_feature (1723)..(1723): n is a, c, g, or t
  misc_feature (1764)..(1764): n is a, c, g, or t
aggacagcacagctgacagccgtgctcagacagcttctggatcctaggctcatctccacagaggagaacacgcaggcagcagagaccatggggcccctcccagccccttcctgcacacagcgcatcacctggaaggggctcctgctcacagcatcacttttaaacttctggaacccgcccaccactgccgaagtcacgattgaagcccagccacccaaagtttctgaggggaaggatgttcttctacttgtccacaatttgccccagaatcttcctggctacttctggtacaaaggggaaatgacggacctctaccattacattatatcgtatatagttgatggtaaaataattatatatgggcctgcatacagtggaagagaaacagtatattccaatgcatccctgctgatccagaatgtcacgccggaaggatgcaggaacctacaccttacacatcataaagcgaggtgatgagactagagaagaaattcgacatttcaccttcaccttatacttggagactcccaagccctacatctccagcagcaacttaaaccccagggaggccatggaggctgtgcgcttaatctgtgatcctgagactctggacgcaagctacctagtggtggatgaatggtcagagcctccctgtgactcacaggttgcagctgtccaaaaccaacaggaccctctatctatttggtgtcacaaagtatattgcaggaccctatgaatgtgaaatacggaacccagtgagtgccagtcgcagtgacccagtcaccctgaatctcctcccgaagctgcccatcccctacatcaccatcaacaacttaaaccccagggagaataaggatgtcttagccttcacctgtgaacctaagagtgagaactacacctacatttggtggctaaacggtcagagcctccccgtcagtcccggggtaaagcgacccattgaaaacaggatactcattctacccagtgtcacgagaaatgaaacaggaccctatcaatgtgaaatacgggaccgatatggtggcctccgcagtaacccagtcatcctaaatgtcctctatggtccagacctccccagaatttacccttcattcacctattaccgttcaggagaaaacctcgacttgtcctgcttcacggaatctaacccaccggcagagtatttttggacaattaatgggaagtttcagcaatcaggacaaaagctctttatcccccaaattactagaaatcatagcgggctctatgcttgctctgttcataactcagccactggcaaggaaatctccaaatccatgacagtcaaagtctctgggtccctgccatggagacctgacagagtctcagtcatgactgcaacaactgagacactgagaaaaagaacaggctgataccttcatgaaattcaagacaaagaagaaaaaaactcaatgttattggactaaataatcaaaaggataatgttttcataattttttattggaaaatgtgctgattctttgaatgttttattctccagatttatgaactttttttcttcagcaattggtaaagtatacttttgtaaacaaaaattgaaatatttgcttttgctgtctatctgaatgccccagaattgtgaaactattcatgagtattcataggtttatggtaataaagttatttgcacatgttccgtaaaaaaaaaacaaaaaacaaaaaaaanacaaacaaacaaaaaaaaaaaaaaacaaaaaaaagaaaaanaaaaaaaaaaattttttgggggggcgcggccctcataaaaaaatcttctttctagccaacacccattctcttgtgtggcggggcgcgcgcggccacccaatcgtgagagttagccgcaccagtggtggcacaacagggcgttcctctcggcaggggacaacctgcggcggccaccaagaactacacgcgcgtggaggtgcatctctctccccacccaaaaaatacaaaacatcgcgcgcgcggggggcgacacacaacaagtcgtcttttttaaagacaacaaaccacccaaactagttcgtcatgctcccgggcaccaccctctatcgtggcggtctcttattcctcccggagggtgccacccaaccgcagacgccccgctcctattcatattattatccccccccccatccatgga

SEQ ID NO: 373267 - DNA, 1629 bp, Homo sapiens
cctcagaactagcatggatagcctcgattctccttgctgctgtaagaagtcttcaattggacaggaattgtcctgctcacagcatcacttttaaacttctggaacccgcccaccactgccgaagtcacgattgaagcccagccacccaaagtttctgaggggaaggatgttcttctacttgtccacaatttgccccagaatcttgctggctacttctggtacaaagggcaaatgacggacctctaccattacattacatcatatgtagtagacggtcaaataattatatatgggcctgcatacagtggaagagaaacagtatattccaatgcatccctgctgatccagaatgtcacgccggaaggatgcaggaacctacaccttacacatcataaagcgaggtgatgagactagagaagaaattcgacatttcaccttcaccttatacttggagactcccaagccctacatctccagcagcaacttaaaccccagggaggccatggaggctgtgcgcttaatctgtgatcctgagactctggacgcaagctacctagtggtggatgaatggtcagagcctccctgtgactcacaggttgcagctgtccaaaaccaacaggaccctctatctatttggtgtcacaaagtatattgcaggaccctatgaatgtgaaatacggaacccagtgagtgccagtcgcagtgacccagtcaccctgaatctcctcccgaagctgcccatcccctacatcaccatcaacaacttaaaccccagggagaataaggatgtcttagccttcacctgtgaacctaagagtgagaactacacctacatttggtggctaaacggtcagagcctccccgtcagtcccggggtaaagcgacccattgaaaacaggatactcattctacccagtgtcacgagaaatgaaacaggaccctatcaatgtgaaatacgggaccgatatggtggcctccgcagtaacccagtcatcctaaatgtcctctatggtccagacctccccagaatttacccttcattcacctattaccgttcaggagaaaacctcgacttgtcctgcttcacggaatctaacccaccggcagagtatttttggacaattaatgggaagtttcagcaatcaggacaaaagctctttatcccccaaattactagaaatcatagcgggctctatgcttgctctgttcataactcagccactggcaaggaaatctccaaatccatgacagtcaaagtctctgggtccctgccatggagacctgacagagtctcagtcatgactgcaacaactgagacactgagaaaaagaacaggctgataccttcatgaaattcaagacaaagaagaaaaaaactcaatgttattggactaaataatcaaaaggataatgttttcataattttttattggaaaatgtgctgattctttgaatgttttattctccagatttatgaactttttttcttcagcaattggtaaagtatacttttgtaaacaaaaattgaaatatttgcttttgctgtctatctgaatgccccagaattgtgaaactattcatgagtattcataggtttatggtaataaagttatttgcacatgttccgtaa

SEQ ID NO: 373268 - DNA, 1546 bp, Homo sapiens
ctgtccgcccctctctgctgctccgcccctctctgccgaagtcacgattgaagcccagccacccaaagtttctgaggggaaggatgttcttctacttgtccacaatttgccccagaatcttcctggctacttctggtacaaaggggaaatgacggacctctaccattacattatatcgtatatagttgatggtaaaataattatatatgggcctgcatacagtggaagagaaacagtatattccaatgcatccctgctgatccagaatgtcacgccggaaggatgcaggaacctacaccttacacatcataaagcgaggtgatgagactagagaagaaattcgacatttcaccttcaccttatacttggagactcccaagccctacatctccagcagcaacttaaaccccagggaggccatggaggctgtgcgcttaatctgtgatcctgagactctggacgcaagctacctagtggtggatgaatggtcagagcctccctgtgactcacaggttgcagctgtccaaaaccaacaggaccctctatctatttggtgtcacaaagtatattgcaggaccctatgaatgtgaaatacggaacccagtgagtgccagtcgcagtgacccagtcaccctgaatctcctcccgaagctgcccatcccctacatcaccatcaacaacttaaaccccagggagaataaggatgtcttagccttcacctgtgaacctaagagtgagaactacacctacatttggtggctaaacggtcagagcctccccgtcagtcccggggtaaagcgacccattgaaaacaggatactcattctacccagtgtcacgagaaatgaaacaggaccctatcaatgtgaaatacgggaccgatatggtggcctccgcagtaacccagtcatcctaaatgtcctctatggtccagacctccccagaatttacccttcattcacctattaccgttcaggagaaaacctcgacttgtcctgcttcacggaatctaacccaccggcagagtatttttggacaattaatgggaagtttcagcaatcaggacaaaagctctttatcccccaaattactagaaatcatagcgggctctatgcttgctctgttcataactcagccactggcaaggaaatctccaaatccatgacagtcaaagtctctgggtccctgccatggagacctgacagagtctcagtcatgactgcaacaactgagacactgagaaaaagaacaggctgataccttcatgaaattcaagacaaagaagaaaaaaactcaatgttattggactaaataatcaaaaggataatgttttcataattttttattggaaaatgtgctgattctttgaatgttttattctccagatttatgaactttttttcttcagcaattggtaaagtatacttttgtaaacaaaaattgaaatatttgcttttgctgtctatctgaatgccccagaattgtgaaactattcatgagtattcataggtttatggtaataaagttatttgcacatgttccgtaa

SEQ ID NO: 373269 - DNA, 2184 bp, Homo sapiens
  misc_feature (1725)..(1725): n is a, c, g, or t
  misc_feature (1766)..(1766): n is a, c, g, or t
aggacagcacagctgacagccgtgctcagacagcttctggatcctaggctcatctccacagaggagaacacgcaggcagcagagaccatggggcccctcccagccccttcctgcacacagcgcatcacctggaaggggctcctgctcacagcatcacttttaaacttctggaacccgcccaccactgccgaagtcacgattgaagcccagccacccaaagtttctgaggggaaggatgttcttctacttgtccacaatttgccccagaatcttcctggctacttctggtacaaaggggaaatgacggacctctaccattacattatatcgtatatagttgatggtaaaataattatatatgggcctgcatacagtggaagagaaacagtatattccaatgcatccctgctgatccagaatgtcacgccggaaggatgcaggaacctacaccttacacatcataaagcgaggtgatgagactagagaagaaattcgacatttcaccttcaccttatacttggagactcccaagccctacatctccagcagcaacttaaaccccagggaggccatggaggctgtgcgcttaatctgtgatcctgagactctggacgcaagctacctagtggtggatgaatggtcagagcctccctgtgactcacaggttgcagctgtccaaaaccaacaggaccctctatctatttggtgtcacaaagtatattgcaggaccctatgaatgtgaaatacggaacccagtgagtgccagtcgcagtgacccagtcaccctgaatctcctcccgaagctgcccatcccctacatcaccatcaacaacttaaaccccagggagaataaggatgtcttagccttcacctgtgaacctaagagtgagaactacacctacatttggtggctaaacggtcagagcctccccgtcagtcccggggtaaagcgacccattgaaaacaggatactcattctacccagtgtcacgagaaatgaaacaggaccctatcaatgtgaaatacgggaccgatatggtggcctccgcagtaacccagtcatcctaaatgtcctctatggtccagacctccccagaatttacccttcattcacctattaccgttcaggagaaaacctcgacttgtcctgcttcacggaatctaacccaccggcagagtatttttggacaattaatgggaagtttcagcaatcaggacaaaagctctttatcccccaaattactagaaatcatagcgggctctatgcttgctctgttcataactcagccactggcaaggaaatctccaaatccatgacagtcaaagtctctggtggtccctgccatggagacctgacagagtctcagtcatgactgcaacaactgagacactgagaaaaagaacaggctgataccttcatgaaattcaagacaaagaagaaaaaaactcaatgttattggactaaataatcaaaaggataatgttttcataattttttattggaaaatgtgctgattctttgaatgttttattctccagatttatgaactttttttcttcagcaattggtaaagtatacttttgtaaacaaaaattgaaatatttgcttttgctgtctatctgaatgccccagaattgtgaaactattcatgagtattcataggtttatggtaataaagttatttgcacatgttccgtaaaaaaaaaacaaaaaacaaaaaaaanacaaacaaacaaaaaaaaaaaaaaacaaaaaaaagaaaaanaaaaaaaaaaattttttgggggggcgcggccctcataaaaaaatcttctttctagccaacacccattctcttgtgtggcggggcgcgcgcggccacccaatcgtgagagttagccgcaccagtggtggcacaacagggcgttcctctcggcaggggacaacctgcggcggccaccaagaactacacgcgcgtggaggtgcatctctctccccacccaaaaaatacaaaacatcgcgcgcgcggggggcgacacacaacaagtcgtcttttttaaagacaacaaaccacccaaactagttcgtcatgctcccgggcaccaccctctatcgtggcggtctcttattcctcccggagggtgccacccaaccgcagacgccccgctcctattcatattattatccccccccccatccatgga

SEQ ID NO: 373270 - DNA, 2532 bp, Homo sapiens
tacccgataacgacagaaggggagtagacgacagaagggttgaaggacagcacagcctgacagccgtgctcaggaagtttctggatcctaggctcagctccacagaggagaacacgcaggcagcagagaccatggggcccctctcagcccctccctgcacacagcacatcacctggaagggggtcctgctcacagcatcacttttaaacttctggaacccgcccaccactgccgaagtcacgattgaagcccagccacccaaagtttctgaggggaaggatgttcttctacttgtccacaatttgccccagaatcttgctggctacttctggtacaaagggcaaatgacggacctctaccattacattacatcatatgtagtagacggtcaaataattatatatgggcctgcatacagtggaagagaaacagtatattccaatgcatccctgctgatccagaatgtcacccgggaaggatgcaggatcctacaccttacacatcataaagcgaggtgatgaggactagaggagtaactggacatttcaccttcaccttatacctgaagctgcccaagccctacatcaccatcaacaactcaaaacccagggagaataaggatgtcttagccttcacctgtgaacctaagagtgagaactacacctacatttggtggctaaatggtcagagcctcccggtcagtcccagggtaaagcgacccattgaaaacaggatcctcattctacccagtgtcacgagaaatgaaacaggaccctatgaatgtgaaatacgggaccgagatggtggcatgcgcagtgacccagtcaccctgaatgtcctctatggtccagacctccccagcatttacccttcattcacctattaccgttcaggagaaaacctctacttgtcctgcttcgcggaatctaacccaccggcagagtatttttggacaattaatgggaagtttcagcaatcaggacaaaagctctctatcccccaaattactacaaagcatagagggctctatgcttgctctgttcgtaactcagccactggcaaggaaagctccaaatccatgacagtcaaagtctctggtaagtggatcccagcatccttggcagtagggttttatgtggagtctatctggctttcagagaagagtcaggaaaacatttttattcccagcctgtgtcccatgggcacaagcaaatcccaaattctcctcctgaaccctcccaatttgtctctacagactctcttctccttgtttttctgttttcttatggctgaccttgtgtctggcctgaaaaaggtagggagggggctttatcagccctgagccctatgtggtagaagaggcttcagagagggacaagaaggagagtcctcaagatcaagttgcttctcgctgtcaccgacacatccccttctgccacgtcttttttttcttgtacctattccatgagctacaaggaacagctgaggctttgaaacaagctcacacttttcccccagatgagaggaggaagccccttgggtgagggaggagcagctcagactctgcttcctgctctgctccgggctcctctggtgactggccctgcctcactcaacctggggtgggactagcgtgtgtgtagaaagggccctggtggcctggtcctgaatttggctaaattgagctgccagttgaagccaagcctcccccgggccaggctgcagggaaataagaagagagggagcctcagggcagactcctgagctgcgtcctggctctgaagtcaccagctgtatgaggctttgggcacagcacgtgggacacagcacggaggacagtgactgatgcagagctggaggaatagggagattcaccgttggggttattcatggcaggaaaggggcagtgccaaaaagtgtgtaattatagagagggtaagactaccagacactttatatatatctaatataagacttaccattaactatttctatgtgtgcaatttagtgttgtgtaaccatcacactatccatttccagaactttttcctcttaccatattaaacctctgtacccaataaacagtaactctcactccttcttcccctaacccttagcacccatcattctactttgtctctatgtaactggctattctaactatcttttataaatggaattacaaaaaaacaaaaaaaaaaaaaaaaaaaaaaaattgtgtggggcgcgcgcctgtgggcccctgagagaaaggttttttgagagaaacaattgggtgtgtgggggcgggggaccccaagatagaggtaaacggcaaacgtgggcacaaaaggggtgttccatgagagaaaccggggacacgacacaagggcggggaatccacacagaaatagaaaagcggcccgcggggaaacgacgaagcgttctgggaaaaacatcccaagaaggagaatcgagagaggacatcggagggaaacaaacaaaggagagtccaagggagaccgaatacacattaagcccggcgcgggagat

SEQ ID NO: 373271 - DNA, 1741 bp, Homo sapiens
tacccgataacgacagaaggggagtagacgacagaagggttgaaggacagcacagcctgacagccgtgctcaggaagtttctggatcctaggctcagctccacagaggagaacacgcaggcagcagagaccatggggcccctctcagcccctccctgcacacagcacatcacctggaagggggtcctgctcacagcatcacttttaaacttctggaacccgcccaccactgccgaagtcacgattgaagcccagccacccaaagtttctgaggggaaggatgttcttctacttgtccacaatttgccccagaatcttgctggctacttctggtacaaagggcaaatgacggacctctaccattacattacatcatatgtagtagacggtcaaataattatatatgggcctgcatacagtggaagagaaacagtatattccaatgcatccctgctgatccagaatgtcacgccggaaggatgcaggaacctacaccttacacatcataaagcgaggtgatgagactagagaagaaattcgacatttcaccttcaccttatacttggagactcccaagccctccatctccagcagcaacttaaatcccagggaggccatggaggctgtgatcttaacctgtgatcctgcgactccagccgcaagctaccagtggtggatgaatggtcagagcctccctatgactcacaggttgcagctgtccaaaaccaacaggaccctctttatatttggtgtcacaaagtatattgcaggaccctatgaatgtgaaatacggaacccagtgagtgccagtcgcagtgacccagtcaccctgaatctcctcccgaagctgcccatcccctacatcaccatcaacaacttaaaccccagggagaataaggatgtcttagccttcacctgtgaacctaagagtgagaactacacctacatttggtggctaaacggtcagagcctccccgtcagtcccggggtaaagcgacccattgaaaacaggatactcattctacccagtgtcacgagaaatgaaacaggaccctatcaatgtgaaatacgggaccgatatggtggcctccgcagtaacccagtcatcctaaatgtcctctatggtccagacctccccagaatttacccttcattcacctattaccgttcaggagaaaacctcgacttgtcctgcttcacggaatctaacccaccggcagagtatttttggacaattaatgggaagtttcagcaatcaggacaaaagctctttatcccccaaattactagaaatcatagcgggctctatgcttgctctgttcataactcagccactggcaaggaaatctccaaatccatgacagtcaaagtctctgggtccctgccatggagacctgacagagtctcagtcatgactgcaacaactgagacactgagaaaaagaacaggctgataccttcatgaaattcaagacaaagaagaaaaaaactcaatgttattggactaaataatcaaaaggataatgttttcataattttttattggaaaatgtgctgattctttgaatgttttattctccagatttatgaactttttttcttcagcaattggtaaagtatacttttgtaaacaaaaattgaaatatttgcttttgctgtctatctgaatgccccagaattgtgaaactattcatgagtattcataggtttatggtaataaagttatttgcacatgttccgtaa

SEQ ID NO: 373272 - DNA, 1545 bp, Homo sapiens
ctgtccgcccctctctgctgctccgcccctctctgccgaagtcacgattgaagcccagccacccaaagtttctgaggggaaggatgttcttctacttgtccacaatttgccccagaatcttcctggctacttctggtacaaaggggaaatgacggacctctaccattacattatatcgtatatagttgatggtaaaataattatatatgggcctgcatacagtggaagagaaacagtatattccaatgcatccctgctgatccagaatgtcacgccggaaggatgcaggaacctacaccttacacatcataaagcgaggtgatgagactagagaagaaattcgacatttcaccttcaccttatacttggagactcccaagccctccatctccagcagcaacttaaatcccagggaggccatggaggctgtgatcttaacctgtgatcctgcgactccagccgcaagctaccagtggtggatgaatggtcagagcctccctatgactcacaggttgcagctgtccaaaaccaacaggaccctctttatatttggtgtcacaaagtatattgcaggaccctatgaatgtgaaatacggaacccagtgagtgccagtcgcagtgacccagtcaccctgaatctcctcccgaagctgcccatcccctacatcaccatcaacaacttaaaccccagggagaataaggatgtcttagccttcacctgtgaacctaagagtgagaactacacctacatttggtggctaaacggtcagagcctccccgtcagtcccggggtaaagcgacccattgaaaacaggatactcattctacccagtgtcacgagaaatgaaacaggaccctatcaatgtgaaatacgggaccgatatggtggcctccgcagtaacccagtcatcctaaatgtcctctatggtccagacctccccagaatttacccttcattcacctattaccgttcaggagaaaacctcgacttgtcctgcttcacggaatctaacccaccggcagagtatttttggacaattaatgggaagtttcagcaatcaggacaaaagctctttatcccccaaattactagaaatcatagcgggctctatgcttgctctgttcataactcagccactggcaaggaaatctccaaatccatgacagtcaaagtctctgggtccctgccatggagacctgacagagtctcagtcatgactgcaacaactgagacactgagaaaaagaacaggctgataccttcatgaaattcaagacaaagaagaaaaaaactcaatgttattggactaaataatcaaaaggataatgttttcataattttttattggaaaatgtgctgattctttgaatgttttattctccagatttatgaactttttttcttcagcaattggtaaagtatacttttgtaaacaaaaattgaaatatttgcttttgctgtctatctgaatgccccagaattgtgaaactattcatgagtattcataggtttatggtaataaagttatttgcacatgttccgtaa

SEQ ID NO: 373273 - DNA, 1742 bp, Homo sapiens
tacccgataacgacagaaggggagtagacgacagaagggttgaaggacagcacagcctgacagccgtgctcaggaagtttctggatcctaggctcagctccacagaggagaacacgcaggcagcagagaccatggggcccctctcagcccctccctgcacacagcacatcacctggaagggggtcctgctcacagcatcacttttaaacttctggaacccgcccaccactgccgaagtcacgattgaagcccagccacccaaagtttctgaggggaaggatgttcttctacttgtccacaatttgccccagaatcttgctggctacttctggtacaaagggcaaatgacggacctctaccattacattacatcatatgtagtagacggtcaaataattatatatgggcctgcatacagtggaagagaaacagtatattccaatgcatccctgctgatccagaatgtcacccgggaaggatgcaggatcctacaccttacacatcataaagcgacgcgatgggactggaggagtaactggacatttcaccttcaccttacacctggagactcccaagccctccatctccagcagcaacttaaatcccagggaggccatggaggctgtgatcttaacctgtgatcctgcgactccagccgcaagctaccagtggtggatgaatggtcagagcctccctatgactcacaggttgcagctgtccaaaaccaacaggaccctctttatatttggtgtcacaaagtatattgcaggaccctatgaatgtgaaatacggaacccagtgagtgccagtcgcagtgacccagtcaccctgaatctcctcccaaagctgcccaagccctacatcacaatcaacaacttaaacccccagggagaataaggatgtcttagccttcacctgtgaacctaagagtgagaactacacctacatttggtggctaaacggtcagagcctccccgtcagtcccggggtaaagcgacccattgaaaacaggatactcattctacccagtgtcacgagaaatgaaacaggaccctatcaatgtgaaatacgggaccgatatggtggcctccgcagtaacccagtcatcctaaatgtcctctatggtccagacctccccagaatttacccttcattcacctattaccgttcaggagaaaacctcgacttgtcctgcttcacggaatctaacccaccggcagagtatttttggacaattaatgggaagtttcagcaatcaggacaaaagctctttatcccccaaattactagaaatcatagcgggctctatgcttgctctgttcataactcagccactggcaaggaaatctccaaatccatgacagtcaaagtctctgggtccctgccatggagacctgacagagtctcagtcatgactgcaacaactgagacactgagaaaaagaacaggctgataccttcatgaaattcaagacaaagaagaaaaaaactcaatgttattggactaaataatcaaaaggataatgttttcataattttttattggaaaatgtgctgattctttgaatgttttattctccagatttatgaactttttttcttcagcaattggtaaagtatacttttgtaaacaaaaattgaaatatttgcttttgctgtctatctgaatgccccagaattgtgaaactattcatgagtattcataggtttatggtaataaagttatttgcacatgttccgtaa

SEQ ID NO: 373274 - DNA, 1742 bp, Homo sapiens
tacccgataacgacagaaggggagtagacgacagaagggttgaaggacagcacagcctgacagccgtgctcaggaagtttctggatcctaggctcagctccacagaggagaacacgcaggcagcagagaccatggggcccctctcagcccctccctgcacacagcacatcacctggaagggggtcctgctcacagcatcacttttaaacttctggaacccgcccaccactgccgaagtcacgattgaagcccagccacccaaagtttctgaggggaaggatgttcttctacttgtccacaatttgccccagaatcttcctggctacttctggtacaaaggggaaatgacggacctctaccattacattatatcgtatatagttgatggtaaaataattatatatgggcctgcatacagtggaagagaaacagtatattccaatgcatccctgctgatccagaatgtcacccgggaaggatgcaggatcctacaccttacacatcataaagcgacgcgatgggactggaggagtaactggacatttcaccttcaccttacacctggagactcccaagccctccatctccagcagcaacttaaatcccagggaggccatggaggctgtgatcttaacctgtgatcctgcgactccagccgcaagctaccagtggtggatgaatggtcagagcctccctatgactcacaggttgcagctgtccaaaaccaacaggaccctctttatatttggtgtcacaaagtatattgcaggaccctatgaatgtgaaatacggaacccagtgagtgccagtcgcagtgacccagtcaccctgaatctcctcccaaagctgcccaagccctacatcacaatcaacaacttaaacccccagggagaataaggatgtcttagccttcacctgtgaacctaagagtgagaactacacctacatttggtggctaaacggtcagagcctccccgtcagtcccggggtaaagcgacccattgaaaacaggatactcattctacccagtgtcacgagaaatgaaacaggaccctatcaatgtgaaatacgggaccgatatggtggcctccgcagtaacccagtcatcctaaatgtcctctatggtccagacctccccagaatttacccttcattcacctattaccgttcaggagaaaacctcgacttgtcctgcttcacggaatctaacccaccggcagagtatttttggacaattaatgggaagtttcagcaatcaggacaaaagctctttatcccccaaattactagaaatcatagcgggctctatgcttgctctgttcataactcagccactggcaaggaaatctccaaatccatgacagtcaaagtctctgggtccctgccatggagacctgacagagtctcagtcatgactgcaacaactgagacactgagaaaaagaacaggctgataccttcatgaaattcaagacaaagaagaaaaaaactcaatgttattggactaaataatcaaaaggataatgttttcataattttttattggaaaatgtgctgattctttgaatgttttattctccagatttatgaactttttttcttcagcaattggtaaagtatacttttgtaaacaaaaattgaaatatttgcttttgctgtctatctgaatgccccagaattgtgaaactattcatgagtattcataggtttatggtaataaagttatttgcacatgttccgtaa

SEQ ID NO: 373275 - DNA, 1076 bp, Homo sapiens
aggacagcacagctgacagccgtgctcagacagcttctggatcctaggctcatctccacagaggagaacacgcaggcagcagagaccatggggcccctcccagccccttcctgcacacagcgcatcacctggaaggggctcctgctcacagcatcacttttaaacttctggaacccgcccaccactgccgaagtcacgattgaagcccagccacccaaagtttctgaggggaaggatgttcttctacttgtccacaatttgccccagaatcttcctggctacttctggtacaaaggggaaatgacggacctctaccattacattatatcgtatatagttgatggtaaaataattatatatgggcctgcatacagtggaagagaaacagtatattccaatgcatccctgctgatccagaatgtcacgccggaaggatgcaggaacctacaccttacacatcataaagcgaggtgatgagactagagaagaaattcgacatttcaccttcaccttatacttggagactcccaagccctacatctccagcagcaacttaaaccccagggaggccatggaggctgtgcgcttaatctgtgatcctgagactctggacgcaagctacctagtggtggatgaatggtcagagcctccctgtgactcacaggttgcagctgtccaaaaccaacaggaccctctatctatttggtgtcacaaagtatattgcaggaccctatgaatgtgaaatacggaacccagtgagtgccagtcgcagtgacccagtcaccctgaatctcctcccgaagctgcccatcccctacatcaccatcaacaacttaaaccccagggagaataaggatgtcttagccttcacctgtgaacctaagagtgagaactacacctacatttggtggctaaacggtcagagcctccccgtcagtcccggggtaaagcgacccattgaaaacaggatactcattctacccagtgtcacgagaaatgtttcacggaccctatgcaatgtgaatatcgggaccgtagtatgtgccccccgtatttaccccggtcatcatataatc

SEQ ID NO: 373276 - DNA, 1463 bp, Homo sapiens
tacccgataacgacagaaggggagtagacgacagaagggttgaaggacagcacagcctgacagccgtgctcaggaagtttctggatcctaggctcagctccacagaggagaacacgcaggcagcagagaccatggggcccctctcagcccctccctgcacacagcacatcacctggaagggggtcctgctcacagcatcacttttaaacttctggaacccgcccaccactgccgaagtcacgattgaagcccagccacccaaagtttctgaggggaaggatgttcttctacttgtccacaatttgccccagaatcttgctggctacttctggtacaaagggcaaatgacggacctctaccattacattacatcatatgtagtagacggtcaaataattatatatgggcctgcatacagtggaagagaaacagtatattccaatgcatccctgctgatccagaatgtcacgccggaaggatgcaggaacctacaccttacacatcataaagcgaggtgatgagactagagaagaaattcgacatttcaccttcaccttatacttggagactcccaagccctacatctccagcagcaacttaaaccccagggaggccatggaggctgtgcgcttaatctgtgatcctgagactctggacgcaagctacctagtggtggatgaatggtcagagcctccctgtgactcacaggttgcagctgtccaaaaccaacaggaccctctatctatttggtgtcacaaagtatattgcaggaccctatgaatgtgaaatacggaacccagtgagtgccagtcgcagtgacccagtcaccctgaatctcctccatggtccagacctccccagaatttacccttcattcacctattaccgttcaggagaaaacctcgacttgtcctgcttcacggaatctaacccaccggcagagtatttttggacaattaatgggaagtttcagcaatcaggacaaaagctctttatcccccaaattactagaaatcatagcgggctctatgcttgctctgttcataactcagccactggcaaggaaatctccaaatccatgacagtcaaagtctctgggtccctgccatggagacctgacagagtctcagtcatgactgcaacaactgagacactgagaaaaagaacaggctgataccttcatgaaattcaagacaaagaagaaaaaaactcaatgttattggactaaataatcaaaaggataatgttttcataattttttattggaaaatgtgctgattctttgaatgttttattctccagatttatgaactttttttcttcagcaattggtaaagtatacttttgtaaacaaaaattgaaatatttgcttttgctgtctatctgaatgccccagaattgtgaaactattcatgagtattcataggtttatggtaataaagttatttgcacatgttccgtaa

SEQ ID NO: 373277 - DNA, 954 bp, Homo sapiens
tacccgataacgacagaaggggagtagacgacagaagggttgaaggacagcacagcctgacagccgtgctcaggaagtttctggatcctaggctcagctccacagaggagaacacgcaggcagcagagaccatggggcccctctcagcccctccctgcacacagcacatcacctggaagggggtcctgctcacagcatcacttttaaacttctggaacccgcccaccactgccgaagtcacgattgaagcccagccacccaaagtttctgaggggaaggatgttcttctacttgtccacaatttgccccagaatcttgctggctacttctggtacaaagggcaaatgacggacctctaccattacattacatcatatgtagtagacggtcaaataattatatatgggcctgcatacagtggaagagaaacagtatattccaatgcatccctgctgatccagaatgtcacgccggaaggatgcaggaacctacaccttacacatcataaagcgaggtgatgagactagagaagaaattcgacatttcaccttcaccttatacttggagactcccaagccctacatctccagcagcaacttaaaccccagggaggccatggaggctgtgcgcttaatctgtgatcctgagactctggacgcaagctacctagtggtggatgaatggtcagagcctccctgtgactcacaggttgcagctgtccaaaaccaacaggaccctctatctatttggtgtcacaaagtatattgcaggaccctatgaatgtgaaatacggaacccagtgagtgccagtcgcagtgacccagtcaccctgaatctcctcctggtacaaaggacaactgatggacctctaccattacattacatcatatgtagtagacggtcaaataaatatatatgggcctgcatacactggacgagaaacagtatattcca

SEQ ID NO: 373278 - DNA, 387 bp, Homo sapiens
  misc_feature (19)..(19): n is a, c, g, or t
ctgtctagaggatcccagngtcatgtataccatgggagactgacagagtctcagtcatgactgcaacaactgagacactgagaaaaagaacaggctgataccttcatgaaattcaagacaaagaagaaaaaaactcaatgttattggactaaataatcaaaaggataatgttttcataattttttattggaaaatgtgctgattctttgaatgttttattctccagatttatgaactttttttcttcagcaattggtaaagtatacttttgtaaacaaaaattgaaatatttgcttttgctgtctatctgaatgccccagaattgtgaaactattcatgagtattcataggtttatggtaataaagttatttgcacatgttccgtaa

SEQ ID NO: 373279 - DNA, 1698 bp, Homo sapiens
aggacagcacagctgacagccgtgctcagacagcttctggatcctaggctcatctccacagaggagaacacgcaggcagcagagaccatggggcccctcccagccccttcctgcacacagcgcatcacctggaaggggctcctgctcacagcatcacttttaaacttctggaacccgcccaccactgccgaagtcacgattgaagcccagccacccaaagtttctgaggggaaggatgttcttctacttgtccacaatttgccccagaatcttcctggctacttctggtacaaaggggaaatgacggacctctaccattacattatatcgtatatagttgatggtaaaataattatatatgggcctgcatacagtggaagagaaacagtatattccaatgcatccctgctgatccagaatgtcacgccggaaggatgcaggaacctacaccttacacatcataaagcgaggtgatgagactagagaagaaattcgacatttcaccttcaccttatacttggagactcccaagccctacatctccagcagcaacttaaaccccagggaggccatggaggctgtgcgcttaatctgtgatcctgagactctggacgcaagctacctagtggtggatgaatggtcagagcctccctgtgactcacaggttgcagctgtccaaaaccaacaggaccctctatctatttggtgtcacaaagtatattgcaggaccctatgaatgtgaaatacggaacccagtgagtgccagtcgcagtgacccagtcaccctgaatctcctcccgaagctgcccatcccctacatcaccatcaacaacttaaaccccagggagaataaggatgtcttagccttcacctgtgaacctaagagtgagaactacacctacatttggtggctaaacggtcagagcctccccgtcagtcccggggtaaagcgacccattgaaaacaggatactcattctacccagtgtcacgagaaatgaaacaggaccctatcaatgtgaaatacgggaccgatatggtggcctccgcagtaacccagtcatcctaaatgtcctctatggtccagacctccccagaatttacccttcattcacctattaccgttcaggagaaaacctcgacttgtcctgcttcacggaatctaacccaccggcagagtatttttggacaattaatgggaagtttcagcaatcaggacaaaagctctttatcccccaaattactagaaatcatagcgggctctatgcttgctctgttcataactcagccactggcaaggaaatctccaaatccatgacagtcaaagtctctgggtccctgccatggagacctgacagagtctcagtcatgactgcaacaactgagacactgagaaaaagaacaggctgataccttcatgaaattcaagacaaagaagaaaaaaactcaatgttattggactaaataatcaaaaggataatgttttcataattttttattggaaaatgtgctgattctttgaatgttttattctccagatttatgaactttttttcttcagcaattggtaaagtatacttttgtaaacaaaaattgaaatatttgcttttgctgtctatctgaatgccccagaattgtgaaactattcatgagtattcataggtttatggtaataaagttatttgcacatgttccgtaa

SEQ ID NO: 373280 - DNA, 1185 bp, Homo sapiens
tacccgataacgacagaaggggagtagacgacagaagggttgaaggacagcacagcctgacagccgtgctcaggaagtttctggatcctaggctcagctccacagaggagaacacgcaggcagcagagaccatggggcccctctcagcccctccctgcacacagcacatcacctggaagggggtcctgctcacagcatcacttttaaacttctggaacccgcccaccactgccgaagtcacgattgaagcccagccacccaaagtttctgaggggaaggatgttcttctacttgtccacaatttgccccagaatcttcctggctacttctggtacaaaggggaaatgacggacctctaccattacattatatcgtatatagttgatggtaaaataattatatatgggcctgcatacagtggaagagaaacagtatattccaatgcatccctgctgatccagaatgtcacgccggaaggatgcaggaacctacaccttacacatcataaagcgaggtgatgagactagagaagaaattcgacatttcaccttcaccttatactatggtccagacctccccagaatttacccttcattcacctattaccgttcaggagaaaacctcgacttgtcctgcttcacggaatctaacccaccggcagagtatttttggacaattaatgggaagtttcagcaatcaggacaaaagctctttatcccccaaattactagaaatcatagcgggctctatgcttgctctgttcataactcagccactggcaaggaaatctccaaatccatgacagtcaaagtctctggtggtccctgccatggagacctgacagagtctcagtcatgactgcaacaactgagacactgagaaaaagaacaggctgataccttcatgaaattcaagacaaagaagaaaaaaactcaatgttattggactaaataatcaaaaggataatgttttcataattttttattggaaaatgtgctgattctttgaatgttttattctccagatttatgaactttttttcttcagcaattggtaaagtatacttttgtaaacaaaaattgaaatatttgcttttgctgtctatctgaatgccccagaattgtgaaactattcatgagtattcataggtttatggtaataaagttatttgcacatgttccgtaa

SEQ ID NO: 373281 - DNA, 2009 bp, Homo sapiens
  misc_feature (1755)..(1755): n is a, c, g, or t
  misc_feature (1796)..(1796): n is a, c, g, or t
aggacagcacagctgacagccgtgctcagacagcttctggatcctaggctcatctccacagaggagaacacgcaggcagcagagaccatggggcccctcccagccccttcctgcacacagcgcatcacctggaaggggctcctgctcacagcatcacttttaaacttctggaacccgcccaccactgccgaagtcacgattgaagcccagccacccaaagtttctgaggggaaggatgttcttctacttgtccacaatttgccccagaatcttcctggctacttctggtacaaaggggaaatgacggacctctaccattacattatatcgtatatagttgatggtaaaataattatatatgggcctgcatacagtggaagagaaacagtatattccaatgcatccctgctgatccagaatgtcacgccggaaggatgcaggaacctacaccttacacatcataaagcgaggtgatgagactagagaagaaattcgacatttcaccttcaccttatacttggagactcccaagccctacatctccagcagcaacttaaaccccagggaggccatggaggctgtgcgcttaatctgtgatcctgagactctggacgcaagctacctagtggtggatgaatggtcagagcctccctgtgactcacaggttgcagctgtccaaaaccaacaggaccctctatctatttggtgtcacaaagtatattgcaggaccctatgaatgtgaaatacggaacccagtgagtgccagtcgcagtgacccagtcaccctgaatctcctcccgaagctgcccatcccctacatcaccatcaacaacttaaaccccagggagaataaggatgtcttagccttcacctgtgaacctaagagtgagaactacacctacatttggtggctaaacggtcagagcctccccgtcagtcccggggtaaagcgacccattgaaaacaggatactcattctacccagtgtcacgagaaatgaaacaggaccctatcaatgtgaaatacgggaccgatatggtggcctccgcagtaacccagtcatcctaaatgtcctctatggtccagacctccccagaatttacccttcattcacctattaccgttcaggagaaaacctcgacttgtcctgcttcacggaatctaacccaccggcagagtatttttggacaattaatgggaagtttcagcaatcaggacaaaagctctttatcccccaaattactagaaatcatagcgggctctatgcttgctctgttcataactcagccactggcaaggaaatctccaaatccatgacagtcaaagtctctgggtccctgccatggagacctgacagagtctcagtcatgactgcaacaactgagacactgagaaaaagaacaggctgataccttcatgaaattcaagacaaagaagaaaaaaactcaatgttattggactaaataatcaaaaggataatgttttcataattttttattggaaaatgtgctgattctttgaatgttttattctccagatttatgaactttttttcttcagcaattggtaaagtatacttttgtaaacaaaaattgaaatatttgcttttgctgtctatctgaatgccccagaattgtgaaactattcatgagtattcataggtttatggtaataaagttatttgcacatgttccgtaaaaaaaaaaaaaaaaaaaaaaaaaaaaaaaaaaaaaaaaaacaaaaaacaaaaaaaanacaaacaaacaaaaaaaaaaaaaaacaaaaaaaagaaaaanaaaaaaaaaaaaaacaaaaaaaaaaaacaagaaagaaaaaaaaagagaacaaaaagacaccaagaacagcacacaacacagaaaggaggcgggcgggcgcgcgacggcgggaaagaaagacgaaaaaaagaccaagggggcgcgaggacagccgaccgcgagtgacacgagagcgacgagaaagagcggcgccccgaagacaggaggtcgagt

SEQ ID NO: 373282 - DNA, 1742 bp, Homo sapiens
tacccgataacgacagaaggggagtagacgacagaagggttgaaggacagcacagcctgacagccgtgctcaggaagtttctggatcctaggctcagctccacagaggagaacacgcaggcagcagagaccatggggcccctctcagcccctccctgcacacagcacatcacctggaagggggtcctgctcacagcatcacttttaaacttctggaacccgcccaccactgccgaagtcacgattgaagcccagccacccaaagtttctgaggggaaggatgttcttctacttgtccacaatttgccccagaatcttgctggctacttctggtacaaagggcaaatgacggacctctaccattacattacatcatatgtagtagacggtcaaataattatatatgggcctgcatacagtggaagagaaacagtatattccaatgcatccctgctgatccagaatgtcacgccggaaggatgcaggaacctacaccttacacatcataaagcgaggtgatgagactagagaagaaattcgacatttcaccttcaccttatacttggagactcccaagccctacatctccagcagcaacttaaaccccagggaggccatggaggctgtgcgcttaatctgtgatcctgagactctggacgcaagctacctagtggtggatgaatggtcagagcctccctgtgactcacaggttgcagctgtccaaaaccaacaggaccctctatctatttggtgtcacaaagtatattgcaggaccctatgaatgtgaaatacggaacccagtgagtgccagtcgcagtgacccagtcaccctgaatctcctcccgaagctgcccatcccctacatcaccatcaacaacttaaaccccagggagaataaggatgtcttagccttcacctgtgaacctaagagtgagaactacacctacatttggtggctaaacggtcagagcctccccgtcagtcccggggtaaagcgacccattgaaaacaggatactcattctacccagtgtcacgagaaatgaaacaggaccctatcaatgtgaaatacgggaccgatatggtggcctccgcagtaacccagtcatcctaaatgtcctctatggtccagacctccccagaatttacccttcattcacctattaccgttcaggagaaaacctcgacttgtcctgcttcacggaatctaacccaccggcagagtatttttggacaattaatgggaagtttcagcaatcaggacaaaagctctttatcccccaaattactagaaatcatagcgggctctatgcttgctctgttcataactcagccactggcaaggaaatctccaaatccatgacagtcaaagtctctgggtccctgccatggagacctgacagagtctcagtcatgactgcaacaactgagacactgagaaaaagaacaggctgataccttcatgaaattcaagacaaagaagaaaaaaactcaatgttattggactaaataatcaaaaggataatgttttcataattttttattggaaaatgtgctgattctttgaatgttttattctccagatttatgaactttttttcttcagcaattggtaaagtatacttttgtaaacaaaaattgaaatatttgcttttgctgtctatctgaatgccccagaattgtgaaactattcatgagtattcataggtttatggtaataaagttatttgcacatgttccgtaa

SEQ ID NO: 373283 - DNA, 1740 bp, Homo sapiens
  misc_feature (63)..(63): n is a, c, g, or t
ggaggggtgaaagtcaacggcgggtcttgtgacggcgttcagcagtagttgacggggagcganagctcagcttgagccggaacaaacacggaccagaagagtgtgcagttgcaagatttaataagagtgaaaacagagctcccagccccttcctgcacacagcgcatcacctggaaggggctcctgctcacagcatcacttttaaacttctggaacccgcccaccactgccgaagtcacgattgaagcccagccacccaaagtttctgaggggaaggatgttcttctacttgtccacaatttgccccagaatcttcctggctacttctggtacaaaggggaaatgacggacctctaccattacattatatcgtatatagttgatggtaaaataattatatatgggcctgcatacagtggaagagaaacagtatattccaatgcatccctgctgatccagaatgtcacgccggaaggatgcaggaacctacaccttacacatcataaagcgaggtgatgagactagagaagaaattcgacatttcaccttcaccttatacttggagactcccaagccctacatctccagcagcaacttaaaccccagggaggccatggaggctgtgcgcttaatctgtgatcctgagactctggacgcaagctacctagtggtggatgaatggtcagagcctccctgtgactcacaggttgcagctgtccaaaaccaacaggaccctctatctatttggtgtcacaaagtatattgcaggaccctatgaatgtgaaatacggaacccagtgagtgccagtcgcagtgacccagtcaccctgaatctcctcccgaagctgcccatcccctacatcaccatcaacaacttaaaccccagggagaataaggatgtcttagccttcacctgtgaacctaagagtgagaactacacctacatttggtggctaaacggtcagagcctccccgtcagtcccggggtaaagcgacccattgaaaacaggatactcattctacccagtgtcacgagaaatgaaacaggaccctatcaatgtgaaatacgggaccgatatggtggcctccgcagtaacccagtcatcctaaatgtcctctatggtccagacctccccagaatttacccttcattcacctattaccgttcaggagaaaacctcgacttgtcctgcttcacggaatctaacccaccggcagagtatttttggacaattaatgggaagtttcagcaatcaggacaaaagctctttatcccccaaattactagaaatcatagcgggctctatgcttgctctgttcataactcagccactggcaaggaaatctccaaatccatgacagtcaaagtctctgggtccctgccatggagacctgacagagtctcagtcatgactgcaacaactgagacactgagaaaaagaacaggctgataccttcatgaaattcaagacaaagaagaaaaaaactcaatgttattggactaaataatcaaaaggataatgttttcataattttttattggaaaatgtgctgattctttgaatgttttattctccagatttatgaactttttttcttcagcaattggtaaagtatacttttgtaaacaaaaattgaaatatttgcttttgctgtctatctgaatgccccagaattgtgaaactattcatgagtattcataggtttatggtaataaagttatttgcacatgttccgtaa

SEQ ID NO: 373284 - DNA, 2767 bp, Homo sapiens
aggacagcacagctgacagccgtgctcagacagcttctggatcctaggctcatctccacagaggagaacacgcaggcagcagagaccatggggcccctcccagccccttcctgcacacagcgcatcacctggaaggggctcctgctcacagcatcacttttaaacttctggaacccgcccaccactgccgaagtcacgattgaagcccagccacccaaagtttctgaggggaaggatgttcttctacttgtccacaatttgccccagaatcttcctggctacttctggtacaaaggggaaatgacggacctctaccattacattatatcgtatatagttgatggtaaaataattatatatgggcctgcatacagtggaagagaaacagtatattccaatgcatccctgctgatccagaatgtcacgccggaaggatgcaggaacctacaccttacacatcataaagcgaggtgatgagactagagaagaaattcgacatttcaccttcaccttatacttggagactcccaagccctacatctccagcagcaacttaaaccccagggaggccatggaggctgtgcgcttaatctgtgatcctgagactctggacgcaagctacctagtggtggatgaatggtcagagcctccctgtgactcacaggttgcagctgtccaaaaccaacaggaccctctatctatttggtgtcacaaagtatattgcaggaccctatgaatgtgaaatacggaacccagtgagtgccagtcgcagtgacccagtcaccctgaatctcctcccgaagctgcccatcccctacatcaccatcaacaacttaaaccccagggagaataaggatgtcttagccttcacctgtgaacctaagagtgagaactacacctacatttggtggctaaacggtcagagcctccccgtcagtcccggggtaaagcgacccattgaaaacaggatactcattctacccagtgtcacgagaaatgaaacaggaccctatcaatgtgaaatacgggaccgatatggtggcctccgcagtaacccagtcatcctaaatgtcctctatggtccagacctccccagaatttacccttcattcacctattaccgttcaggagaaaacctcgacttgtcctgcttcacggaatctaacccaccggcagagtatttttggacaattaatgggaagtttcagcaatcaggacaaaagctctttatcccccaaattactagaaatcatagcgggctctatgcttgctctgttcataactcagccactggcaaggaaatctccaaatccatgacagtcaaagtctctggtaagtggatcccagcatccttggcagtagggttttatgtggagtctatctggctttcagagaagagtcaggaaaacatttttattcccagcctgtgtcccatgggcacaagcaaatcccaaattctcctcctgaaccctcccaatttgtctctacagactctcttctccttgtttttctgttttcttatggctgaccttgtgtctggcctgaaaaaggtagggagggggctttatcagccctgagccctatgtggtagaagaggcttcagagagggacaagaaggagagtcctcaagatcaagttgcttctcgctgtcaccgacacatccccttctgccacgtcttttttttcttgtacctattccatgagctacaaggaacagctgaggctttgaaacaagctcacacttttcccccagatgagaggaggaagccccttgggtgagggaggagcagctcagactctgcttcctgctctgctccgggctcctctggtgactggccctgcctcactcaacctggggtgggactagcgtgtgtgtagaaagggccctggtggcctggtcctgaatttggctaaattgagctgccagttgaagccaagcctcccccgggccaggctgcagggaaataagaagagagggagcctcagggcagactcctgagctgcgtcctggctctgaagtcaccagctgtatgaggctttgggcacagcacgtgggacacagcacggaggacagtgactgatgcagagctggaggaatagggagattcaccgttggggttattcatggcaggaaaggggcagtgccaaaaagtgtgtaattatagagagggtaagactaccagacactttatatatatctaatataagacttaccattaactatttctatgtgtgcaatttagtgttgtgtaaccatcacactatccatttccagaactttttcctcttaccatattaaacctctgtacccaataaacagtaactctcactccttcttcccctaacccttagcacccatcattctactttgtctctatgtaactggctattctaactatcttttataaatggaattacaaaaaaacaaaaaaaaaaaaaaaaaaaaaaaattgtgtggggcgcgcgcctgtgggcccctgagagaaaggttttttgagagaaacaattgggtgtgtgggggcgggggaccccaagatagaggtaaacggcaaacgtgggcacaaaaggggtgttccatgagagaaaccggggacacgacacaagggcggggaatccacacagaaatagaaaagcggcccgcggggaaacgacgaagcgttctgggaaaaacatcccaagaaggagaatcgagagaggacatcggagggaaacaaacaaaggagagtccaagggagaccgaatacacattaagcccggcgcgggagat

SEQ ID NO: 373285 - DNA, 2767 bp, Homo sapiens
aggacagcacagctgacagccgtgctcagacagcttctggatcctaggctcatctccacagaggagaacacgcaggcagcagagaccatggggcccctcccagccccttcctgcacacagcgcatcacctggaaggggctcctgctcacagcatcacttttaaacttctggaacccgcccaccactgccgaagtcacgattgaagcccagccacccaaagtttctgaggggaaggatgttcttctacttgtccacaatttgccccagaatcttcctggctacttctggtacaaaggggaaatgacggacctctaccattacattatatcgtatatagttgatggtaaaataattatatatgggcctgcatacagtggaagagaaacagtatattccaatgcatccctgctgatccagaatgtcacgccggaaggatgcaggaacctacaccttacacatcataaagcgaggtgatgagactagagaagaaattcgacatttcaccttcaccttatacttggagactcccaagccctacatctccagcagcaacttaaaccccagggaggccatggaggctgtgcgcttaatctgtgatcctgagactctggacgcaagctacctagtggtggatgaatggtcagagcctccctgtgactcacaggttgcagctgtccaaaaccaacaggaccctctatctatttggtgtcacaaagtatattgcaggaccctatgaatgtgaaatacggaacccagtgagtgccagtcgcagtgacccagtcaccctgaatctcctcccgaagctgcccatcccctacatcaccatcaacaacttaaaccccagggagaataaggatgtcttagccttcacctgtgaacctaagagtgagaactacacctacatttggtggctaaacggtcagagcctccccgtcagtcccggggtaaagcgacccattgaaaacaggatactcattctacccagtgtcacgagaaatgaaacaggaccctatcaatgtgaaatacgggaccgatatggtggcctccgcagtaacccagtcatcctaaatgtcctctatggtccagacctccccagaatttacccttcattcacctattaccgttcaggagaaaacctcgacttgtcctgcttcacggaatctaacccaccggcagagtatttttggacaattaatgggaagtttcagcaatcaggacaaaagctctctatcccccaaattactacaaagcatagagggctctatgcttgctctgttcgtaactcagccactggcaaggaaagctccaaatccatgacagtcaaagtctctggtaagtggatcccagcatccttggcagtagggttttatgtggagtctatctggctttcagagaagagtcaggaaaacatttttattcccagcctgtgtcccatgggcacaagcaaatcccaaattctcctcctgaaccctcccaatttgtctctacagactctcttctccttgtttttctgttttcttatggctgaccttgtgtctggcctgaaaaaggtagggagggggctttatcagccctgagccctatgtggtagaagaggcttcagagagggacaagaaggagagtcctcaagatcaagttgcttctcgctgtcaccgacacatccccttctgccacgtcttttttttcttgtacctattccatgagctacaaggaacagctgaggctttgaaacaagctcacacttttcccccagatgagaggaggaagccccttgggtgagggaggagcagctcagactctgcttcctgctctgctccgggctcctctggtgactggccctgcctcactcaacctggggtgggactagcgtgtgtgtagaaagggccctggtggcctggtcctgaatttggctaaattgagctgccagttgaagccaagcctcccccgggccaggctgcagggaaataagaagagagggagcctcagggcagactcctgagctgcgtcctggctctgaagtcaccagctgtatgaggctttgggcacagcacgtgggacacagcacggaggacagtgactgatgcagagctggaggaatagggagattcaccgttggggttattcatggcaggaaaggggcagtgccaaaaagtgtgtaattatagagagggtaagactaccagacactttatatatatctaatataagacttaccattaactatttctatgtgtgcaatttagtgttgtgtaaccatcacactatccatttccagaactttttcctcttaccatattaaacctctgtacccaataaacagtaactctcactccttcttcccctaacccttagcacccatcattctactttgtctctatgtaactggctattctaactatcttttataaatggaattacaaaaaaacaaaaaaaaaaaaaaaaaaaaaaaattgtgtggggcgcgcgcctgtgggcccctgagagaaaggttttttgagagaaacaattgggtgtgtgggggcgggggaccccaagatagaggtaaacggcaaacgtgggcacaaaaggggtgttccatgagagaaaccggggacacgacacaagggcggggaatccacacagaaatagaaaagcggcccgcggggaaacgacgaagcgttctgggaaaaacatcccaagaaggagaatcgagagaggacatcggagggaaacaaacaaaggagagtccaagggagaccgaatacacattaagcccggcgcgggagat

SEQ ID NO: 373286 - DNA, 1741 bp, Homo sapiens
tacccgataacgacagaaggggagtagacgacagaagggttgaaggacagcacagcctgacagccgtgctcaggaagtttctggatcctaggctcagctccacagaggagaacacgcaggcagcagagaccatggggcccctctcagcccctccctgcacacagcacatcacctggaagggggtcctgctcacagcatcacttttaaacttctggaacccgcccaccactgccgaagtcacgattgaagcccagccacccaaagtttctgaggggaaggatgttcttctacttgtccacaatttgccccagaatcttgctggctacttctggtacaaagggcaaatgacggacctctaccattacattacatcatatgtagtagacggtcaaataattatatatgggcctgcatacagtggaagagaaacagtatattccaatgcatccctgctgatccagaatgtcacccgggaaggatgcaggatcctacaccttacacatcataaagcgacgcgatgggactggaggagtaactggacatttcaccttcaccttacacctggagactcccaagccctccatctccagcagcaacttaaatcccagggaggccatggaggctgtgatcttaacctgtgatcctgcgactccagccgcaagctaccagtggtggatgaatggtcagagcctccctatgactcacaggttgcagctgtccaaaaccaacaggaccctctttatatttggtgtcacaaagtatattgcaggaccctatgaatgtgaaatacggaacccagtgagtgccagtcgcagtgacccagtcaccctgaatctcctcccgaagctgcccatcccctacatcaccatcaacaacttaaaccccagggagaataaggatgtcttagccttcacctgtgaacctaagagtgagaactacacctacatttggtggctaaacggtcagagcctccccgtcagtcccggggtaaagcgacccattgaaaacaggatactcattctacccagtgtcacgagaaatgaaacaggaccctatcaatgtgaaatacgggaccgatatggtggcctccgcagtaacccagtcatcctaaatgtcctctatggtccagacctccccagaatttacccttcattcacctattaccgttcaggagaaaacctcgacttgtcctgcttcacggaatctaacccaccggcagagtatttttggacaattaatgggaagtttcagcaatcaggacaaaagctctttatcccccaaattactagaaatcatagcgggctctatgcttgctctgttcataactcagccactggcaaggaaatctccaaatccatgacagtcaaagtctctgggtccctgccatggagacctgacagagtctcagtcatgactgcaacaactgagacactgagaaaaagaacaggctgataccttcatgaaattcaagacaaagaagaaaaaaactcaatgttattggactaaataatcaaaaggataatgttttcataattttttattggaaaatgtgctgattctttgaatgttttattctccagatttatgaactttttttcttcagcaattggtaaagtatacttttgtaaacaaaaattgaaatatttgcttttgctgtctatctgaatgccccagaattgtgaaactattcatgagtattcataggtttatggtaataaagttatttgcacatgttccgtaa

SEQ ID NO: 373287 - DNA, 1699 bp, Homo sapiens
aggacagcacagctgacagccgtgctcagacagcttctggatcctaggctcatctccacagaggagaacacgcaggcagcagagaccatggggcccctcccagccccttcctgcacacagcgcatcacctggaaggggctcctgctcacagcatcacttttaaacttctggaacccgcccaccactgccgaagtcacgattgaagcccagccacccaaagtttctgaggggaaggatgttcttctacttgtccacaatttgccccagaatcttcctggctacttctggtacaaaggggaaatgacggacctctaccattacattatatcgtatatagttgatggtaaaataattatatatgggcctgcatacagtggaagagaaacagtatattccaatgcatccctgctgatccagaatgtcacgccggaaggatgcaggaacctacaccttacacatcataaagcgaggtgatgagactagagaagaaattcgacatttcaccttcaccttatacttggagactcccaagccctacatctccagcagcaacttaaaccccagggaggccatggaggctgtgcgcttaatctgtgatcctgagactctggacgcaagctacctagtggtggatgaatggtcagagcctccctgtgactcacaggttgcagctgtccaaaaccaacaggaccctctatctatttggtgtcacaaagtatattgcaggaccctatgaatgtgaaatacggaacccagtgagtgccagtcgcagtgacccagtcaccctgaatctcctcccgaagctgcccatcccctacatcaccatcaacaacttaaaccccagggagaataaggatgtcttagccttcacctgtgaacctaagagtgagaactacacctacatttggtggctaaacggtcagagcctccccgtcagtcccggggtaaagcgacccattgaaaacaggatactcattctacccagtgtcacgagaaatgaaacaggaccctatgaatgtgaaatacgggaccgagatggtggcatgcgcagtgacccagtcaccctgaatgtcctctatggtccagacctccccagcatttacccttcattcacctattaccgttcaggaggaaaacctcgacttgtcctgcttcacggaatctaacccaccggcagagtatttttggacaattaatgggaagtttcagcaatcaggacaaaagctctttatcccccaaattactagaaatcatagcgggctctatgcttgctctgttcataactcagccactggcaaggaaatctccaaatccatgacagtcaaagtctctgggtccctgccatggagacctgacagagtctcagtcatgactgcaacaactgagacactgagaaaaagaacaggctgataccttcatgaaattcaagacaaagaagaaaaaaactcaatgttattggactaaataatcaaaaggataatgttttcataattttttattggaaaatgtgctgattctttgaatgttttattctccagatttatgaactttttttcttcagcaattggtaaagtatacttttgtaaacaaaaattgaaatatttgcttttgctgtctatctgaatgccccagaattgtgaaactattcatgagtattcataggtttatggtaataaagttatttgcacatgttccgtaa

SEQ ID NO: 373288 - DNA, 1701 bp, Homo sapiens
aggacagcacagctgacagccgtgctcagacagcttctggatcctaggctcatctccacagaggagaacacgcaggcagcagagaccatggggcccctcccagccccttcctgcacacagcgcatcacctggaaggggctcctgctcacagcatcacttttaaacttctggaacccgcccaccactgccgaagtcacgattgaagcccagccacccaaagtttctgaggggaaggatgttcttctacttgtccacaatttgccccagaatcttcctggctacttctggtacaaaggggaaatgacggacctctaccattacattatatcgtatatagttgatggtaaaataattatatatgggcctgcatacagtggaagagaaacagtatattccaatgcatccctgctgatccagaatgtcacgccggaaggatgcaggaacctacaccttacacatcataaagcgaggtgatgagactagagaagaaattcgacatttcaccttcaccttatacttggagactcccaagccctacatctccagcagcaacttaaaccccagggaggccatggaggctgtgcgcttaatctgtgatcctgagactctggacgcaagctacctagtggtggatgaatggtcagagcctccctgtgactcacaggttgcagctgtccaaaaccaacaggaccctctatctatttggtgtcacaaagtatattgcaggaccctatgaatgtgaaatacggaacccagtgagtgccagtcgcagtgacccagtcaccctgaatctcctcccgaagctgcccatcccctacatcaccatcaacaacttaaaccccagggagaataaggatgtcttagccttcacctgtgaacctaagagtgagaactacacctacatttggtggctaaacggtcagagcctccccgtcagtcccggggtaaagcgacccattgaaaacaggatactcattctacccagtgtcacgagaaatgaaacaggaccctatgaatgtgaaatacgggaccgagatggtggcatgcgcagtgacccagtcaccctgaatgtcctctatggtccagacctccccagcatttacccttcattcacctattaccgttcaggaggaaaacctcgacttgtcctgcttcacggaatctaacccaccggcagagtatttttggacaattaatgggaagtttcagcaatcaggacaaaagctctttatcccccaaattactagaaatcatagcgggctctatgcttgctctgttcataactcagccactggcaaggaaatctccaaatccatgacagtcaaagtctctggtggtccctgccatggagacctgacagagtctcagtcatgactgcaacaactgagacactgagaaaaagaacaggctgataccttcatgaaattcaagacaaagaagaaaaaaactcaatgttattggactaaataatcaaaaggataatgttttcataattttttattggaaaatgtgctgattctttgaatgttttattctccagatttatgaactttttttcttcagcaattggtaaagtatacttttgtaaacaaaaattgaaatatttgcttttgctgtctatctgaatgccccagaattgtgaaactattcatgagtattcataggtttatggtaataaagttatttgcacatgttccgtaa

SEQ ID NO: 373289 - DNA, 2001 bp, Homo sapiens
tacccgataacgacagaaggggagtagacgacagaagggttgaaggacagcacagcctgacagccgtgctcaggaagtttctggatcctaggctcagctccacagaggagaacacgcaggcagcagagaccatggggcccctctcagcccctccctgcacacagcacatcacctggaagggggtcctgctcacagcatcacttttaaacttctggaacccgcccaccactgccgaagtcacgattgaagcccagccacccaaagtttctgaggggaaggatgttcttctacttgtccacaatttgccccagaatcttgctggctacttctggtacaaagggcaaatgacggacctctaccattacattacatcatatgtagtagacggtcaaataattatatatgggcctgcatacagtggaagagaaacagtatattccaatgcatccctgctgatccagaatgtcacgccggaaggatgcaggaacctacaccttacacatcataaagcgaggtgatgagactagagaagaaattcgacatttcaccttcaccttatacttggagactcccaagccctacatctccagcagcaacttaaaccccagggaggccatggaggctgtgcgcttaatctgtgatcctgagactctggacgcaagctacctagtggtggatgaatggtcagagcctccctgtgactcacaggttgcagctgtccaaaaccaacaggaccctctatctatttggtgtcacaaagtatattgcaggaccctatgaatgtgaaatacggaacccagtgagtgccagtcgcagtgacccagtcaccctgaatctcctccatggtccagacctccccagaatttacccttcattcacctattaccgttcaggagaaaacctcgacttgtcctgcttcacggaatctaacccaccggcagagtatttttggacaattaatgggaagtttcagcaatcaggacaaaagctctttatcccccaaattactagaaatcatagcgggctctatgcttgctctgttcataactcagccactggcaaggaaatctccaaatccatgacagtcaaagtctctggtaagtggatcccagcatccttggcagtagggttttatgtggagtctatctggctttcagagaagagtcaggaaaacatttttattcccagcctgtgtcccatgggcacaagcaaatcccaaattctcctcctgaaccctcccaatttgtctctacagactctcttctccttgtttttctgttttcttatggctgaccttgtgtctggcctgaaaaaggtagggagggggctttatcagccctgagccctatgtggtagaagaggcttcagagagggacaagaagggaattccaaggcagcgtccgcaggtcgtggtcacctgccagcgactgtctcagactgggcagggaggctttggcatgacttaagaggaagggcagtcttgggcccgctatgcaggtcctggcaaacctggctgccctgtctccatccctgtccctcagggtagcaccatggcaggactgggggaactggagtgtccttgctgtatccctgttgtgaggttccttccaggggctggcactgaagcaagggtgctgggaccccatggccttcagccctggctgagcaactgggctgtagggcagggcacttctgaggtcaggtcttggtaggtgcctgcatctgtctgccttctggctgacaatcctggaaatctgttctccagaatcaggccaaaaagttcacagtcaaatggggaggggtattcttcatgcaggagacccctaggccctggaggctgcaacatacctcaatcctgtcccaggccggatcctcctgaagcccttttcgcagcactgctatcctccaaagccattgtaaatgtgtgtacagtgtgtataaaccttcttcttctttttttttttttaaactgaggattgtcattaaacacagttgttttct

SEQ ID NO: 373290 - DNA, 867 bp, Homo sapiens
tacccgataacgacagaaggggagtagacgacagaagggttgaaggacagcacagcctgacagccgtgctcaggaagtttctggatcctaggctcagctccacagaggagaacacgcaggcagcagagaccatggggcccctctcagcccctccctgcacacagcacatcacctggaagggggtcctgctcacagcatcacttttaaacttctggaacccgcccaccactgccgaagtcacgattgaagcccagccacccaaagtttctgaggggaaggatgttcttctacttgtccacaatttgccccagaatcttgctggctacttctggtacaaagggcaaatgacggacctctaccattacattacatcatatgtagtagacggtcaaataattatatatgggcctgcatacagtggaagagaaacagtatattccaatgcatccctgctgatccagaatgtcacgccggaaggatgcaggaacctacaccttacacatcataaagcgaggtgatgagactagagaagaaattcgacatttcaccttcaccttatactttggagactcccaagccctacatctccagcagcaacttaaaccccagggaggccatggaggctgtgcgcttaatctgtgatcctgagactctggacgcaagctacctatggtggatgaatggtcagagcctccctgtgactcacaggttgcagctgtccaaaaccaacaggaccctctatctatttggtgtcacaaagtatattgcaggaccctatgaatgtgaaatacggaacccagtgagtgccagtcgcagtgacccagtcaccctgaatctcctccgtgagtatcctctgttcctctgtga

SEQ ID NO: 373291 - DNA, 774 bp, Homo sapiens
tgtggttggttttttttggccacccctcccccaatctatctctaattttaagatgtgattcactaggaaaatatgattctgttaattgaattcattttagagccaacttttcaggaacctatctatttctgtaaagtgagagccacttgtaaatgtaccgtttggtgccagcactcaaattttccctgactcagttgctccagtggtgtttaaatatcttcccataaatcaggcagccagcgctccatacttatttactgggtcttgtgattcagcccaggatcctgatagtgatcttggatgggtgatataaatagactaggatttgccaatggctatttttatcagggaagctttctaagttgatttctttgaacccagaacaacttcctccctctggcttcccctgttttcctccaagactagggagatcctttctttattctgcccgcccatcttctgcccctcccccagccagctggtgtctgcagaaattagaaggaaggtacgtgcctgacacagagttgcctgaaatcatatatctttaccccctttcaggatcatctttctttcatccggcccaagaatggcaccttccccgcccatcaggccacctgcactcaggagtcggctgcctgtcctgaaatagatctctaccagctctcaagcagaacaattccttgcattcatacttgaatgtataatttgtgttattacctcttatttgtctttgtaagtttgtccctgccccagtttaaaaaaaaaaaaaaatct

SEQ ID NO: 373292 - DNA, 170 bp, Homo sapiens
atgactcctatgccgccgcttcctcttcccgcaggaggccgagcatgctcactgcgccgcgctgccgaggcagggagggcttctgcacaggatcagcctctcaatgtagcaagtgttggaaagaaagagaaaggggagggggagagactctagagacggggccttggcag

SEQ ID NO: 373293 - DNA, 6453 bp, Homo sapiens
  misc_feature (2803)..(2803): n is a, c, g, or t
gcacgcgcgccgcttcccagtggcaagcgcgggcaggaccgcgttgcgtcatcggggcgcgcgcctcagagagagctgtggttgccggaagttgagcggcggcaagaaataatggcggcagctacgggggatcctggactctctaaactgcagtttgccccttttagtagtgccttggatgttgggttttggcatgagttgacccagaagaagctgaacgagtatcggctggatgaagctcccaaggacattaagggttattactacaatggtgactctgctgggctgccagctcgcttaacattggagttcagtgcttttgacatgagtgctcccaccccagcccgttgctgcccagctattggaacactgtataacaccaacacactcgagtctttcaagactgcagataagaagctccttttggaacaagcagcaaatgagatatgggaatccataaaatcaggcactgctcttgaaaaccctgtactcctcaacaagttcctcctcttgacatttgcagatctaaagaagtaccacttctactattggttttgctatcctgccctctgtcttccagagagtttacctctcattcaggggccagtgggtttggatcaaaggttttcactaaaacagattgaagcactagagtgtgcatatgataatctttgtcaaacagaaggagtcacagctcttccttacttcttaatcaagtatgatgagaacatggtgctggtttccttgcttaaacactacagtgatttcttccaaggtcaaaggacgaagataacaattggtgtatatgatccctgtaacttagcccagtaccctggatggcctttgaggaattttttggtcctagcagcccacagatggagtagcagtttccagtctgttgaagttgtttgcttccgtgaccgtaccatgcagggggcgagagacgttgcccacagcatcatcttcgaagtgaagcttccagaaatggcatttagcccagattgtcctaaagcagttggatgggaaaagaaccagaaaggaggcatgggaccaaggatggtgaacctcagtgaatgtatggaccctaaaaggttagctgagtcatcagtggatctaaatctcaaactgatgtgttggagattggttcctactttagacttggacaaggttgtgtctgtcaaatgtctgctgcttggagccggcaccttgggttgcaatgtagctaggacgttgatgggttggggcgtgagacacatcacatttgtggacaatgccaagatctcctactccaatcctgtgaggcagcctctctatgagtttgaagattgcctagggggtggtaagcccaaggctctggcagcagcggaccggctccagaaaatattccccggtgtgaatgccagaggattcaacatgagcatacctatgcctgggcatccagtgaacttctccagtgtcactctggagcaagcccgcagagatgtggagcaactggagcagctcatcgaaagccatgatgtcgtcttcctattgatggacaccagggagagccggtggcttcctgccgtcattgctgcaagcaagagaaagctggtcatcaatgctgctttgggatttgacacatttgttgtcatgagacatggtctgaagaaaccaaagcagcaaggagctggggacttgtgtccaaaccaccctgtggcatctgctgacctcctgggctcatcgctttttgccaacatccctggttacaagcttggctgctacttctgcaatgatgtggtggccccaggagattcaaccagagaccggaccttggaccagcagtgcactgtgagtcgtccaggactggccgtgattgcaggagccctggccgtggaattgatggtatctgttttgcagcatccagaagggggctatgccattgccagcagcagtgacgatcggatgaatgagcctccaacctctcttgggcttgtgcctcaccagatccggggatttctttcacggtttgataatgtccttcccgtcagcctggcatttgacaaatgtacagcttgttcttccaaagttcttgatcaatatgaacgagaaggatttaacttcctagccaaggtgtttaattcttcacattccttcttagaagacttgactggtcttacattgctgcatcaagaaacccaagctgctgagatctgggacatgagcgatgatgagaccatctgagatggccccgctgtggggctgacttctccccggccgcctgctgaggagctctccatcgccagagcaggactgctgaccccaggcctggtgattctgggcccctcctccataccccgaggtctgggattcccccctctgctgcccaggagtggccagtgttcggcgttgctcgggattcaagataccaccagttcagagctaaataataaccttggccttggccttgctattgacctgggacttggtcctccatgcagtttttatttcttgtcacagtgactgatagccatcccccaggatcctttccccttggccctgagggggtgacccaacacagaccaaatggggaaatgagcaaccagctcctgcccagagccactgcgggaggtggcaccctcatccccggaatgtgctgcccaccgcaccgcaggctcctcctgtgggggccctgggcatgggtgagggtgggaccccgtgagcgcactgcaccctggccctggtggagcgggaggaggaggagagccgagctgggtacgagactaaagggcccacatgacccagtgacgccagatttccaccnaggactgagtgagctgctcagacatggctttctgcctcccagcctgtcctccactgtgggcatagcatctgtgcctgcctgcctgcttgagggagaggagtttctgctgctgccttgagctggggggaagagcccaggggcagatcctggcagctgcctggatggggctcctccctgcccttatgagcaggccaggcccagaaaggccgagcctgggctgccttcctgccccagccgagggaggggtcagacggctctaccatgggtaactcaggcaagagctggttttcctctttattctgggtgtgtgcagctgtgaggccccaacccaggagaggccatggcctaggtacctgtgaccaccctgcccccgtgtagagggcatcgtctttcctgctattttattctttcagcttttgtcttaggcccagaatcaaagtgaaaattgagtcgagctgacccttacaacagtaggatttagtagggtagatttcaaatgaggcttcgcttctcccaaagtagccagtccaagttccagtggctgtcgttcagctcatgggagcttcatggggacacagccggcacaggtgcagggcccgagtccgcccacccagcctggcgctgaaactgcacacgtacactatgtggtttaagagcactttattattgttcttaaggctacttttaagtacaaaaaaagatggcctgccaaacctttttttttcttcttccaggaaaaacaggccacagagaatggtatattacagatttacacacatgaagagaaggtcagagcgcactgcaggcagcgcggctctgggaagaacttcacggagccccttcttagagcagggagggggctttctcagtgaaatgtttggttttctgctgcctcctctgccccaggcccccctccagggtactgcctatcccagataggtcagtgcaccagggacccggccgccagcaccgccgacccctcccagagtgacgcccttgttcactgacaaagagacctgtcccaggagtgtcctccaccgagccggtcagctgtgggtggttttcctgttacgacgctcagtagcctgtagcaataacaaactcgtggctatgaatgcagatgcagtgttctcatagaataactgttcctgcacttttacagacaaatctacgacaaaaaaaaagatcaactttttttttccgaacaacaaaaaaaatgaatgattacaataggaaagggaaaaattaaatagctacatatcattaacaaattaatgttcttcaaaaaatacctacaaatttctctgtacattctttacgcacagcgtaacgatggtctcaaaatcacccatatagaaaagtgttctcaacgatttttcctacagaaaatataggggcctgaatgccaaagcttggaagcccagtacagtgggagtgaaatgtgtgcggggcaaggagaagggcttttctttcctccacttttcaaaggcctgcagccactctgtgactacaagagccagtcctccgaccttttcacccagtgccaatttccaaaattcaacagctaaaaactgtaaaaccgggggtcatacggtgtgcagagtccacaaagccttgcaggtgaggtgaccacgcccacgtcacctggtcaggtgccatcgtcgtgagcctctggtgggccaggtgggacacagcacaccccagggggaggggatagaaacgctcattgaccaaaaaggagcagctgtgacctccacagctgtgtctgtcatgcttgcttcatctaatttctagttagtagctattaatatagcaaataataaatgcagtaataacagtataaagtcagaggaatgtatactgccttggccccagcgtacgaggaagcgtataaaacaccatatcacagattgtctgtcagtaatctgctgttcagccaagagagttcaaagggagcagtttctgcatgtagggaagttggaagacacaaaccccacctcccctgggagcttgtaacaaagcagacagggatgcaaaaataaatgatgtcagcctgcagccaaactccagcatcccacaccgcagctgacccactgctcatcgcgagggcctgccaggagctggcctcccgcactacttgtgagtaaagtgaatatcaaataccaatcttagagtacaactgtaccagcagtaagtatatctaggactgtaactgacaaaaataaactaattctgaaaagaagatagtaagtattaaggtttttgtttactgtctatataattaatagaaaccagctattttttctccattaaaacatgcatcacgtttaaagcactatggaatcctccaacctcagctctagtctaacaaactgcagtgttcagagaagataaaatgcccgtgattggtagagtctgcagtccagttgcaagcacctgaaatctagagagagaaagacctataacctgtatgagacttccccttccaaagctgtattgtctacattaaaaaaaacaaaaacagtaacaacaacaaacacacaaatggtcagaaatgtcatccttaaaccctttgtttttcagcagtttgccctcagagttctggcataacacataaagttgtcaggcaactttagtcctcctccaatagtgcaaatcagacacgacagttctcttcaagtatacacacgcacacacatggaccgaaccaaacacgccgtggaagctgagccacacacaccccggtctcaagaagcaaaggaaaaagcacaaagcgtctgagtcaccaattcatcatggcttgtgactgagaaagcgctgtggagtcctggccccgtcggggcagcagacctgcatcagaggtttctttggtaactgaggcaggaagtaaggatgctacattagacagatgttccacgcgtagttcctgctatcatgtttgagggcccccttgtacggataccaagcaagtacaaaaacagaacacaaatcccaacaacatggtttttgcaaataaaccatcccttcccttccccccaccccacccccatgatttttttttttttaagtactgactgttcaaagctcaggcaaaccatgcagatccacgtgttgttggaggaggcgctcccttcaggagaccacagagggggagtgactgtggctgaccatgtgggcagaggggctggcgggctggcccctgcgagaggcggactcagggctgctggatgctccgtccttggccgctttgatctggagccacgtgtcacccagagctttggcaaagtggtcgtccacggagcccgtgatggacacggagttgggtgccggctcgggctccttgtaattcttgcccaggctcctgcggaaatgctcctccaccacggggtcacaggtggtggcagctgcaggcaagcaggaaggcaggcagtcagacacaggtggctgcagacagacaggcacggttgcagcaccctccctcaggcagcccagagccggactggctgccacggtcagcgtgggctctgcagacagaacccacctcccccggctaagtcaggcacttgggcaggtcacttttctgtaaaatggtgatgtaccaactgcactgggccagagtccgagttcagaaagagaatgtggcattaaat

SEQ ID NO: 373294 - DNA, 6331 bp, Homo sapiens
  misc_feature (2681)..(2681): n is a, c, g, or t
gcacgcgcgccgcttcccagtggcaagcgcgggcaggaccgcgttgcgtcatcggggcgcgcgcctcagagagagctgtggttgccggaagttgagcggcggcaagaaataatggcggcagctacgggggatcctggactctctaaactgcagtttgccccttttagtagtgccttggatgttgggttttggcatgagttgacccagaagaagctgaacgagtatcggctggatgaagctcccaaggacattaagggttattactacaatggtgactctgctgggctgccagctcgcttaacattggagttcagtgcttttgacatgagtgctcccaccccagcccgttgctgcccagctattggaacactgtataacaccaacacactcgagtctttcaagactgcagataagaagctccttttggaacaagcagcaaatgagatatgggaatccataaaatcaggcactgctcttgaaaaccctgtactcctcaacaagttcctcctcttgacatttgcagatctaaagaagtaccacttctactattggttttgctatcctgccctctgtcttccagagagtttacctctcattcaggggccagtgggtttggatcaaaggttttcactaaaacagattgaagcactagagtgtgcatatgataatctttgtcaaacagaaggagtcacagctcttccttacttcttaatcaagtatgatgagaacatggtgctggtttccttgcttaaacactacagtgatttcttccaaggtcaaaggacgaagataacaattggtgtatatgatccctgtaacttagcccagtaccctggatggcctttgaggaattttttggtcctagcagcccacagatgattgtcctaaagcagttggatgggaaaagaaccagaaaggaggcatgggaccaaggatggtgaacctcagtgaatgtatggaccctaaaaggttagctgagtcatcagtggatctaaatctcaaactgatgtgttggagattggttcctactttagacttggacaaggttgtgtctgtcaaatgtctgctgcttggagccggcaccttgggttgcaatgtagctaggacgttgatgggttggggcgtgagacacatcacatttgtggacaatgccaagatctcctactccaatcctgtgaggcagcctctctatgagtttgaagattgcctagggggtggtaagcccaaggctctggcagcagcggaccggctccagaaaatattccccggtgtgaatgccagaggattcaacatgagcatacctatgcctgggcatccagtgaacttctccagtgtcactctggagcaagcccgcagagatgtggagcaactggagcagctcatcgaaagccatgatgtcgtcttcctattgatggacaccagggagagccggtggcttcctgccgtcattgctgcaagcaagagaaagctggtcatcaatgctgctttgggatttgacacatttgttgtcatgagacatggtctgaagaaaccaaagcagcaaggagctggggacttgtgtccaaaccaccctgtggcatctgctgacctcctgggctcatcgctttttgccaacatccctggttacaagcttggctgctacttctgcaatgatgtggtggccccaggagattcaaccagagaccggaccttggaccagcagtgcactgtgagtcgtccaggactggccgtgattgcaggagccctggccgtggaattgatggtatctgttttgcagcatccagaagggggctatgccattgccagcagcagtgacgatcggatgaatgagcctccaacctctcttgggcttgtgcctcaccagatccggggatttctttcacggtttgataatgtccttcccgtcagcctggcatttgacaaatgtacagcttgttcttccaaagttcttgatcaatatgaacgagaaggatttaacttcctagccaaggtgtttaattcttcacattccttcttagaagacttgactggtcttacattgctgcatcaagaaacccaagctgctgagatctgggacatgagcgatgatgagaccatctgagatggccccgctgtggggctgacttctccccggccgcctgctgaggagctctccatcgccagagcaggactgctgaccccaggcctggtgattctgggcccctcctccataccccgaggtctgggattcccccctctgctgcccaggagtggccagtgttcggcgttgctcgggattcaagataccaccagttcagagctaaataataaccttggccttggccttgctattgacctgggacttggtcctccatgcagtttttatttcttgtcacagtgactgatagccatcccccaggatcctttccccttggccctgagggggtgacccaacacagaccaaatggggaaatgagcaaccagctcctgcccagagccactgcgggaggtggcaccctcatccccggaatgtgctgcccaccgcaccgcaggctcctcctgtgggggccctgggcatgggtgagggtgggaccccgtgagcgcactgcaccctggccctggtggagcgggaggaggaggagagccgagctgggtacgagactaaagggcccacatgacccagtgacgccagatttccaccnaggactgagtgagctgctcagacatggctttctgcctcccagcctgtcctccactgtgggcatagcatctgtgcctgcctgcctgcttgagggagaggagtttctgctgctgccttgagctggggggaagagcccaggggcagatcctggcagctgcctggatggggctcctccctgcccttatgagcaggccaggcccagaaaggccgagcctgggctgccttcctgccccagccgagggaggggtcagacggctctaccatgggtaactcaggcaagagctggttttcctctttattctgggtgtgtgcagctgtgaggccccaacccaggagaggccatggcctaggtacctgtgaccaccctgcccccgtgtagagggcatcgtctttcctgctattttattctttcagcttttgtcttaggcccagaatcaaagtgaaaattgagtcgagctgacccttacaacagtaggatttagtagggtagatttcaaatgaggcttcgcttctcccaaagtagccagtccaagttccagtggctgtcgttcagctcatgggagcttcatggggacacagccggcacaggtgcagggcccgagtccgcccacccagcctggcgctgaaactgcacacgtacactatgtggtttaagagcactttattattgttcttaaggctacttttaagtacaaaaaaagatggcctgccaaacctttttttttcttcttccaggaaaaacaggccacagagaatggtatattacagatttacacacatgaagagaaggtcagagcgcactgcaggcagcgcggctctgggaagaacttcacggagccccttcttagagcagggagggggctttctcagtgaaatgtttggttttctgctgcctcctctgccccaggcccccctccagggtactgcctatcccagataggtcagtgcaccagggacccggccgccagcaccgccgacccctcccagagtgacgcccttgttcactgacaaagagacctgtcccaggagtgtcctccaccgagccggtcagctgtgggtggttttcctgttacgacgctcagtagcctgtagcaataacaaactcgtggctatgaatgcagatgcagtgttctcatagaataactgttcctgcacttttacagacaaatctacgacaaaaaaaaagatcaactttttttttccgaacaacaaaaaaaatgaatgattacaataggaaagggaaaaattaaatagctacatatcattaacaaattaatgttcttcaaaaaatacctacaaatttctctgtacattctttacgcacagcgtaacgatggtctcaaaatcacccatatagaaaagtgttctcaacgatttttcctacagaaaatataggggcctgaatgccaaagcttggaagcccagtacagtgggagtgaaatgtgtgcggggcaaggagaagggcttttctttcctccacttttcaaaggcctgcagccactctgtgactacaagagccagtcctccgaccttttcacccagtgccaatttccaaaattcaacagctaaaaactgtaaaaccgggggtcatacggtgtgcagagtccacaaagccttgcaggtgaggtgaccacgcccacgtcacctggtcaggtgccatcgtcgtgagcctctggtgggccaggtgggacacagcacaccccagggggaggggatagaaacgctcattgaccaaaaaggagcagctgtgacctccacagctgtgtctgtcatgcttgcttcatctaatttctagttagtagctattaatatagcaaataataaatgcagtaataacagtataaagtcagaggaatgtatactgccttggccccagcgtacgaggaagcgtataaaacaccatatcacagattgtctgtcagtaatctgctgttcagccaagagagttcaaagggagcagtttctgcatgtagggaagttggaagacacaaaccccacctcccctgggagcttgtaacaaagcagacagggatgcaaaaataaatgatgtcagcctgcagccaaactccagcatcccacaccgcagctgacccactgctcatcgcgagggcctgccaggagctggcctcccgcactacttgtgagtaaagtgaatatcaaataccaatcttagagtacaactgtaccagcagtaagtatatctaggactgtaactgacaaaaataaactaattctgaaaagaagatagtaagtattaaggtttttgtttactgtctatataattaatagaaaccagctattttttctccattaaaacatgcatcacgtttaaagcactatggaatcctccaacctcagctctagtctaacaaactgcagtgttcagagaagataaaatgcccgtgattggtagagtctgcagtccagttgcaagcacctgaaatctagagagagaaagacctataacctgtatgagacttccccttccaaagctgtattgtctacattaaaaaaaacaaaaacagtaacaacaacaaacacacaaatggtcagaaatgtcatccttaaaccctttgtttttcagcagtttgccctcagagttctggcataacacataaagttgtcaggcaactttagtcctcctccaatagtgcaaatcagacacgacagttctcttcaagtatacacacgcacacacatggaccgaaccaaacacgccgtggaagctgagccacacacaccccggtctcaagaagcaaaggaaaaagcacaaagcgtctgagtcaccaattcatcatggcttgtgactgagaaagcgctgtggagtcctggccccgtcggggcagcagacctgcatcagaggtttctttggtaactgaggcaggaagtaaggatgctacattagacagatgttccacgcgtagttcctgctatcatgtttgagggcccccttgtacggataccaagcaagtacaaaaacagaacacaaatcccaacaacatggtttttgcaaataaaccatcccttcccttccccccaccccacccccatgatttttttttttttaagtactgactgttcaaagctcaggcaaaccatgcagatccacgtgttgttggaggaggcgctcccttcaggagaccacagagggggagtgactgtggctgaccatgtgggcagaggggctggcgggctggcccctgcgagaggcggactcagggctgctggatgctccgtccttggccgctttgatctggagccacgtgtcacccagagctttggcaaagtggtcgtccacggagcccgtgatggacacggagttgggtgccggctcgggctccttgtaattcttgcccaggctcctgcggaaatgctcctccaccacggggtcacaggtggtggcagctgcaggcaagcaggaaggcaggcagtcagacacaggtggctgcagacagacaggcacggttgcagcaccctccctcaggcagcccagagccggactggctgccacggtcagcgtgggctctgcagacagaacccacctcccccggctaagtcaggcacttgggcaggtcacttttctgtaaaatggtgatgtaccaactgcactgggccagagtccgagttcagaaagagaatgtggcattaaat

SEQ ID NO: 373295 - DNA, 6302 bp, Homo sapiens
  misc_feature (2652)..(2652): n is a, c, g, or t
ggcacgaggggttgccggaagttgagcggcggcaagaaataatggcggcagctacgggggatcctggactctctaaactgcagtttgccccttttagtagtgccttggatgttgggttttggcatgagttgacccagaagaagctgaacgagtatcggctggatgaagctcccaaggacattaagggttattactacaatggtgactctgctgggctgccagctcgcttaacattggagttcagtgcttttgacatgagtgctcccaccccagcccgttgctgcccagctattggaacactgtataacaccaacacactcgagtctttcaagactgcagataagaagctccttttggaacaagcagcaaatgagatatgggaatccataaaatcaggcactgctcttgaaaaccctgtactcctcaacaagttcctcctcttgacatttgcagatctaaagaagtaccacttctactattggttttgctatcctgccctctgtcttccagagagtttacctctcattcaggggccagtgggtttggatcaaaggttttcactaaaacagattgaagcactagagtgtgcatatgataatctttgtcaaacagaaggagtcacagctcttccttacttcttaatcaagtatgatgagaacatggtgctggtttccttgcttaaacactacagtgatttcttccaaggtcaaaggacgaagataacaattggtgtatatgatccctgtaacttagcccagtaccctggatggcctttgaggaattttttggtcctagcagcccacagatggagtagcagtttccagtctgttgaagttgtttgcttccgtgaccgtaccatgcagggggcgagagacgttgcccacagcatcatcttcgaagtgaagcttccagaaatggcatttagcccagattgtcctaaagcagttggatgggaaaagaaccagaaaggaggcatgggaccaaggatggtgaacctcagtgaatgtatggaccctaaaaggttagctgagtcatcagtggatctaaatctcaaactgatgtgttggagattggttcctactttagacttggacaaggttgtgtctgtcaaatgtctgctgcttggagccggcaccttgggttgcaatgtagctaggacgttgatgggttggggcgtgagacacatcacatttgtggacaatgccaagatctcctactccaatcctgtgaggcagcctctctatgagtttgaagattgcctagggggtggtaagcccaaggctctggcagcagcggaccggctccagaaaatattccccggtgtgaatgccagaggattcaacatgagcatacctatgcctgggcatccagtgaacttctccagtgtcactctggagcaagcccgcagagatgtggagcaactggagcagctcatcgaaagccatgatgtcgtcttcctattgatggacaccagggagagccggtggcttcctgccgtcattgctgcaagcaagagaaagctggtcatcaatgctgctttgggatttgacacatttgttgtcatgagacatggtctgaagaaaccaaagcagcaaggagctggggacttgtgtccaaaccaccctgtggcatctgctgacctcctgggctcatcgctttttgccaacatccctggttacaagcttggctgctacttctgcaatgatgtggtggccccaggagattcaaccagagaccggaccttggaccagcagtgcactgtgagtcgtccaggactggccgtgattgcaggagccctggccgtggaattgatggtatctgttttgcagcatccagaagggggctatgccattgccagcagcagtgacgatcggatgaatgagcctccaacctctcttgggcttgtgcctcaccaggttcttgatcaatatgaacgagaaggatttaacttcctagccaaggtgtttaattcttcacattccttcttagaagacttgactggtcttacattgctgcatcaagaaacccaagctgctgagatctgggacatgagcgatgatgagaccatctgagatggccccgctgtggggctgacttctccccggccgcctgctgaggagctctccatcgccagagcaggactgctgaccccaggcctggtgattctgggcccctcctccataccccgaggtctgggattcccccctctgctgcccaggagtggccagtgttcggcgttgctcgggattcaagataccaccagttcagagctaaataataaccttggccttggccttgctattgacctgggacttggtcctccatgcagtttttatttcttgtcacagtgactgatagccatcccccaggatcctttccccttggccctgagggggtgacccaacacagaccaaatggggaaatgagcaaccagctcctgcccagagccactgcgggaggtggcaccctcatccccggaatgtgctgcccaccgcaccgcaggctcctcctgtgggggccctgggcatgggtgagggtgggaccccgtgagcgcactgcaccctggccctggtggagcgggaggaggaggagagccgagctgggtacgagactaaagggcccacatgacccagtgacgccagatttccaccnaggactgagtgagctgctcagacatggctttctgcctcccagcctgtcctccactgtgggcatagcatctgtgcctgcctgcctgcttgagggagaggagtttctgctgctgccttgagctggggggaagagcccaggggcagatcctggcagctgcctggatggggctcctccctgcccttatgagcaggccaggcccagaaaggccgagcctgggctgccttcctgccccagccgagggaggggtcagacggctctaccatgggtaactcaggcaagagctggttttcctctttattctgggtgtgtgcagctgtgaggccccaacccaggagaggccatggcctaggtacctgtgaccaccctgcccccgtgtagagggcatcgtctttcctgctattttattctttcagcttttgtcttaggcccagaatcaaagtgaaaattgagtcgagctgacccttacaacagtaggatttagtagggtagatttcaaatgaggcttcgcttctcccaaagtagccagtccaagttccagtggctgtcgttcagctcatgggagcttcatggggacacagccggcacaggtgcagggcccgagtccgcccacccagcctggcgctgaaactgcacacgtacactatgtggtttaagagcactttattattgttcttaaggctacttttaagtacaaaaaaagatggcctgccaaacctttttttttcttcttccaggaaaaacaggccacagagaatggtatattacagatttacacacatgaagagaaggtcagagcgcactgcaggcagcgcggctctgggaagaacttcacggagccccttcttagagcagggagggggctttctcagtgaaatgtttggttttctgctgcctcctctgccccaggcccccctccagggtactgcctatcccagataggtcagtgcaccagggacccggccgccagcaccgccgacccctcccagagtgacgcccttgttcactgacaaagagacctgtcccaggagtgtcctccaccgagccggtcagctgtgggtggttttcctgttacgacgctcagtagcctgtagcaataacaaactcgtggctatgaatgcagatgcagtgttctcatagaataactgttcctgcacttttacagacaaatctacgacaaaaaaaaagatcaactttttttttccgaacaacaaaaaaaatgaatgattacaataggaaagggaaaaattaaatagctacatatcattaacaaattaatgttcttcaaaaaatacctacaaatttctctgtacattctttacgcacagcgtaacgatggtctcaaaatcacccatatagaaaagtgttctcaacgatttttcctacagaaaatataggggcctgaatgccaaagcttggaagcccagtacagtgggagtgaaatgtgtgcggggcaaggagaagggcttttctttcctccacttttcaaaggcctgcagccactctgtgactacaagagccagtcctccgaccttttcacccagtgccaatttccaaaattcaacagctaaaaactgtaaaaccgggggtcatacggtgtgcagagtccacaaagccttgcaggtgaggtgaccacgcccacgtcacctggtcaggtgccatcgtcgtgagcctctggtgggccaggtgggacacagcacaccccagggggaggggatagaaacgctcattgaccaaaaaggagcagctgtgacctccacagctgtgtctgtcatgcttgcttcatctaatttctagttagtagctattaatatagcaaataataaatgcagtaataacagtataaagtcagaggaatgtatactgccttggccccagcgtacgaggaagcgtataaaacaccatatcacagattgtctgtcagtaatctgctgttcagccaagagagttcaaagggagcagtttctgcatgtagggaagttggaagacacaaaccccacctcccctgggagcttgtaacaaagcagacagggatgcaaaaataaatgatgtcagcctgcagccaaactccagcatcccacaccgcagctgacccactgctcatcgcgagggcctgccaggagctggcctcccgcactacttgtgagtaaagtgaatatcaaataccaatcttagagtacaactgtaccagcagtaagtatatctaggactgtaactgacaaaaataaactaattctgaaaagaagatagtaagtattaaggtttttgtttactgtctatataattaatagaaaccagctattttttctccattaaaacatgcatcacgtttaaagcactatggaatcctccaacctcagctctagtctaacaaactgcagtgttcagagaagataaaatgcccgtgattggtagagtctgcagtccagttgcaagcacctgaaatctagagagagaaagacctataacctgtatgagacttccccttccaaagctgtattgtctacattaaaaaaaacaaaaacagtaacaacaacaaacacacaaatggtcagaaatgtcatccttaaaccctttgtttttcagcagtttgccctcagagttctggcataacacataaagttgtcaggcaactttagtcctcctccaatagtgcaaatcagacacgacagttctcttcaagtatacacacgcacacacatggaccgaaccaaacacgccgtggaagctgagccacacacaccccggtctcaagaagcaaaggaaaaagcacaaagcgtctgagtcaccaattcatcatggcttgtgactgagaaagcgctgtggagtcctggccccgtcggggcagcagacctgcatcagaggtttctttggtaactgaggcaggaagtaaggatgctacattagacagatgttccacgcgtagttcctgctatcatgtttgagggcccccttgtacggataccaagcaagtacaaaaacagaacacaaatcccaacaacatggtttttgcaaataaaccatcccttcccttccccccaccccacccccatgatttttttttttttaagtactgactgttcaaagctcaggcaaaccatgcagatccacgtgttgttggaggaggcgctcccttcaggagaccacagagggggagtgactgtggctgaccatgtgggcagaggggctggcgggctggcccctgcgagaggcggactcagggctgctggatgctccgtccttggccgctttgatctggagccacgtgtcacccagagctttggcaaagtggtcgtccacggagcccgtgatggacacggagttgggtgccggctcgggctccttgtaattcttgcccaggctcctgcggaaatgctcctccaccacggggtcacaggtggtggcagctgcaggcaagcaggaaggcaggcagtcagacacaggtggctgcagacagacaggcacggttgcagcaccctccctcaggcagcccagagccggactggctgccacggtcagcgtgggctctgcagacagaacccacctcccccggctaagtcaggcacttgggcaggtcacttttctgtaaaatggtgatgtaccaactgcactgggccagagtccgagttcagaaagagaatgtggcattaaat

SEQ ID NO: 373296 - DNA, 6588 bp, Homo sapiens
  misc_feature (2938)..(2938): n is a, c, g, or t
gcacgcgcgccgcttcccagtggcaagcgcgggcaggaccgcgttgcgtcatcggggcgcgcgcctcagagagagctgtggttgccggaagttgagcggcggcaagaaataatggcggcagctacgggggatcctggactctctaaactgcagtttgccccttttagtagtgccttggatgttgggttttggcatgagttgacccagaagaagctgaacgagtatcggctggatgaagctcccaaggacattaagggttattactacaatggtgactctgctgggctgccagctcgcttaacattggagttcagtgcttttgacatgagtgctcccaccccagcccgttgctgcccagctattggaacactgtataacaccaacacactcgagtctttcaagactgcagataagaagctccttttggaacaagcagcaaatgagatatgggaatccataaaatcaggcactgctcttgaaaaccctgtactcctcaacaagttcctcctcttgacatttgcagatctaaagaagtaccacttctactattggttttgctatcctgccctctgtcttccagagagtttacctctcattcaggggccagtgggtttggatcaaaggttttcactaaaacagattgaagcactagagtgtgcatatgataatctttgtcaaacagaaggagtcacagctcttccttacttcttaatcaagtatgatgagaacatggtgctggtttccttgcttaaacactacagtgatttcttccaaggtcaaaggacgaagataacaattggtgtatatgatccctgtaacttagcccagtaccctggatggcctttgaggaattttttggtcctagcagcccacagatggagtagcagtttccagtctgttgaagttgtttgcttccgtgaccgtaccatgcagggggcgagagacgttgcccacagcatcatcttcgaagtgaagcttccagaaatggcatttagcccagattgtcctaaagcagttggatgggaaaagaaccagaaaggaggcatgggaccaaggatggtgaacctcagtgaatgtatggaccctaaaaggttagctgagtcatcagtggatctaaatctcaaactgatgtgttggagattggttcctactttagacttggacaaggttgtgtctgtcaaatgtctgctgcttggagccggcaccttgggttgcaatgtagctaggacgttgatgggttggggcgtgagacacatcacatttgtggacaatgccaagatctcctactccaatcctgtgaggcagcctctctatgagtttgaagattgcctagggggtggtaagcccaaggctctggcagcagcggaccggctccagaaaatattccccggtgtgaatgccagaggattcaacatgagcatacctatgcctgggcatccagtgaacttctccagtgtcactctggagcaagcccgcagagatgtggagcaactggagcagctcatcgaaagccatgatgtcgtcttcctattgatggacaccagggagagccggtggcttcctgccgtcattgctgcaagcaagagaaagctggtcatcaatgctgctttgggatttgacacatttgttgtcatgagacatggtctgaagaaaccaaagcagcaaggagctggggacttgtgtccaaaccaccctgtggcatctgctgacctcctgggctcatcgctttttgccaacatccctggttacaagcttggctgctacttctgcaatgatgtggtggccccaggagattcaaccagagaccggaccttggaccagcagtgcactgtgagtcgtccaggactggccgtgattgcaggagccctggccgtggaattgatggtatctgttttgcagcatccagaagggggctatgccattgccagcagcagtgacgatcggatgaatgagcctccaacctctcttgggcttgtgcctcaccagatccggggatttctttcacggtttgataatgtccttcccgtcagcctggcatttgacaaatgtacagcttgttcttccaaagttcttgatcaatatgaacgagaaggatttaacttcctagccaaggtgtttaattcttcacattccttcttagaagacttgactggtcttacattgctgcatcaagaaacccaagctgctgagcatctttgagatcttcggctctggatgaagcaggagaggcagaacataaacaaatggacggaagaatcaagcacttctgtgaatggaatcttttattcctcgcccatctgattcttggctgctttgttccataagatctgggacatgagcgatgatgagaccatctgagatggccccgctgtggggctgacttctccccggccgcctgctgaggagctctccatcgccagagcaggactgctgaccccaggcctggtgattctgggcccctcctccataccccgaggtctgggattcccccctctgctgcccaggagtggccagtgttcggcgttgctcgggattcaagataccaccagttcagagctaaataataaccttggccttggccttgctattgacctgggacttggtcctccatgcagtttttatttcttgtcacagtgactgatagccatcccccaggatcctttccccttggccctgagggggtgacccaacacagaccaaatggggaaatgagcaaccagctcctgcccagagccactgcgggaggtggcaccctcatccccggaatgtgctgcccaccgcaccgcaggctcctcctgtgggggccctgggcatgggtgagggtgggaccccgtgagcgcactgcaccctggccctggtggagcgggaggaggaggagagccgagctgggtacgagactaaagggcccacatgacccagtgacgccagatttccaccnaggactgagtgagctgctcagacatggctttctgcctcccagcctgtcctccactgtgggcatagcatctgtgcctgcctgcctgcttgagggagaggagtttctgctgctgccttgagctggggggaagagcccaggggcagatcctggcagctgcctggatggggctcctccctgcccttatgagcaggccaggcccagaaaggccgagcctgggctgccttcctgccccagccgagggaggggtcagacggctctaccatgggtaactcaggcaagagctggttttcctctttattctgggtgtgtgcagctgtgaggccccaacccaggagaggccatggcctaggtacctgtgaccaccctgcccccgtgtagagggcatcgtctttcctgctattttattctttcagcttttgtcttaggcccagaatcaaagtgaaaattgagtcgagctgacccttacaacagtaggatttagtagggtagatttcaaatgaggcttcgcttctcccaaagtagccagtccaagttccagtggctgtcgttcagctcatgggagcttcatggggacacagccggcacaggtgcagggcccgagtccgcccacccagcctggcgctgaaactgcacacgtacactatgtggtttaagagcactttattattgttcttaaggctacttttaagtacaaaaaaagatggcctgccaaacctttttttttcttcttccaggaaaaacaggccacagagaatggtatattacagatttacacacatgaagagaaggtcagagcgcactgcaggcagcgcggctctgggaagaacttcacggagccccttcttagagcagggagggggctttctcagtgaaatgtttggttttctgctgcctcctctgccccaggcccccctccagggtactgcctatcccagataggtcagtgcaccagggacccggccgccagcaccgccgacccctcccagagtgacgcccttgttcactgacaaagagacctgtcccaggagtgtcctccaccgagccggtcagctgtgggtggttttcctgttacgacgctcagtagcctgtagcaataacaaactcgtggctatgaatgcagatgcagtgttctcatagaataactgttcctgcacttttacagacaaatctacgacaaaaaaaaagatcaactttttttttccgaacaacaaaaaaaatgaatgattacaataggaaagggaaaaattaaatagctacatatcattaacaaattaatgttcttcaaaaaatacctacaaatttctctgtacattctttacgcacagcgtaacgatggtctcaaaatcacccatatagaaaagtgttctcaacgatttttcctacagaaaatataggggcctgaatgccaaagcttggaagcccagtacagtgggagtgaaatgtgtgcggggcaaggagaagggcttttctttcctccacttttcaaaggcctgcagccactctgtgactacaagagccagtcctccgaccttttcacccagtgccaatttccaaaattcaacagctaaaaactgtaaaaccgggggtcatacggtgtgcagagtccacaaagccttgcaggtgaggtgaccacgcccacgtcacctggtcaggtgccatcgtcgtgagcctctggtgggccaggtgggacacagcacaccccagggggaggggatagaaacgctcattgaccaaaaaggagcagctgtgacctccacagctgtgtctgtcatgcttgcttcatctaatttctagttagtagctattaatatagcaaataataaatgcagtaataacagtataaagtcagaggaatgtatactgccttggccccagcgtacgaggaagcgtataaaacaccatatcacagattgtctgtcagtaatctgctgttcagccaagagagttcaaagggagcagtttctgcatgtagggaagttggaagacacaaaccccacctcccctgggagcttgtaacaaagcagacagggatgcaaaaataaatgatgtcagcctgcagccaaactccagcatcccacaccgcagctgacccactgctcatcgcgagggcctgccaggagctggcctcccgcactacttgtgagtaaagtgaatatcaaataccaatcttagagtacaactgtaccagcagtaagtatatctaggactgtaactgacaaaaataaactaattctgaaaagaagatagtaagtattaaggtttttgtttactgtctatataattaatagaaaccagctattttttctccattaaaacatgcatcacgtttaaagcactatggaatcctccaacctcagctctagtctaacaaactgcagtgttcagagaagataaaatgcccgtgattggtagagtctgcagtccagttgcaagcacctgaaatctagagagagaaagacctataacctgtatgagacttccccttccaaagctgtattgtctacattaaaaaaaacaaaaacagtaacaacaacaaacacacaaatggtcagaaatgtcatccttaaaccctttgtttttcagcagtttgccctcagagttctggcataacacataaagttgtcaggcaactttagtcctcctccaatagtgcaaatcagacacgacagttctcttcaagtatacacacgcacacacatggaccgaaccaaacacgccgtggaagctgagccacacacaccccggtctcaagaagcaaaggaaaaagcacaaagcgtctgagtcaccaattcatcatggcttgtgactgagaaagcgctgtggagtcctggccccgtcggggcagcagacctgcatcagaggtttctttggtaactgaggcaggaagtaaggatgctacattagacagatgttccacgcgtagttcctgctatcatgtttgagggcccccttgtacggataccaagcaagtacaaaaacagaacacaaatcccaacaacatggtttttgcaaataaaccatcccttcccttccccccaccccacccccatgatttttttttttttaagtactgactgttcaaagctcaggcaaaccatgcagatccacgtgttgttggaggaggcgctcccttcaggagaccacagagggggagtgactgtggctgaccatgtgggcagaggggctggcgggctggcccctgcgagaggcggactcagggctgctggatgctccgtccttggccgctttgatctggagccacgtgtcacccagagctttggcaaagtggtcgtccacggagcccgtgatggacacggagttgggtgccggctcgggctccttgtaattcttgcccaggctcctgcggaaatgctcctccaccacggggtcacaggtggtggcagctgcaggcaagcaggaaggcaggcagtcagacacaggtggctgcagacagacaggcacggttgcagcaccctccctcaggcagcccagagccggactggctgccacggtcagcgtgggctctgcagacagaacccacctcccccggctaagtcaggcacttgggcaggtcacttttctgtaaaatggtgatgtaccaactgcactgggccagagtccgagttcagaaagagaatgtggcattaaat

SEQ ID NO: 373297 - DNA, 4034 bp, Homo sapiens
  misc_feature (2803)..(2803): n is a, c, g, or t
gcacgcgcgccgcttcccagtggcaagcgcgggcaggaccgcgttgcgtcatcggggcgcgcgcctcagagagagctgtggttgccggaagttgagcggcggcaagaaataatggcggcagctacgggggatcctggactctctaaactgcagtttgccccttttagtagtgccttggatgttgggttttggcatgagttgacccagaagaagctgaacgagtatcggctggatgaagctcccaaggacattaagggttattactacaatggtgactctgctgggctgccagctcgcttaacattggagttcagtgcttttgacatgagtgctcccaccccagcccgttgctgcccagctattggaacactgtataacaccaacacactcgagtctttcaagactgcagataagaagctccttttggaacaagcagcaaatgagatatgggaatccataaaatcaggcactgctcttgaaaaccctgtactcctcaacaagttcctcctcttgacatttgcagatctaaagaagtaccacttctactattggttttgctatcctgccctctgtcttccagagagtttacctctcattcaggggccagtgggtttggatcaaaggttttcactaaaacagattgaagcactagagtgtgcatatgataatctttgtcaaacagaaggagtcacagctcttccttacttcttaatcaagtatgatgagaacatggtgctggtttccttgcttaaacactacagtgatttcttccaaggtcaaaggacgaagataacaattggtgtatatgatccctgtaacttagcccagtaccctggatggcctttgaggaattttttggtcctagcagcccacagatggagtagcagtttccagtctgttgaagttgtttgcttccgtgaccgtaccatgcagggggcgagagacgttgcccacagcatcatcttcgaagtgaagcttccagaaatggcatttagcccagattgtcctaaagcagttggatgggaaaagaaccagaaaggaggcatgggaccaaggatggtgaacctcagtgaatgtatggaccctaaaaggttagctgagtcatcagtggatctaaatctcaaactgatgtgttggagattggttcctactttagacttggacaaggttgtgtctgtcaaatgtctgctgcttggagccggcaccttgggttgcaatgtagctaggacgttgatgggttggggcgtgagacacatcacatttgtggacaatgccaagatctcctactccaatcctgtgaggcagcctctctatgagtttgaagattgcctagggggtggtaagcccaaggctctggcagcagcggaccggctccagaaaatattccccggtgtgaatgccagaggattcaacatgagcatacctatgcctgggcatccagtgaacttctccagtgtcactctggagcaagcccgcagagatgtggagcaactggagcagctcatcgaaagccatgatgtcgtcttcctattgatggacaccagggagagccggtggcttcctgccgtcattgctgcaagcaagagaaagctggtcatcaatgctgctttgggatttgacacatttgttgtcatgagacatggtctgaagaaaccaaagcagcaaggagctggggacttgtgtccaaaccaccctgtggcatctgctgacctcctgggctcatcgctttttgccaacatccctggttacaagcttggctgctacttctgcaatgatgtggtggccccaggagattcaaccagagaccggaccttggaccagcagtgcactgtgagtcgtccaggactggccgtgattgcaggagccctggccgtggaattgatggtatctgttttgcagcatccagaagggggctatgccattgccagcagcagtgacgatcggatgaatgagcctccaacctctcttgggcttgtgcctcaccagatccggggatttctttcacggtttgataatgtccttcccgtcagcctggcatttgacaaatgtacagcttgttcttccaaagttcttgatcaatatgaacgagaaggatttaacttcctagccaaggtgtttaattcttcacattccttcttagaagacttgactggtcttacattgctgcatcaagaaacccaagctgctgagatctgggacatgagcgatgatgagaccatctgagatggccccgctgtggggctgacttctccccggccgcctgctgaggagctctccatcgccagagcaggactgctgaccccaggcctggtgattctgggcccctcctccataccccgaggtctgggattcccccctctgctgcccaggagtggccagtgttcggcgttgctcgggattcaagataccaccagttcagagctaaataataaccttggccttggccttgctattgacctgggacttggtcctccatgcagtttttatttcttgtcacagtgactgatagccatcccccaggatcctttccccttggccctgagggggtgacccaacacagaccaaatggggaaatgagcaaccagctcctgcccagagccactgcgggaggtggcaccctcatccccggaatgtgctgcccaccgcaccgcaggctcctcctgtgggggccctgggcatgggtgagggtgggaccccgtgagcgcactgcaccctggccctggtggagcgggaggaggaggagagccgagctgggtacgagactaaagggcccacatgacccagtgacgccagatttccaccnaggactgagtgagctgctcagacatggctttctgcctcccagcctgtcctccactgtgggcatagcatctgtgcctgcctgcctgcttgagggagaggagtttctgctgctgccttgagctggggggaagagcccaggggcagatcctggcagctgcctggatggggctcctccctgcccttatgagcaggccaggcccagaaaggccgagcctgggctgccttcctgccccagccgagggaggggtcagacggctctaccatgggtaactcaggcaagagctggttttcctctttattctgggtgtgtgcagctgtgaggccccaacccaggagaggccatggcctaggtacctgtgaccaccctgcccccgtgtagagggcatcgtctttcctgctattttattctttcagcttttgtcttaggcccagaatcaaagtgaaaattgagtcgagctgacccttacaacagtaggatttagtagggtagatttcaaatgaggcttcgcttctcccaaagtagccagtccaagttccagtggctgtcgttcagctcatgggagcttcatggggacacagccggcacaggtgcagggcccgagtccgcccacccagcctggcgctgaaactgcacacgtacactatgtggtttaagagcactttattattgttcttaaggctacttttaagtacaaaaaaagatggcctgccaaacctttttttttcttcttccaggaaaaacaggccacagagaatggtatattacagatttacacacatgaagagaaggtcagagcgcactgcaggcagcgcggctctgggaagaacttcacggagccccttcttagagcagggagggggctttctcagtgaaatgtttggttttctgctgcctcctctgccccaggcccccctccagggtactgcctatcccagataggtcagtgcaccagggacccggccgccagcaccgccgacccctcccagagtgacgcccttgttcactgacaaagagacctgtcccaggagtgtcctccaccgagccggtcagctgtgggtggttttcctgttacgacgctcagtagcctgtagcaataacaaactcgtggctatgaatgcagtcacggcgttggatcagtcgcggcgttggatgcagtcacggcgttggatccagtcagcggcgttggatgcagtcagcggcgttgatgcagtcagcggcgttgaatgcagtc

SEQ ID NO: 373298 - DNA, 4442 bp, Homo sapiens
  misc_feature (2803)..(2803): n is a, c, g, or t
gcacgcgcgccgcttcccagtggcaagcgcgggcaggaccgcgttgcgtcatcggggcgcgcgcctcagagagagctgtggttgccggaagttgagcggcggcaagaaataatggcggcagctacgggggatcctggactctctaaactgcagtttgccccttttagtagtgccttggatgttgggttttggcatgagttgacccagaagaagctgaacgagtatcggctggatgaagctcccaaggacattaagggttattactacaatggtgactctgctgggctgccagctcgcttaacattggagttcagtgcttttgacatgagtgctcccaccccagcccgttgctgcccagctattggaacactgtataacaccaacacactcgagtctttcaagactgcagataagaagctccttttggaacaagcagcaaatgagatatgggaatccataaaatcaggcactgctcttgaaaaccctgtactcctcaacaagttcctcctcttgacatttgcagatctaaagaagtaccacttctactattggttttgctatcctgccctctgtcttccagagagtttacctctcattcaggggccagtgggtttggatcaaaggttttcactaaaacagattgaagcactagagtgtgcatatgataatctttgtcaaacagaaggagtcacagctcttccttacttcttaatcaagtatgatgagaacatggtgctggtttccttgcttaaacactacagtgatttcttccaaggtcaaaggacgaagataacaattggtgtatatgatccctgtaacttagcccagtaccctggatggcctttgaggaattttttggtcctagcagcccacagatggagtagcagtttccagtctgttgaagttgtttgcttccgtgaccgtaccatgcagggggcgagagacgttgcccacagcatcatcttcgaagtgaagcttccagaaatggcatttagcccagattgtcctaaagcagttggatgggaaaagaaccagaaaggaggcatgggaccaaggatggtgaacctcagtgaatgtatggaccctaaaaggttagctgagtcatcagtggatctaaatctcaaactgatgtgttggagattggttcctactttagacttggacaaggttgtgtctgtcaaatgtctgctgcttggagccggcaccttgggttgcaatgtagctaggacgttgatgggttggggcgtgagacacatcacatttgtggacaatgccaagatctcctactccaatcctgtgaggcagcctctctatgagtttgaagattgcctagggggtggtaagcccaaggctctggcagcagcggaccggctccagaaaatattccccggtgtgaatgccagaggattcaacatgagcatacctatgcctgggcatccagtgaacttctccagtgtcactctggagcaagcccgcagagatgtggagcaactggagcagctcatcgaaagccatgatgtcgtcttcctattgatggacaccagggagagccggtggcttcctgccgtcattgctgcaagcaagagaaagctggtcatcaatgctgctttgggatttgacacatttgttgtcatgagacatggtctgaagaaaccaaagcagcaaggagctggggacttgtgtccaaaccaccctgtggcatctgctgacctcctgggctcatcgctttttgccaacatccctggttacaagcttggctgctacttctgcaatgatgtggtggccccaggagattcaaccagagaccggaccttggaccagcagtgcactgtgagtcgtccaggactggccgtgattgcaggagccctggccgtggaattgatggtatctgttttgcagcatccagaagggggctatgccattgccagcagcagtgacgatcggatgaatgagcctccaacctctcttgggcttgtgcctcaccagatccggggatttctttcacggtttgataatgtccttcccgtcagcctggcatttgacaaatgtacagcttgttcttccaaagttcttgatcaatatgaacgagaaggatttaacttcctagccaaggtgtttaattcttcacattccttcttagaagacttgactggtcttacattgctgcatcaagaaacccaagctgctgagatctgggacatgagcgatgatgagaccatctgagatggccccgctgtggggctgacttctccccggccgcctgctgaggagctctccatcgccagagcaggactgctgaccccaggcctggtgattctgggcccctcctccataccccgaggtctgggattcccccctctgctgcccaggagtggccagtgttcggcgttgctcgggattcaagataccaccagttcagagctaaataataaccttggccttggccttgctattgacctgggacttggtcctccatgcagtttttatttcttgtcacagtgactgatagccatcccccaggatcctttccccttggccctgagggggtgacccaacacagaccaaatggggaaatgagcaaccagctcctgcccagagccactgcgggaggtggcaccctcatccccggaatgtgctgcccaccgcaccgcaggctcctcctgtgggggccctgggcatgggtgagggtgggaccccgtgagcgcactgcaccctggccctggtggagcgggaggaggaggagagccgagctgggtacgagactaaagggcccacatgacccagtgacgccagatttccaccnaggactgagtgagctgctcagacatggctttctgcctcccagcctgtcctccactgtgggcatagcatctgtgcctgcctgcctgcttgagggagaggagtttctgctgctgccttgagctggggggaagagcccaggggcagatcctggcagctgcctggatggggctcctccctgcccttatgagcaggccaggcccagaaaggccgagcctgggctgccttcctgccccagccgagggaggggtcagacggctctaccatgggtaactcaggcaagagctggttttcctctttattctgggtgtgtgcagctgtgaggccccaacccaggagaggccatggcctaggtacctgtgaccaccctgcccccgtgtagagggcatcgtctttcctgctattttattctttcagcttttgtcttaggcccagaatcaaagtgaaaattgagtcgagctgacccttacaacagtaggatttagtagggtagatttcaaatgaggcttcgcttctcccaaagtagccagtccaagttccagtggctgtcgttcagctcatgggagcttcatggggacacagccggcacaggtgcagggcccgagtccgcccacccagcctggcgctgaaactgcacacgtacactatgtggtttaagagcactttattattgttcttaaggctacttttaagtacaaaaaaagatggcctgccaaacctttttttttcttcttccaggaaaaacaggccacagagaatggtatattacagatttacacacatgaagagaaggtcagagcgcactgcaggcagcgcggctctgggaagaacttcacggagccccttcttagagcagggagggggctttctcagtgaaatgtttggttttctgctgcctcctctgccccaggcgtagttcctgctatcatgtttgagggcccccttgtacggataccaagcaagtacaaaaacagaacacaaatcccaacaacatggtttttgcaaataaaccatcccttcccttccccccaccccacccccatgatttttttttttttaagtactgactgttcaaagctcaggcaaaccatgcagatccacgtgttgttggaggaggcgctcccttcaggagaccacagagggggagtgactgtggctgaccatgtgggcagaggggctggcgggctggcccctgcgagaggcggactcagggctgctggatgctccgtccttggccgctttgatctggagccacgtgtcacccagagctttggcaaagtggtcgtccacggagcccgtgatggacacggagttgggtgccggctcgggctccttgtaattcttgcccaggctcctgcggaaatgctcctccaccacggggtcacaggtggtggcagctgcaggcaagcaggaaggcaggcagtcagacacaggtggctgcagacagacaggcacggttgcagcaccctccctcaggcagcccagagccggactggctgccacggtcagcgtgggctctgcagacagaacccacctcccccggctaagtcaggcacttgggcaggtcacttttctgtaaaatggtgatgtaccaactgcactgggccagagtccgagttcagaaagagaatgtggcattaaat

SEQ ID NO: 373299 - DNA, 2945 bp, Homo sapiens
gcaagagtaagttcagcatggagccaggtgacgaggacatagactgtgacaacgaccacgtcttccaaaatgagtcgcatcttcaacccccatctgaacaagactgccaatggagactgccgcagagacccccgggagcggagccggcagccccatcgagcgcgctgtggcccccaccatgagcctgcacggaagccacctgtacacctccctccccagccttggcctggagcagcccctgcaccagggacccggccgccagcaccgccgacccctcccagagtgacgcccttgttcactgacaaagagacctgtcccaggagtgtcctccaccgagccggtcagctgtgggtggttttcctgttacgacgctcagtagcctgtagcaataacaaactcgtggctatgaatgcagatgcagtgttctcatagaataactgttcctgcacttttacagacaaatctacgacaaaaaaaaagatcaactttttttttccgaacaacaaaaaaaatgaatgattacaataggaaagggaaaaattaaatagctacatatcattaacaaattaatgttcttcaaaaaatacctacaaatttctctgtacattctttacgcacagcgtaacgatggtctcaaaatcacccatatagaaaagtgttctcaacgatttttcctacagaaaatataggggcctgaatgccaaagcttggaagcccagtacagtgggagtgaaatgtgtgcggggcaaggagaagggcttttctttcctccacttttcaaaggcctgcagccactctgtgactacaagagccagtcctccgaccttttcacccagtgccaatttccaaaattcaacagctaaaaactgtaaaaccgggggtcatacggtgtgcagagtccacaaagccttgcaggtgaggtgaccacgcccacgtcacctggtcaggtgccatcgtcgtgagcctctggtgggccaggtgggacacagcacaccccagggggaggggatagaaacgctcattgaccaaaaaggagcagctgtgacctccacagctgtgtctgtcatgcttgcttcatctaatttctagttagtagctattaatatagcaaataataaatgcagtaataacagtataaagtcagaggaatgtatactgccttggccccagcgtacgaggaagcgtataaaacaccatatcacagattgtctgtcagtaatctgctgttcagccaagagagttcaaagggagcagtttctgcatgtagggaagttggaagacacaaaccccacctcccctgggagcttgtaacaaagcagacagggatgcaaaaataaatgatgtcagcctgcagccaaactccagcatcccacaccgcagctgacccactgctcatcgcgagggcctgccaggagctggcctcccgcactacttgtgagtaaagtgaatatcaaataccaatcttagagtacaactgtaccagcagtaagtatatctaggactgtaactgacaaaaataaactaattctgaaaagaagatagtaagtattaaggtttttgtttactgtctatataattaatagaaaccagctattttttctccattaaaacatgcatcacgtttaaagcactatggaatcctccaacctcagctctagtctaacaaactgcagtgttcagagaagataaaatgcccgtgattggtagagtctgcagtccagttgcaagcacctgaaatctagagagagaaagacctataacctgtatgagacttccccttccaaagctgtattgtctacattaaaaaaaacaaaaacagtaacaacaacaaacacacaaatggtcagaaatgtcatccttaaaccctttgtttttcagcagtttgccctcagagttctggcataacacataaagttgtcaggcaactttagtcctcctccaatagtgcaaatcagacacgacagttctcttcaagtatacacacgcacacacatggaccgaaccaaacacgccgtggaagctgagccacacacaccccggtctcaagaagcaaaggaaaaagcacaaagcgtctgagtcaccaattcatcatggcttgtgactgagaaagcgctgtggagtcctggccccgtcggggcagcagacctgcatcagaggtttctttggtaactgaggcaggaagtaaggatgctacattagacagatgttccacgcgtagttcctgctatcatgtttgagggcccccttgtacggataccaagcaagtacaaaaacagaacacaaatcccaacaacatggtttttgcaaataaaccatcccttcccttccccccaccccacccccatgatttttttttttttaagtactgactgttcaaagctcaggcaaaccatgcagatccacgtgttgttggaggaggcgctcccttcaggagaccacagagggggagtgactgtggctgaccatgtgggcagaggggctggcgggctggcccctgcgagaggcggactcagggctgctggatgctccgtccttggccgctttgatctggagccacgtgtcacccagagctttggcaaagtggtcgtccacggagcccgtgatggacacggagttgggtgccggctcgggctccttgtaattcttgcccaggctcctgcggaaatgctcctccaccacggggtcacaggtggtggcagctgcaggcaagcaggaaggcaggcagtcagacacaggtggctgcagacagacaggcacggttgcagcaccctccctcaggcagcccagagccggactggctgccacggtcagcgtgggctctgcagacagaacccacctcccccggctaagtcaggcacttgggcaggtcacttttctgtaaaatggtgatgtaccaactgcactgggccagagtccgagttcagaaagagaatgtggcattaaat

SEQ ID NO: 373300 - DNA, 2714 bp, Homo sapiens
gcacgcgcgccgcttcccagtggcaagcgcgggcaggaccgcgttgcgtcatcggggcgcgcgcctcagagagagctgtggttgccggaagttgagcggcggcaagaaataatggcggcagctacgggggatcctggactctctaaactgcagtttgccccttttagtagtgccttggatgttgggttttggcatgagttgacccagaagaagctgaacgagtatcggctggatgaagctcccaaggacattaagggttattactacaatggtgactctgctgggctgccagctcgcttaacattggagttcagtgcttttgacatgagtgctcccaccccagcccgttgctgcccagctattggaacactgtataacaccaacacactcgagtctttcaagactgcagataagaagctccttttggaacaagcagcaaatgagatatgggaatccataaaatcaggcactgctcttgaaaaccctgtactcctcaacaagttcctcctcttgacatttgcagatctaaagaagtaccacttctactattggttttgctatcctgccctctgtcttccagagagtttacctctcattcaggggccagtgggtttggatcaaaggttttcactaaaacagattgaagcactagagtgtgcatatgataatctttgtcaaacagaaggagtcacagctcttccttacttcttaatcaagtatgatgagaacatggtgctggtttccttgcttaaacactacagtgatttcttccaaggtcaaaggacgaagataacaattggtgtatatgatccctgtaacttagcccagtaccctggatggcctttgaggaattttttggtcctagcagcccacagatggagtagcagtttccagtctgttgaagttgtttgcttccgtgaccgtaccatgcagggggcgagagacgttgcccacagcatcatcttcgaagtgaagcttccagaaatggcatttagcccagattgtcctaaagcagttggatgggaaaagaaccagaaaggaggcatgggaccaaggatggtgaacctcagtgaatgtatggaccctaaaaggttagctgagtcatcagtggatctaaatctcaaactgatgtgttggagattggttcctactttagacttggacaaggttgtgtctgtcaaatgtctgctgcttggagccggcaccttgggttgcaatgtagctaggacgttgatgggttggggcgtgagacacatcacatttgtggacaatgccaagatctcctactccaatcctgtgaggcagcctctctatgagtttgaagattgcctagggggtggtaagcccaaggctctggcagcagcggaccggctccagaaaatattccccggtgtgaatgccagaggattcaacatgagcatacctatgcctgggcatccagtgaacttctccagtgtcactctggagcaagcccgcagagatgtggagcaactggagcagctcatcgaaagccatgatgtcgtcttcctattgatggacaccagggagagccggtggcttcctgccgtcattgctgcaagcaagagaaagctggtcatcaatgctgctttgggatttgacacatttgttgtcatgagacatggtctgaagaaaccaaagcagcaaggagctggggacttgtgtccaaaccaccctgtggcatctgctgacctcctgggctcatcgctttttgccaacatccctggttacaagcttggctgctacttctgcaatgatgtggtggccccaggagattcaaccagagaccggaccttggaccagcagtgcactgtgagtcgtccaggactggccgtgattgcaggagccctggccgtggaattgatggtatctgttttgcagcatccagaagggggctatgccattgccagcagcagtgacgatcggatgaatgagcctccaacctctcttgggcttgtgcctcaccagatccggggatttctttcacggtttgataatgtccttcccgtcagcctggcatttgacaaatgtacagcttgttcttccaaagttcttgatcaatatgaacgagaaggatttaacttcctagccaaggtgtttaattcttcacattccttcttagaagacttgactggtcttacattgctgcatcaagaaacccaagctgctgaggtaagaacaaaacaagctttctgtagtgaagactgacatgcttaaaactatttgatattcgccatatggaaaaggaagaaagcaattaattttaatttttgtaacttagagcaaatatcactaaataagtctgctagttaccagagaacgaataaccctcagcaagtgctggatactgatgtgtgtaggttgctgtccagtaggtgcctaatacacaaaatcagtgtgataaaggaagtataggttgtagatttccaggcacctcttgtccttactgaagatctgcatgtgtatgaccattggagagagttggctttaatgtccatatatcaaaatgtaagttggtaaagacattggactccagctatgttctttagaaagaaggtattggactctggccatgttcttcagaaagaacatgcctggctttttcacgatttgatcagtcttcttagaccctgaaccccaccatgaaatggcttccccagacacaacccgagagagttatgctttgtttctcagct

SEQ ID NO: 373301 - DNA, 2406 bp, Homo sapiens
gcacgcgcgccgcttcccagtggcaagcgcgggcaggaccgcgttgcgtcatcggggcgcgcgcctcagagagagctgtggttgccggaagttgagcggcggcaagaaataatggcggcagctacgggggatcctggactctctaaactgcagtttgccccttttagtagtgccttggatgttgggttttggcatgagttgacccagaagaagctgaacgagtatcggctggatgaagctcccaaggacattaagggttattactacaatggtgactctgctgggctgccagctcgcttaacattggagttcagtgcttttgacatgagtgctcccaccccagcccgttgctgcccagctattggaacactgtataacaccaacacactcgagtctttcaagactgcagataagaagctccttttggaacaagcagcaaatgagatatgggaatccataaaatcaggcactgctcttgaaaaccctgtactcctcaacaagttcctcctcttgacatttgcagatctaaagaagtaccacttctactattggttttgctatcctgccctctgtcttccagagagtttacctctcattcaggggccagtgggtttggatcaaaggttttcactaaaacagattgaagcactagagtgtgcatatgataatctttgtcaaacagaaggagtcacagctcttccttacttcttaatcaagtatgatgagaacatggtgctggtttccttgcttaaacactacagtgatttcttccaaggtcaaaggacgaagataacaattggtgtatatgatccctgtaacttagcccagtaccctggatggcctttgaggaattttttggtcctagcagcccacagatggagtagcagtttccagtctgttgaagttgtttgcttccgtgaccgtaccatgcagggggcgagagacgttgcccacagcatcatcttcgaagtgaagcttccagaaatggcatttagcccagattgtcctaaagcagttggatgggaaaagaaccagaaaggaggcatgggaccaaggatggtgaacctcagtgaatgtatggaccctaaaaggttagctgagtcatcagtggatctaaatctcaaactgatgtgttggagattggttcctactttagacttggacaaggttgtgtctgtcaaatgtctgctgcttggagccggcaccttgggttgcaatgtagctaggacgttgatgggttggggcgtgagacacatcacatttgtggacaatgccaagatctcctactccaatcctgtgaggcagcctctctatgagtttgaagattgcctagggggtggtaagcccaaggctctggcagcagcggaccggctccagaaaatattccccggtgtgaatgccagaggattcaacatgagcatacctatgcctgggcatccagtgaacttctccagtgtcactctggagcaagcccgcagagatgtggagcaactggagcagctcatcgaaagccatgatgtcgtcttcctattgatggacaccagggagagccggtggcttcctgccgtcattgctgcaagcaagagaaagctggtcatcaatgctgctttgggatttgacacatttgttgtcatgagacatggtctgaagaaaccaaagcagcaaggagctggggacttgtgtccaaaccaccctgtggcatctgctgacctcctgggctcatcgctttttgccaacatccctggttacaagcttggctgctacttctgcaatgatgtggtggccccaggagattcaaccagagaccggaccttggaccagcagtgcactgtgagtcgtccaggactggccgtgattgcaggagccctggccgtggaattgatggtatctgttttgcagcatccagaagggggctatgccattgccagcagcagtgacgatcggatgaatgagcctccaacctctcttgggcttgtgcctcaccagatccggggatttctttcacggtttgataatgtccttcccgtcagcctggcatttgacaaatgtacagcttgttcttccaaagttcttgatcaatatgaacgagaaggatttaacttcctagccaaggtgtttaattcttcacattccttcttagaagacttgactggtcttacattgctgcatcaagaaacccaagctgctgaggatcatctttctttcatccggcccaagaatggcaccttccccgcccatcaggccacctgcactcaggagtcggctgcctgtcctgaaatagatctctaccagctctcaagcagaacaattccttgcattcatacttgaatgtataatttgtgttattacctcttatttgtctttgtaagtttgtccctgccccagtttaaaaaaaaaaaaaaatct

SEQ ID NO: 373302 - DNA, 2483 bp, Homo sapiens
gcacgcgcgccgcttcccagtggcaagcgcgggcaggaccgcgttgcgtcatcggggcgcgcgcctcagagagagctgtggttgccggaagttgagcggcggcaagaaataatggcggcagctacgggggatcctggactctctaaactgcagtttgccccttttagtagtgccttggatgttgggttttggcatgagttgacccagaagaagctgaacgagtatcggctggatgaagctcccaaggacattaagggttattactacaatggtgactctgctgggctgccagctcgcttaacattggagttcagtgcttttgacatgagtgctcccaccccagcccgttgctgcccagctattggaacactgtataacaccaacacactcgagtctttcaagactgcagataagaagctccttttggaacaagcagcaaatgagatatgggaatccataaaatcaggcactgctcttgaaaaccctgtactcctcaacaagttcctcctcttgacatttgcagatctaaagaagtaccacttctactattggttttgctatcctgccctctgtcttccagagagtttacctctcattcaggggccagtgggtttggatcaaaggttttcactaaaacagattgaagcactagagtgtgcatatgataatctttgtcaaacagaaggagtcacagctcttccttacttcttaatcaagtatgatgagaacatggtgctggtttccttgcttaaacactacagtgatttcttccaaggtcaaaggacgaagataacaattggtgtatatgatccctgtaacttagcccagtaccctggatggcctttgaggaattttttggtcctagcagcccacagatggagtagcagtttccagtctgttgaagttgtttgcttccgtgaccgtaccatgcagggggcgagagacgttgcccacagcatcatcttcgaagtgaagcttccagaaatggcatttagcccagattgtcctaaagcagttggatgggaaaagaaccagaaaggaggcatgggaccaaggatggtgaacctcagtgaatgtatggaccctaaaaggttagctgagtcatcagtggatctaaatctcaaactgatgtgttggagattggttcctactttagacttggacaaggttgtgtctgtcaaatgtctgctgcttggagccggcaccttgggttgcaatgtagctaggacgttgatgggttggggcgtgagacacatcacatttgtggacaatgccaagatctcctactccaatcctgtgaggcagcctctctatgagtttgaagattgcctagggggtggtaagcccaaggctctggcagcagcggaccggctccagaaaatattccccggtgtgaatgccagaggattcaacatgagcatacctatgcctgggcatccagtgaacttctccagtgtcactctggagcaagcccgcagagatgtggagcaactggagcagctcatcgaaagccatgatgtcgtcttcctattgatggacaccagggagagccggtggcttcctgccgtcattgctgcaagcaagagaaagctggtcatcaatgctgctttgggatttgacacatttgttgtcatgagacatggtctgaagaaaccaaagcagcaaggagctggggacttgtgtccaaaccaccctgtggcatctgctgacctcctgggctcatcgctttttgccaacatccctggttacaagcttggctgctacttctgcaatgatgtggtggccccaggagattcaaccagagaccggaccttggaccagcagtgcactgtgagtcgtccaggactggccgtgattgcaggagccctggccgtggaattgatggtatctgttttgcagcatccagaagggggctatgccattgccagcagcagtgacgatcggatgaatgagcctccaacctctcttgggcttgtgcctcaccagatccggggatttctttcacggtttgataatgtccttcccgtcagcctggcatttgacaaatgtacagcttgttcttccaaaaccagatcccggcattcaacaaagcactggcaacagtgcttttccagctcttccagcccagcaccgggcatatgaaggaagaacgttcatttcatttccagaagatataccttgcagaagaatcaaggagcccagggaacatccagaaccaagaccccagggacatggccctaaggaagccatcccagccatctccagacatccgagtcacccagctgaggccccagtcaatgtggagcagggacaagaattgtgaagctgtccctgtagtgccatgcccaaatttcttacccacttagtgtagtttcatgtcactgagttttggagtggtttgttatgcagcaatagaaagctagaacacacagtaaacccccaacaagtggtcattattacttaataaaattattattatcagc

SEQ ID NO: 373303 - DNA, 739 bp, Homo sapiens
cggcgggcgagggtgtagtggggtcttgctgggccggttttggaggcctggagtcaaggggcgagctcgccagggagggcgagggtcacagcaagtctcaggatcctcctctgccagtttctgggtggtccttcctcctccagggactcactgattccggctggcgcccttcgtctgtagccgcgtcccctcagactggttcagtccggggtcttctgacttggaagctcgtgctgatttcctaagtcagcccctcctgtcctcttggatccaattcctgtatcttcaccttgtctaccgggatttctagagcagccttgtgagagacatttctgagacctgtatgtcctgcgtctatgattcttccctgatcaagctttcttgggaggcaaccgccactgcacatttcctgtggggatttgatcttaaaaaacaaaagatttagatccatgtggacagaaacttttggcaagaaataatggcggcagctacgggggatcctggactctctaaactgcagtttgccccttttagtagtgccttggatgttgggttttggcatgagttgacccagaagaagctgaacgagtatcggctggatgaagctcccaaggacattaagggttattactacaatggtgactctgctgggctgccagctcgcttaacattggagttcagtgcttttgacatcgttccctgtgggcatgtgaagctgtgtgcgaagtagattcctcca

SEQ ID NO: 373304 - DNA, 6310 bp, Homo sapiens
  misc_feature (2803)..(2803): n is a, c, g, or t
gcacgcgcgccgcttcccagtggcaagcgcgggcaggaccgcgttgcgtcatcggggcgcgcgcctcagagagagctgtggttgccggaagttgagcggcggcaagaaataatggcggcagctacgggggatcctggactctctaaactgcagtttgccccttttagtagtgccttggatgttgggttttggcatgagttgacccagaagaagctgaacgagtatcggctggatgaagctcccaaggacattaagggttattactacaatggtgactctgctgggctgccagctcgcttaacattggagttcagtgcttttgacatgagtgctcccaccccagcccgttgctgcccagctattggaacactgtataacaccaacacactcgagtctttcaagactgcagataagaagctccttttggaacaagcagcaaatgagatatgggaatccataaaatcaggcactgctcttgaaaaccctgtactcctcaacaagttcctcctcttgacatttgcagatctaaagaagtaccacttctactattggttttgctatcctgccctctgtcttccagagagtttacctctcattcaggggccagtgggtttggatcaaaggttttcactaaaacagattgaagcactagagtgtgcatatgataatctttgtcaaacagaaggagtcacagctcttccttacttcttaatcaagtatgatgagaacatggtgctggtttccttgcttaaacactacagtgatttcttccaaggtcaaaggacgaagataacaattggtgtatatgatccctgtaacttagcccagtaccctggatggcctttgaggaattttttggtcctagcagcccacagatggagtagcagtttccagtctgttgaagttgtttgcttccgtgaccgtaccatgcagggggcgagagacgttgcccacagcatcatcttcgaagtgaagcttccagaaatggcatttagcccagattgtcctaaagcagttggatgggaaaagaaccagaaaggaggcatgggaccaaggatggtgaacctcagtgaatgtatggaccctaaaaggttagctgagtcatcagtggatctaaatctcaaactgatgtgttggagattggttcctactttagacttggacaaggttgtgtctgtcaaatgtctgctgcttggagccggcaccttgggttgcaatgtagctaggacgttgatgggttggggcgtgagacacatcacatttgtggacaatgccaagatctcctactccaatcctgtgaggcagcctctctatgagtttgaagattgcctagggggtggtaagcccaaggctctggcagcagcggaccggctccagaaaatattccccggtgtgaatgccagaggattcaacatgagcatacctatgcctgggcatccagtgaacttctccagtgtcactctggagcaagcccgcagagatgtggagcaactggagcagctcatcgaaagccatgatgtcgtcttcctattgatggacaccagggagagccggtggcttcctgccgtcattgctgcaagcaagagaaagctggtcatcaatgctgctttgggatttgacacatttgttgtcatgagacatggtctgaagaaaccaaagcagcaaggagctggggacttgtgtccaaaccaccctgtggcatctgctgacctcctgggctcatcgctttttgccaacatccctggttacaagcttggctgctacttctgcaatgatgtggtggccccaggagattcaaccagagaccggaccttggaccagcagtgcactgtgagtcgtccaggactggccgtgattgcaggagccctggccgtggaattgatggtatctgttttgcagcatccagaagggggctatgccattgccagcagcagtgacgatcggatgaatgagcctccaacctctcttgggcttgtgcctcaccagatccggggatttctttcacggtttgataatgtccttcccgtcagcctggcatttgacaaatgtacagcttgttcttccaaagttcttgatcaatatgaacgagaaggatttaacttcctagccaaggtgtttaattcttcacattccttcttagaagacttgactggtcttacattgctgcatcaagaaacccaagctgctgagatctgggacatgagcgatgatgagaccatctgagatggccccgctgtggggctgacttctccccggccgcctgctgaggagctctccatcgccagagcaggactgctgaccccaggcctggtgattctgggcccctcctccataccccgaggtctgggattcccccctctgctgcccaggagtggccagtgttcggcgttgctcgggattcaagataccaccagttcagagctaaataataaccttggccttggccttgctattgacctgggacttggtcctccatgcagtttttatttcttgtcacagtgactgatagccatcccccaggatcctttccccttggccctgagggggtgacccaacacagaccaaatggggaaatgagcaaccagctcctgcccagagccactgcgggaggtggcaccctcatccccggaatgtgctgcccaccgcaccgcaggctcctcctgtgggggccctgggcatgggtgagggtgggaccccgtgagcgcactgcaccctggccctggtggagcgggaggaggaggagagccgagctgggtacgagactaaagggcccacatgacccagtgacgccagatttccaccnaggactgagtgagctgctcagacatggctttctgcctcccagcctgtcctccactgtgggcatagcatctgtgcctgcctgcctgcttgagggagaggagtttctgctgctgccttgagctggggggaagagcccaggggcagatcctggcagctgcctggatggggctcctccctgcccttatgagcaggccaggcccagaaaggccgagcctgggctgccttcctgccccagccgagggaggggtcagacggctctaccatgggtaactcaggcaagagctggttttcctctttattctgggtgtgtgcagctgtgaggccccaacccaggagaggccatggcctaggtacctgtgaccaccctgcccccgtgtagagggcatcgtctttcctgctattttattctttcagcttttgtcttaggcccagaatcaaagtgaaaattgagtcgagctgacccttacaacagtaggatttagtagggtagatttcaaatgaggcttcgcttctcccaaagtagccagtccaagttccagtggctgtcgttcagctcatgggagcttcatggggacacagccggcacaggtgcagggcccgagtccgcccacccagcctggcgctgaaactgcacacgtacactatgtggtttaagagcactttattattgttcttaaggctacttttaagtacaaaaaaagatggcctgccaaacctttttttttcttcttccaggaaaaacaggccacagagaatggtatattacagatttacacacatgaagagaaggtcagagcgcactgcaggcagcgcggctctgggaagaacttcacggagccccttcttagagcagggagggggctttctcagtgaaatgtttggttttctgctgcctcctctgccccaggcccccctccagggtactgcctatcccagataggtcagtgcaccagggacccggccgccagcaccgccgacccctcccagagtgacgcccttgttcactgacaaagagacctgtcccaggagtgtcctccaccgagccggtcagctgtgggtggttttcctgttacgacgctcagtagcctgtagcaataacaaactcgtggctatgaatgcagatgcagtgttctcatagaataactgttcctgcacttttacagacaaatctacgacaaaaaaaaagatcaactttttttttccgaacaacaaaaaaaatgaatgattacaataggaaagggaaaaattaaatagctacatatcattaacaaattaatgttcttcaaaaaatacctacaaatttctctgtacattctttacgcacagcgtaacgatggtctcaaaatcacccatatagaaaagtgttctcaacgatttttcctacagaaaatataggggcctgaatgccaaagcttggaagcccagtacagtgggagtgaaatgtgtgcggggcaaggagaagggcttttctttcctccacttttcaaaggcctgcagccactctgtgactacaagagccagtcctccgaccttttcacccagtgccaatttccaaaattcaacagctaaaaactgtaaaaccgggggtcatacggtgtgcagagtccacaaagccttgcaggtgaggtgaccacgcccacgtcacctggtcaggtgccatcgtcgtgagcctctggtgggccaggtgggacacagcacaccccagggggaggggatagaaacgctcattgaccaaaaaggagcagctgtgacctccacagctgtgtctgtcatgcttgcttcatctaatttctagttagtagctattaatatagcaaataataaatgcagtaataacagtataaagtcagaggaatgtatactgccttggccccagcgtacgaggaagcgtataaaacaccatatcacagattgtctgtcagtaatctgctgttcagccaagagagttcaaagggagcagtttctgcatgtagggaagttggaagacacaaaccccacctcccctgggagcttgtaacaaagcagacagggatgcaaaaataaatgatgtcagcctgcagccaaactccagcatcccacaccgcagctgacccactgctcatcgcgagggcctgccaggagctggcctcccgcactacttgtgagtaaagtgaatatcaaataccaatcttagagtacaactgtaccagcagtaagtatatctaggactgtaactgacaaaaataaactaattctgaaaagaagatagtaagtattaaggtttttgtttactgtctatataattaatagaaaccagctattttttctccattaaaacatgcatcacgtttaaagcactatggaatcctccaacctcagctctagtctaacaaactgcagtgttcagagaagataaaatgcccgtgattggtagagtctgcagtccagttgcaagcacctgaaatctagagagagaaagacctataacctgtatgagacttccccttccaaagctgtattgtctacattaaaaaaaacaaaaacagtaacaacaacaaacacacaaatggtcagaaatgtcatccttaaaccctttgtttttcagcagtttgccctcagagttctggcataacacataaagttgtcaggcaactttagtcctcctccaatagtgcaaatcagacacgacagttctcttcaagtatacacacgcacacacatggaccgaaccaaacacgccgtggaagctgagccacacacaccccggtctcaagaagcaaaggaaaaagcacaaagcgtctgagtcaccaattcatcatggcttgtgactgagaaagcgctgtggagtcctggccccgtcggggcagcagacctgcatcagaggtttctttggtaactgaggcaggaagtaaggatgctacattagacagatgttccacgcgtagttcctgctatcatgtttgagggcccccttgtacggataccaagcaagtacaaaaacagaacacaaatcccaacaacatggtttttgcaaataaaccatcccttcccttccccccaccccacccccatgatttttttttttttaagtactgactgttcaaagctcaggcaaaccatgcagatccacgtgttgttggaggaggcgctcccttcaggagaccacagagggggagtgactgtggctgaccatgtgggcagaggggctggcgggctggcccctgcgagaggcggactcagggctgctggatgctccgtccttggccgctttgatctggagccacgtgtcacccagagctttggcaaagtggtcgtccacggagcccgtgatggacacggagttgggtgccggctcgggctccttgtaattcttgcccaggctcctgcggaaatgctcctccaccacggggtcacaggtggtggcagcgctcggtggcctccggtagctggcaggcccgggcgcggcacagccgctgtgcgcgatggggcagtgcgagaggttgcagttgcgggcgccagccgaggcaca

SEQ ID NO: 373305 - DNA, 5039 bp, Homo sapiens
  misc_feature (2803)..(2803): n is a, c, g, or t
gcacgcgcgccgcttcccagtggcaagcgcgggcaggaccgcgttgcgtcatcggggcgcgcgcctcagagagagctgtggttgccggaagttgagcggcggcaagaaataatggcggcagctacgggggatcctggactctctaaactgcagtttgccccttttagtagtgccttggatgttgggttttggcatgagttgacccagaagaagctgaacgagtatcggctggatgaagctcccaaggacattaagggttattactacaatggtgactctgctgggctgccagctcgcttaacattggagttcagtgcttttgacatgagtgctcccaccccagcccgttgctgcccagctattggaacactgtataacaccaacacactcgagtctttcaagactgcagataagaagctccttttggaacaagcagcaaatgagatatgggaatccataaaatcaggcactgctcttgaaaaccctgtactcctcaacaagttcctcctcttgacatttgcagatctaaagaagtaccacttctactattggttttgctatcctgccctctgtcttccagagagtttacctctcattcaggggccagtgggtttggatcaaaggttttcactaaaacagattgaagcactagagtgtgcatatgataatctttgtcaaacagaaggagtcacagctcttccttacttcttaatcaagtatgatgagaacatggtgctggtttccttgcttaaacactacagtgatttcttccaaggtcaaaggacgaagataacaattggtgtatatgatccctgtaacttagcccagtaccctggatggcctttgaggaattttttggtcctagcagcccacagatggagtagcagtttccagtctgttgaagttgtttgcttccgtgaccgtaccatgcagggggcgagagacgttgcccacagcatcatcttcgaagtgaagcttccagaaatggcatttagcccagattgtcctaaagcagttggatgggaaaagaaccagaaaggaggcatgggaccaaggatggtgaacctcagtgaatgtatggaccctaaaaggttagctgagtcatcagtggatctaaatctcaaactgatgtgttggagattggttcctactttagacttggacaaggttgtgtctgtcaaatgtctgctgcttggagccggcaccttgggttgcaatgtagctaggacgttgatgggttggggcgtgagacacatcacatttgtggacaatgccaagatctcctactccaatcctgtgaggcagcctctctatgagtttgaagattgcctagggggtggtaagcccaaggctctggcagcagcggaccggctccagaaaatattccccggtgtgaatgccagaggattcaacatgagcatacctatgcctgggcatccagtgaacttctccagtgtcactctggagcaagcccgcagagatgtggagcaactggagcagctcatcgaaagccatgatgtcgtcttcctattgatggacaccagggagagccggtggcttcctgccgtcattgctgcaagcaagagaaagctggtcatcaatgctgctttgggatttgacacatttgttgtcatgagacatggtctgaagaaaccaaagcagcaaggagctggggacttgtgtccaaaccaccctgtggcatctgctgacctcctgggctcatcgctttttgccaacatccctggttacaagcttggctgctacttctgcaatgatgtggtggccccaggagattcaaccagagaccggaccttggaccagcagtgcactgtgagtcgtccaggactggccgtgattgcaggagccctggccgtggaattgatggtatctgttttgcagcatccagaagggggctatgccattgccagcagcagtgacgatcggatgaatgagcctccaacctctcttgggcttgtgcctcaccagatccggggatttctttcacggtttgataatgtccttcccgtcagcctggcatttgacaaatgtacagcttgttcttccaaagttcttgatcaatatgaacgagaaggatttaacttcctagccaaggtgtttaattcttcacattccttcttagaagacttgactggtcttacattgctgcatcaagaaacccaagctgctgagatctgggacatgagcgatgatgagaccatctgagatggccccgctgtggggctgacttctccccggccgcctgctgaggagctctccatcgccagagcaggactgctgaccccaggcctggtgattctgggcccctcctccataccccgaggtctgggattcccccctctgctgcccaggagtggccagtgttcggcgttgctcgggattcaagataccaccagttcagagctaaataataaccttggccttggccttgctattgacctgggacttggtcctccatgcagtttttatttcttgtcacagtgactgatagccatcccccaggatcctttccccttggccctgagggggtgacccaacacagaccaaatggggaaatgagcaaccagctcctgcccagagccactgcgggaggtggcaccctcatccccggaatgtgctgcccaccgcaccgcaggctcctcctgtgggggccctgggcatgggtgagggtgggaccccgtgagcgcactgcaccctggccctggtggagcgggaggaggaggagagccgagctgggtacgagactaaagggcccacatgacccagtgacgccagatttccaccnaggactgagtgagctgctcagacatggctttctgcctcccagcctgtcctccactgtgggcatagcatctgtgcctgcctgcctgcttgagggagaggagtttctgctgctgccttgagctggggggaagagcccaggggcagatcctggcagctgcctggatggggctcctccctgcccttatgagcaggccaggcccagaaaggccgagcctgggctgccttcctgccccagccgagggaggggtcagacggctctaccatgggtaactcaggcaagagctggttttcctctttattctgggtgtgtgcagctgtgaggccccaacccaggagaggccatggcctaggtacctgtgaccaccctgcccccgtgtagagggcatcgtctttcctgctattttattctttcagcttttgtcttaggcccagaatcaaagtgaaaattgagtcgagctgacccttacaacagtaggatttagtagggtagatttcaaatgaggcttcgcttctcccaaagtagccagtccaagttccagtggctgtcgttcagctcatgggagcttcatggggacacagccggcacaggtgcagggcccgagtccgcccacccagcctggcgctgaaactgcacacgtacactatgtggtttaagagcactttattattgttcttaaggctacttttaagtacaaaaaaagatggcctgccaaacctttttttttcttcttccaggaaaaacaggccacagagaatggtatattacagatttacacacatgaagagaaggtcagagcgcactgcaggcagcgcggctctgggaagaacttcacggagccccttcttagagcagggagggggctttctcagtgaaatgtttggttttctgctgcctcctctgccccaggcccccctccagggtactgcctatcccagataggtcagtgcaccagggacccggccgccagcaccgccgacccctcccagagtgacgcccttgttcactgacaaagagacctgtcccaggagtgtcctccaccgagccggtcagctgtgggtggttttcctgttacgacgctcagtagcctgtagcaataacaaactcgtggctatgaatgcagatgcagtgttctcatagaataactgttcctgcacttttacagacaaatctacgacaaaaaaaaagatcaactttttttttccgaacaacaaaaaaaatgaatgattacaataggaaagggaaaaattaaatagctacatatcattaacaaattaatgttcttcaaaaaatacctacaaatttctctgtacattctttacgcacagcgtaacgatggtctcaaaatcacccatatagaaaagtgttctcaacgatttttcctacagaaaatataggggcctgaatgccaaagcttggaagcccagtacagtgggagtgaaatgtgtgcggggcaaggagaagggcttttctttcctccacttttcaaaggcctgcagccactctgtgactacaagagccagtcctccgaccttttcacccagtgccaatttccaaaattcaacagctaaaaactgtaaaaccgggggtcatacggtgtgcagagtccacaaagccttgcaggtgaggtgaccacgcccacgtcacctggtcaggtgccatcgtcgtgagcctctggtgggccaggtgggacacagcacaccccagggggaggggatagaaacgctcattgaccaaaaaggagcagctgtgacctccacagctgtgtctgtcatgcttgcttcatctaatttctagttagtagctattaatatagcaaataataaatgcagtaataacagtataaagtcagaggaatgtatactgccttggccccagcgtacgaggaagcgtataaaacaccatatcacagattgtctgtcagtaatctgctgttcagccaagagagttcaaagggagcagtttctgcatgtagggaagttggaagacacaaaccccacctcccctgggagcttgtaacaaagcagacagggatgcaaaaataaatgatgtcagcctgcagccaaactccagcatcccacaccgcagctgacccactgctcatcgcgagggcctgccaggagctggcctcccgcactacttgtgagtaaagtgaatatcaaataccaatcttagagtacaactgtaccagcagtaagtatatctaggactgtaactgacaaaaataaactaattctga

SEQ ID NO: 373306 - DNA, 4887 bp, Homo sapiens
  misc_feature (2803)..(2803): n is a, c, g, or t
gcacgcgcgccgcttcccagtggcaagcgcgggcaggaccgcgttgcgtcatcggggcgcgcgcctcagagagagctgtggttgccggaagttgagcggcggcaagaaataatggcggcagctacgggggatcctggactctctaaactgcagtttgccccttttagtagtgccttggatgttgggttttggcatgagttgacccagaagaagctgaacgagtatcggctggatgaagctcccaaggacattaagggttattactacaatggtgactctgctgggctgccagctcgcttaacattggagttcagtgcttttgacatgagtgctcccaccccagcccgttgctgcccagctattggaacactgtataacaccaacacactcgagtctttcaagactgcagataagaagctccttttggaacaagcagcaaatgagatatgggaatccataaaatcaggcactgctcttgaaaaccctgtactcctcaacaagttcctcctcttgacatttgcagatctaaagaagtaccacttctactattggttttgctatcctgccctctgtcttccagagagtttacctctcattcaggggccagtgggtttggatcaaaggttttcactaaaacagattgaagcactagagtgtgcatatgataatctttgtcaaacagaaggagtcacagctcttccttacttcttaatcaagtatgatgagaacatggtgctggtttccttgcttaaacactacagtgatttcttccaaggtcaaaggacgaagataacaattggtgtatatgatccctgtaacttagcccagtaccctggatggcctttgaggaattttttggtcctagcagcccacagatggagtagcagtttccagtctgttgaagttgtttgcttccgtgaccgtaccatgcagggggcgagagacgttgcccacagcatcatcttcgaagtgaagcttccagaaatggcatttagcccagattgtcctaaagcagttggatgggaaaagaaccagaaaggaggcatgggaccaaggatggtgaacctcagtgaatgtatggaccctaaaaggttagctgagtcatcagtggatctaaatctcaaactgatgtgttggagattggttcctactttagacttggacaaggttgtgtctgtcaaatgtctgctgcttggagccggcaccttgggttgcaatgtagctaggacgttgatgggttggggcgtgagacacatcacatttgtggacaatgccaagatctcctactccaatcctgtgaggcagcctctctatgagtttgaagattgcctagggggtggtaagcccaaggctctggcagcagcggaccggctccagaaaatattccccggtgtgaatgccagaggattcaacatgagcatacctatgcctgggcatccagtgaacttctccagtgtcactctggagcaagcccgcagagatgtggagcaactggagcagctcatcgaaagccatgatgtcgtcttcctattgatggacaccagggagagccggtggcttcctgccgtcattgctgcaagcaagagaaagctggtcatcaatgctgctttgggatttgacacatttgttgtcatgagacatggtctgaagaaaccaaagcagcaaggagctggggacttgtgtccaaaccaccctgtggcatctgctgacctcctgggctcatcgctttttgccaacatccctggttacaagcttggctgctacttctgcaatgatgtggtggccccaggagattcaaccagagaccggaccttggaccagcagtgcactgtgagtcgtccaggactggccgtgattgcaggagccctggccgtggaattgatggtatctgttttgcagcatccagaagggggctatgccattgccagcagcagtgacgatcggatgaatgagcctccaacctctcttgggcttgtgcctcaccagatccggggatttctttcacggtttgataatgtccttcccgtcagcctggcatttgacaaatgtacagcttgttcttccaaagttcttgatcaatatgaacgagaaggatttaacttcctagccaaggtgtttaattcttcacattccttcttagaagacttgactggtcttacattgctgcatcaagaaacccaagctgctgagatctgggacatgagcgatgatgagaccatctgagatggccccgctgtggggctgacttctccccggccgcctgctgaggagctctccatcgccagagcaggactgctgaccccaggcctggtgattctgggcccctcctccataccccgaggtctgggattcccccctctgctgcccaggagtggccagtgttcggcgttgctcgggattcaagataccaccagttcagagctaaataataaccttggccttggccttgctattgacctgggacttggtcctccatgcagtttttatttcttgtcacagtgactgatagccatcccccaggatcctttccccttggccctgagggggtgacccaacacagaccaaatggggaaatgagcaaccagctcctgcccagagccactgcgggaggtggcaccctcatccccggaatgtgctgcccaccgcaccgcaggctcctcctgtgggggccctgggcatgggtgagggtgggaccccgtgagcgcactgcaccctggccctggtggagcgggaggaggaggagagccgagctgggtacgagactaaagggcccacatgacccagtgacgccagatttccaccnaggactgagtgagctgctcagacatggctttctgcctcccagcctgtcctccactgtgggcatagcatctgtgcctgcctgcctgcttgagggagaggagtttctgctgctgccttgagctggggggaagagcccaggggcagatcctggcagctgcctggatggggctcctccctgcccttatgagcaggccaggcccagaaaggccgagcctgggctgccttcctgccccagccgagggaggggtcagacggctctaccatgggtaactcaggcaagagctggttttcctctttattctgggtgtgtgcagctgtgaggccccaacccaggagaggccatggcctaggtacctgtgaccaccctgcccccgtgtagagggcatcgtctttcctgctattttattctttcagcttttgtcttaggcccagaatcaaagtgaaaattgagtcgagctgacccttacaacagtaggatttagtagggtagatttcaaatgaggcttcgcttctcccaaagtagccagtccaagttccagtggctgtcgttcagctcatgggagcttcatggggacacagccggcacaggtgcagggcccgagtccgcccacccagcctggcgctgaaactgcacacgtacactatgtggtttaagagcactttattattgttcttaaggctacttttaagtacaaaaaaagatggcctgccaaacctttttttttcttcttccaggaaaaacaggccacagagaatggtatattacagatttacacacatgaagagaaggtcagagcgcactgcaggcagcgcggctctgggaagaacttcacggagccccttcttagagcagggagggggctttctcagtgaaatgtttggttttctgctgcctcctctgccccaggcccccctccagggtactgcctatcccagataggtcagtgcaccagggacccggccgccagcaccgccgacccctcccagagtgacgcccttgttcactgacaaagagacctgtcccaggagtgtcctccaccgagccggtcagctgtgggtggttttcctgttacgacgctcagtagcctgtagcaataacaaactcgtggctatgaatgcagatgcagtgttctcatagaataactgttcctgcacttttacagacaaatctacgacaaaaaaaaagatcaactttttttttccgaacaacaaaaaaaatgaatgattacaataggaaagggaaaaattaaatagctacatatcattaacaaattaatgttcttcaaaaaatacctacaaatttctctgtacattctttacgcacagcgtaacgatggtctcaaaatcacccatatagaaaagtgttctcaacgatttttcctacagaaaatataggggcctgaatgccaaagcttggaagcccagtacagtgggagtgaaatgtgtgcggggcaaggagaagggcttttctttcctccacttttcaaaggcctgcagccactctgtgactacaagagccagtcctccgaccttttcacccagtgccaatttccaaaattcaacagctaaaaactgtaaaaccgggggtcatacggtgtgcagagtccacaaagccttgcaggtgaggtgaccacgcccacgtcacctggtcaggtgccatcgtcgtgagcctctggtgggccaggtgggacacagcacaccccagggggaggggatagaaacgctcattgaccaaaaaggagcagctgtgacctccacagctgtgtctgtcatgcttgcttcatctaatttctagttagtagctattaatatagcaaataataaatgcagtaataacagtataaagtcagaggaatgtatactgccttggccgctttgatctggagccacgtgtcacccagagctttggcaaaggacggagcatccagcagccctgagtccgcctctcgcagggccagcccgccagcccctctgcccacatggtcagccacagtcactccccctctgtggtctcctgaagggagcgcctcctccaacaacacgtggatctgcatggtttgcctgagctttgaacagtcagtactt

SEQ ID NO: 373307 - DNA, 6347 bp, Homo sapiens
  misc_feature (2803)..(2803): n is a, c, g, or t
gcacgcgcgccgcttcccagtggcaagcgcgggcaggaccgcgttgcgtcatcggggcgcgcgcctcagagagagctgtggttgccggaagttgagcggcggcaagaaataatggcggcagctacgggggatcctggactctctaaactgcagtttgccccttttagtagtgccttggatgttgggttttggcatgagttgacccagaagaagctgaacgagtatcggctggatgaagctcccaaggacattaagggttattactacaatggtgactctgctgggctgccagctcgcttaacattggagttcagtgcttttgacatgagtgctcccaccccagcccgttgctgcccagctattggaacactgtataacaccaacacactcgagtctttcaagactgcagataagaagctccttttggaacaagcagcaaatgagatatgggaatccataaaatcaggcactgctcttgaaaaccctgtactcctcaacaagttcctcctcttgacatttgcagatctaaagaagtaccacttctactattggttttgctatcctgccctctgtcttccagagagtttacctctcattcaggggccagtgggtttggatcaaaggttttcactaaaacagattgaagcactagagtgtgcatatgataatctttgtcaaacagaaggagtcacagctcttccttacttcttaatcaagtatgatgagaacatggtgctggtttccttgcttaaacactacagtgatttcttccaaggtcaaaggacgaagataacaattggtgtatatgatccctgtaacttagcccagtaccctggatggcctttgaggaattttttggtcctagcagcccacagatggagtagcagtttccagtctgttgaagttgtttgcttccgtgaccgtaccatgcagggggcgagagacgttgcccacagcatcatcttcgaagtgaagcttccagaaatggcatttagcccagattgtcctaaagcagttggatgggaaaagaaccagaaaggaggcatgggaccaaggatggtgaacctcagtgaatgtatggaccctaaaaggttagctgagtcatcagtggatctaaatctcaaactgatgtgttggagattggttcctactttagacttggacaaggttgtgtctgtcaaatgtctgctgcttggagccggcaccttgggttgcaatgtagctaggacgttgatgggttggggcgtgagacacatcacatttgtggacaatgccaagatctcctactccaatcctgtgaggcagcctctctatgagtttgaagattgcctagggggtggtaagcccaaggctctggcagcagcggaccggctccagaaaatattccccggtgtgaatgccagaggattcaacatgagcatacctatgcctgggcatccagtgaacttctccagtgtcactctggagcaagcccgcagagatgtggagcaactggagcagctcatcgaaagccatgatgtcgtcttcctattgatggacaccagggagagccggtggcttcctgccgtcattgctgcaagcaagagaaagctggtcatcaatgctgctttgggatttgacacatttgttgtcatgagacatggtctgaagaaaccaaagcagcaaggagctggggacttgtgtccaaaccaccctgtggcatctgctgacctcctgggctcatcgctttttgccaacatccctggttacaagcttggctgctacttctgcaatgatgtggtggccccaggagattcaaccagagaccggaccttggaccagcagtgcactgtgagtcgtccaggactggccgtgattgcaggagccctggccgtggaattgatggtatctgttttgcagcatccagaagggggctatgccattgccagcagcagtgacgatcggatgaatgagcctccaacctctcttgggcttgtgcctcaccagatccggggatttctttcacggtttgataatgtccttcccgtcagcctggcatttgacaaatgtacagcttgttcttccaaagttcttgatcaatatgaacgagaaggatttaacttcctagccaaggtgtttaattcttcacattccttcttagaagacttgactggtcttacattgctgcatcaagaaacccaagctgctgagatctgggacatgagcgatgatgagaccatctgagatggccccgctgtggggctgacttctccccggccgcctgctgaggagctctccatcgccagagcaggactgctgaccccaggcctggtgattctgggcccctcctccataccccgaggtctgggattcccccctctgctgcccaggagtggccagtgttcggcgttgctcgggattcaagataccaccagttcagagctaaataataaccttggccttggccttgctattgacctgggacttggtcctccatgcagtttttatttcttgtcacagtgactgatagccatcccccaggatcctttccccttggccctgagggggtgacccaacacagaccaaatggggaaatgagcaaccagctcctgcccagagccactgcgggaggtggcaccctcatccccggaatgtgctgcccaccgcaccgcaggctcctcctgtgggggccctgggcatgggtgagggtgggaccccgtgagcgcactgcaccctggccctggtggagcgggaggaggaggagagccgagctgggtacgagactaaagggcccacatgacccagtgacgccagatttccaccnaggactgagtgagctgctcagacatggctttctgcctcccagcctgtcctccactgtgggcatagcatctgtgcctgcctgcctgcttgagggagaggagtttctgctgctgccttgagctggggggaagagcccaggggcagatcctggcagctgcctggatggggctcctccctgcccttatgagcaggccaggcccagaaaggccgagcctgggctgccttcctgccccagccgagggaggggtcagacggctctaccatgggtaactcaggcaagagctggttttcctctttattctgggtgtgtgcagctgtgaggccccaacccaggagaggccatggcctaggtacctgtgaccaccctgcccccgtgtagagggcatcgtctttcctgctattttattctttcagcttttgtcttaggcccagaatcaaagtgaaaattgagtcgagctgacccttacaacagtaggatttagtagggtagatttcaaatgaggcttcgcttctcccaaagtagccagtccaagttccagtggctgtcgttcagctcatgggagcttcatggggacacagccggcacaggtgcagggcccgagtccgcccacccagcctggcgctgaaactgcacacgtacactatgtggtttaagagcactttattattgttcttaaggctacttttaagtacaaaaaaagatggcctgccaaacctttttttttcttcttccaggaaaaacaggccacagagaatggtatattacagatttacacacatgaagagaaggtcagagcgcactgcaggcagcgcggctctgggaagaacttcacggagccccttcttagagcagggagggggctttctcagtgaaatgtttggttttctgctgcctcctctgccccaggcccccctccagggtactgcctatcccagataggtcagctgtgggtggttttcctgttacgacgctcagtagcctgtagcaataacaaactcgtggctatgaatgcagatgcagtgttctcatagaataactgttcctgcacttttacagacaaatctacgacaaaaaaaaagatcaactttttttttccgaacaacaaaaaaaatgaatgattacaataggaaagggaaaaattaaatagctacatatcattaacaaattaatgttcttcaaaaaatacctacaaatttctctgtacattctttacgcacagcgtaacgatggtctcaaaatcacccatatagaaaagtgttctcaacgatttttcctacagaaaatataggggcctgaatgccaaagcttggaagcccagtacagtgggagtgaaatgtgtgcggggcaaggagaagggcttttctttcctccacttttcaaaggcctgcagccactctgtgactacaagagccagtcctccgaccttttcacccagtgccaatttccaaaattcaacagctaaaaactgtaaaaccgggggtcatacggtgtgcagagtccacaaagccttgcaggtgaggtgaccacgcccacgtcacctggtcaggtgccatcgtcgtgagcctctggtgggccaggtgggacacagcacaccccagggggaggggatagaaacgctcattgaccaaaaaggagcagctgtgacctccacagctgtgtctgtcatgcttgcttcatctaatttctagttagtagctattaatatagcaaataataaatgcagtaataacagtataaagtcagaggaatgtatactgccttggccccagcgtacgaggaagcgtataaaacaccatatcacagattgtctgtcagtaatctgctgttcagccaagagagttcaaagggagcagtttctgcatgtagggaagttggaagacacaaaccccacctcccctgggagcttgtaacaaagcagacagggatgcaaaaataaatgatgtcagcctgcagccaaactccagcatcccacaccgcagctgacccactgctcatcgcgagggcctgccaggagctggcctcccgcactacttgtgagtaaagtgaatatcaaataccaatcttagagtacaactgtaccagcagtaagtatatctaggactgtaactgacaaaaataaactaattctgaaaagaagatagtaagtattaaggtttttgtttactgtctatataattaatagaaaccagctattttttctccattaaaacatgcatcacgtttaaagcactatggaatcctccaacctcagctctagtctaacaaactgcagtgttcagagaagataaaatgcccgtgattggtagagtctgcagtccagttgcaagcacctgaaatctagagagagaaagacctataacctgtatgagacttccccttccaaagctgtattgtctacattaaaaaaaacaaaaacagtaacaacaacaaacacacaaatggtcagaaatgtcatccttaaaccctttgtttttcagcagtttgccctcagagttctggcataacacataaagttgtcaggcaactttagtcctcctccaatagtgcaaatcagacacgacagttctcttcaagtatacacacgcacacacatggaccgaaccaaacacgccgtggaagctgagccacacacaccccggtctcaagaagcaaaggaaaaagcacaaagcgtctgagtcaccaattcatcatggcttgtgactgagaaagcgctgtggagtcctggccccgtcggggcagcagacctgcatcagaggtttctttggtaactgaggcaggaagtaaggatgctacattagacagatgttccacgcgtagttcctgctatcatgtttgagggcccccttgtacggataccaagcaagtacaaaaacagaacacaaatcccaacaacatggtttttgcaaataaaccatcccttcccttccccccaccccacccccatgatttttttttttttaagtactgactgttcaaagctcaggcaaaccatgcagatccacgtgttgttggaggaggcgctcccttcaggagaccacagagggggagtgactgtggctgaccatgtgggcagaggggctggcgggctggcccctgcgagaggcggactcagggctgctggatgctccgtccttggccgctttgatctggagccacgtgtcacccagagctttggcaaagtggtcgtccacggagcccgtgatggacacggagttgggtgccggctcgggctccttgtaattcttgcccaggctcctgcggaaatgctcctccaccacggggtcacaggtggtggcagctgcaggcaagcaggaaggcaggcagtcagacacaggtggctgcagacagacaggcacggttgcagcaccctccctcaggcagcccagagccggactggctgccacggtcagcgtgggctctgcagacagaacccacctcccccggctaagtcaggcacttgggcaggtcacttttctgtaaaatggtgatgtaccaactgcactgggccagagtccgagttcagaaagagaatgtggcattaaat

SEQ ID NO: 373308 - DNA, 4834 bp, Homo sapiens
  misc_feature (1184)..(1184): n is a, c, g, or t
gcacgcgcgccgcttcccagtggcaagcgcgggcaggaccgcgttgcgtcatcggggcgcgcgcctcagagagagctgtggttgccggaagttgagcggcggcaagaaataatggcggcagctacgggggatcctggactctctaaactgcagtttgccccttttagtagtgccttggatgttgggttttggcatgagttgacccagaagaagctgaacgagtatcggctggatgaagctcccaaggacattaagggttattactacaatggtgactctgctgggctgccagctcgcttaacattggagttcagtgcttttgacatgagtgctcccaccccagcccgttgctgcccagctattggaacactgtataacaccaacacactcgagtctttcaagactgcagataagaagctccttttggaacaagcagcaaatgagatatgggaatccataaaatcaggcactgctcttgaaaaccctgtactcctcaacaagttcctcctcttgacatttgcagatctaaagaagtaccacttctactattggttttgctatcctgccctctgtcttccagagagtttacctctcattcaggggccagtgggtttggatcaaaggttttcactaaaacagattgaagcactagagtgtgcatatgataatctttgtcaaacagaaggagtcacagctcttccttacttcttaatcaagtatgatgagaacatggtgctggtttccttgcttaaacactacatgttcggcgttgctcgggattcaagataccaccagttcagagctaaataataaccttggccttggccttgctattgacctgggacttggtcctccatgcagtttttatttcttgtcacagtgactgatagccatcccccaggatcctttccccttggccctgagggggtgacccaacacagaccaaatggggaaatgagcaaccagctcctgcccagagccactgcgggaggtggcaccctcatccccggaatgtgctgcccaccgcaccgcaggctcctcctgtgggggccctgggcatgggtgagggtgggaccccgtgagcgcactgcaccctggccctggtggagcgggaggaggaggagagccgagctgggtacgagactaaagggcccacatgacccagtgacgccagatttccaccnaggactgagtgagctgctcagacatggctttctgcctcccagcctgtcctccactgtgggcatagcatctgtgcctgcctgcctgcttgagggagaggagtttctgctgctgccttgagctggggggaagagcccaggggcagatcctggcagctgcctggatggggctcctccctgcccttatgagcaggccaggcccagaaaggccgagcctgggctgccttcctgccccagccgagggaggggtcagacggctctaccatgggtaactcaggcaagagctggttttcctctttattctgggtgtgtgcagctgtgaggccccaacccaggagaggccatggcctaggtacctgtgaccaccctgcccccgtgtagagggcatcgtctttcctgctattttattctttcagcttttgtcttaggcccagaatcaaagtgaaaattgagtcgagctgacccttacaacagtaggatttagtagggtagatttcaaatgaggcttcgcttctcccaaagtagccagtccaagttccagtggctgtcgttcagctcatgggagcttcatggggacacagccggcacaggtgcagggcccgagtccgcccacccagcctggcgctgaaactgcacacgtacactatgtggtttaagagcactttattattgttcttaaggctacttttaagtacaaaaaaagatggcctgccaaacctttttttttcttcttccaggaaaaacaggccacagagaatggtatattacagatttacacacatgaagagaaggtcagagcgcactgcaggcagcgcggctctgggaagaacttcacggagccccttcttagagcagggagggggctttctcagtgaaatgtttggttttctgctgcctcctctgccccaggcccccctccagggtactgcctatcccagataggtcagtgcaccagggacccggccgccagcaccgccgacccctcccagagtgacgcccttgttcactgacaaagagacctgtcccaggagtgtcctccaccgagccggtcagctgtgggtggttttcctgttacgacgctcagtagcctgtagcaataacaaactcgtggctatgaatgcagatgcagtgttctcatagaataactgttcctgcacttttacagacaaatctacgacaaaaaaaaagatcaactttttttttccgaacaacaaaaaaaatgaatgattacaataggaaagggaaaaattaaatagctacatatcattaacaaattaatgttcttcaaaaaatacctacaaatttctctgtacattctttacgcacagcgtaacgatggtctcaaaatcacccatatagaaaagtgttctcaacgatttttcctacagaaaatataggggcctgaatgccaaagcttggaagcccagtacagtgggagtgaaatgtgtgcggggcaaggagaagggcttttctttcctccacttttcaaaggcctgcagccactctgtgactacaagagccagtcctccgaccttttcacccagtgccaatttccaaaattcaacagctaaaaactgtaaaaccgggggtcatacggtgtgcagagtccacaaagccttgcaggtgaggtgaccacgcccacgtcacctggtcaggtgccatcgtcgtgagcctctggtgggccaggtgggacacagcacaccccagggggaggggatagaaacgctcattgaccaaaaaggagcagctgtgacctccacagctgtgtctgtcatgcttgcttcatctaatttctagttagtagctattaatatagcaaataataaatgcagtaataacagtataaagtcagaggaatgtatactgccttggccccagcgtacgaggaagcgtataaaacaccatatcacagattgtctgtcagtaatctgctgttcagccaagagagttcaaagggagcagtttctgcatgtagggaagttggaagacacaaaccccacctcccctgggagcttgtaacaaagcagacagggatgcaaaaataaatgatgtcagcctgcagccaaactccagcatcccacaccgcagctgacccactgctcatcgcgagggcctgccaggagctggcctcccgcactacttgtgagtaaagtgaatatcaaataccaatcttagagtacaactgtaccagcagtaagtatatctaggactgtaactgacaaaaataaactaattctgaaaagaagatagtaagtattaaggtttttgtttactgtctatataattaatagaaaccagctattttttctccattaaaacatgcatcacgtttaaagcactatggaatcctccaacctcagctctagtctaacaaactgcagtgttcagagaagataaaatgcccgtgattggtagagtctgcagtccagttgcaagcacctgaaatctagagagagaaagacctataacctgtatgagacttccccttccaaagctgtattgtctacattaaaaaaaacaaaaacagtaacaacaacaaacacacaaatggtcagaaatgtcatccttaaaccctttgtttttcagcagtttgccctcagagttctggcataacacataaagttgtcaggcaactttagtcctcctccaatagtgcaaatcagacacgacagttctcttcaagtatacacacgcacacacatggaccgaaccaaacacgccgtggaagctgagccacacacaccccggtctcaagaagcaaaggaaaaagcacaaagcgtctgagtcaccaattcatcatggcttgtgactgagaaagcgctgtggagtcctggccccgtcggggcagcagacctgcatcagaggtttctttggtaactgaggcaggaagtaaggatgctacattagacagatgttccacgcgtagttcctgctatcatgtttgagggcccccttgtacggataccaagcaagtacaaaaacagaacacaaatcccaacaacatggtttttgcaaataaaccatcccttcccttccccccaccccacccccatgatttttttttttttaagtactgactgttcaaagctcaggcaaaccatgcagatccacgtgttgttggaggaggcgctcccttcaggagaccacagagggggagtgactgtggctgaccatgtgggcagaggggctggcgggctggcccctgcgagaggcggactcagggctgctggatgctccgtccttggccgctttgatctggagccacgtgtcacccagagctttggcaaagtggtcgtccacggagcccgtgatggacacggagttgggtgccggctcgggctccttgtaattcttgcccaggctcctgcggaaatgctcctccaccacggggtcacaggtggtggcagctgcaggcaagcaggaaggcaggcagtcagacacaggtggctgcagacagacaggcacggttgcagcaccctccctcaggcagcccagagccggactggctgccacggtcagcgtgggctctgcagacagaacccacctcccccggctaagtcaggcacttgggcaggtcacttttctgtaaaatggtgatgtaccaactgcactgggccagagtccgagttcagaaagagaatgtggcattaaat

SEQ ID NO: 373309 - DNA, 4444 bp, Homo sapiens
  misc_feature (794)..(794): n is a, c, g, or t
gcaatttggtggtgtaattaaaagggagcatgtttgtacctgccagcatctttgagatcttcggctctggatgaagcaggagaggcagaacataaacaaatggacggaagaatcaagcacttctgtgaatggaatcttttattcctcgcccatctgattcttggctgctttgttccataagatctgggacatgagcgatgatgagaccatctgagatggccccgctgtggggctgacttctccccggccgcctgctgaggagctctccatcgccagagcaggactgctgaccccaggcctggtgattctgggcccctcctccataccccgaggtctgggattcccccctctgctgcccaggagtggccagtgttcggcgttgctcgggattcaagataccaccagttcagagctaaataataaccttggccttggccttgctattgacctgggacttggtcctccatgcagtttttatttcttgtcacagtgactgatagccatcccccaggatcctttccccttggccctgagggggtgacccaacacagaccaaatggggaaatgagcaaccagctcctgcccagagccactgcgggaggtggcaccctcatccccggaatgtgctgcccaccgcaccgcaggctcctcctgtgggggccctgggcatgggtgagggtgggaccccgtgagcgcactgcaccctggccctggtggagcgggaggaggaggagagccgagctgggtacgagactaaagggcccacatgacccagtgacgccagatttccaccnaggactgagtgagctgctcagacatggctttctgcctcccagcctgtcctccactgtgggcatagcatctgtgcctgcctgcctgcttgagggagaggagtttctgctgctgccttgagctggggggaagagcccaggggcagatcctggcagctgcctggatggggctcctccctgcccttatgagcaggccaggcccagaaaggccgagcctgggctgccttcctgccccagccgagggaggggtcagacggctctaccatgggtaactcaggcaagagctggttttcctctttattctgggtgtgtgcagctgtgaggccccaacccaggagaggccatggcctaggtacctgtgaccaccctgcccccgtgtagagggcatcgtctttcctgctattttattctttcagcttttgtcttaggcccagaatcaaagtgaaaattgagtcgagctgacccttacaacagtaggatttagtagggtagatttcaaatgaggcttcgcttctcccaaagtagccagtccaagttccagtggctgtcgttcagctcatgggagcttcatggggacacagccggcacaggtgcagggcccgagtccgcccacccagcctggcgctgaaactgcacacgtacactatgtggtttaagagcactttattattgttcttaaggctacttttaagtacaaaaaaagatggcctgccaaacctttttttttcttcttccaggaaaaacaggccacagagaatggtatattacagatttacacacatgaagagaaggtcagagcgcactgcaggcagcgcggctctgggaagaacttcacggagccccttcttagagcagggagggggctttctcagtgaaatgtttggttttctgctgcctcctctgccccaggcccccctccagggtactgcctatcccagataggtcagtgcaccagggacccggccgccagcaccgccgacccctcccagagtgacgcccttgttcactgacaaagagacctgtcccaggagtgtcctccaccgagccggtcagctgtgggtggttttcctgttacgacgctcagtagcctgtagcaataacaaactcgtggctatgaatgcagatgcagtgttctcatagaataactgttcctgcacttttacagacaaatctacgacaaaaaaaaagatcaactttttttttccgaacaacaaaaaaaatgaatgattacaataggaaagggaaaaattaaatagctacatatcattaacaaattaatgttcttcaaaaaatacctacaaatttctctgtacattctttacgcacagcgtaacgatggtctcaaaatcacccatatagaaaagtgttctcaacgatttttcctacagaaaatataggggcctgaatgccaaagcttggaagcccagtacagtgggagtgaaatgtgtgcggggcaaggagaagggcttttctttcctccacttttcaaaggcctgcagccactctgtgactacaagagccagtcctccgaccttttcacccagtgccaatttccaaaattcaacagctaaaaactgtaaaaccgggggtcatacggtgtgcagagtccacaaagccttgcaggtgaggtgaccacgcccacgtcacctggtcaggtgccatcgtcgtgagcctctggtgggccaggtgggacacagcacaccccagggggaggggatagaaacgctcattgaccaaaaaggagcagctgtgacctccacagctgtgtctgtcatgcttgcttcatctaatttctagttagtagctattaatatagcaaataataaatgcagtaataacagtataaagtcagaggaatgtatactgccttggccccagcgtacgaggaagcgtataaaacaccatatcacagattgtctgtcagtaatctgctgttcagccaagagagttcaaagggagcagtttctgcatgtagggaagttggaagacacaaaccccacctcccctgggagcttgtaacaaagcagacagggatgcaaaaataaatgatgtcagcctgcagccaaactccagcatcccacaccgcagctgacccactgctcatcgcgagggcctgccaggagctggcctcccgcactacttgtgagtaaagtgaatatcaaataccaatcttagagtacaactgtaccagcagtaagtatatctaggactgtaactgacaaaaataaactaattctgaaaagaagatagtaagtattaaggtttttgtttactgtctatataattaatagaaaccagctattttttctccattaaaacatgcatcacgtttaaagcactatggaatcctccaacctcagctctagtctaacaaactgcagtgttcagagaagataaaatgcccgtgattggtagagtctgcagtccagttgcaagcacctgaaatctagagagagaaagacctataacctgtatgagacttccccttccaaagctgtattgtctacattaaaaaaaacaaaaacagtaacaacaacaaacacacaaatggtcagaaatgtcatccttaaaccctttgtttttcagcagtttgccctcagagttctggcataacacataaagttgtcaggcaactttagtcctcctccaatagtgcaaatcagacacgacagttctcttcaagtatacacacgcacacacatggaccgaaccaaacacgccgtggaagctgagccacacacaccccggtctcaagaagcaaaggaaaaagcacaaagcgtctgagtcaccaattcatcatggcttgtgactgagaaagcgctgtggagtcctggccccgtcggggcagcagacctgcatcagaggtttctttggtaactgaggcaggaagtaaggatgctacattagacagatgttccacgcgtagttcctgctatcatgtttgagggcccccttgtacggataccaagcaagtacaaaaacagaacacaaatcccaacaacatggtttttgcaaataaaccatcccttcccttccccccaccccacccccatgatttttttttttttaagtactgactgttcaaagctcaggcaaaccatgcagatccacgtgttgttggaggaggcgctcccttcaggagaccacagagggggagtgactgtggctgaccatgtgggcagaggggctggcgggctggcccctgcgagaggcggactcagggctgctggatgctccgtccttggccgctttgatctggagccacgtgtcacccagagctttggcaaagtggtcgtccacggagcccgtgatggacacggagttgggtgccggctcgggctccttgtaattcttgcccaggctcctgcggaaatgctcctccaccacggggtcacaggtggtggcagctgcaggcaagcaggaaggcaggcagtcagacacaggtggctgcagacagacaggcacggttgcagcaccctccctcaggcagcccagagccggactggctgccacggtcagcgtgggctctgcagacagaacccacctcccccggctaagtcaggcacttgggcaggtcacttttctgtaaaatggtgatgtaccaactgcactgggccagagtccgagttcagaaagagaatgtggcattaaat

SEQ ID NO: 373310 - DNA, 5257 bp, Homo sapiens
gcacgcgcgccgcttcccagtggcaagcgcgggcaggaccgcgttgcgtcatcggggcgcgcgcctcagagagagctgtggttgccggaagttgagcggcggcaagaaataatggcggcagctacgggggatcctggactctctaaactgcagtttgccccttttagtagtgccttggatgttgggttttggcatgagttgacccagaagaagctgaacgagtatcggctggatgaagctcccaaggacattaagggttattactacaatggtgactctgctgggctgccagctcgcttaacattggagttcagtgcttttgacatgagtgctcccaccccagcccgttgctgcccagctattggaacactgtataacaccaacacactcgagtctttcaagactgcagataagaagctccttttggaacaagcagcaaatgagatatgggaatccataaaatcaggcactgctcttgaaaaccctgtactcctcaacaagttcctcctcttgacatttgcagatctaaagaagtaccacttctactattggttttgctatcctgccctctgtcttccagagagtttacctctcattcaggggccagtgggtttggatcaaaggttttcactaaaacagattgaagcactagagtgtgcatatgataatctttgtcaaacagaaggagtcacagctcttccttacttcttaatcaagtatgatgagaacatggtgctggtttccttgcttaaacactacagtgatttcttccaaggtcaaaggacgaagataacaattggtgtatatgatccctgtaacttagcccagtaccctggatggcctttgaggaattttttggtcctagcagcccacagatggagtagcagtttccagtctgttgaagttgtttgcttccgtgaccgtaccatgcagggggcgagagacgttgcccacagcatcatcttcgaagtgaagcttccagaaatggcatttagcccagattgtcctaaagcagttggatgggaaaagaaccagaaaggaggcatgggaccaaggatggtgaacctcagtgaatgtatggaccctaaaaggttagctgagtcatcagtggatctaaatctcaaactgatgtgttggagattggttcctactttagacttggacaaggttgtgtctgtcaaatgtctgctgcttggagccggcaccttgggttgcaatgtagctaggacgttgatgggttggggcgtgagacacatcacatttgtggacaatgccaagatctcctactccaatcctgtgaggcagcctctctatgagtttgaagattgcctagggggtggtaagcccaaggctctggcagcagcggaccggctccagaaaatattccccggtgtgaatgccagaggattcaacatgagcatacctatgcctgggcatccagtgaacttctccagtgtcactctggagcaagcccgcagagatgtggagcaactggagcagctcatcgaaagccatgatgtcgtcttcctattgatggacaccagggagagccggtggcttcctgccgtcattgctgcaagcaagagaaagctggtcatcaatgctgctttgggatttgacacatttgttgtcatgagacatggtctgaagaaaccaaagcagcaaggagctggggacttgtgtccaaaccaccctgtggcatctgctgacctcctgggctcatcgctttttgccaacatccctggttacaagcttggctgctacttctgcaatgatgtggtggccccaggagattcaaccagagaccggaccttggaccagcagtgcactgtgagtcgtccaggactggccgtgattgcaggagccctggccgtggaattgatggtatctgttttgcagcatccagaagggggctatgccattgccagcagcagtgacgatcggatgaatgagcctccaacctctcttgggcttgtgcctcaccagatccggggatttctttcacggtttgataatgtccttcccgtcagcctggcatttgacaaatgtacagcttgttcttccaaagttcttgatcaatatgaacgagaaggatttaacttcctagccaaggtgtttaattcttcacattccttcttagaagacttgactggtcttacattgctgcatcaagaaacccaagctgctgagatctgggacatgagcgatgatgagaccatctgagatggccccgctgtggggctgacttctccccggccgcctgctgaggagctctccatcgccagagcaggactgctgaccccaggcctggtgattctgggcccctcctccataccccgaggaaaaacaggccacagagaatggtatattacagatttacacacatgaagagaaggtcagagcgcactgcaggcagcgcggctctgggaagaacttcacggagccccttcttagagcagggagggggctttctcagtgaaatgtttggttttctgctgcctcctctgccccaggcccccctccagggtactgcctatcccagataggtcagtgcaccagggacccggccgccagcaccgccgacccctcccagagtgacgcccttgttcactgacaaagagacctgtcccaggagtgtcctccaccgagccggtcagctgtgggtggttttcctgttacgacgctcagtagcctgtagcaataacaaactcgtggctatgaatgcagatgcagtgttctcatagaataactgttcctgcacttttacagacaaatctacgacaaaaaaaaagatcaactttttttttccgaacaacaaaaaaaatgaatgattacaataggaaagggaaaaattaaatagctacatatcattaacaaattaatgttcttcaaaaaatacctacaaatttctctgtacattctttacgcacagcgtaacgatggtctcaaaatcacccatatagaaaagtgttctcaacgatttttcctacagaaaatataggggcctgaatgccaaagcttggaagcccagtacagtgggagtgaaatgtgtgcggggcaaggagaagggcttttctttcctccacttttcaaaggcctgcagccactctgtgactacaagagccagtcctccgaccttttcacccagtgccaatttccaaaattcaacagctaaaaactgtaaaaccgggggtcatacggtgtgcagagtccacaaagccttgcaggtgaggtgaccacgcccacgtcacctggtcaggtgccatcgtcgtgagcctctggtgggccaggtgggacacagcacaccccagggggaggggatagaaacgctcattgaccaaaaaggagcagctgtgacctccacagctgtgtctgtcatgcttgcttcatctaatttctagttagtagctattaatatagcaaataataaatgcagtaataacagtataaagtcagaggaatgtatactgccttggccccagcgtacgaggaagcgtataaaacaccatatcacagattgtctgtcagtaatctgctgttcagccaagagagttcaaagggagcagtttctgcatgtagggaagttggaagacacaaaccccacctcccctgggagcttgtaacaaagcagacagggatgcaaaaataaatgatgtcagcctgcagccaaactccagcatcccacaccgcagctgacccactgctcatcgcgagggcctgccaggagctggcctcccgcactacttgtgagtaaagtgaatatcaaataccaatcttagagtacaactgtaccagcagtaagtatatctaggactgtaactgacaaaaataaactaattctgaaaagaagatagtaagtattaaggtttttgtttactgtctatataattaatagaaaccagctattttttctccattaaaacatgcatcacgtttaaagcactatggaatcctccaacctcagctctagtctaacaaactgcagtgttcagagaagataaaatgcccgtgattggtagagtctgcagtccagttgcaagcacctgaaatctagagagagaaagacctataacctgtatgagacttccccttccaaagctgtattgtctacattaaaaaaaacaaaaacagtaacaacaacaaacacacaaatggtcagaaatgtcatccttaaaccctttgtttttcagcagtttgccctcagagttctggcataacacataaagttgtcaggcaactttagtcctcctccaatagtgcaaatcagacacgacagttctcttcaagtatacacacgcacacacatggaccgaaccaaacacgccgtggaagctgagccacacacaccccggtctcaagaagcaaaggaaaaagcacaaagcgtctgagtcaccaattcatcatggcttgtgactgagaaagcgctgtggagtcctggccccgtcggggcagcagacctgcatcagaggtttctttggtaactgaggcaggaagtaaggatgctacattagacagatgttccacgcgtagttcctgctatcatgtttgagggcccccttgtacggataccaagcaagtacaaaaacagaacacaaatcccaacaacatggtttttgcaaataaaccatcccttcccttccccccaccccacccccatgatttttttttttttaagtactgactgttcaaagctcaggcaaaccatgcagatccacgtgttgttggaggaggcgctcccttcaggagaccacagagggggagtgactgtggctgaccatgtgggcagaggggctggcgggctggcccctgcgagaggcggactcagggctgctggatgctccgtccttggccgctttgatctggagccacgtgtcacccagagctttggcaaagtggtcgtccacggagcccgtgatggacacggagttgggtgccggctcgggctccttgtaattcttgcccaggctcctgcggaaatgctcctccaccacggggtcacaggtggtggcagctgcaggcaagcaggaaggcaggcagtcagacacaggtggctgcagacagacaggcacggttgcagcaccctccctcaggcagcccagagccggactggctgccacggtcagcgtgggctctgcagacagaacccacctcccccggctaagtcaggcacttgggcaggtcacttttctgtaaaatggtgatgtaccaactgcactgggccagagtccgagttcagaaagagaatgtggcattaaat

SEQ ID NO: 373311 - DNA, 3659 bp, Homo sapiens
  misc_feature (2803)..(2803): n is a, c, g, or t
gcacgcgcgccgcttcccagtggcaagcgcgggcaggaccgcgttgcgtcatcggggcgcgcgcctcagagagagctgtggttgccggaagttgagcggcggcaagaaataatggcggcagctacgggggatcctggactctctaaactgcagtttgccccttttagtagtgccttggatgttgggttttggcatgagttgacccagaagaagctgaacgagtatcggctggatgaagctcccaaggacattaagggttattactacaatggtgactctgctgggctgccagctcgcttaacattggagttcagtgcttttgacatgagtgctcccaccccagcccgttgctgcccagctattggaacactgtataacaccaacacactcgagtctttcaagactgcagataagaagctccttttggaacaagcagcaaatgagatatgggaatccataaaatcaggcactgctcttgaaaaccctgtactcctcaacaagttcctcctcttgacatttgcagatctaaagaagtaccacttctactattggttttgctatcctgccctctgtcttccagagagtttacctctcattcaggggccagtgggtttggatcaaaggttttcactaaaacagattgaagcactagagtgtgcatatgataatctttgtcaaacagaaggagtcacagctcttccttacttcttaatcaagtatgatgagaacatggtgctggtttccttgcttaaacactacagtgatttcttccaaggtcaaaggacgaagataacaattggtgtatatgatccctgtaacttagcccagtaccctggatggcctttgaggaattttttggtcctagcagcccacagatggagtagcagtttccagtctgttgaagttgtttgcttccgtgaccgtaccatgcagggggcgagagacgttgcccacagcatcatcttcgaagtgaagcttccagaaatggcatttagcccagattgtcctaaagcagttggatgggaaaagaaccagaaaggaggcatgggaccaaggatggtgaacctcagtgaatgtatggaccctaaaaggttagctgagtcatcagtggatctaaatctcaaactgatgtgttggagattggttcctactttagacttggacaaggttgtgtctgtcaaatgtctgctgcttggagccggcaccttgggttgcaatgtagctaggacgttgatgggttggggcgtgagacacatcacatttgtggacaatgccaagatctcctactccaatcctgtgaggcagcctctctatgagtttgaagattgcctagggggtggtaagcccaaggctctggcagcagcggaccggctccagaaaatattccccggtgtgaatgccagaggattcaacatgagcatacctatgcctgggcatccagtgaacttctccagtgtcactctggagcaagcccgcagagatgtggagcaactggagcagctcatcgaaagccatgatgtcgtcttcctattgatggacaccagggagagccggtggcttcctgccgtcattgctgcaagcaagagaaagctggtcatcaatgctgctttgggatttgacacatttgttgtcatgagacatggtctgaagaaaccaaagcagcaaggagctggggacttgtgtccaaaccaccctgtggcatctgctgacctcctgggctcatcgctttttgccaacatccctggttacaagcttggctgctacttctgcaatgatgtggtggccccaggagattcaaccagagaccggaccttggaccagcagtgcactgtgagtcgtccaggactggccgtgattgcaggagccctggccgtggaattgatggtatctgttttgcagcatccagaagggggctatgccattgccagcagcagtgacgatcggatgaatgagcctccaacctctcttgggcttgtgcctcaccagatccggggatttctttcacggtttgataatgtccttcccgtcagcctggcatttgacaaatgtacagcttgttcttccaaagttcttgatcaatatgaacgagaaggatttaacttcctagccaaggtgtttaattcttcacattccttcttagaagacttgactggtcttacattgctgcatcaagaaacccaagctgctgagatctgggacatgagcgatgatgagaccatctgagatggccccgctgtggggctgacttctccccggccgcctgctgaggagctctccatcgccagagcaggactgctgaccccaggcctggtgattctgggcccctcctccataccccgaggtctgggattcccccctctgctgcccaggagtggccagtgttcggcgttgctcgggattcaagataccaccagttcagagctaaataataaccttggccttggccttgctattgacctgggacttggtcctccatgcagtttttatttcttgtcacagtgactgatagccatcccccaggatcctttccccttggccctgagggggtgacccaacacagaccaaatggggaaatgagcaaccagctcctgcccagagccactgcgggaggtggcaccctcatccccggaatgtgctgcccaccgcaccgcaggctcctcctgtgggggccctgggcatgggtgagggtgggaccccgtgagcgcactgcaccctggccctggtggagcgggaggaggaggagagccgagctgggtacgagactaaagggcccacatgacccagtgacgccagatttccaccnaggactgagtgagctgctcagacatggctttctgcctcccagcctgtcctccactgtgggcatagcatctgtgcctgcctgcctgcttgagggagaggagtttctgctgctgccttgagctggggggaagagcccaggggcagatcctggcagctgcctggatggggctcctccctgcccttatgagcaggccaggcccagaaaggccgagcctgggctgccttcctgccccagccgagggaggggtcagacggctctaccatgggtaactcaggcaagagctggttttcctctttattctgggtgtgtgcagctgtgaggccccaacccaggagaggccatggcctaggtacctgtgaccaccctgcccccgtgtagagggcatcgtctttcctgctattttattctttcagcttttgtcttaggcccagaatcaaagtgaaaattgagtcgagctgacccttacaacagtaggatttagtagggtagatttcaaatgaggcttcgcttctcccaaagtagccagtccaagttccagtggctgtcgttcagctcatgggagcttcatggggacacagccggcacaggtgcagggcccgagtccgcccacccagcctggcgctgaaactgcacacgtacactatgtggtttaagagcactttattattgttcttaaggctacttttaagtacaaaaaaagatggcatttattgggctagcaaagaaaaccagctctttgcttttgccccaaaagagttaagtttcaaaaatcaattgttgctgagtagctcctggctcttcaacttcacaaaggcagaggcccagcctcagactatcaaaacaaagtatgcaaaag

SEQ ID NO: 373312 - DNA, 2793 bp, Homo sapiens
gcacgcgcgccgcttcccagtggcaagcgcgggcaggaccgcgttgcgtcatcggggcgcgcgcctcagagagagctgtggttgccggaagttgagcggcggcaagaaataatggcggcagctacgggggatcctggactctctaaactgcagtttgccccttttagtagtgccttggatgttgggttttggcatgagttgacccagaagaagctgaacgagtatcggctggatgaagctcccaaggacattaagggttattactacaatggtgactctgctgggctgccagctcgcttaacattggagttcagtgcttttgacatgagtgctcccaccccagcccgttgctgcccagctattggaacactgtataacaccaacacactcgagtctttcaagactgcagataagaagctccttttggaacaagcagcaaatgagatatgggaatccataaaatcaggcactgctcttgaaaaccctgtactcctcaacaagttcctcctcttgacatttgcagatctaaagaagtaccacttctactattggttttgctatcctgccctctgtcttccagagagtttacctctcattcaggggccagtgggtttggatcaaaggttttcactaaaacagattgaagcactagagtgtgcatatgataatctttgtcaaacagaaggagtcacagctcttccttacttcttaatcaagtatgatgagaacatggtgctggtttccttgcttaaacactacagtgatttcttccaaggtcaaaggacgaagataacaattggtgtatatgatccctgtaacttagcccagtaccctggatggcctttgaggaattttttggtcctagcagcccacagatggagtagcagtttccagtctgttgaagttgtttgcttccgtgaccgtaccatgcagggggcgagagacgttgcccacagcatcatcttcgaagtgaagcttccagaaatggcatttagcccagattgtcctaaagcagttggatgggaaaagaaccagaaaggaggcatgggaccaaggatggtgaacctcagtgaatgtatggaccctaaaaggttagctgagtcatcagtggatctaaatctcaaactgatgtgttggagattggttcctactttagacttggacaaggttgtgtctgtcaaatgtctgctgcttggagccggcaccttgggttgcaatgtagctaggacgttgatgggttggggcgtgagacacatcacatttgtggacaatgccaagatctcctactccaatcctgtgaggcagcctctctatgagtttgaagattgcctagggggtggtaagcccaaggctctggcagcagcggaccggctccagaaaatattccccggtgtgaatgccagaggattcaacatgagcatacctatgcctgggcatccagtgaacttctccagtgtcactctggagcaagcccgcagagatgtggagcaactggagcagctcatcgaaagccatgatgtcgtcttcctattgatggacaccagggagagccggtggcttcctgccgtcattgctgcaagcaagagaaagctggtcatcaatgctgctttgggatttgacacatttgttgtcatgagacatggtctgaagaaaccaaagcagcaaggagctggggacttgtgtccaaaccaccctgtggcatctgctgacctcctgggctcatcgctttttgccaacatccctggttacaagcttggctgctacttctgcaatgatgtggtggccccaggagattcaaccagagaccggaccttggaccagcagtgcactgtgagtcgtccaggactggccgtgattgcaggagccctggccgtggaattgatggtatctgttttgcagcatccagaagggggctatgccattgccagcagcagtgacgatcggatgaatgagcctccaacctctcttgggcttgtgcctcaccagatccggggatttctttcacggtttgataatgtccttcccgtcagcctggcatttgacaaatgtacagcttgttcttccaaagttcttgatcaatatgaacgagaaggatttaacttcctagccaaggtgtttaattcttcacattccttcttagaagacttgactggtcttacattgctgcatcaagaaacccaagctgctgagcatctttgagatcttcggctctggatgaagcaggagaggcagaacataaacaaatggacggaagaatcaagcacttctgtgaatggaatcttttattcctcgcccatctgattcttggctgctttgttccataaggtagatgaacaatgatgataaaataaaatgtaaataagaatttttgtgctacaaactcctgaatcgataaatacgttcagtaatgaatgtaagtttctccatgtgctgtgaaatgctaaatggatagaagtgtatttatataattctatttcttttaaacacaagcatcagcatgttttctccctctaatttataaatgtcagcacttatttcttgatatataaattgatacaggatgccacaaacaaaaagttgccgcaaaagataagggcgtttgttagacacagctggaaagctttttagtcactatagaagttagcaggaatgtgattccaaagttaagatggccctcctgagttattcagaactctttcagttgtaagttgcaaattttaaccaacctgaacaagggggaatttttttgcttatgtagttggaatgttactggaactactcataggattacag

SEQ ID NO: 373313 - DNA, 2628 bp, Homo sapiens
gcacgcgcgccgcttcccagtggcaagcgcgggcaggaccgcgttgcgtcatcggggcgcgcgcctcagagagagctgtggttgccggaagttgagcggcggcaagaaataatggcggcagctacgggggatcctggactctctaaactgcagtttgccccttttagtagtgccttggatgttgggttttggcatgagttgacccagaagaagctgaacgagtatcggctggatgaagctcccaaggacattaagggttattactacaatggtgactctgctgggctgccagctcgcttaacattggagttcagtgcttttgacatgagtgctcccaccccagcccgttgctgcccagctattggaacactgtataacaccaacacactcgagtctttcaagactgcagataagaagctccttttggaacaagcagcaaatgagatatgggaatccataaaatcaggcactgctcttgaaaaccctgtactcctcaacaagttcctcctcttgacatttgcagatctaaagaagtaccacttctactattggttttgctatcctgccctctgtcttccagagagtttacctctcattcaggggccagtgggtttggatcaaaggttttcactaaaacagattgaagcactagagtgtgcatatgataatctttgtcaaacagaaggagtcacagctcttccttacttcttaatcaagtatgatgagaacatggtgctggtttccttgcttaaacactacagtgatttcttccaaggtcaaaggacgaagataacaattggtgtatatgatccctgtaacttagcccagtaccctggatggcctttgaggaattttttggtcctagcagcccacagatggagtagcagtttccagtctgttgaagttgtttgcttccgtgaccgtaccatgcagggggcgagagacgttgcccacagcatcatcttcgaagtgaagcttccagaaatggcatttagcccagattgtcctaaagcagttggatgggaaaagaaccagaaaggaggcatgggaccaaggatggtgaacctcagtgaatgtatggaccctaaaaggttagctgagtcatcagtggatctaaatctcaaactgatgtgttggagattggttcctactttagacttggacaaggttgtgtctgtcaaatgtctgctgcttggagccggcaccttgggttgcaatgtagctaggacgttgatgggttggggcgtgagacacatcacatttgtggacaatgccaagatctcctactccaatcctgtgaggcagcctctctatgagtttgaagattgcctagggggtggtaagcccaaggctctggcagcagcggaccggctccagaaaatattccccggtgtgaatgccagaggattcaacatgagcatacctatgcctgggcatccagtgaacttctccagtgtcactctggagcaagcccgcagagatgtggagcaactggagcagctcatcgaaagccatgatgtcgtcttcctattgatggacaccagggagagccggtggcttcctgccgtcattgctgcaagcaagagaaagctggtcatcaatgctgctttgggatttgacacatttgttgtcatgagacatggtctgaagaaaccaaagcagcaaggagctggggacttgtgtccaaaccaccctgtggcatctgctgacctcctgggctcatcgctttttgccaacatccctggttacaagcttggctgctacttctgcaatgatgtggtggccccaggagattcaaccagagaccggaccttggaccagcagtgcactgtgagtcgtccaggactggccgtgattgcaggagccctggccgtggaattgatggtatctgttttgcagcatccagaagggggctatgccattgccagcagcagtgacgatcggatgaatgagcctccaacctctcttgggcttgtgcctcaccagatccggggatttctttcacggtttgataatgtccttcccgtcagcctggcatttgacaaatgtacagcttgttcttccaaagttcttgatcaatatgaacgagaaggatttaacttcctagccaaggtgtttaattcttcacattccttcttagaagacttgactggtcttacattgctgcatcaagaaacccaagctgctgagcactaagaagattttcttacattgatacctactgtgacaaaacacacatccaatgacagtgttaaaatgtcataaatgagcctttaaaagaatgaggcacatgatacatcatggtacttgagcagactgcaagcctgaccagactgaattcatgaattcctgacttttgacttcttcctgtaagatgctaccccactgccagggactcaacctctaaatccagtcaaggggctacttgggcctggaaccaaggcacagtcaaggtgaaccagctatgctccagggggaggtggttgaaatcactggtctcctggactgggccatgagtgatggttattggggctggggaggtatgagagacatcgtgttgtccatctacctctgtgtatcttcaaaggtctctgtaataaaaagttttctgaaatttactgcctgaca

SEQ ID NO: 373314 - DNA, 1336 bp, Homo sapiens
ccagttcctgcttcttgaaaaaatgggacactgtgacagtgtttacctctcagaagttgcgagagtactcaggtggtggttttgtaacgcatgtaaaaggaagatggcgccagttcctgcttctgaaatctagagagagaaagacctataacctgtatgagacttccccttccaaagctgtattgtctacattaaaaaaaacaaaaacagtaacaacaacaaacacacaaatggtcagaaatgtcatccttaaaccctttgtttttcagcagtttgccctcagagttctggcataacacataaagttgtcaggcaactttagtcctcctccaatagtgcaaatcagacacgacagttctcttcaagtatacacacgcacacacatggaccgaaccaaacacgccgtggaagctgagccacacacaccccggtctcaagaagcaaaggaaaaagcacaaagcgtctgagtcaccaattcatcatggcttgtgactgagaaagcgctgtggagtcctggccccgtcggggcagcagacctgcatcagaggtttctttggtaactgaggcaggaagtaaggatgctacattagacagatgttccacgcgtagttcctgctatcatgtttgagggcccccttgtacggataccaagcaagtacaaaaacagaacacaaatcccaacaacatggtttttgcaaataaaccatcccttcccttccccccaccccacccccatgatttttttttttttaagtactgactgttcaaagctcaggcaaaccatgcagatccacgtgttgttggaggaggcgctcccttcaggagaccacagagggggagtgactgtggctgaccatgtgggcagaggggctggcgggctggcccctgcgagaggcggactcagggctgctggatgctccgtccttggccgctttgatctggagccacgtgtcacccagagctttggcaaagtggtcgtccacggagcccgtgatggacacggagttgggtgccggctcgggctccttgtaattcttgcccaggctcctgcggaaatgctcctccaccacggggtcacaggtggtggcagctgcaggcaagcaggaaggcaggcagtcagacacaggtggctgcagacagacaggcacggttgcagcaccctccctcaggcagcccagagccggactggctgccacggtcagcgtgggctctgcagacagaacccacctcccccggctaagtcaggcacttgggcaggtcacttttctgtaaaatggtgatgtaccaactgcactgggccagagtccgagttcagaaagagaatgtggcattaaat

SEQ ID NO: 373315 - DNA, 336 bp, Homo sapiens
ccctcccaagtagtaaaggccccatttgttggcccttataatccgctgggcgcttttaccatccatgaggtcatccccaaaatgcgctgggggcagtcgcagtgtcagcgcggcggcccgagctcccatcacgcctgacctctccgcatgacccagcaggagccgcaccggggcccctctcatcaggatctgctgtgaggccgggcaggctgctgccgcctcacagatcacaccccaaacctagaggcccaaaaccaacaagcatttactattgacacagcgtctcggcggcggctttgctgcgaggctctggcttggggtctcttaggaggttgc

SEQ ID NO: 373316 - DNA, 5008 bp, Homo sapiens
gagtggagttctggaggaatgtttaccagacacagagcccagagggacagcgcccagagcccagatagagagacacggcctcactggctcagcaccagggtccccttccccctcctcagctccctccctggcccctttaagaaagagctgatcctctcctctcttgagttaacccctgattgtccaggtggcccctggctctggcctggtgggcggaggcaaagggggagccaggggcggagaaagggttgcccaagtctgggagtgagggaaggaggcaggggtgctgagaaggcggctgctgggcagagccggtggcaagggcctcccctgccgctgtgccaggcaggcagtgccaaatccggggagcctggagctggggggagggccggggacagcccggccctgccccctcccccgctgggagcccagcaacttctgaggaaagtttggcacccatggcgtggcggtgccccaggatgggcagggtcccgctggcctggtgcttggcgctgtgcggctgggcgtgcatggcccccaggggcacgcaggctgaagaaagtcccttcgtgggcaacccagggaatatcacaggtgcccggggactcacgggcacccttcggtgtcagctccaggttcagggagagccccccgaggtacattggcttcgggatggacagatcctggagctcgcggacagcacccagacccaggtgcccctgggtgaggatgaacaggatgactggatagtggtcagccagctcagaatcacctccctgcagctttccgacacgggacagtaccagtgtttggtgtttctgggacatcagaccttcgtgtcccagcctggctatgttgggctggagggcttgccttacttcctggaggagcccgaagacaggactgtggccgccaacacccccttcaacctgagctgccaagctcagggacccccagagcccgtggacctactctggctccaggatgctgtccccctggccacggctccaggtcacggcccccagcgcagcctgcatgttccagggctgaacaagacatcctctttctcctgcgaagcccataacgccaagggggtcaccacatcccgcacagccaccatcacagtgctcccccagcagccccgtaacctccacctggtctcccgccaacccacggagctggaggtggcttggactccaggcctgagcggcatctaccccctgacccactgcaccctgcaggctgtgctgtcagacgatgggatgggcatccaggcgggagaaccagaccccccagaggagcccctcacctcgcaagcatccgtgcccccccatcagcttcggctaggcagcctccatcctcacaccccttatcacatccgcgtggcatgcaccagcagccagggcccctcatcctggacccactggcttcctgtggagacgccggagggagtgcccctgggcccccctgagaacattagtgctacgcggaatgggagccaggccttcgtgcattggcaagagccccgggcgcccctgcagggtaccctgttagggtaccggctggcgtatcaaggccaggacaccccagaggtgctaatggacatagggctaaggcaagaggtgaccctggagctgcagggggacgggtctgtgtccaatctgacagtgtgtgtggcagcctacactgctgctggggatggaccctggagcctcccagtacccctggaggcctggcgcccagggcaagcacagccagtccaccagctggtgaaggaaccttcaactcctgccttctcgtggccctggtggtatgtactgctaggagcagtcgtggccgctgcctgtgtcctcatcttggctctcttccttgtccaccggcgaaagaaggagacccgttatggagaagtgtttgaaccaacagtggaaagaggtgaactggtagtcaggtaccgcgtgcgcaagtcctacagtcgtcggaccactgaagctaccttgaacagcctgggcatcagtgaagagctgaaggagaagctgcgggatgtgatggtggaccggcacaaggtggccctggggaagactctgggagagggagagtttggagctgtgatggaaggccagctcaaccaggacgactccatcctcaaggtggctgtgaagacgatgaagattgccatctgcacgaggtcagagctggaggatttcctgagtgaagcggtctgcatgaaggaatttgaccatcccaacgtcatgaggctcatcggtgtctgtttccagggttctgaacgagagagcttcccagcacctgtggtcatcttacctttcatgaaacatggagacctacacagcttcctcctctattcccggctcggggaccagccagtgtacctgcccactcagatgctagtgaagttcatggcagacatcgccagtggcatggagtatctgagtaccaagagattcatacaccgggacctggcggccaggaactgcatgctgaatgagaacatgtccgtgtgtgtggcggacttcgggctctccaagaagatctacaatggggactactaccgccagggacgtatcgccaagatgccagtcaagtggattgccattgagagtctagctgaccgtgtctacaccagcaagagcgatgtgtggtccttcggggtgacaatgtgggagattgccacaagaggccaaaccccatatccgggcgtggagaacagcgagatttatgactatctgcgccagggaaatcgcctgaagcagcctgcggactgtctggatggactgtatgccttgatgtcgcggtgctgggagctaaatccccaggaccggccaagttttacagagctgcgggaagatttggagaacacactgaaggccttgcctcctgcccaggagcctgacgaaatcctctatgtcaacatggatgagggtggaggttatcctgaaccccctggagctgcaggaggagctgaccccccaacccagccagaccctaaggattcctgtagctgcctcactgcggctgaggtccatcctgctggacgctatgtcctctgcccttccacaacccctagccccgctcagcctgctgataggggctccccagcagccccagggcaggaggatggtgcctgagacaaccctccacctggtactccctctcaggatccaagctaagcactgccactggggaaaactccaccttcccactttcccaccccacgccttatccccacttgcagccctgtcttcctacctatcccacctccatcccagacaggtccctccccttctctgtgcagtagcatcaccttgaaagcagtagcatcaccatctgtaaaaggaaggggttggattgcaatatctgaagccctcccaggtgttaacattccaagactctagagtccaaggtttaaagagtctagattcaaaggttctaggtttcaaagatgctgtgagtctttggttctaaggacctgaaattccaaagtctctaattctattaaagtgctaaggttctaaggcctacttttttttttttttttttttttttttttttttttgcgatagagtctcactgtgtcacccaggctggagtgcagtggtgcaatctcgcctcactgcaaccttcacctaccgagttcaagtgattttcctgccttggcctcccaagtagctgggattacaggtgtgtgccaccacacccggctaatttttatatttttagtagagacagggtttcaccatgttggccaggctggtctaaaactcctgacctcaagtgatctgcccacctcagcctcccaaagtgctgagattacaggcatgagccactgcactcaaccttaagacctactgttctaaagctctgacattatgtggttttagattttctggttctaacatttttgataaagcctcaaggttttaggttctaaagttctaagattctgattttaggagctaaggctctatgagtctagatgtttattcttctagagttcagagtccttaaaatgtaagattatagattctaaagattctatagttctagacatggaggttctaaggcctaggattctaaaatgtgatgttctaaggctctgagagtctagattctctggctgtaaggctctagatcataaggcttcaaaatgttatcttctcaagttctaagattctaatgatgatcaattatagtttctgaggctttatgataatagattctcttgtataagatcctagatcctaagggtcgaaagctctagaatctgcaattcaaaagttccaagagtctaaagatggagtttctaaggtccggtgttctaagatgtgatattctaagacttactctaagatcttagattctctgtgtctaagattctagatcagatgctccaagattctagatgattaaataagattctaacggtctgttctgtttcaaggcactctagattccattggtccaagattccggatcctaagcatctaagttataagactctcacactcagttgtgactaactagacaccaaagttctaataatttctaatgttggacacctttaggttctttgctgcattctgcctctctaggaccatggttaagagtccaagaatccacatttctaaaatcttatagttctaggcactgtagttctaagactcaaatgttctaagtttctaagattctaaaggtccacaggtctagactattaggtgcaatttcaaggttctaaccctatactgtagtattctttggggtgcccctctccttcttagctatcattgcttcctcctccccaactgtgggggtgtgcccccttcaagcctgtgcaatgcattagggatgcctcctttcccgcaggggatggacgatctcccacctttcgggccatgttgcccccgtgagccaatccctcaccttctgagtacagagtgtggactctggtgcctccagaggggctcaggtcacataaaactttgtatatcaacga

SEQ ID NO: 373317 - DNA, 3524 bp, Homo sapiens
tgctgggataacaggcatgagccaccacacctggcctccatcccactcttaactcacccatcctacaactttcacacacttctgctttaacctgcacttgtatcacatccattgcatgccctgtccagcccagcccattcagatatgtgaatgcatccatcacacacctcatcaagtatgtgcacatctttgccgaggccttctgcctccctcccacatcacccctttgggtcccagagagctggatccaaggcttcatccatgacctgttcctcataccccctgatgaaggaaccttcaactcctgccttctcgtggccctggtggtatgtactgctaggagcagtcgtggccgctgcctgtgtcctcatcttggctctcttccttgtccaccggcgaaagaaggagacccgttatggagaagtgtttgaaccaacagtggaaagaggtgaactggtagtcaggtaccgcgtgcgcaagtcctacagtcgtcggaccactgaagctaccttgaacagcctgggcatcagtgaagagctgaaggagaagctgcgggatgtgatggtggaccggcacaaggtggccctggggaagactctgggagagggagagtttggagctgtgatggaaggccagctcaaccaggacgactccatcctcaaggtggctgtgaagacgatgaagattgccatctgcacgaggtcagagctggaggatttcctgagtgaagcggtctgcatgaaggaatttgaccatcccaacgtcatgaggctcatcggtgtctgtttccagggttctgaacgagagagcttcccagcacctgtggtcatcttacctttcatgaaacatggagacctacacagcttcctcctctattcccggctcggggaccagccagtgtacctgcccactcagatgctagtgaagttcatggcagacatcgccagtggcatggagtatctgagtaccaagagattcatacaccgggacctggcggccaggaactgcatgctgaatgagaacatgtccgtgtgtgtggcggacttcgggctctccaagaagatctacaatggggactactaccgccagggacgtatcgccaagatgccagtcaagtggattgccattgagagtctagctgaccgtgtctacaccagcaagagcgatgtgtggtccttcggggtgacaatgtgggagattgccacaagaggccaaaccccatatccgggcgtggagaacagcgagatttatgactatctgcgccagggaaatcgcctgaagcagcctgcggactgtctggatggactgtatgccttgatgtcgcggtgctgggagctaaatccccaggaccggccaagttttacagagctgcgggaagatttggagaacacactgaaggccttgcctcctgcccaggagcctgacgaaatcctctatgtcaacatggatgagggtggaggttatcctgaaccccctggagctgcaggaggagctgaccccccaacccagccagaccctaaggattcctgtagctgcctcactgcggctgaggtccatcctgctggacgctatgtcctctgcccttccacaacccctagccccgctcagcctgctgataggggctccccagcagccccagggcaggaggatggtgcctgagacaaccctccacctggtactccctctcaggatccaagctaagcactgccactggggaaaactccaccttcccactttcccaccccacgccttatccccacttgcagccctgtcttcctacctatcccacctccatcccagacaggtccctccccttctctgtgcagtagcatcaccttgaaagcagtagcatcaccatctgtaaaaggaaggggttggattgcaatatctgaagccctcccaggtgttaacattccaagactctagagtccaaggtttaaagagtctagattcaaaggttctaggtttcaaagatgctgtgagtctttggttctaaggacctgaaattccaaagtctctaattctattaaagtgctaaggttctaaggcctacttttttttttttttttttttttttttttttttttgcgatagagtctcactgtgtcacccaggctggagtgcagtggtgcaatctcgcctcactgcaaccttcacctaccgagttcaagtgattttcctgccttggcctcccaagtagctgggattacaggtgtgtgccaccacacccggctaatttttatatttttagtagagacagggtttcaccatgttggccaggctggtctaaaactcctgacctcaagtgatctgcccacctcagcctcccaaagtgctgagattacaggcatgagccactgcactcaaccttaagacctactgttctaaagctctgacattatgtggttttagattttctggttctaacatttttgataaagcctcaaggttttaggttctaaagttctaagattctgattttaggagctaaggctctatgagtctagatgtttattcttctagagttcagagtccttaaaatgtaagattatagattctaaagattctatagttctagacatggaggttctaaggcctaggattctaaaatgtgatgttctaaggctctgagagtctagattctctggctgtaaggctctagatcataaggcttcaaaatgttatcttctcaagttctaagattctaatgatgatcaattatagtttctgaggctttatgataatagattctcttgtataagatcctagatcctaagggtcgaaagctctagaatctgcaattcaaaagttccaagagtctaaagatggagtttctaaggtccggtgttctaagatgtgatattctaagacttactctaagatcttagattctctgtgtctaagattctagatcagatgctccaagattctagatgattaaataagattctaacggtctgttctgtttcaaggcactctagattccattggtccaagattccggatcctaagcatctaagttataagactctcacactcagttgtgactaactagacaccaaagttctaataatttctaatgttggacacctttaggttctttgctgcattctgcctctctaggaccatggttaagagtccaagaatccacatttctaaaatcttatagttctaggcactgtagttctaagactcaaatgttctaagtttctaagattctaaaggtccacaggtctagactattaggtgcaatttcaaggttctaaccctatactgtagtattctttggggtgcccctctccttcttagctatcattgcttcctcctccccaactgtgggggtgtgcccccttcaagcctgtgcaatgcattagggatgcctcctttcccgcaggggatggacgatctcccacctttcgggccatgttgcccccgtgagccaatccctcaccttctgagtacagagtgtggactctggtgcctccagaggggctcaggtcacataaaactttgtatatcaacga

SEQ ID NO: 373318 - DNA, 5037 bp, Homo sapiens
gagtggagttctggaggaatgtttaccagacacagagcccagagggacagcgcccagagcccagatagagagacacggcctcactggctcagcaccagggtccccttccccctcctcagctccctccctggcccctttaagaaagagctgatcctctcctctcttgagttaacccctgattgtccaggtggcccctggctctggcctggtgggcggaggcaaagggggagccaggggcggagaaagggttgcccaagtctgggagtgagggaaggaggcaggggtgctgagaaggcggctgctgggcagagccggtggcaagggcctcccctgccgctgtgccaggcaggcagtgccaaatccggggagcctggagctggggggagggccggggacagcccggccctgccccctcccccgctgggagcccagcaacttctgaggaaagtttggcacccatggcgtggcggtgccccaggatgggcagggtcccgctggcctggtgcttggcgctgtgcggctgggcgtgcatggcccccaggggcacgcaggctgaagaaagtcccttcgtgggcaacccagggaatatcacaggtgcccggggactcacgggcacccttcggtgtcagctccaggttcagggagagccccccgaggtacattggcttcgggatggacagatcctggagctcgcggacagcacccagacccaggtgcccctgggtgaggatgaacaggatgactggatagtggtcagccagctcagaatcacctccctgcagctttccgacacgggacagtaccagtgtttggtgtttctgggacatcagaccttcgtgtcccagcctggctatgttgggctggagggcttgccttacttcctggaggagcccgaagacaggactgtggccgccaacacccccttcaacctgagctgccaagctcagggacccccagagcccgtggacctactctggctccaggatgctgtccccctggccacggctccaggtcacggcccccagcgcagcctgcatgttccagggctgaacaagacatcctctttctcctgcgaagcccataacgccaagggggtcaccacatcccgcacagccaccatcacagtgctcccccagcagccccgtaacctccacctggtctcccgccaacccacggagctggaggtggcttggactccaggcctgagcggcatctaccccctgacccactgcaccctgcaggctgtgctgtcagacgatgggatgggcatccaggcgggagaaccagaccccccagaggagcccctcacctcgcaagcatccgtgcccccccatcagcttcggctaggcagcctccatcctcacaccccttatcacatccgcgtggcatgcaccagcagccagggcccctcatcctggacccactggcttcctgtggagacgccggagggagtgcccctgggcccccctgagaacattagtgctacgcggaatgggagccaggccttcgtgcattggcaagagccccgggcgcccctgcagggtaccctgttagggtaccggctggcgtatcaaggccaggacaccccagaggtgctaatggacatagggctaaggcaagaggtgaccctggagctgcagggggacgggtctgtgtccaatctgacagtgtgtgtggcagcctacactgctgctggggatggaccctggagcctcccagtacccctggaggcctggcgcccagggcaagcacagccagtccaccagctggtgaaggaaccttcaactcctgccttctcgtggccctggtggtatgtactgctaggagcagtcgtggccgctgcctgtgtcctcatcttggctctcttccttgtccaccggcgaaagaaggagacccgttatggagaagtgtttgaaccaacagtggaaagaggtgaactggtagtcaggtaccgcgtgcgcaagtcctacagtcgtcggaccactgaagctaccttgaacagcctgggcatcagtgaagagctgaaggagaagctgcgggatgtgatggtggaccggcacaaggtggccctggggaagactctgggagagggagagtttggagctgtgatggaaggccagctcaaccaggacgactccatcctcaaggtggctgtgaagacgatgaagattgccatctgcacgaggtcagagctggaggatttcctgagtgaagcggtctgcatgaaggaatttgaccatcccaacgtcatgaggctcatcggtgtctgtttccagggttctgaacgagagagcttcccagcacctgtggtcatcttacctttcatgaaacatggagacctacacagcttcctcctctattcccggctcggggaccagccagtgtacctgcccactcagatgctagtgaagttcatggcagacatcgccagtggcatggagtatctgagtaccaagagattcatacaccgggacctggcggccaggaactgcatgctgaatgagaacatgtccgtgtgtgtggcggacttcgggctctccaagaagatctacaatggggactactaccgccagggacgtatcgccaagatgccagtcaagtggattgccattgagagtctagctgaccgtgtctacaccagcaagagcgatgtgtggtccttcggggtgacaatgtgggagattgccacaagaggccaaaccccatatccgggcgtggagaacagcgagatttatgactatctgcgccagggaaatcgcctgaagcagcctgcggactgtctggatggactgtatgccttgatgtcgcggtgctgggagctaaatccccaggaccggccaagttttacagagctgcgggaagatttggagaacacactgaaggccttgcctcctgcccaggagcctgacgaaatcctctatgtcaacatggatgagggtggaggttatcctgaaccccctggagctgcaggaggagctgaccccccaacccagccagaccctaaggattcctgtagctgcctcactgcggctgaggtccatcctgctggacgctatgtcctctgcccttccacaacccctagccccgctcagcctgctgataggggctccccagcagccccagggcaggaggatggtgcctgagacaaccctccacctggtactccctctcaggatccaagctaagcactgccactggggaaaactccaccttcccactttcccaccccacgccttatccccacttgcagccctgtcttcctacctatcccacctccatcccagacaggtccctccccttctctgtgcagtagcatcaccttgaaagcagtagcatcaccatctgtaaaaggaaggggttggattgcaatatctgaagccctcccaggtgttaacattccaagactctagagtccaaggtttaaagagtctagattcaaaggttctaggtttcaaagatgctgtgagtctttggttctaaggacctgaaattccaaagtctctaattctattaaagtgctaaggttctaaggcctacttttttttttttttttttttttttttttttttttgcgatagagtctcactgtgtcacccaggctggagtgcagtggtgcaatctcgcctcactgcaaccttcacctaccgagttcaagtgattttcctgccttggcctcccaagtagctgggattacaggtgtgtgccaccacacccggctaatttttatatttttagtagagacagggtttcaccatgttggccaggctggtctaaaactcctgacctcaagtgatctgcccacctcagcctcccaaagtgctgagattacaggcatgagccactgcactcaaccttaagacctactgttctaaagctctgacattatgtggttttagattttctggttctaacatttttgataaagcctcaaggttttaggttctaaagttctaagattctgattttaggagctaaggctctatgagtctagatgtttattcttctagagttcagagtccttaaaatgtaagattatagattctaaagattctatagttctagacatggaggttctaaggcctaggattctaaaatgtgatgttctaaggctctgagagtctagattctctggctgtaaggctctagatcataaggcttcaaaatgttatcttctcaagttctaagattctaatgatgatcaattatagtttctgaggctttatgataatagattctcttgtataagatcctagatcctaagggtcgaaagctctagaatctgcaattcaaaagttccaagagtctaaagatggagtttctaaggtccggtgttctaagatgtgatattctaagacttactctaagatcttagattctctgtgtctaagattctagatcagatgctccaagattctagatgattaaataagattctaacggtctgttctgtttcaaggcactctagattccattggtccaagattccggatcctaagcatctaagttataagactctcacactcagttgtgactaactagacaccaaagttctaataatttctaatgttggacacctttaggttctttgctgcattctgcctctctaggaccatggttaagagtccaagaatccacatttctaaaatcttatagttctaggcactgtagttctaagactcaaatgttctaagtttctaagattctaaaggtccacaggtctagactattaggtgcaatttcaaggttctaaccctatactgtagtattctttggggtgcccctctccttcttagctatcattgcttcctcctccccaactgtgggggtgtgcccccttcaagcctgtgcaatgcattagggatgcctcctttcccgcaggggatggacgatctcccacctttcgggccatgttgcccccgtgagccaatccctcaccttctgagtacagagtgtggactctggtgcctataccacggctcaggtacattaacttgtcggggtagttctttcttggttcttgttagttttctgtgtttt

SEQ ID NO: 373319 - DNA, 4954 bp, Homo sapiens
gagtggagttctggaggaatgtttaccagacacagagcccagagggacagcgcccagagcccagatagagagacacggcctcactggctcagcaccagggtccccttccccctcctcagctccctccctggcccctttaagaaagagctgatcctctcctctcttgagttaacccctgattgtccaggtggcccctggctctggcctggtgggcggaggcaaagggggagccaggggcggagaaagggttgcccaagtctgggagtgagggaaggaggcaggggtgctgagaaggcggctgctgggcagagccggtggcaagggcctcccctgccgctgtgccaggcaggcagtgccaaatccggggagcctggagctggggggagggccggggacagcccggccctgccccctcccccgctgggagcccagcaacttctgaggaaagtttggcacccatggcgtggcggtgccccaggatgggcagggtcccgctggcctggtgcttggcgctgtgcggctgggcgtgcatggcccccaggggcacgcaggctgaagaaagtcccttcgtgggcaacccagggaatatcacaggtgcccggggactcacgggcacccttcggtgtcagctccaggttcagggagagccccccgaggtacattggcttcgggatggacagatcctggagctcgcggacagcacccagacccaggtgcccctgggtgaggatgaacaggatgactggatagtggtcagccagctcagaatcacctccctgcagctttccgacacgggacagtaccagtgtttggtgtttctgggacatcagaccttcgtgtcccagcctggctatgttgggctggagggcttgccttacttcctggaggagcccgaagacaggactgtggccgccaacacccccttcaacctgagctgccaagctcagggacccccagagcccgtggacctactctggctccaggatgctgtccccctggccacggctccaggtcacggcccccagcgcagcctgcatgttccagggctgaacaagacatcctctttctcctgcgaagcccataacgccaagggggtcaccacatcccgcacagccaccatcacagtgctcccccagcagccccgtaacctccacctggtctcccgccaacccacggagctggaggtggcttggactccaggcctgagcggcatctaccccctgacccactgcaccctgcaggctgtgctgtcagacgatgggatgggcatccaggcgggagaaccagaccccccagaggagcccctcacctcgcaagcatccgtgcccccccatcagcttcggctaggcagcctccatcctcacaccccttatcacatccgcgtggcatgcaccagcagccagggcccctcatcctggacccactggcttcctgtggagacgccggagggagtgcccctgggcccccctgagaacattagtgctacgcggaatgggagccaggccttcgtgcattggcaagagccccgggcgcccctgcagggtaccctgttagggtaccggctggcgtatcaaggccaggacaccccagaggtgctaatggacatagggctaaggcaagaggtgaccctggagctgcagggggacgggtctgtgtccaatctgacagtgtgtgtggcagcctacactgctgctggggatggaccctggagcctcccagtacccctggaggcctggcgcccagggcaagcacagccagtccaccagctggtgaaggaaccttcaactcctgccttctcgtggccctggtggtatgtactgctaggagcagtcgtggccgctgcctgtgtcctcatcttggctctcttccttgtccaccggcgaaagaaggagacccgttatggagaagtgtttgaaccaacagtggaaagaggtgaactggtagtcaggtaccgcgtgcgcaagtcctacagtcgtcggaccactgaagctaccttgaacagcctgggcatcagtgaagagctgaaggagaagctgcgggatgtgatggtggaccggcacaaggtggccctggggaagactctgggagagggagagtttggagctgtgatggaaggccagctcaaccaggacgactccatcctcaaggtggctgtgaagacgatgaagattgccatctgcacgaggtcagagctggaggatttcctgagtgaagcggtctgcatgaaggaatttgaccatcccaacgtcatgaggctcatcggtgtctgtttccagggttctgaacgagagagcttcccagcacctgtggtcatcttacctttcatgaaacatggagacctacacagcttcctcctctattcccggctcggggaccagccagtgtacctgcccactcagatgctagtgaagttcatggcagacatcgccagtggcatggagtatctgagtaccaagagattcatacaccgggacctggcggccaggaactgcatgctgaatgagaacatgtccgtgtgtgtggcggacttcgggctctccaagaagatctacaatggggactactaccgccagggacgtatcgccaagatgccagtcaagtggattgccattgagagtctagctgaccgtgtctacaccagcaagagcgatgtgtggtccttcggggtgacaatgtgggagattgccacaagaggccaaaccccatatccgggcgtggagaacagcgagatttatgactatctgcgccagggaaatcgcctgaagcagcctgcggactgtctggatggactgtatgccttgatgtcgcggtgctgggagctaaatccccaggaccggccaagttttacagagctgcgggaagatttggagaacacactgaaggccttgcctcctgcccaggagcctgacgaaatcctctatgtcaacatggatgagggtggaggttatcctgaaccccctggagctgcaggaggagctgaccccccaacccagccagaccctaaggattcctgtagctgcctcactgcggctgaggtccatcctgctggacgctatgtcctctgcccttccacaacccctagccccgctcagcctgctgataggggctccccagcagccccagggcaggaggatggtgcctgagacaaccctccacctggtactccctctcaggatccaagctaagcactgccactggggaaaactccaccttcccactttcccaccccacgccttatccccacttgcagccctgtcttcctacctatcccacctccatcccagacaggtccctccccttctctgtgcagtagcatcaccttgaaagcagtagcatcaccatctgtaaaaggaaggggttggattgcaatatctgaagccctcccaggtgttaacattccaagactctagagtccaaggtttaaagagtctagattcaaaggttctaggtttcaaagatgctgtgagtctttggttctaaggacctgaaattccaaagtctctaattctattaaagtgctaaggttctaaggcctacttttttttttttttttttttttttttttttttttgcgatagagtctcactgtgtcacccaggctggagtgcagtggtgcaatctcgcctcactgcaaccttcacctaccgagttcaagtgattttcctgccttggcctcccaagtagctgggattacaggtgtgtgccaccacacccggctaatttttatatttttagtagagacagggtttcaccatgttggccaggctggtctaaaactcctgacctcaagtgatctgcccacctcagcctcccaaagtgctgagattacaggcatgagccactgcactcaaccttaagacctactgttctaaagctctgacattatgtggttttagattttctggttctaacatttttgataaagcctcaaggttttaggttctaaagttctaagattctgattttaggagctaaggctctatgagtctagatgtttattcttctagagttcagagtccttaaaatgtaagattatagattctaaagattctatagttctagacatggaggttctaaggcctaggattctaaaatgtgatgttctaaggctctgagagtctagattctctggctgtaaggctctagatcataaggcttcaaaatgttatcttctcaagttctaagattctaatgatgatcaattatagtttctgaggctttatgataatagattctcttgtataagatcctagatcctaagggtcgaaagctctagaatctgcaattcaaaagttccaagagtctaaagatggagtttctaaggtccggtgttctaagatgtgatattctaagacttactctaagatcttagattctctgtgtctaagattctagatcagatgctccaagattctagatgattaaataagattctaacggtctgttctgtttcaaggcactctagattccattggtccaagattccggatcctaagcatctaagttataagactctcacactcagttgtgactaactagacaccaaagttctaataatttctaatgttggacacctttaggttctttgctgcattctgcctctctaggaccatggttaagagtccaagaatccacatttcttaagattctaaaggtccacaggtctagactattaggtgcaatttcaaggttctaaccctatactgtagtattctttggggtgcccctctccttcttagctatcattgcttcctcctccccaactgtgggggtgtgcccccttcaagcctgtgcaatgcattagggatgcctcctttcccgcaggggatggacgatctcccacctttcgggccatgttgcccccgtgagccaatccctcaccttctgagtacagagtgtggactctggtgcctccagaggggctcaggtcacataaaactttgtatatcaacga

SEQ ID NO: 373320 - DNA, 4885 bp, Homo sapiens
gagtggagttctggaggaatgtttaccagacacagagcccagagggacagcgcccagagcccagatagagagacacggcctcactggctcagcaccagggtccccttccccctcctcagctccctccctggcccctttaagaaagagctgatcctctcctctcttgagttaacccctgattgtccaggtggcccctggctctggcctggtgggcggaggcaaagggggagccaggggcggagaaagggttgcccaagtctgggagtgagggaaggaggcaggggtgctgagaaggcggctgctgggcagagccggtggcaagggcctcccctgccgctgtgccaggcaggcagtgccaaatccggggagcctggagctggggggagggccggggacagcccggccctgccccctcccccgctgggagcccagcaacttctgaggaaagtttggcacccatggcgtggcggtgccccaggatgggcagggtcccgctggcctggtgcttggcgctgtgcggctgggcgtgcatggcccccaggggcacgcaggctgaagaaagtcccttcgtgggcaacccagggaatatcacaggtgcccggggactcacgggcacccttcggtgtcagctccaggttcagggagagccccccgaggtacattggcttcgggatggacagatcctggagctcgcggacagcacccagacccaggtgcccctgggtgaggatgaacaggatgactggatagtggtcagccagctcagaatcacctccctgcagctttccgacacgggacagtaccagtgtttggtgtttctgggacatcagaccttcgtgtcccagcctggctatgttgggctggagggcttgccttacttcctggaggagcccgaagacaggactgtggccgccaacacccccttcaacctgagctgccaagctcagggacccccagagcccgtggacctactctggctccaggatgctgtccccctggccacggctccaggtcacggcccccagcgcagcctgcatgttccagggctgaacaagacatcctctttctcctgcgaagcccataacgccaagggggtcaccacatcccgcacagccaccatcacagtgctcccccagcagccccgtaacctccacctggtctcccgccaacccacggagctggaggtggcttggactccaggcctgagcggcatctaccccctgacccactgcaccctgcaggctgtgctgtcagacgatgggatgggcatccaggcgggagaaccagaccccccagaggagcccctcacctcgcaagcatccgtgcccccccatcagcttcggctaggcagcctccatcctcacaccccttatcacatccgcgtggcatgcaccagcagccagggcccctcatcctggacccactggcttcctgtggagacgccggagggagtgcccctgggcccccctgagaacattagtgctacgcggaatgggagccaggccttcgtgcattggcaagagccccgggcgcccctgcagggtaccctgttagggtaccggctggcgtatcaaggccaggacaccccagaggtgctaatggacatagggctaaggcaagaggtgaccctggagctgcagggggacgggtctgtgtccaatctgacagtgtgtgtggcagcctacactgctgctggggatggaccctggagcctcccagtacccctggaggcctggcgcccagggcaagcacagccagtccaccagctggtgaaggaaccttcaactcctgccttctcgtggccctggtggtatgtactgctaggagcagtcgtggccgctgcctgtgtcctcatcttggctctcttccttgtccaccggcgaaagaaggagacccgttatggagaagtgtttgaaccaacagtggaaagaggtgaactggtagtcaggtaccgcgtgcgcaagtcctacagtcgtcggaccactgaagctaccttgaacagcctgggcatcagtgaagagctgaaggagaagctgcgggatgtgatggtggaccggcacaaggtggccctggggaagactctgggagagggagagtttggagctgtgatggaaggccagctcaaccaggacgactccatcctcaaggtggctgtgaagacgatgaagattgccatctgcacgaggtcagagctggaggatttcctgagtgaagcggtctgcatgaaggaatttgaccatcccaacgtcatgaggctcatcggtgtctgtttccagggttctgaacgagagagcttcccagcacctgtggtcatcttacctttcatgaaacatggagacctacacagcttcctcctctattcccggctcggggaccagccagtgtacctgcccactcagatgctagtgaagttcatggcagacatcgccagtggcatggagtatctgagtaccaagagattcatacaccgggacctggcggccaggaactgcatgctgaatgagaacatgtccgtgtgtgtggcggacttcgggctctccaagaagatctacaatggggactactaccgccagggacgtatcgccaagatgccagtcaagtggattgccattgagagtctagctgaccgtgtctacaccagcaagagcgatgtgtggtccttcggggtgacaatgtgggagattgccacaagaggccaaaccccatatccgggcgtggagaacagcgagatttatgactatctgcgccagggaaatcgcctgaagcagcctgcggactgtctggatggactgtatgccttgatgtcgcggtgctgggagctaaatccccaggaccggccaagttttacagagctgcgggaagatttggagaacacactgaaggccttgcctcctgcccaggagcctgacgaaatcctctatgtcaacatggatgagggtggaggttatcctgaaccccctggagctgcaggaggagctgaccccccaacccagccagaccctaaggattcctgtagctgcctcactgcggctgaggtccatcctgctggacgctatgtcctctgcccttccacaacccctagccccgctcagcctgctgataggggctccccagcagccccagggcaggaggatggtgcctgagacaaccctccacctggtactccctctcaggatccaagctaagcactgccactggggaaaactccaccttcccactttcccaccccacgccttatccccacttgcagccctgtcttcctacctatcccacctccatcccagacaggtccctccccttctctgtgcagtagcatcaccttgaaagcagtagcatcaccatctgtaaaaggaaggggttggattgcaatatctgaagccctcccaggtgttaacattccaagactctagagtccaaggtttaaagagtctagattcaaaggttctaggtttcaaagatgctgtgagtctttggttctaaggacctgaaattccaaagtctctaattctattaaagtgctaaggttctaaggcctacttttttttttttttttttttttttttttttttttgcgatagagtctcactgtgtcacccaggctggagtgcagtggtgcaatctcgcctcactgcaaccttcacctaccgagttcaagtgattttcctgccttggcctcccaagtagctgggattacaggtgtgtgccaccacacccggctaatttttatatttttagtagagacagggtttcaccatgttggccaggctggtctaaaactcctgacctcaagtgatctgcccacctcagcctcccaaagtgctgagattacaggcatgagccactgcactcaaccttaagacctactgttctaaagctctgacattatgtggttttagattttctggttctaacatttttgataaagcctcaaggttttaggttctaaagttctaagattctgattttaggagctaaggctctatgagtctagatgtttattcttctagagttcagagtccttaaaatgtaagattatagattctaaagattctatagttctagacatggaggttctaaggcctaggattctaaaatgtgatgttctaaggctctgagagtctagattctctggctgtaaggctctagatcataaggcttcaaaatgttatcttctcaagttctaagattctaatgatgatcaattatagtttctgaggctttatgataatagattctcttgtataagatcctagatcctaagggtcgaaagctctagaatctgcaattcaaaagttccaagagtctaaagatggagtttctaaggtccggtgttctaagatgtgatattctaagacttactctaagatcttagattctctgtgtctaagattctagatcagatgctccaagattctagatgattaaataagattctaacggtctgttctgtttcaaggcactctagattccattggtccaagattccggatcctaagcatctaagttataagactctcacactcagttgtgactaactagacaccaaagttctaataatttctaatgttggacacctttaggttctttgctgcattctgcctctctaggaccatggttaagagtccaagaatccacatttctaaaatcttatagttctaggcactgtagttctaagactcaaatgttctaagtttctaagattctaaaggtccacaggtctagactatttaagcgctggccaaaaaaacttttttttttttccccaaaaaaagggggggtttttctaaaacccctatactgtagtattcctttggggggtggccccctcttccttttctttaggttaattcattttggttttccctcccttccccaaaattggttt

SEQ ID NO: 373321 - DNA, 1409 bp, Homo sapiens
  misc_feature (58)..(58): n is a, c, g, or t
  misc_feature (74)..(74): n is a, c, g, or t
aaccccctaaacccggttaaaagccttgctgaatagggggcctcccaaggaaaccccnaaaggggacagaaggnaatgggtgcctggagaaaaaacccctccacctggtactccctctcaggatccaagctaagcactgccactggggaaaactccaccttcccactttcccaccccacgccttatccccacttgcagccctgtcttcctacctatcccacctccatcccagacaggtccctccccttctctgtgcagtagcatcaccttgaaagcagtagcatcaccatctgtaaaaggaaggggttggattgcaatatctgaagccctcccaggtgttaacattccaagactctagagtccaaggtttaaagagtctagattcaaaggttctaggtttcaaagatgctgtgagtctttggttctaaggacctgaaattccaaagtctctaattctattaaagtgctaaggttctaaggcctaggattctaaaatgtgatgttctaaggctctgagagtctagattctctggctgtaaggctctagatcataaggcttcaaaatgttatcttctcaagttctaagattctaatgatgatcaattatagtttctgaggctttatgataatagattctcttgtataagatcctagatcctaagggtcgaaagctctagaatctgcaattcaaaagttccaagagtctaaagatggagtttctaaggtccggtgttctaagatgtgatattctaagacttactctaagatcttagattctctgtgtctaagattctagatcagatgctccaagattctagatgattaaataagattctaacggtctgttctgtttcaaggcactctagattccattggtccaagattccggatcctaagcatctaagttataagactctcacactcagttgtgactaactagacaccaaagttctaataatttctaatgttggacacctttaggttctttgctgcattctgcctctctaggaccatggttaagagtccaagaatccacatttctaaaatcttatagttctaggcactgtagttctaagactcaaatgttctaagtttctaagattctaaaggtccacaggtctagactattaggtgcaatttcaaggttctaaccctatactgtagtattctttggggtgcccctctccttcttagctatcattgcttcctcctccccaactgtgggggtgtgcccccttcaagcctgtgcaatgcattagggatgcctcctttcccgcaggggatggacgatctcccacctttcgggccatgttgcccccgtgagccaatccctcaccttctgagtacagagtgtggactctggtgcctccagaggggctcaggtcacataaaactttgtatatcaacga

SEQ ID NO: 373322 - DNA, 404 bp, Homo sapiens
cagtgtttcaacaatggatctatccctactggtgggtgaatgtcacctgaatgtcagccctgctccatgactctgtccaccccaaccttgcatgcagtgaacagcctgggcatcagtgaagagctgaaggagaagctgcgggatgtgatggtggaccggcacaaggtggccctggggaagactctgggagagggtgagtcccccggcagcatacacacatccttctgaacttctgagatcctgcacttccacactcccacccaactataggaaatacagtccccacgggccctctgaggtcagtgtctccctctggccccccacaggagagtttggagctgtgatggaaggccagctcaaccaggacgactccatcctcaaggtggctgtgaagacgatgaaga

SEQ ID NO: 373323 - DNA, 339 bp, Homo sapiens
gatgaggagttggaggatggggagagcgttttgagaaagagatggggcattgagcccgagagtgaaggcttaacagctggggggtaaggttctaccctgatgccacttctggacctcctaggtgctaatggacatagggctaaggcaagaggtgaccctggagctgcagggggacgggtctgtgtccaatctgacagtgtgtgtggcagcctacactgctgctggggatggaccctggagcctcccagtacccctggaggcctggcgcccaggtccaaagccatgcccaacctgcttcaacctgtctctccctgacagccctgacttactccttgtacc

SEQ ID NO: 373324 - DNA, 4981 bp, Homo sapiens
gagtggagttctggaggaatgtttaccagacacagagcccagagggacagcgcccagagcccagatagagagacacggcctcactggctcagcaccagggtccccttccccctcctcagctccctccctggcccctttaagaaagagctgatcctctcctctcttgagttaacccctgattgtccaggtggcccctggctctggcctggtgggcggaggcaaagggggagccaggggcggagaaagggttgcccaagtctgggagtgagggaaggaggcaggggtgctgagaaggcggctgctgggcagagccggtggcaagggcctcccctgccgctgtgccaggcaggcagtgccaaatccggggagcctggagctggggggagggccggggacagcccggccctgccccctcccccgctgggagcccagcaacttctgaggaaagtttggcacccatggcgtggcggtgccccaggatgggcagggtcccgctggcctggtgcttggcgctgtgcggctgggcgtgcatggcccccaggggcacgcaggctgaagaaagtcccttcgtgggcaacccagggaatatcacaggtgcccggggactcacgggcacccttcggtgtcagctccaggttcagggagagccccccgaggtacattggcttcgggatggacagatcctggagctcgcggacagcacccagacccaggtgcccctgggtgaggatgaacaggatgactggatagtggtcagccagctcagaatcacctccctgcagctttccgacacgggacagtaccagtgtttggtgtttctgggacatcagaccttcgtgtcccagcctggctatgttgggctggagggcttgccttacttcctggaggagcccgaagacaggactgtggccgccaacacccccttcaacctgagctgccaagctcagggacccccagagcccgtggacctactctggctccaggatgctgtccccctggccacggctccaggtcacggcccccagcgcagcctgcatgttccagggctgaacaagacatcctctttctcctgcgaagcccataacgccaagggggtcaccacatcccgcacagccaccatcacagtgctcccccagcagccccgtaacctccacctggtctcccgccaacccacggagctggaggtggcttggactccaggcctgagcggcatctaccccctgacccactgcaccctgcaggctgtgctgtcagacgatgggatgggcatccaggcgggagaaccagaccccccagaggagcccctcacctcgcaagcatccgtgcccccccatcagcttcggctaggcagcctccatcctcacaccccttatcacatccgcgtggcatgcaccagcagccagggcccctcatcctggacccactggcttcctgtggagacgccggagggagtgcccctgggcccccctgagaacattagtgctacgcggaatgggagccaggccttcgtgcattggcaagagccccgggcgcccctgcagggtaccctgttagggtaccggctggcgtatcaaggccaggacaccccagaggtgctaatggacatagggctaaggcaagaggtgaccctggagctgcagggggacgggtctgtgtccaatctgacagtgtgtgtggcagcctacactgctgctggggatggaccctggagcctcccagtacccctggaggcctggcgcccagtgaaggaaccttcaactcctgccttctcgtggccctggtggtatgtactgctaggagcagtcgtggccgctgcctgtgtcctcatcttggctctcttccttgtccaccggcgaaagaaggagacccgttatggagaagtgtttgaaccaacagtggaaagaggtgaactggtagtcaggtaccgcgtgcgcaagtcctacagtcgtcggaccactgaagctaccttgaacagcctgggcatcagtgaagagctgaaggagaagctgcgggatgtgatggtggaccggcacaaggtggccctggggaagactctgggagagggagagtttggagctgtgatggaaggccagctcaaccaggacgactccatcctcaaggtggctgtgaagacgatgaagattgccatctgcacgaggtcagagctggaggatttcctgagtgaagcggtctgcatgaaggaatttgaccatcccaacgtcatgaggctcatcggtgtctgtttccagggttctgaacgagagagcttcccagcacctgtggtcatcttacctttcatgaaacatggagacctacacagcttcctcctctattcccggctcggggaccagccagtgtacctgcccactcagatgctagtgaagttcatggcagacatcgccagtggcatggagtatctgagtaccaagagattcatacaccgggacctggcggccaggaactgcatgctgaatgagaacatgtccgtgtgtgtggcggacttcgggctctccaagaagatctacaatggggactactaccgccagggacgtatcgccaagatgccagtcaagtggattgccattgagagtctagctgaccgtgtctacaccagcaagagcgatgtgtggtccttcggggtgacaatgtgggagattgccacaagaggccaaaccccatatccgggcgtggagaacagcgagatttatgactatctgcgccagggaaatcgcctgaagcagcctgcggactgtctggatggactgtatgccttgatgtcgcggtgctgggagctaaatccccaggaccggccaagttttacagagctgcgggaagatttggagaacacactgaaggccttgcctcctgcccaggagcctgacgaaatcctctatgtcaacatggatgagggtggaggttatcctgaaccccctggagctgcaggaggagctgaccccccaacccagccagaccctaaggattcctgtagctgcctcactgcggctgaggtccatcctgctggacgctatgtcctctgcccttccacaacccctagccccgctcagcctgctgataggggctccccagcagccccagggcaggaggatggtgcctgagacaaccctccacctggtactccctctcaggatccaagctaagcactgccactggggaaaactccaccttcccactttcccaccccacgccttatccccacttgcagccctgtcttcctacctatcccacctccatcccagacaggtccctccccttctctgtgcagtagcatcaccttgaaagcagtagcatcaccatctgtaaaaggaaggggttggattgcaatatctgaagccctcccaggtgttaacattccaagactctagagtccaaggtttaaagagtctagattcaaaggttctaggtttcaaagatgctgtgagtctttggttctaaggacctgaaattccaaagtctctaattctattaaagtgctaaggttctaaggcctacttttttttttttttttttttttttttttttttttgcgatagagtctcactgtgtcacccaggctggagtgcagtggtgcaatctcgcctcactgcaaccttcacctaccgagttcaagtgattttcctgccttggcctcccaagtagctgggattacaggtgtgtgccaccacacccggctaatttttatatttttagtagagacagggtttcaccatgttggccaggctggtctaaaactcctgacctcaagtgatctgcccacctcagcctcccaaagtgctgagattacaggcatgagccactgcactcaaccttaagacctactgttctaaagctctgacattatgtggttttagattttctggttctaacatttttgataaagcctcaaggttttaggttctaaagttctaagattctgattttaggagctaaggctctatgagtctagatgtttattcttctagagttcagagtccttaaaatgtaagattatagattctaaagattctatagttctagacatggaggttctaaggcctaggattctaaaatgtgatgttctaaggctctgagagtctagattctctggctgtaaggctctagatcataaggcttcaaaatgttatcttctcaagttctaagattctaatgatgatcaattatagtttctgaggctttatgataatagattctcttgtataagatcctagatcctaagggtcgaaagctctagaatctgcaattcaaaagttccaagagtctaaagatggagtttctaaggtccggtgttctaagatgtgatattctaagacttactctaagatcttagattctctgtgtctaagattctagatcagatgctccaagattctagatgattaaataagattctaacggtctgttctgtttcaaggcactctagattccattggtccaagattccggatcctaagcatctaagttataagactctcacactcagttgtgactaactagacaccaaagttctaataatttctaatgttggacacctttaggttctttgctgcattctgcctctctaggaccatggttaagagtccaagaatccacatttctaaaatcttatagttctaggcactgtagttctaagactcaaatgttctaagtttctaagattctaaaggtccacaggtctagactattaggtgcaatttcaaggttctaaccctatactgtagtattctttggggtgcccctctccttcttagctatcattgcttcctcctccccaactgtgggggtgtgcccccttcaagcctgtgcaatgcattagggatgcctcctttcccgcaggggatggacgatctcccacctttcgggccatgttgcccccgtgagccaatccctcaccttctgagtacagagtgtggactctggtgcctccagaggggctcaggtcacataaaactttgtatatcaacga

SEQ ID NO: 373325 - DNA, 4461 bp, Homo sapiens
gagtggagttctggaggaatgtttaccagacacagagcccagagggacagcgcccagagcccagatagagagacacggcctcactggctcagcaccagggtccccttccccctcctcagctccctccctggcccctttaagaaagagctgatcctctcctctcttgagttaacccctgattgtccaggtggcccctggctctggcctggtgggcggaggcaaagggggagccaggggcggagaaagggttgcccaagtctgggagtgagggaaggaggcaggggtgctgagaaggcggctgctgggcagagccggtggcaagggcctcccctgccgctgtgccaggcaggcagtgccaaatccggggagcctggagctggggggagggccggggacagcccggccctgccccctcccccgctgggagcccagcaacttctgaggaaagtttggcacccatggcgtggcggtgccccaggatgggcagggtcccgctggcctggtgcttggcgctgtgcggctgggcgtgcatggcccccaggggcacgcaggctgaagaaagtcccttcgtgggcaacccagggaatatcacaggtgcccggggactcacgggcacccttcggtgtcagctccaggttcagggagagccccccgaggtacattggcttcgggatggacagatcctggagctcgcggacagcacccagacccaggtgcccctgggtgaggatgaacaggatgactggatagtggtcagccagctcagaatcacctccctgcagctttccgacacgggacagtaccagtgtttggtgtttctgggacatcagaccttcgtgtcccagcctggctatgttgggctggagggcttgccttacttcctggaggagcccgaagacaggactgtggccgccaacacccccttcaacctgagctgccaagctcagggacccccagagcccgtggacctactctggctccaggatgctgtccccctggccacggctccaggtcacggcccccagcgcagcctgcatgttccagggctgaacaagacatcctctttctcctgcgaagcccataacgccaagggggtcaccacatcccgcacagccaccatcacagtgctcccccagcagccccgtaacctccacctggtctcccgccaacccacggagctggaggtggcttggactccaggcctgagcggcatctaccccctgacccactgcaccctgcaggctgtgctgtcagacgatgggatgggcatccaggcgggagaaccagaccccccagaggagcccctcacctcgcaagcatccgtgcccccccatcagcttcggctaggcagcctccatcctcacaccccttatcacatccgcgtggcatgcaccagcagccagggcccctcatcctggacccactggcttcctgtggagacgccggagggagtgcccctgggcccccctgagaacattagtgctacgcggaatgggagccaggccttcgtgcattggcaagagccccgggcgcccctgcagggtaccctgttagggtaccggctggcgtatcaaggccaggacaccccagaggtgctaatggacatagggctaaggcaagaggtgaccctggagctgcagggggacgggtctgtgtccaatctgacagtgtgtgtggcagcctacactgctgctggggatggaccctggagcctcccagtacccctggaggcctggcgcccagggcaagcacagccagtccaccagctggtgaaggaaccttcaactcctgccttctcgtggccctggtggtatgtactgctaggagcagtcgtggccgctgcctgtgtcctcatcttggctctcttccttgtccaccggcgaaagaaggagacccgttatggagaagtgtttgaaccaacagtggaaagaggtgaactggtagtcaggtaccgcgtgcgcaagtcctacagtcgtcggaccactgaagctaccttgaacagcctgggcatcagtgaagagctgaaggagaagctgcgggatgtgatggtggaccggcacaaggtggccctggggaagactctgggagagggagagtttggagctgtgatggaaggccagctcaaccaggacgactccatcctcaaggtggctgtgaagacgatgaagattgccatctgcacgaggtcagagctggaggatttcctgagtgaagcggtctgcatgaaggaatttgaccatcccaacgtcatgaggctcatcggtgtctgtttccagggttctgaacgagagagcttcccagcacctgtggtcatcttacctttcatgaaacatggagacctacacagcttcctcctctattcccggctcggggaccagccagtgtacctgcccactcagatgctagtgaagttcatggcagacatcgccagtggcatggagtatctgagtaccaagagattcatacaccgggacctggcggccaggaactgcatgctgaatgagaacatgtccgtgtgtgtggcggacttcgggctctccaagaagatctacaatggggactactaccgccagggacgtatcgccaagatgccagtcaagtggattgccattgagagtctagctgaccgtgtctacaccagcaagagcgatgtgtggtccttcggggtgacaatgtgggagattgccacaagaggccaaaccccatatccgggcgtggagaacagcgagatttatgactatctgcgccagggaaatcgcctgaagcagcctgcggactgtctggatggactgtatgccttgatgtcgcggtgctgggagctaaatccccaggaccggccaagttttacagagctgcgggaagatttggagaacacactgaaggccttgcctcctgcccaggagcctgacgaaatcctctatgtcaacatggatgagggtggaggttatcctgaaccccctggagctgcaggaggagctgaccccccaacccagccagaccctaaggattcctgtagctgcctcactgcggctgaggtccatcctgctggacgctatgtcctctgcccttccacaacccctagccccgctcagcctgctgataggggctccccagcagccccagggcaggaggatggtgcctgagacaaccctccacctggtactccctctcaggatccaagctaagcactgccactggggaaaactccaccttcccactttcccaccccacgccttatccccacttgcagccctgtcttcctacctatcccacctccatcccagacaggtccctccccttctctgtgcagtagcatcaccttgaaagcagtagcatcaccatctgtaaaaggaaggggttggattgcaatatctgaagccctcccaggtgttaacattccaagactctagagtccaaggtttaaagagtctagattcaaaggttctaggtttcaaagatgctgtgagtctttggttctaaggacctgaaattccaaagtctctaattctattaaagtgctaaggttctaaggcctaggattctaaaatgtgatgttctaaggctctgagagtctagattctctggctgtaaggctctagatcataaggcttcaaaatgttatcttctcaagttctaagattctaatgatgatcaattatagtttctgaggctttatgataatagattctcttgtataagatcctagatcctaagggtcgaaagctctagaatctgcaattcaaaagttccaagagtctaaagatggagtttctaaggtccggtgttctaagatgtgatattctaagacttactctaagatcttagattctctgtgtctaagattctagatcagatgctccaagattctagatgattaaataagattctaacggtctgttctgtttcaaggcactctagattccattggtccaagattccggatcctaagcatctaagttataagactctcacactcagttgtgactaactagacaccaaagttctaataatttctaatgttggacacctttaggttctttgctgcattctgcctctctaggaccatggttaagagtccaagaatccacatttctaaaatcttatagttctaggcactgtagttctaagactcaaatgttctaagtttctaagattctaaaggtccacaggtctagactattaggtgcaatttcaaggttctaaccctatactgtagtattctttggggtgcccctctccttcttagctatcattgcttcctcctccccaactgtgggggtgtgcccccttcaagcctgtgcaatgcattagggatgcctcctttcccgcaggggatggacgatctcccacctttcgggccatgttgcccccgtgagccaatccctcaccttctgagtacagagtgtggactctggtgcctccagaggggctcaggtcacataaaactttgtatatcaacga

SEQ ID NO: 373326 - DNA, 327 bp, Homo sapiens
aggacgaggaaggatgaggagttggaggatggggagagcgttttgagaaagagatggggcattgagcccgagagtgaaggcttaacagctggggggtaaggttctaccctgatgccacttctggacctcctaggtgctaatggacatagggctaaggcaagaggtgaccctggagctgcagggggacgggtctgtgtccaatctgacagtgtgtgtggcagcctacactgctgctggggatggaccctggagcctcccagtacccctggaggcctggcgcccaggtccaaagccatgcccaacctgcttcaacctgtctctccctga

SEQ ID NO: 373327 - DNA, 3911 bp, Homo sapiens
cccaactcaaacaggcagataaagagagatcaaagagatgagcatgagatacagtcccctcgtgcccaaggagacagggtggttacagacatggaaaatctgagaataatcacctctgataaagatcacagaagctgcccgggaggtgtttggtaagcttggagttacgtttgtggggtggatgggcagaagtcagatttcatagcactgaggatgcagcacaaggagaagttcaagatcaattcctaagacaacaacttggcactaaaaaacataaactatgttctgaaggctttaccctggggacaagggaagggaggtgataacagcagaagtggcagccactggcgatcctttctttccatggtttggcttctactccaaagccacttatttgtgcattctacaaaaagtttcttgtcctttttgaaataaagctcttatcctaagctccattcacacctgcgtgataatgaaccagctagtacttactgtactcaggaagcatgcaaagttctgaatcttagaacagaaagtgaaagcaaaagtaaattccccttcagtcaaatctgcagcagcatgatttaagattaaattcatgtattgaaaatattgttcagaccccatgtgacataactggagccagtgcagtgccatgaagaactacgagattagcctggatattaacttgtcttctagagaatagatttcatgttccattcttctgcaatggttaattcacacagaaaaccaatgtttaacattcacagaggattttactgcttaacagccatcttgccccaaatatgcatttgttctcagttctcagtgccatctagttatcacttcactgaggatcccggggctttcccagtagccactaatggggaacgatttccttggcaggagctaaggctccccagtgtggtcattcctctccattatgacctctttgtccaccccaatctcacctctctggactttgttgcatctgagaagatcgaagtcttggtcagcaatgctacccagtttatcatcttgcacagcaaagatcttgaaatcacgaatgccacccttcagtcagaggaagattcaagatacatgaaaccaggaaaagaactgaaagttttgagttaccctgctcatgaacaaattgcactgctggttccagagaaacttacgcctcacctgaaatactatgtggctatggacttccaagccaagttaggtgatggctttgaagggttttataaaagcacatacagaactcttggtggtgaaacaagaattcttgcagtaacagattttgagccaacccaggcacgcatggctttcccttgctttgatgaaccgttgttcaaagccaacttttcaatcaagatacgaagagagagcaggcatattgcactatccaacatgccaaaggttaagacaattgaacttgaaggaggtcttttggaagatcactttgaaactactgtaaaaatgagtacataccttgtagcctacatagtttgtgatttccactctctgagtggcttcacttcatcaggggtcaaggtgtccatctatgcatccccagacaaacggaatcaaacacattatgctttgcaggcatcactgaagctacttgatttttatgaaaagtactttgatatctactatccactctccaaactggatttaattgctattcctgactttgcacctggagccatggaaaattggggcctcattacatatagggagacgtcactgctttttgaccccaagacctcttctgcttccgataaactgtgggtcaccagagtcatagcccatgaactggcgcaccagtggtttggcaacctggtcacaatggaatggtggaatgatatttggcttaaggagggttttgcaaaatacatggaacttatcgctgttaatgctacatatccagagctgcaatttgatgactattttttgaatgtgtgttttgaagtaattacaaaagattcattgaattcatcccgccctatctccaaaccagcggaaaccccgactcaaatacaggaaatgtttgatgaagtttcctataacaagggagcttgtattttgaatatgctcaaggattttctgggtgaggagaaattccagaaaggaataattcagtacttaaagaagttcagctatagaaatgctaagaatgatgacttgtggagcagtctgtcaaatagttgtttagaaagtgattttacatctggtggagtttgtcattcggatcccaagatgacaagtaacatgctcgcctttctgggggaaaatgcagaggtcaaagagatgatgactacatggactctccagaaaggaatccccctgctggtggttaaacaagacgggtgttcactccgactgcaacaggagcgcttcctccagggggttttccaggaagaccctgaatggagggccctgcaggagaggtacctgtggcatatcccattgacctactccacgagttcttctaatgtgatccacagacacattctaaaatcaaagacagatactctggatctacctgaaaagaccagttgggtgaaatttaatgtggactcaaatggttactacatcgttcactatgagggtcatggatgggaccaactcattacacagctgaatcagaaccacacacttctcagacctaaggacagagtaggtctgattcatgatgtgtttcagctagttggtgcagggagactgaccctagacaaagctcttgacatgacttactacctccaacatgaaacaagcagccccgcacttctcgaaggtctgagttacttggaatcgttttaccacatgatggacagaaggaatatttcagatatctctgaaaacctcaagcgttaccttcttcagtattttaagccagtgattgacaggcaaagctggagtgacaagggctcagtctgggacaggatgctccgctcggctctcttgaagctggcctgtgacctgaaccatgctccttgcatccagaaagctgctgaactcttctcccagtggatggaatccagtggaaaattaaatataccaacagatgttttaaagattgtgtattctgtgggtgctcagacaacagcaggatggaattaccttttagagcaatatgaactgtcaatgtcaagtgctgaacaaaacaaaattctgtatgctttgtcaacgagcaagcatcaggaaaagttactgaagttaattgaactaggaatggaaggaaaggttatcaagacacagaacttggcagctctccttcatgcgattgccagacgtccaaaggggcagcaactagcatgggattttgtaagagaaaattggacccatcttctgaaaaaatttgacttgggctcatatgacataaggatgatcatctctggcacaacagctcacttttcttccaaggataagttgcaagaggtgaaactattttttgaatctcttgaggctcaaggatcacatctggatatttttcaaactgttctggaaacgataaccaaaaatataaaatggctggagaagaatcttccgactctgaggacttggctaatggttaatacttaaatggtcaatagaaaaagtaggctgggcgcggtggctcacgcctgtaatcccagcactttgggaggctgagaagggcggatcacgaggtcaggagatggagaccatcctggctaacacggtgagaccccgtctccgctaaaaatacaaaaaattagccgggcatggtggcaggtgcctgtagtcccagctactcggcaggctgcagcaggaaaatggcataaacccgggaggtggagcttgcagtgagccgagattgcaccactgcattccagcctgggtgactgagcgagactctgtctcaaaaaaaaaaaaaaaaa

SEQ ID NO: 373328 - DNA, 3967 bp, Homo sapiens
cccaactcaaacaggcagataaagagagatcaaagagatgagcatgagatacagtcccctcgtgcccaaggagacagggtggttacagacatggaaaatctgagaataatcacctctgataaagatcacagaagctgcccgggaggtgtttggtaagcttggagttacgtttgtggggtggatgggcagaagtcagatttcatagcactgaggatgcagcacaaggagaagttcaagatcaattcctaagacaacaacttggcactaaaaaacataaactatgttctgaaggctttaccctggggacaagggaagggaggtgataacagcagaagtggcagccactggcgatcctttctttccatggtttggcttctactccaaagccacttatttgtgcattctacaaaaagtttcttgtcctttttgaaataaagctcttatcctaagctccattcacacctgcgtgataatgaaccagctagtacttactgtactcaggaagcatgcaaagttctgaatcttagaacagaaagtgaaagcaaaagtaaattccccttcagtcaaatctgcagcagcatgatttaagattaaattcatgtattgaaaatattgttcagaccccatgtgacataactggagccagtgcagtgccatgaagaactacgagattagcctggatattaacttgtcttctagagaatagatttcatgttccattcttctgcaatggttaattcacacagaaaaccaatgtttaacattcacagaggattttactgcttaacagccatcttgccccaaatatgcatttgttctcagttctcagtgccatctagttatcacttcactgaggatcccggggctttcccagtagccactaatggggaacgatttccttggcaggagctaaggctccccagtgtggtcattcctctccattatgacctctttgtccaccccaatctcacctctctggactttgttgcatctgagaagatcgaagtcttggtcagcaatgctacccagtttatcatcttgcacagcaaagatcttgaaatcacgaatgccacccttcagtcagaggaagattcaagatacatgaaaccaggaaaagaactgaaagttttgagttaccctgctcatgaacaaattgcactgctggttccagagaaacttacgcctcacctgaaatactatgtggctatggacttccaagccaagttaggtgatggctttgaagggttttataaaagcacatacagaactcttggtggtgaaacaagaattcttgcagtaacagattttgagccaacccaggcacgcatggctttcccttgctttgatgaaccgttgttcaaagccaacttttcaatcaagatacgaagagagagcaggcatattgcactatccaacatgccaaaggttaagacaattgaacttgaaggaggtcttttggaagatcactttgaaactactgtaaaaatgagtacataccttgtagcctacatagtttgtgatttccactctctgagtggcttcacttcatcaggggtcaaggtgtccatctatgcatccccagacaaacggaatcaaacacattatgctttgcaggcatcactgaagctacttgatttttatgaaaagtactttgatatctactatccactctccaaactggatttaattgctattcctgactttgcacctggagccatggaaaattggggcctcattacatatagggagacgtcactgctttttgaccccaagacctcttctgcttccgataaactgtgggtcaccagagtcatagcccatgaactggcgcaccagtggtttggcaacctggtcacaatggaatggtggaatgatatttggcttaaggagggttttgcaaaatacatggaacttatcgctgttaatgctacatatccagagctgcaatttgatgactattttttgaatgtgtgttttgaagtaattacaaaagattcattgaattcatcccgccctatctccaaaccagcggaaaccccgactcaaatacaggaaatgtttgatgaagtttcctataacaagggagcttgtattttgaatatgctcaaggattttctgggtgaggagaaattccagaaaggaataattcagtacttaaagaagttcagctatagaaatgctaagaatgatgacttgtggagcagtctgtcaaatagttgtttagaaagtgattttacatctggtggagtttgtcattcggatcccaagatgacaagtaacatggtgaggataaagagagtcacagagtagaagagatctgtggaatagcctgacctagactcgcctttctgggggaaaatgcagaggtcaaagagatgatgactacatggactctccagaaaggaatccccctgctggtggttaaacaagacgggtgttcactccgactgcaacaggagcgcttcctccagggggttttccaggaagaccctgaatggagggccctgcaggagaggtacctgtggcatatcccattgacctactccacgagttcttctaatgtgatccacagacacattctaaaatcaaagacagatactctggatctacctgaaaagaccagttgggtgaaatttaatgtggactcaaatggttactacatcgttcactatgagggtcatggatgggaccaactcattacacagctgaatcagaaccacacacttctcagacctaaggacagagtaggtctgattcatgatgtgtttcagctagttggtgcagggagactgaccctagacaaagctcttgacatgacttactacctccaacatgaaacaagcagccccgcacttctcgaaggtctgagttacttggaatcgttttaccacatgatggacagaaggaatatttcagatatctctgaaaacctcaagcgttaccttcttcagtattttaagccagtgattgacaggcaaagctggagtgacaagggctcagtctgggacaggatgctccgctcggctctcttgaagctggcctgtgacctgaaccatgctccttgcatccagaaagctgctgaactcttctcccagtggatggaatccagtggaaaattaaatataccaacagatgttttaaagattgtgtattctgtgggtgctcagacaacagcaggatggaattaccttttagagcaatatgaactgtcaatgtcaagtgctgaacaaaacaaaattctgtatgctttgtcaacgagcaagcatcaggaaaagttactgaagttaattgaactaggaatggaaggaaaggttatcaagacacagaacttggcagctctccttcatgcgattgccagacgtccaaaggggcagcaactagcatgggattttgtaagagaaaattggacccatcttctgaaaaaatttgacttgggctcatatgacataaggatgatcatctctggcacaacagctcacttttcttccaaggataagttgcaagaggtgaaactattttttgaatctcttgaggctcaaggatcacatctggatatttttcaaactgttctggaaacgataaccaaaaatataaaatggctggagaagaatcttccgactctgaggacttggctaatggttaatacttaaatggtcaatagaaaaagtaggctgggcgcggtggctcacgcctgtaatcccagcactttgggaggctgagaagggcggatcacgaggtcaggagatggagaccatcctggctaacacggtgagaccccgtctccgctaaaaatacaaaaaattagccgggcatggtggcaggtgcctgtagtcccagctactcggcaggctgcagcaggaaaatggcataaacccgggaggtggagcttgcagtgagccgagattgcaccactgcattccagcctgggtgactgagcgagactctgtctcaaaaaaaaaaaaaaaaa

SEQ ID NO: 373329 - DNA, 3530 bp, Homo sapiens
cccaactcaaacaggcagataaagagagatcaaagagatgagcatgagatacagtcccctcgtgcccaaggagacagggtggttacagacatggaaaatctgagaataatcacctctgataaagatcacagaagctgcccgggaggtgtttggtaagcttggagttacgtttgtggggtggatgggcagaagtcagatttcatagcactgaggatgcagcacaaggagaagttcaagatcaattcctaagacaacaacttggcactaaaaaacataaactatgttctgaaggctttaccctggggacaagggaagggaggtgataacagcagaagtggcagccactggcgatcctttctttccatggtttggcttctactccaaagccacttatttgtgcattctacaaaaagtttcttgtcctttttgaaataaagctcttatcctaagctccattcacacctgcgtgataatgaaccagctagtacttactgtactcaggaagcatgcaaagttctgaatcttagaacagaaagtgaaagcaaaagtaaattccccttcagtcaaatctgcagcagcatgatttaagattaaattcatgtattgaaaatattgttcagaccccatgtgacataactggagccagtgcagtgccatgaagaactacgagattagcctggatattaacttgtcttctagagaatagatttcatgttccattcttctgcaatggttaattcacacagaaaaccaatgtttaacattcacagaggattttactgcttaacagccatcttgccccaaatatgcatttgttctcagttctcagtgccatctagttatcacttcactgaggatcccggggctttcccagtagccactaatggggaacgatttccttggcaggagctaaggctccccagtgtggtcattcctctccattatgacctctttgtccaccccaatctcacctctctggactttgttgcatctgagaagatcgaagtcttggtcagcaatgctacccagtttatcatcttgcacagcaaagatcttgaaatcacgaatgccacccttcagtcagaggaagattcaagatacatgaaaccaggaaaagaactgaaagttttgagttaccctgctcatgaacaaattgcactgctggttccagagaaacttacgcctcacctgaaatactatgtggctatggacttccaagccaagttaggtgatggctttgaagggttttataaaagcacatacagaactcttggtggtgaaacaagaattcttgcagtaacagattttgagccaacccaggcacgcatggctttcccttgctttgatgaaccgttgttcaaagccaacttttcaatcaagatacgaagagagagcaggcatattgcactatccaacatgccaaaggttaagacaattgaacttgaaggaggtcttttggaagatcactttgaaactactgtaaaaatgagtacataccttgtagcctacatagtttgtgatttccactctctgagtggcttcacttcatcaggggtcaaggtgtccatctatgcatccccagacaaacggaatcaaacacattatgctttgcaggcatcactgaagctacttgatttttatgaaaagtactttgatatctactatccactctccaaactggatttaattgctattcctgactttgcacctggagccatggaaaattggggcctcattacatatagggagacgtcactgctttttgaccccaagacctcttctgcttccgataaactgtgggtcaccagagtcatagcccatgaactggcgcaccagtggtttggcaacctggtcacaatggaatggtggaatgatatttggcttaaggagggttttgcaaaatacatggaacttatcgctgttaatgctacatatccagagctgcaatttgatgactattttttgaatgtgtgttttgaagtaattacaaaagattcattgaattcatcccgccctatctccaaaccagcggaaaccccgactcaaatacaggaaatgtttgatgaagtttcctataacaagggagcttgtattttgaatatgctcaaggattttctgggtgaggagaaattccagaaaggaataattcagtacttaaagaagttcagctatagaaatgctaagaatgatgacttgtggagcagtctgtcaaatagttgtttagaaagtgattttacatctggtggagtttgtcattcggatcccaagatgacaagtaacatgctcgcctttctgggggaaaatgcagaggtcaaagagatgatgactacatggactctccagaaaggaatccccctgctggtggttaaacaagacgggtgttcactccgactgcaacaggagcgcttcctccagggggttttccaggaagaccctgaatggagggccctgcaggagaggtacctgtggcatatcccattgacctactccacgagttcttctaatgtgatccacagacacattctaaaatcaaagacagatactctggatctacctgaaaagaccagttgggtgaaatttaatgtggactcaaatggttactacatcgttcactatgagggtcatggatgggaccaactcattacacagctgaatcagaaccacacacttctcagacctaaggacagagtaggtctgattcatgatgtgtttcagctagttggtgcagggagactgaccctagacaaagctcttgacatgacttactacctccaacatgaaacaagcagccccgcacttctcgaaggtctgagttacttggaatcgttttaccacatgatggacagaaggaatatttcagatatctctgaaaacctcaagcgttaccttcttcagtattttaagccagtgattgacaggcaaagctggagtgacaagggctcagtctgggacaggatgctccgctcggctctcttgaagctggcctgtgacctgaaccatgctccttgcatccagaaagctgctgaactcttctcccagtggatggaatccagtggaaaattaaatataccaacagatgttttaaagattgtgtattctgtgggtgctcagacaacagcaggatggaattaccttttagagcaatatgaactgtcaatgtcaagtgctgaacaaaacaaaattctgtatgctttgtcaacgagcaagcatcaggaaaagttactgaagttaattgaactaggaatggaaggaaaggttatcaagacacagaacttggcagctctccttcatgcgattgccagacgtccaaaggggcagcaactagcatgggattttgtaagagaaaattggacccatcttctgaaaaaatttgacttgggctcatatgacataaggatgatcatctctggcacaacagctcacttttcttccaaggataagttgcaagaggtttgtgactttctgtttttaacaatttcaaaataaatgttcaaattgtggaattgaaagtaaacttagatataatctga

SEQ ID NO: 373330 - DNA, 1863 bp, Homo sapiens
cccaactcaaacaggcagataaagagagatcaaagagatgagcatgagatacagtcccctcgtgcccaaggagacagggtggttacagacatggaaaatctgagaataatcacctctgataaagatcacagaagctgcccgggaggtgtttggtaagcttggagttacgtttgtggggtggatgggcagaagtcagatttcatagcactgaggatgcagcacaaggagaagttcaagatcaattcctaagacaacaacttggcactaaaaaacataaactatgttctgaaggctttaccctggggacaagggaagggaggtgataacagcagaagtggcagccactggcgatcctttctttccatggtttggcttctactccaaagccacttatttgtgcattctacaaaaagtttcttgtcctttttgaaataaagctcttatcctaagctccattcacacctgcgtgataatgaaccagctagtacttactgtactcaggaagcatgcaaagttctgaatcttagaacagaaagtgaaagcaaaagtaaattccccttcagtcaaatctgcagcagcatgatttaagattaaattcatgtattgaaaatattgttcagaccccatgtgacataactggagccagtgcagtgccatgaagaactacgagattagcctggatattaacttgtcttctagagaatagatttcatgttccattcttctgcaatggttaattcacacagaaaaccaatgtttaacattcacagaggattttactgcttaacagccatcttgccccaaatatgcatttgttctcagttctcagtgccatctagttatcacttcactgaggatcccggggctttcccagtagccactaatggggaacgatttccttggcaggagctaaggctccccagtgtggtcattcctctccattatgacctctttgtccaccccaatctcacctctctggactttgttgcatctgagaagatcgaagtcttggtcagcaatgctacccagtttatcatcttgcacagcaaagatcttgaaatcacgaatgccacccttcagtcagaggaagattcaagatacatgaaaccaggaaaagaactgaaagttttgagttaccctgctcatgaacaaattgcactgctggttccagagaaacttacgcctcacctgaaatactatgtggctatggacttccaagccaagttaggtgatggctttgaagggttttataaaagcacatacagaactcttggtggtgaaacaagaattcttgcagtaacagattttgagccaacccaggcacgcatggctttcccttgctttgatgaaccgttgttcaaagccaacttttcaatcaagatacgaagagagagcaggcatattgcactatccaacatgccaaaggttaagacaattgaacttgaaggaggtcttttggaagatcactttgaaactactgtaaaaatgagtacataccttgtagcctacatagtttgtgatttccactctctgagtggcttcacttcatcaggggtcaaggtgtccatctatgcatccccagacaaacggaatcaaacacattatgctttgcaggcatcactgaagctacttgatttttatgaaaagtactttgatatctactatccactctccaaactgggtatgttcaaattccacattattgtcttcatttttgctcataaaacttgctttgatctcttccctctttctctttctatgtgatttaaatgagcactgaggaattcagttagctcaggaaaaaataatttgttcctcagagatgattcttgagtgtagaaaataaaatatttatgacatgcc

SEQ ID NO: 373331 - DNA, 437 bp, Homo sapiens
tctctactaaaggtgattttattttatatccattgatattcccctttcagataggaaattaaaccatgtttaaatgcaaaaactgtttcctaagtatggtgggtaacagccagaaaaagataagagaaatacgaagatacactgtttggggaaagattgggaaagatgcagaaagtttagagttgagccctttagatgggcaagaactgtgttaaggactaaatttagcctctctgttaaccatctcatattttctgcagcgttaccttcttcagtattttaagccagtgattgacaggcaaagctggagtgacaagggctcagtctgggacaggatgctccgctcggctctcttgaagctggcctgtgacctgaaccatgctccttgcatccagaaagctgctgaactcttctcccagtggatggaatccagtgga

SEQ ID NO: 373332 - DNA, 534 bp, Homo sapiens
agaaaaaagaaaaccaagcaaaaatgtggtggtgagaataagaaggcaaggaaatcagtagaagaaaattgtacagagagaaaagggtagcaaagagagaagagagatcctaactaataaaaaaaaagttagtaactattgtattttttgctaaagttaataatttttatttgtttaacttctaataatattgagtttttacctcctagtggtttggcaacctggtcacaatggaatggtggaatgatatttggcttaaggagggttttgcaaaatacatggaacttatcgctgttaatgctacatatccagagctgcaatttgtaagttcacaattctgtgtatcatactatatggtgtaaagaatcatcaattcactattaaaatttcaagtgaatgttaaacagaaaaactacataatgttgtggtttttgaacatatggcattttgtttgatacacgaaacagatcacagaactggatgaaacattgaaggttttagaaaacaatcaacataaatctgtcaccccaaagt

SEQ ID NO: 373333 - DNA, 3754 bp, Homo sapiens
cccaactcaaacaggcagataaagagagatcaaagagatgagcatgagatacagtcccctcgtgcccaaggagacagggtggttacagacatggaaaatctgagaataatcacctctgataaagatcacagaagctgcccgggaggtgtttggtaagcttggagttacgtttgtggggtggatgggcagaagtcagatttcatagcactgaggatgcagcacaaggagaagttcaagatcaattcctaagacaacaacttggcactaaaaaacataaactatgttctgaaggctttaccctggggacaagggaagggaggtgataacagcagaagtggcagccactggcgatcctttctttccatggtttggcttctactccaaagccacttatttgtgcattctacaaaaagtttcttgtcctttttgaaataaagctcttatcctaagctccattcacacctgcgtgataatgaaccagctagtacttactgtactcaggaagcatgcaaagttctgaatcttagaacagaaagtgaaagcaaaagtaaattccccttcagtcaaatctgcagcagcatgatttaagattaaattcatgtattgaaaatattgttcagaccccatgtgacataactggagccagtgcagtgccatgaagaactacgagattagcctggatattaacttgtcttctagagaatagatttcatgttccattcttctgcaatggttaattcacacagaaaaccaatgtttaacattcacagaggattttactgcttaacagccatcttgccccaaatatgcatttgttctcagttctcagtgccatctagttatcacttcactgaggatcccggggctttcccagtagccactaatggggaacgatttccttggcaggagctaaggctccccagtgtggtcattcctctccattatgacctctttgtccaccccaatctcacctctctggactttgttgcatctgagaagatcgaagtcttggtcagcaatgctacccagtttatcatcttgcacagcaaagatcttgaaatcacgaatgccacccttcagtcagaggaagattcaagatacatgaaaccaggaaaagaactgaaagttttgagttaccctgctcatgaacaaattgcactgctggttccagagaaacttacgcctcacctgaaatactatgtggctatggacttccaagccaagttaggtgatggctttgaagggttttataaaagcacatacagaactcttggtggtgaaacaagaattcttgcagtaacagattttgagccaacccaggcacgcatggctttcccttgctttgatgaaccgttgttcaaagccaacttttcaatcaagatacgaagagagagcaggcatattgcactatccaacatgccaaaggttaagacaattgaacttgaaggaggtcttttggaagatcactttgaaactactgtaaaaatgagtacataccttgtagcctacatagtttgtgatttccactctctgagtggcttcacttcatcaggggtcaaggtgtccatctatgcatccccagacaaacggaatcaaacacattatgctttgcaggcatcactgaagctacttgatttttatgaaaagtactttgatatctactatccactctccaaactggatttaattgctattcctgactttgcacctggagccatggaaaattggggcctcattacatatagggagacgtcactgctttttgaccccaagacctcttctgcttccgataaactgtgggtcaccagagtcatagcccatgaactggcgcaccagtggtttggcaacctggtcacaatggaatggtggaatgatatttggcttaaggagggttttgcaaaatacatggaacttatcgctgttaatgctacatatccagagctgcaatttgatgactattttttgaatgtgtgttttgaagtaattacaaaagattcattgaattcatcccgccctatctccaaaccagcggaaaccccgactcaaatacaggaaatgtttgatgaagtttcctataacaagggagcttgtattttgaatatgctcaaggattttctgggtgaggagaaattccagaaaggaataattcagtacttaaagaagttcagctatagaaatgctaagaatgatgacttgtggagcagtctgtcaaatagttgtttagaaagtgattttacatctggtggagtttgtcattcggatcccaagatgacaagtaacatgctcgcctttctgggggaaaatgcagaggtcaaagagatgatgactacatggactctccagaaaggaatccccctgctggtggttaaacaagacgggtgttcactccgactgcaacaggagcgcttcctccagggggttttccaggaagaccctgaatggagggccctgcaggagaggtacctgtggcatatcccattgacctactccacgagttcttctaatgtgatccacagacacattctaaaatcaaagacagatactctggatctacctgaaaagaccagttgggtgaaatttaatgtggactcaaatggttactacatcgttcactatgagggtcatggatgggaccaactcattacacagctgaatcagaaccacacacttctcagacctaaggacagagtaggtctgattcatgatgtgtttcagctagttggtgcagggagactgaccctagacaaagctcttgacatgacttactacctccaacatgaaacaagcagccccgcacttctcgaaggtctgagttacttggaatcgttttaccacatgatggacagaaggaatatttcagatatctctgaaaacctcaagcgttaccttcttcagtattttaagccagtgattgacaggcaaagctggagtgacaagggctcagtctgggacaggatgctccgctcggctctcttgaagctggcctgtgacctgaaccatgctccttgcatccagaaagctgctgaactcttctcccagtggatggaatccagtggaaaattaaagtagatgtagacttctgtcctaccctttgttcttttctctttgatgtaaaagtctttgatcaagcaagacattaggtctaaaaccttttagtgaggatagaaaaaaaaacatgctgggcattacaaaccctgtttcatgctctcacattgtaagtgctatgtatggagactagtacaatctctaccatgaaatgtaatggtgtccattattccggtgctggctggatgcagtggcccacgcctataatcccagcactttgggaggccaaggagggtgaatcactgaggtcaggagttcaagaccagcctggccaacatagtgaagccctgtctgcactaaaaatgcaaaaattagccaagtgtggtggtgcacgcttgtaatcccagctacttcggaggctgaggtgggagaattgcttgaacctgggaagcagaagttgccgtgagccaagatcacttcactgcactgcagtctgggcaacagagaaaggccctgtctcaaaaaaaaaaaaaaaacttttcctgtgccaaattattataagatggtatcataacttctctcgctataactaaatctgtgagctttttgaaatcctttcttgaattcttctttttaaaaaagtaattcaagttttcttctttttggactttttttccttgttgggattcaagcctgaaatcagttttag

SEQ ID NO: 373334 - DNA, 3633 bp, Homo sapiens
  misc_feature (3559)..(3559): n is a, c, g, or t
  misc_feature (3562)..(3562): n is a, c, g, or t
  misc_feature (3571)..(3571): n is a, c, g, or t
  misc_feature (3578)..(3578): n is a, c, g, or t
  misc_feature (3588)..(3588): n is a, c, g, or t
cccaactcaaacaggcagataaagagagatcaaagagatgagcatgagatacagtcccctcgtgcccaaggagacagggtggttacagacatggaaaatctgagaataatcacctctgataaagatcacagaagctgcccgggaggtgtttggtaagcttggagttacgtttgtggggtggatgggcagaagtcagatttcatagcactgaggatgcagcacaaggagaagttcaagatcaattcctaagacaacaacttggcactaaaaaacataaactatgttctgaaggctttaccctggggacaagggaagggaggtgataacagcagaagtggcagccactggcgatcctttctttccatggtttggcttctactccaaagccacttatttgtgcattctacaaaaagtttcttgtcctttttgaaataaagctcttatcctaagctccattcacacctgcgtgataatgaaccagctagtacttactgtactcaggaagcatgcaaagttctgaatcttagaacagaaagtgaaagcaaaagtaaattccccttcagtcaaatctgcagcagcatgatttaagattaaattcatgtattgaaaatattgttcagaccccatgtgacataactggagccagtgcagtgccatgaagaactacgagattagcctggatattaacttgtcttctagagaatagatttcatgttccattcttctgcaatggttaattcacacagaaaaccaatgtttaacattcacagaggattttactgcttaacagccatcttgccccaaatatgcatttgttctcagttctcagtgccatctagttatcacttcactgaggatcccggggctttcccagtagccactaatggggaacgatttccttggcaggagctaaggctccccagtgtggtcattcctctccattatgacctctttgtccaccccaatctcacctctctggactttgttgcatctgagaagatcgaagtcttggtcagcaatgctacccagtttatcatcttgcacagcaaagatcttgaaatcacgaatgccacccttcagtcagaggaagattcaagatacatgaaaccaggaaaagaactgaaagttttgagttaccctgctcatgaacaaattgcactgctggttccagagaaacttacgcctcacctgaaatactatgtggctatggacttccaagccaagttaggtgatggctttgaagggttttataaaagcacatacagaactcttggtggtgaaacaagaattcttgcagtaacagattttgagccaacccaggcacgcatggctttcccttgctttgatgaaccgttgttcaaagccaacttttcaatcaagatacgaagagagagcaggcatattgcactatccaacatgccaaaggttaagacaattgaacttgaaggaggtcttttggaagatcactttgaaactactgtaaaaatgagtacataccttgtagcctacatagtttgtgatttccactctctgagtggcttcacttcatcaggggtcaaggtgtccatctatgcatccccagacaaacggaatcaaacacattatgctttgcaggcatcactgaagctacttgatttttatgaaaagtactttgatatctactatccactctccaaactggatttaattgctattcctgactttgcacctggagccatggaaaattggggcctcattacatatagggagacgtcactgctttttgaccccaagacctcttctgcttccgataaactgtgggtcaccagagtcatagcccatgaactggcgcaccagtggtttggcaacctggtcacaatggaatggtggaatgatatttggcttaaggagggttttgcaaaatacatggaacttatcgctgttaatgctacatatccagagctgcaatttgatgactattttttgaatgtgtgttttgaagtaattacaaaagattcattgaattcatcccgccctatctccaaaccagcggaaaccccgactcaaatacaggaaatgtttgatgaagtttcctataacaagggagcttgtattttgaatatgctcaaggattttctgggtgaggagaaattccagaaaggaataattcagtacttaaagaagttcagctatagaaatgctaagaatgatgacttgtggagcagtctgtcaaatagttgtttagaaagtgattttacatctggtggagtttgtcattcggatcccaagatgacaagtaacatgctcgcctttctgggggaaaatgcagaggtcaaagagatgatgactacatggactctccagaaaggaatccccctgctggtggttaaacaagacgggtgttcactccgactgcaacaggagcgcttcctccagggggttttccaggaagaccctgaatggagggccctgcaggagaggtacctgtggcatatcccattgacctactccacgagttcttctaatgtgatccacagacacattctaaaatcaaagacagatactctggatctacctgaaaagaccagttgggtgaaatttaatgtggactcaaatggttactacatcgttcactatgagggtcatggatgggaccaactcattacacagctgaatcagaaccacacacttctcagacctaaggacagagtaggtctgattcatgatgtgtttcagctagttggtgcagggagactgaccctagacaaagctcttgacatgacttactacctccaacatgaaacaagcagccccgcacttctcgaaggtctgagttacttggaatcgttttaccacatgatggacagaaggaatatttcagatatctctgaaaacctcaagcgttaccttcttcagtattttaagccagtgattgacaggcaaagctggagtgacaagggctcagtctgggacaggatgctccgctcggctctcttgaagctggcctgtgacctgaaccatgctccttgcatccagaaagctgctgaactcttctcccagtggatggaatccagtggaaaattaaatataccaacagatgttttaaagattgtgtattctgtgggtgctcagacaacagcaggatggaattaccttttagagcaatatgaactgtcaatgtcaagtgctgaacaaaacaaaattctgtatgctttgtcaacgagcaagcatcaggaaaagttactgaagttaattgaactaggaatggaaggaaaggttatcaagacacagaacttggcagctctccttcatgcgattgccagacgtccaaaggggcagcaactagcatgggattttgtaagagaaaattggacccatcttctgaaaaaatttgacttgggctcatatgacataaggatgatcatctctggcacaacagctcacttttcttccaaggataagttgcaagaggtgaaactattttttgaatctcttgaggctcaaggatcacatctggatatttttcaaactgttctggaaacgataaccaaaaatataaaatggctggagaagaatcttnatnttctactcnttcatantcatggaccnacactcacttgcatctttggaggtattggcgggatcctctagatc

SEQ ID NO: 373335 - DNA, 556 bp, Homo sapiens
agcgggcgaggggtggggctgcgggaggccctggagcgcggcggtgatggcggggccggtgaaggaccgcgaggccttccagaggctcaacttcctgtaccaggccgcccattgtgtccttgcccaggaccccgagaaccaggcgctggcgaggttttactgctacactgagaggaccattgcgaagcggctcgtcttgcggcgggatccctcggtgaagaggactctctgtcgaggctgctcttccctcctcgtcccgggcctcacctgcacccagcgccagagacgctgcaggggacagcgctggaccgtacagacctgcctaacatgccagcgcagccaacgcttcctcaatgatcccgggcatttactctggggagacaggcctgaggcccagctcgggagccaagcagattccaaaccactacaacccttgccaaacacagcccactccatttcagaccgccttcctgaggagaaaatgcagactcagggttccagtaaccagtgatggattcaccccatctcccaaataaagtttacttgttttacattc

SEQ ID NO: 373336 - DNA, 771 bp, Homo sapiens
agcgggcgaggggtggggctgcgggaggccctggagcgcggcggtgatggcggggccggtgaaggaccgcgaggccttccagaggctcaacttcctgtaccaggccgcccattgtgtccttgcccaggaccccgagaaccaggcgctggcgaggttttactgctacactgagaggaccattgcgaagcggctcgtcttgcggcgggatccctcggtgaagaggactctctgtcgaggctgctcttccctcctcgtcccgggcctcacctgcacccagcgccagagacgctgcaggggacagcgctggaccgtacagacctgcctaacatgccagcgcagccaacgcttcctcaatgatcccgggcatttactctggggagacaggcctgaggcccagctcgggagccaagcagattccaaaccactacaacccttgccaaacacagcccactccatttcagaccgccttcctgaggagaaaatgcagactcagggttccagtaaccagtgatggattcaccccatctcccaaataaagtttacttgttttacattcaaaaaaaaaaaaaaacaaacttcgaggggggttgaaaagccttgagcagcaagggcccccgggaaacccctgtgtacaagggggcgcgggaaagcccggaacgggaaaccagggaaagcgccgaaagttctcgggaaacggtgaatttgcaaatcagttggaaaactttttgaccccaaaagggacaagcgcttccggggccccgaaggcttaac

SEQ ID NO: 373337 - DNA, 595 bp, Homo sapiens
agcgggcgaggggtggggctgcgggaggccctggagcgcggcggtgatggcggggccggtgaaggaccgcgaggccttccagaggctcaacttcctgtaccaggccgcccattgtgtccttgcccaggaccccgagaaccaggcgctggcgaggttttactgctacactgagaggaccattgcgaagcggctcgtcttgcggcgggatccctcggtgaagaggactctctgtcgaggctgctcttccctcctcgtcccgggcctcacctgcacccagcgccagagacgctgcaggggacagcgctggaccgtacagacctgcctaacatgccagcgcagccaacgcttcctcaatgatcccgggcatttactctggggagacaggcctgaggcccagctcgggagccaagcagattccaaaccactacaacccttgccaaacacagcccactccatttcagaccgccttcctgaggagaaaatgcagactcagggttccagtaaccagtgatggattcaccccatctcccaaataaagtttacttgttttacattcccatgattctgttctgtgggtatttcaactcttaattcc

SEQ ID NO: 373338 - DNA, 648 bp, Homo sapiens
agcgggcgaggggtggggctgcgggaggccctggagcgcggcggtgatggcggggccggtgaaggaccgcgaggccttccagaggctcaacttcctgtaccaggccgcccattgtgtccttgcccaggaccccgagaaccaggcgctggcgaggttttactgctacactgagaggaccattgcgaagcggctcgtcttgcggcggtgagacagccacggggcgggcggcgggcgggacgcgggaggaacgcgagagggagcgcgggcgccagaccactatcctcctccgcccccagggatccctcggtgaagaggactctctgtcgaggctgctcttccctcctcgtcccgggcctcacctgcacccagcgccagagacgctgcaggggacagcgctggaccgtacagacctgcctaacatgccagcgcagccaacgcttcctcaatgatcccgggcatttactctggggagacaggcctgaggcccagctcgggagccaagcagattccaaaccactacaacccttgccaaacacagcccactccatttcagaccgccttcctgaggagaaaatgcagactcagggttccagtaaccagtgatggattcaccccatctcccaaataaagtttacttgttttacattc

SEQ ID NO: 373339 - DNA, 1506 bp, Homo sapiens
agcgggcgaggggtggggctgcgggaggccctggagcgcggcggtgatggcggggccggtgaaggaccgcgaggccttccagaggctcaacttcctgtaccaggccgcccattgtgtccttgcccaggaccccgagaaccaggcgctggcgaggttttactgctacactgagaggaccattgcgaagcggctcgtcttgcggcggtgagacagccacggggcgggcggcgggcgggacgcgggaggaacgcgagagggagcgcgggcgccagaccactatcctcctccgcccccagggatccctcggtgaagaggactctctgtcgaggctgctcttccctcctcgtcccgggcctcacctgcacccagcgccagagacgtgagtgctccaacggaggtggaagactgcggagcattgggggcgcggaggggggcggggtggggggcgggcactggaggccaacagcgcctttctcactgtagatggatgttgggtgtgggattcgcaggagtcttccttcttcgggtttggattaagttcctaacgccacttgcacaaactagggtttgggctcggctgttttttttttttttcttccagtgtgggcaataaataataacttttaagaggcaaccccacccatgcacaataatagatgttgttcggctttgtggaggacgattcccatcaccattcatttattaagcaaatacttattttctaaaatgtgtcaggtactgtgctagattcattattctcattgaaattacggtctgatgggacagactaagaaacaaaatggtgtagaaaaagattaactgggggagtagaatgctcacttactcatgccagtggtggcgaagtttatgataagcaaagggagtgagagatggaaattctaggcatgtgtgcagactctgagacaagagagcttgtggtgctgtcaaagaaatgagagttcaggaggctggagtttgaggtaggagggcaaaacatgagactggagggggaaacaggccagttcttgaagtcttgttagggagtttgaactttatcttaaagagttccaggaaatcgatggagcttatgccgaggcctgacaccatcaaatgtgcattcaaattgggggtgtggtgggggagcggggatacctactgaaaaacactggaggcaaaactggcagcaagagaccgttacttctaaacgtggacagtctttttcccatgttcaccctaggctgcaggggacagcgctggaccgtacagacctgcctaacatgccagcgcagccaacgcttcctcaatgatcccgggcatttactctggggagacaggcctgaggcccagctcgggagccaagcagattccaaaccactacaacccttgccaaacacagcccactccatttcagaccgccttcctgaggagaaaatgcagactcagggttccagtaaccagtgatggattcaccccatctcccaaataaagtttacttgttttacattc

SEQ ID NO: 373340 - DNA, 912 bp, Homo sapiens
agcgggcgaggggtggggctgcgggaggccctggagcgcggcggtgatggcggggccggtgaaggaccgcgaggccttccagaggctcaacttcctgtaccaggccgcccattgtgtccttgcccaggaccccgagaaccaggcgctggcgaggttttactgctacactgagaggaccattgcgaagcggctcgtcttgcggcgggatccctcggtgaagaggactctctgtcgaggctgctcttccctcctcgtcccgggcctcacctgcacccagcgccagagacgtgagtgctccaacggaggtggaagactgcggagcattgggggcgcggaggggggcggggtggggggcgggcactggaggccaacagcgcctttctcactgtagatggatgttgggtgtgggattcgcaggagtcttccttcttcgggtttggattaagttcctaacgccacttgcacaaactagggtttgggctcggctgttttttttttttttcttccagtgtgggcaataaataataacttttaagaggcaaccccacccatgcacaataatagatgttgttcggctttgtggaggacgattcccatcaccattcatttattaagcaaatacttattttctaaaatgtgtcaggctgcaggggacagcgctggaccgtacagacctgcctaacatgccagcgcagccaacgcttcctcaatgatcccgggcatttactctggggagacaggcctgaggcccagctcgggagccaagcagattccaaaccactacaacccttgccaaacacagcccactccatttcagaccgccttcctgaggagaaaatgcagactcagggttccagtaaccagtgatggattcaccccatctcccaaataaagtttacttgttttacattc

SEQ ID NO: 373341 - DNA, 1629 bp, Homo sapiens
agcgggcgaggggtggggctgcgggaggccctggagcgcggcggtgatggcggggccggtgaaggaccgcgaggccttccagaggctcaacttcctgtaccaggccgcccattgtgtccttgcccaggaccccgagaaccaggcgctggcgaggttttactgctacactgagaggaccattgcgaagcggctcgtcttgcggcgggatccctcggtgaagaggactctctgtcgaggctgctcttccctcctcgtcccgggcctcacctgcacccagcgccagagacgtgagtgctccaacggaggtggaagactgcggagcattgggggcgcggaggggggcggggtggggggcgggcactggaggccaacagcgcctttctcactgtagatggatgttgggtgtgggattcgcaggagtcttccttcttcgggtttggattaagttcctaacgccacttgcacaaactagggtttgggctcggctgttttttttttttttcttccagtgtgggcaataaataataacttttaagaggcaaccccacccatgcacaataatagatgttgttcggctttgtggaggacgattcccatcaccattcatttattaagcaaatacttattttctaaaatgtgtcaggtactgtgctagattcattattctcattgaaattacggtctgatgggacagactaagaaacaaaatggtgtagaaaaagattaactgggggagtagaatgctcacttactcatgccagtggtggcgaagtttatgataagcaaagggagtgagagatggaaattctaggcatgtgtgcagactctgagacaagagagcttgtggtgctgtcaaagaaatgagagttcaggaggctggagtttgaggtaggagggcaaaacatgagactggagggggaaacaggccagttcttgaagtcttgttagggagtttgaactttatcttaaagagttccaggaaatcgatggagcttatgccgaggcctgacaccatcaaatgtgcattcaaattgggggtgtggtgggggagcggggatacctactgaaaaacactggaggcaaaactggcagcaagagaccgttacttctaaacgtggacagtctttttcccatgttcaccctaggctgcaggggacagcgctggaccgtacagacctgcctaacatgccagcgcagccaacgcttcctcaatgatcccgggcatttactctggggagacaggcctgaggcccagctcgggagccaagcagattccaaaccactacaacccttgccaaacacagcccactccatttcagaccgccttcctgaggagaaaatgcagactcagggttccagtaaccagtgatggattcaccccatctcccaaataaagtttacttgttttacattcaaaaaaaaaaaaaaacaaacttcgaggggggttgaaaagccttgagcagcaagggcccccgggaaacccctgtgtacaagggggcgcgggaaagcccggaacgggaaaccagggaaagcgccgaaagttctcgggaaacggtgaatttgcaaatcagttggaaaactttttgaccccaaaagggacaagcgcttccggggccccgaaggcttaac

SEQ ID NO: 373342 - DNA, 994 bp, Homo sapiens
agcgggcgaggggtggggctgcgggaggccctggagcgcggcggtgatggcggggccggtgaaggaccgcgaggccttccagaggctcaacttcctgtaccaggtgagtctgcgacaagggccccacggggacggtgctcggcgtcccagagtgactgctcccctcccgcaggccgcccattgtgtccttgcccaggaccccgagaaccaggcgctggcgaggttttactgctacactgagaggaccattgcgaagcggctcgtcttgcggcgggatccctcggtgaagaggactctctgtcgaggctgctcttccctcctcgtcccgggcctcacctgcacccagcgccagagacgctgcaggggacagcgctggaccgtacagacctgcctaacatgccagcgcagccaacgcttcctcaatgatcccgggcatttactctggggagacaggcctgaggcccagctcgggagccaagcagattccaaaccactacaacccttgccaaacacagcccactccatttcagaccgccttcctgaggagaaaatgcagactcagggttccagtaaccagtgatggattcaccccatctcccaaataaagtttacttgttttacattcaaaaaaaaaaaaaaaaaaaaaaaaaaaaaaaaaaaaaaaacaaaaaaaaaaaaaaaaaagagagggggggggaaaagaaaaaatattccacgaagggaggagccaaagaacaaagaccgagacccaggacatagtgtgtgaaaaaaggggcaccaccaggcgacgagacaaaaaaacaaagagcgaggccgccggaacaaacgaggcggagtgagcaaccggcaaccggagcacacatggggagccaaaccacaccgggggggcgaacgacgtggaccaaccacagcagaatacaacgaggggacacacactaagggtgaatgtggaaccaacgacatgggcgaaacaaggcacggaaaaccaattgga

SEQ ID NO: 373343 - DNA, 532 bp, Homo sapiens
agcgggcgaggggtggggctgcgggaggccctggagcgcggcggtgatggcggggccggtgaaggaccgcgaggccttccagaggctcaacttcctgtaccaggaccccgagaaccaggcgctggcgaggttttactgctacactgagaggaccattgcgaagcggctcgtcttgcggcgggatccctcggtgaagaggactctctgtcgaggctgctcttccctcctcgtcccgggcctcacctgcacccagcgccagagacgctgcaggggacagcgctggaccgtacagacctgcctaacatgccagcgcagccaacgcttcctcaatgatcccgggcatttactctggggagacaggcctgaggcccagctcgggagccaagcagattccaaaccactacaacccttgccaaacacagcccactccatttcagaccgccttcctgaggagaaaatgcagactcagggttccagtaaccagtgatggattcaccccatctcccaaataaagtttacttgttttacattc

SEQ ID NO: 373344 - DNA, 580 bp, Homo sapiens
agcgggcgaggggtggggctgcgggaggccctggagcgcggcggtgatggcggggccggtgaaggaccgcgaggccttccagaggctcaacttcctgtaccaggccgcccattgtgtccttgcccaggaccccgagaaccaggcgctggcgaggttttactgctacactgagaggaccattgcgaagcggctcgtcttgcggcgaccactatcctcctccgcccccagggatccctcggtgaagaggactctctgtcgaggctgctcttccctcctcgtcccgggcctcacctgcacccagcgccagagacgctgcaggggacagcgctggaccgtacagacctgcctaacatgccagcgcagccaacgcttcctcaatgatcccgggcatttactctggggagacaggcctgaggcccagctcgggagccaagcagattccaaaccactacaacccttgccaaacacagcccactccatttcagaccgccttcctgaggagaaaatgcagactcagggttccagtaaccagtgatggattcaccccatctcccaaataaagtttacttgttttacattc

SEQ ID NO: 373345 - DNA, 625 bp, Homo sapiens
agcgggcgaggggtggggctgcgggaggccctggagcgcggcggtgatggcggggccggtgaaggaccgcgaggccttccagaggctcaacttcctgtaccaggtgagtctgcgacaagggccccacggggacggtgctcggcgtcccagagtgactgctcccctcccgcaggccgcccattgtgtccttgcccaggaccccgagaaccaggcgctggcgaggttttactgctacactgagaggaccattgcgaagcggctcgtcttgcggcgggatccctcggtgaagaggactctctgtcgaggctgctcttccctcctcgtcccgggcctcacctgcacccagcgccagagacgctgcaggggacagcgctggaccgtacagacctgcctaacatgccagcgcagccaacgcttcctcaatgatcccgggcatttactctggggagacaggcctgaggcccagctcgggagccaagcagattccaaaccactacaacccttgccaaacacagcccactccatttcagaccgccttcctgaggagaaaatgcagactcagggttccagtaaccagtgatggattcaccccatctcccaaataaagtttacttgttttacattc

SEQ ID NO: 373346 - DNA, 1414 bp, Homo sapiens
agcgggcgaggggtggggctgcgggaggccctggagcgcggcggtgatggcggggccggtgaaggaccgcgaggccttccagaggctcaacttcctgtaccaggccgcccattgtgtccttgcccaggaccccgagaaccaggcgctggcgaggttttactgctacactgagaggaccattgcgaagcggctcgtcttgcggcgggatccctcggtgaagaggactctctgtcgaggctgctcttccctcctcgtcccgggcctcacctgcacccagcgccagagacgtgagtgctccaacggaggtggaagactgcggagcattgggggcgcggaggggggcggggtggggggcgggcactggaggccaacagcgcctttctcactgtagatggatgttgggtgtgggattcgcaggagtcttccttcttcgggtttggattaagttcctaacgccacttgcacaaactagggtttgggctcggctgttttttttttttttcttccagtgtgggcaataaataataacttttaagaggcaaccccacccatgcacaataatagatgttgttcggctttgtggaggacgattcccatcaccattcatttattaagcaaatacttattttctaaaatgtgtcaggtactgtgctagattcattattctcattgaaattacggtctgatgggacagactaagaaacaaaatggtgtagaaaaagattaactgggggagtagaatgctcacttactcatgccagtggtggcgaagtttatgataagcaaagggagtgagagatggaaattctaggcatgtgtgcagactctgagacaagagagcttgtggtgctgtcaaagaaatgagagttcaggaggctggagtttgaggtaggagggcaaaacatgagactggagggggaaacaggccagttcttgaagtcttgttagggagtttgaactttatcttaaagagttccaggaaatcgatggagcttatgccgaggcctgacaccatcaaatgtgcattcaaattgggggtgtggtgggggagcggggatacctactgaaaaacactggaggcaaaactggcagcaagagaccgttacttctaaacgtggacagtctttttcccatgttcaccctaggctgcaggggacagcgctggaccgtacagacctgcctaacatgccagcgcagccaacgcttcctcaatgatcccgggcatttactctggggagacaggcctgaggcccagctcgggagccaagcagattccaaaccactacaacccttgccaaacacagcccactccatttcagaccgccttcctgaggagaaaatgcagactcagggttccagtaaccagtgatggattcaccccatctcccaaataaagtttacttgttttacattc

SEQ ID NO: 373347 - DNA, 508 bp, Homo sapiens
agcgggcgaggggtggggctgcgggaggccctggagcgcggcggtgatggcggggccggtgaaggaccgcgaggccttccagaggctcaacttcctgtaccaggccgcccattgtgtccttgcccaggaccccgagaaccaggcgctggcgaggttttactgctacactgagaggaccattgcgaagcggctcgtcttgcggcgggatccctcggtgaagaggactctctgtcgaggctgctcttccctcctcgtcccgggcctcacctgcacccagcgccagagacgctgcaggggacagcgctggaccgtacagacctgcctaacatgccagcgcagccaacgcttcctcaatgatcccgggcatttactctggggagacaggcctgaggcccagctcgggagccaagcagaccgccttcctgaggagaaaatgcagactcagggttccagtaaccagtgatggattcaccccatctcccaaataaagtttacttgttttacattc

SEQ ID NO: 373348 - DNA, 523 bp, Homo sapiens
  misc_feature (7)..(8): n is a, c, g, or t
gcggccnnctactactactaaattcgcggccgcgtcgacttcgcggtagctgggaccgccgttcagtcgccaatatgcagctctttgtccgcgcccaggagctacacaccttcgaggtgaccggccaggaaacggtcgcccagatcaaggctcatgtagcctcactggagggcattgccccggaagatcaagtcgtgctcctggcaggcgcgcccctggaggatgaggccactctgggccagtgcggggtggaggccctgactaccctggaagtagcaggccgcatgcttggaggtaaagtccatggttccctggcccgtgctggaaaagtgagaggtcagactcctaaggtggccaaacaggagaagaagaagaagaagacaggtcgggctaagcggcggatgcagtacaaccggcgctttgtcaacgttgtgcccacctttggcaagaagaagggccccaatgccaactcttaagtcttttgtaattctggctttctctaataaaaaagccacttagttca

SEQ ID NO: 373349 - DNA, 885 bp, Homo sapiens
  misc_feature (578)..(578): n is a, c, g, or t
  misc_feature (580)..(580): n is a, c, g, or t
  misc_feature (596)..(596): n is a, c, g, or t
  misc_feature (676)..(676): n is a, c, g, or t
  misc_feature (681)..(681): n is a, c, g, or t
  misc_feature (685)..(685): n is a, c, g, or t
  misc_feature (704)..(704): n is a, c, g, or t
ccacgcgtcgcggacgcgtgggtcgacccacgcgtcgcttcgcggtagctgggaccgccgttcagtcgccaatatgcagctctttgtccgcgcccaggagctacacaccttcgaggtgaccggccaggaaacggtcgcccagatcaaggctcatgtagcctcactggagggcattgccccggaagatcaagtcgtgctcctggcaggcgcgcccctggaggatgaggccactctgggccagtgcggggtggaggccctgactaccctggaagtagcaggccgcatgcttggaggtaaagtccatggttccctggcccgtgctggaaaagtgagaggtcagactcctaaggtggccaaacaggagaagaagaagaagaagacaggtcgggctaagcggcggatgcagtacaaccggcgctttgtcaacgttgtgcccacctttggcaagaagaagggccccaatgccaactcttaagtcttttgtaattctggctttctctaataaaaaagccacttagttcagtcaaaaaaaaaaaaaaaaaaaaaaaaaacaaaaaaaaaaaaaaaaacccgggggntntttttggggggggggnaaaaggggtttgaaggggccggggcttttttttccggccccccttttttttgcaggggggaaatcggggggccccccaanggggngcgncaaaaaatcggcgaagagngcagttgccgcggttatattctccgtgctaaaaaaggagtgagacacgacgagagcgagcagcggaggacaacccactactagacacaaagtgtggctggaaaaccaataacacaagagaaaagcaaatcagagagacaaaagagacgcaccgagacaagagaacaagacacaaccaaaag

SEQ ID NO: 373350 - DNA, 539 bp, Homo sapiens
  misc_feature (2)..(2): n is a, c, g, or t
  misc_feature (19)..(19): n is a, c, g, or t
tnccgaattcggcagaggnacgcgccctcgcttcttcctctttctcgactccatcttcgcggtagctgggaccgccgttcagtcgccaatatgcagctctttgtccgcgcccaggagctacacaccttcgaggtgaccggccaggaaacggtcgcccagatcaaggctcatgtagcctcactggagggcattgccccggaagatcaagtcgtgctcctggcaggcgcgcccctggaggatgaggccactctgggccagtgcggggtggaggccctgactaccctggaagtagcaggccgcatgcttggaggtaaagtccatggttccctggcccgtgctggaaaagtgagaggtcagactcctaaggtggccaaacaggagaagaagaagaagaagacaggtcgggctaagcggcggatgcagtacaaccggcgctttgtcaacgttgtgcccacctttggcaagaagaagggccccaatgccaactcttaagtcttttgtaattctggctttctctaataaaaaagccacttagttca

SEQ ID NO: 373351 - DNA, 522 bp, Homo sapiens
ccacgcgtcgcggacgcgtgggtcgacccacgcgtcgcttcgcggtagctgggaccgccgttcagtcgccaatatgcagctctttgtccgcgcccaggagctacacaccttcgaggtgaccggccaggaaacggtcgcccagatcaaggctcatgtagcctcactggagggcattgccccggaagatcaagtcgtgctcctggcaggcgcgcccctggaggatgaggccactctgggccagtgcggggtggaggccctgactaccctggaagtagcaggccgcatgcttggaggtaaagtccatggttccctggcccgtgctggaaaagtgagaggtcagactcctaaggtggccaaacaggagaagaagaagaagaagacaggtcgggctaagcggcggatgcagtacaaccggcgctttgtcaacgttgtgcccacctttggcaagaagaagggccccaatgccaactcttaagtcttttgtaattctggctttctctaataaaaaagccacttagttca

SEQ ID NO: 373352 - DNA, 994 bp, Homo sapiens
  misc_feature (622)..(624): n is a, c, g, or t
ccccaccccccaccacaccttccggctaggtacgaggactcggttaatcgccgagggagcgcctcgcttcttcctctttctcgactccatcttcgcggtagctgggaccgccgttcagtcgccaatatgcagctctttgtccgcgcccaggagctacacaccttcgaggtgaccggccaggaaacggtcgcccagatcaaggctcatgtagcctcactggagggcattgccccggaagatcaagtcgtgctcctggcaggcgcgcccctggaggatgaggccactctgggccagtgcggggtggaggccctgactaccctggaagtagcaggccgcatgcttggaggtaaagtccatggttccctggcccgtgctggaaaagtgagaggtcagactcctaaggtggccaaacaggagaagaagaagaagaagacaggtcgggctaagcggcggatgcagtacaaccggcgctttgtcaacgttgtgcccacctttggcaagaagaagggccccaatgccaactcttaagtcttttgtaattctggctttctctaataaaaaagccacttagttcaaaaaaaaaacaacaaaaaacacaaaaaaaaaaacaaaaaaaaaaaannngggggggggccaaaaaaaataccccggggggggcccacatttgggcagtacacccgggtttttttgtacgcagggggggccccataatggggagggcgctataaaaagaagcgaggaacgacgcggggccggtttaacacagccgtgtccgcgcggcgtggcacagcactccgtctcagctggggcactctgggggaaaggcgacacccccataccgccgggggggcgccccctgtgggcaccccacaccacacaagaattgaacgcccgagggcagacaatacaccttcccgtgtgctccggttgggcacccccaccgcatatgtcgtggccgacaagaaatcgccccgggacttgattgaaaataacg

SEQ ID NO: 373353 - DNA, 651 bp, Homo sapiens
atcccccgggctgcaggaattggcacgagcttcctctttctcgactccatcttcgcggtagctgggaccgccgttcagtcgccaatatgcagctctttgtccgcgcccaggagctacacaccttcgaggtgaccggccaggaaacggtcgcccagatcaaggctcatgtagcctcactggagggcattgccccggaagatcaagtcgtgctcctggcaggcgcgcccctggaggatgaggccactctgggccagtgcggggtggaggccctgactaccctggaagtagcaggccgcatgcttggaggtaaagtccatggttccctggcccgtgctggaaaagtgagaggtcagactcctaaggtggccaaacaggagaagaagaagaagaagacaggtcgggctaagcggcggatgcagtacaaccggcgctttgtcaacgttgtgcccacctttggcaagaagaagggccccaatgccaactcttaagtcttttgtaattctggctttctctaataaaaaagccacttagttcaaaaaaaaaacaacaaaaaacacaaaaaaaaaaactcgaggggggcccggtcccaatttggcctatagtgaagcgtattacatttacctgcccgtggtttacaacgtcgtgactggg

SEQ ID NO: 373354 - DNA, 741 bp, Homo sapiens
catcatctttagacttaaggaattaacaagggtcagggagaccccacggtctgtactgacgcgccctcgcttcttcctctttctcgactccatcttcgcggtagctgggaccgccgttcagtcgccaatatgcagctctttgtccgcgcccaggagctacacaccttcgaggtgaccggccaggaaacggtcgcccagatcaaggctcatgtagcctcactggagggcattgccccggaagatcaagtcgtgctcctggcaggcgcgcccctggaggatgaggccactctgggccagtgcggggtggaggccctgactaccctggaagtagcaggccgcatgcttggaggtaaagtccatggttccctggcccgtgctggaaaagtgagaggtcagactcctaaggtggccaaacaggagaagaagaagaagaagacaggtcgggctaagcggcggatgcagtacaaccggcgctttgtcaacgttgtgcccacctttggcaagaagaagggccccaatgccaactcttaagtcttttgtaattctggctttctctaataaaaaagccacttagttcactcaacatacatctccactccttaccgacccgcaccaaccatgtcgggcccgcttggtccacccgaattttgatccggccagtcttatgcatcgcggccgcaatccggtccctttcggccaatcgcgcttttaggcggtcattctacttcactgcccctctcg

SEQ ID NO: 373355 - DNA, 767 bp, Homo sapiens
  misc_feature (2)..(2): n is a, c, g, or t
  misc_feature (19)..(19): n is a, c, g, or t
tnccgaattcggcagaggnacgcgccctcgcttcttcctctttctcgactccatcttcgcggtagctgggaccgccgttcagtcgccaatatgcagctctttgtccgcgcccaggagctacacaccttcgaggtgaccggccaggaaacggtcgcccagatcaaggctcatgtagcctcactggagggcattgccccggaagatcaagtcgtgctcctggcaggcgcgcccctggaggatgaggccactctgggccagtgcggggtggaggccctgactaccctggaagtagcaggccgcatgcttggaggtaaagtccatggttccctggcccgtgctggaaaagtgagaggtcagactcctaaggtggccaaacaggagaagaagaagaagaagacaggtcgggctaagcggcggatgcagtacaaccggcgctttgtcaacgttgtgcccacctttggcaagaagaagggccccaatgccaactcttaagtcttttgtaattctggctttctctaataaaaaagccacttagttcagtcaaaaaaaaaaaggggctctctcaccagggaacgtgaccttgagttccggaattcctggcggttccaaggggggcgaatcggggcagcctggattggctggagtggtcatctcaaaccccaatctatcctggcccctggtggcatgtccggaatgattggcaggtccttcctaaacagtccggcctaattcccccgggtttggcacggaaaatccctggtggctga

SEQ ID NO: 373356 - DNA, 325 bp, Homo sapiens
gggctgcaggaattcggcacgaggatgaggccactctgggccagtgcggggtggaggccctgactaccctggaagtagcaggccgcatgcttggaggtaaagtccatggttccctggcccgtgctggaaaagtgagaggtcagactcctaaggtggccaaacaggagaagaagaagaagaagacaggtcgggctaagcggcggatgcagtacaaccggcgctttgtcaacgttgtgcccacctttggcaagaagaagggccccaatgccaactcttaagtcttttgtaattctggctttctctaataaaaaagccacttagttca

SEQ ID NO: 373357 - DNA, 286 bp, Homo sapiens
gcggccgcctactactactactactgctcgaattcaagcttctaacgatgtacggggataaagtccatggttccctggcccgtgctggaaaagtgagaggtcagactcctaaggtggccaaacaggagaagaagaagaagaagacaggtcgggctaagcggcggatgcagtacaaccggcgctttgtcaacgttgtgcccacctttggcaagaagaagggccccaatgccaactcttaagtcttttgtaattctggctttctctaataaaaaagccacttagttca

SEQ ID NO: 373358 - DNA, 211 bp, Homo sapiens
  misc_feature (22)..(22): n is a, c, g, or t
  misc_feature (31)..(31): n is a, c, g, or t
  misc_feature (33)..(33): n is a, c, g, or t
  misc_feature (36)..(37): n is a, c, g, or t
aattcgcggccgcgtcgacacngcgcgatangncgnnagaagccaaacaggagaagaagaagaagaagacaggtcgggctaagcggcggatgcagtacaaccggcgctttgtcaacgttgtgcccacctttggcaagaagaagggccccaatgccaactcttaagtcttttgtaattctggctttctctaataaaaaagccacttagttca

SEQ ID NO: 373359 - DNA, 203 bp, Homo sapiens
  misc_feature (46)..(46): n is a, c, g, or t
tcggttgcccaccaccgaaagaaaagggcctcggtgaccaacaggnagactagagaagaaacaggtcgggctaagcggcggatgcagtacaaccggcgctttgtcaacgttgtgcccacctttggcaagaagaagggccccaatgccaactcttaagtcttttgtaattctggctttctctaataaaaaagccacttagttca

SEQ ID NO: 373360 - DNA, 931 bp, Homo sapiens
  misc_feature (679)..(679): n is a, c, g, or t
accgcgcggtcgctcagcagacgaggtgacacgcagcccacggtctgtactgacgcgccctcgcttcttcctctttctcgactccatcttcgcggtagctgggaccgccgttcagtcgccaatatgcagctctttgtccgcgcccaggagctacacaccttcgaggtgaccggccaggaaacggtcgcccagatcaaggctcatgtagcctcactggagggcattgccccggaagatcaagtcgtgctcctggcaggcgcgcccctggaggatgaggccactctgggccagtgcggggtggaggccctgactaccctggaagtagcaggccgcatgcttggaggtaaagtccatggttccctggcccgtgctggaaaagtgagaggtcagactcctaaggtggccaaacaggagaagaagaagaagaagacaggtcgggctaagcggcggatgcagtacaaccggcgctttgtcaacgttgtgcccacctttggcaagaagaagggccccaatgccaactcttaagtcttttgtaattctggctttctctaataaaaaagccacttagttcagtcaaaaaaaaaaaaaaaaaaaaaaaaaacaaaaaaaaaaaaaaaaaaaaaaaaaacaaaaaaaaacaaaaaaaaaaaaaagaaaaaaaaaaaaaaaaaaaaaaaanagggggggggggccctaaaaaatatccccgcggggggccccagagctaagcgcgcgccaccccacgatgtgtggtacgaaagcggggctccccctaaggaggaggcgcgccattaaaaaaacgagagcagccggcggccgcgatgataaaacacacgcgacggtagcgcggacaacaatgcgctgccgaggagaacactggggagagaggcaccacaccggcggggaggcaacacagctgggacacaccaca

SEQ ID NO: 373361 - DNA, 883 bp, Homo sapiens
  misc_feature (631)..(631): n is a, c, g, or t
accgcgcggtcgctcagcagacgaggtgacacgcagcccacggtctgtactgacgcgccctcgcttcttcctctttctcgactccatcttcgcggtagctgggaccgccgttcagtcgccaatatgcagctctttgtccgcgcccaggagctacacaccttcgaggtgaccggccaggaaacggtcgcccagatcaaggctcatgtagcctcactggagggcattgccccggaagatcaagtcgtgctcctggcaggcgcgcccctggaggatgaggccactctgggccagtgcggggtggaggccctgactaccctggaagtagcaggccgcatgcttggaggtaaagtccatggttccctggcccgtgctggaaaagtgagaggtcagactcctaaggtggccaaacaggagaagaagaagaagaagacaggtcgggctaagcggcggatgcagtacaaccggcgctttgtcaacgttgtgcccacctttggcaagaagaagggccccaatgccaactcttaagtcttttgtaattctggctttctctaataaaaaagccacttagttcagtcaaaaaaaaaaaaaaaaaaaaaaaaaacaaaaaaaaaaaaaaaaaaaaaaaaaaaanagggggggggggccctaaaaaatatccccgcggggggccccagagctaagcgcgcgccaccccacgatgtgtggtacgaaagcggggctccccctaaggaggaggcgcgccattaaaaaaacgagagcagccggcggccgcgatgataaaacacacgcgacggtagcgcggacaacaatgcgctgccgaggagaacactggggagagaggcaccacaccggcggggaggcaacacagctgggacacaccaca

SEQ ID NO: 373362 - DNA, 935 bp, Homo sapiens
  misc_feature (628)..(628): n is a, c, g, or t
  misc_feature (630)..(630): n is a, c, g, or t
  misc_feature (646)..(646): n is a, c, g, or t
  misc_feature (726)..(726): n is a, c, g, or t
  misc_feature (731)..(731): n is a, c, g, or t
  misc_feature (735)..(735): n is a, c, g, or t
  misc_feature (754)..(754): n is a, c, g, or t
accgcgcggtcgctcagcagacgaggtgacacgcagcccacggtctgtactgacgcgccctcgcttcttcctctttctcgactccatcttcgcggtagctgggaccgccgttcagtcgccaatatgcagctctttgtccgcgcccaggagctacacaccttcgaggtgaccggccaggaaacggtcgcccagatcaaggctcatgtagcctcactggagggcattgccccggaagatcaagtcgtgctcctggcaggcgcgcccctggaggatgaggccactctgggccagtgcggggtggaggccctgactaccctggaagtagcaggccgcatgcttggaggtaaagtccatggttccctggcccgtgctggaaaagtgagaggtcagactcctaaggtggccaaacaggagaagaagaagaagaagacaggtcgggctaagcggcggatgcagtacaaccggcgctttgtcaacgttgtgcccacctttggcaagaagaagggccccaatgccaactcttaagtcttttgtaattctggctttctctaataaaaaagccacttagttcagtcaaaaaaaaaaaaaaaaaaaaaaaaaacaaaaaaaaaaaaaaaaacccgggggntntttttggggggggggnaaaaggggtttgaaggggccggggcttttttttccggccccccttttttttgcaggggggaaatcggggggccccccaanggggngcgncaaaaaatcggcgaagagngcagttgccgcggttatattctccgtgctaaaaaaggagtgagacacgacgagagcgagcagcggaggacaacccactactagacacaaagtgtggctggaaaaccaataacacaagagaaaagcaaatcagagagacaaaagagacgcaccgagacaagagaacaagacacaaccaaaag

SEQ ID NO: 373363 - DNA, 894 bp, Homo sapiens
  misc_feature (642)..(642): n is a, c, g, or t
atcccccgggctgcaggaattggcacgagcttcctctttctcgactccatcttcgcggtagctgggaccgccgttcagtcgccaatatgcagctctttgtccgcgcccaggagctacacaccttcgaggtgaccggccaggaaacggtcgcccagatcaaggctcatgtagcctcactggagggcattgccccggaagatcaagtcgtgctcctggcaggcgcgcccctggaggatgaggccactctgggccagtgcggggtggaggccctgactaccctggaagtagcaggccgcatgcttggaggtaaagtccatggttccctggcccgtgctggaaaagtgagaggtcagactcctaaggtggccaaacaggagaagaagaagaagaagacaggtcgggctaagcggcggatgcagtacaaccggcgctttgtcaacgttgtgcccacctttggcaagaagaagggccccaatgccaactcttaagtcttttgtaattctggctttctctaataaaaaagccacttagttcagtcaaaaaaaaaaaaaaaaaaaaaaaaaacaaaaaaaaaaaaaaaaaaaaaaaaaacaaaaaaaaacaaaaaaaaaaaaaagaaaaaaaaaaaaaaaaaaaaaaaanagggggggggggccctaaaaaatatccccgcggggggccccagagctaagcgcgcgccaccccacgatgtgtggtacgaaagcggggctccccctaaggaggaggcgcgccattaaaaaaacgagagcagccggcggccgcgatgataaaacacacgcgacggtagcgcggacaacaatgcgctgccgaggagaacactggggagagaggcaccacaccggcggggaggcaacacagctgggacacaccaca

SEQ ID NO: 373364 - DNA, 963 bp, Homo sapiens
catcatctttagacttaaggaattaacaagggtcagggagaccccacggtctgtactgacgcgccctcgcttcttcctctttctcgactccatcttcgcggtagctgggaccgccgttcagtcgccaatatgcagctctttgtccgcgcccaggagctacacaccttcgaggtgaccggccaggaaacggtcgcccagatcaaggctcatgtagcctcactggagggcattgccccggaagatcaagtcgtgctcctggcaggcgcgcccctggaggatgaggccactctgggccagtgcggggtggaggccctgactaccctggaagtagcaggccgcatgcttggaggtaaagtccatggttccctggcccgtgctggaaaagtgagaggtcagactcctaaggtggccaaacaggagaagaagaagaagaagacaggtcgggctaagcggcggatgcagtacaaccggcgctttgtcaacgttgtgcccacctttggcaagaagaagggccccaatgccaactcttaagtcttttgtaattctggctttctctaataaaaaagccacttagttcagtcaaaaaaaaaaaaaaaaaaaaaaaaaacaaaaaaaaaaaaaaaaaggggggggcggcccaaaaagtttcccccgggggggcccaggtttccgggttccccggttttttttgttaacagagggggtgcccctatattaggaggagcgccggtattaataaggcgtaagggcacgggcgccggccggttttacaacaacgtttcggtcgatgtgtggcacagaccgtggctaacgcgtcgggcactcttgtgggggaaggggacccttcaactttctgggggcgtgtggaccattatttgggggcgcaatctaccccttacgggaagtttttaaacgggccttaagcgggaaaattttacgccttttccaccgtggtagcagcgg

SEQ ID NO: 373365 - DNA, 925 bp, Homo sapiens
  misc_feature (9)..(9): n is a, c, g, or t
gcgcccagngcgtctgtactgacgcgccctcgttcttcctctttctcgactccatcttcgcggtagctgggaccgccgttcagtcgccaatatgcagctctttgtccgcgcccaggagctacacaccttcgaggtgaccggccaggaaacggtcgcccagatcaaggctcatgtagcctcactggagggcattgccccggaagatcaagtcgtgctcctggcaggcgcgcccctggaggatgaggccactctgggccagtgcggggtggaggccctgactaccctggaagtagcaggccgcatgcttggaggtaaagtccatggttccctggcccgtgctggaaaagtgagaggtcagactcctaaggtggccaaacaggagaagaagaagaagaagacaggtcgggctaagcggcggatgcagtacaaccggcgctttgtcaacgttgtgcccacctttggcaagaagaagggccccaatgccaactcttaagtcttttgtaattctggctttctctaataaaaaagccacttagttcagtcaaaaaaaaaaaaaaaaaaaaaaaaaacaaaaaaaaaaaaaaaaaggggggggcggcccaaaaagtttcccccgggggggcccaggtttccgggttccccggttttttttgttaacagagggggtgcccctatattaggaggagcgccggtattaataaggcgtaagggcacgggcgccggccggttttacaacaacgtttcggtcgatgtgtggcacagaccgtggctaacgcgtcgggcactcttgtgggggaaggggacccttcaactttctgggggcgtgtggaccattatttgggggcgcaatctaccccttacgggaagtttttaaacgggccttaagcgggaaaattttacgccttttccaccgtggtagcagcgg

SEQ ID NO: 373366 - DNA, 908 bp, Homo sapiens
  misc_feature (7)..(8): n is a, c, g, or t
gcggccnnctactactactaaattcgcggccgcgtcgacttcgcggtagctgggaccgccgttcagtcgccaatatgcagctctttgtccgcgcccaggagctacacaccttcgaggtgaccggccaggaaacggtcgcccagatcaaggctcatgtagcctcactggagggcattgccccggaagatcaagtcgtgctcctggcaggcgcgcccctggaggatgaggccactctgggccagtgcggggtggaggccctgactaccctggaagtagcaggccgcatgcttggaggtaaagtccatggttccctggcccgtgctggaaaagtgagaggtcagactcctaaggtggccaaacaggagaagaagaagaagaagacaggtcgggctaagcggcggatgcagtacaaccggcgctttgtcaacgttgtgcccacctttggcaagaagaagggccccaatgccaactcttaagtcttttgtaattctggctttctctaataaaaaagccacttagttcagtcaaaaaaaaaaaaaaaaaaaaaaaaaacaaaaaaaaaaaaaaaaaggggggggcggcccaaaaagtttcccccgggggggcccaggtttccgggttccccggttttttttgttaacagagggggtgcccctatattaggaggagcgccggtattaataaggcgtaagggcacgggcgccggccggttttacaacaacgtttcggtcgatgtgtggcacagaccgtggctaacgcgtcgggcactcttgtgggggaaggggacccttcaactttctgggggcgtgtggaccattatttgggggcgcaatctaccccttacgggaagtttttaaacgggccttaagcgggaaaattttacgccttttccaccgtggtagcagcgg

SEQ ID NO: 373367 - DNA, 1149 bp, Homo sapiens
  misc_feature (897)..(897): n is a, c, g, or t
ccacgcgtcgcggacgcgtgggtcgacccacgcgtcgcttcgcggtagctgggaccgccgttcaggtaagaatggggccttggctggatccgaagggcttgtagcaggttggctgcggggtcagaaggcgcggggggaaccgaagaacggggcctgctccgtggccctgctccagtccctatccgaactccttgggaggcctggccttccccacgtgagccgccgcgaccaccatcccgtcgcgatcgtttctggaccgctttccactcccaaatctcctttatcccagagcatttcttggcttctcttacaagccgtcttttctttactcagtcgccaatatgcagctctttgtccgcgcccaggagctacacaccttcgaggtgaccggccaggaaacggtcgcccagatcaaggctcatgtagcctcactggagggcattgccccggaagatcaagtcgtgctcctggcaggcgcgcccctggaggatgaggccactctgggccagtgcggggtggaggccctgactaccctggaagtagcaggccgcatgcttggaggtaaagtccatggttccctggcccgtgctggaaaagtgagaggtcagactcctaaggtggccaaacaggagaagaagaagaagaagacaggtcgggctaagcggcggatgcagtacaaccggcgctttgtcaacgttgtgcccacctttggcaagaagaagggccccaatgccaactcttaagtcttttgtaattctggctttctctaataaaaaagccacttagttcagtcaaaaaaaaaaaaaaaaaaaaaaaaaacaaaaaaaaaaaaaaaaaaaaaaaaaacaaaaaaaaacaaaaaaaaaaaaaagaaaaaaaaaaaaaaaaaaaaaaaanagggggggggggccctaaaaaatatccccgcggggggccccagagctaagcgcgcgccaccccacgatgtgtggtacgaaagcggggctccccctaaggaggaggcgcgccattaaaaaaacgagagcagccggcggccgcgatgataaaacacacgcgacggtagcgcggacaacaatgcgctgccgaggagaacactggggagagaggcaccacaccggcggggaggcaacacagctgggacacaccaca

SEQ ID NO: 373368 - DNA, 858 bp, Homo sapiens
  misc_feature (7)..(8): n is a, c, g, or t
  misc_feature (606)..(606): n is a, c, g, or t
gcggccnnctactactactaaattcgcggccgcgtcgatcagtcgccaatatgcagctctttgtccgcgcccaggagctacacaccttcgaggtgaccggccaggaaacggtcgcccagatcaaggctcatgtagcctcactggagggcattgccccggaagatcaagtcgtgctcctggcaggcgcgcccctggaggatgaggccactctgggccagtgcggggtggaggccctgactaccctggaagtagcaggccgcatgcttggaggtaaagtccatggttccctggcccgtgctggaaaagtgagaggtcagactcctaaggtggccaaacaggagaagaagaagaagaagacaggtcgggctaagcggcggatgcagtacaaccggcgctttgtcaacgttgtgcccacctttggcaagaagaagggccccaatgccaactcttaagtcttttgtaattctggctttctctaataaaaaagccacttagttcagtcaaaaaaaaaaaaaaaaaaaaaaaaaacaaaaaaaaaaaaaaaaaaaaaaaaaacaaaaaaaaacaaaaaaaaaaaaaagaaaaaaaaaaaaaaaaaaaaaaaanagggggggggggccctaaaaaatatccccgcggggggccccagagctaagcgcgcgccaccccacgatgtgtggtacgaaagcggggctccccctaaggaggaggcgcgccattaaaaaaacgagagcagccggcggccgcgatgataaaacacacgcgacggtagcgcggacaacaatgcgctgccgaggagaacactggggagagaggcaccacaccggcggggaggcaacacagctgggacacaccaca

SEQ ID NO: 373369 - DNA, 934 bp, Homo sapiens
accgcgcggtcgctcagcagacgaggtgacacgcagcccacggtctgtactgacgcgccctcgcttcttcctctttctcgactccatcttcgcggtagctgggaccgccgttcagtcgccaatatgcagctctttgtccgcgcccaggagctacacaccttcgaggtgaccggccaggaaacggtcgcccagatcaaggctcatgtagcctcactggagggcattgccccggaagatcaagtcgtgctcctggcaggcgcgcccctggaggatgaggccactctgggccagtgcggggtggaggccctgactaccctggaagtagcaggccgcatgcttggaggtaaagtccatggttccctggcccgtgctggaaaagtgagaggtcagactcctaaggtggccaaacaggagaagaagaagaagaagacaggtcgggctaagcggcggatgcagtacaaccggcgctttgtcaacgttgtgcccacctttggcaagaagaagggccccaatgccaactcttaagtcttttgtaattctggctttctctaataaaaaagccacttagttcaaaaaaaaaagagaagaaaagaagagaaaggagaaaaaaaacattgcggggggcctttttagcgggggggggaaaacagcggctagaaagaaaaagggcgcccatcgggcagaagaagcgtggccccacggagcccgaagagtgctctctgtaaacaaaacggcgggctacatctgcggaggagatccgcccaccaataggagaagaggcgtgaatgaaaaatggagaggaaaacgacggaggatcacaaccgggctaaaaggaacgcggcaaaacacgacgggacgaagaagcgggaagagacgaaggagaagacaagagagggaacgcacaagggacaacaccaccgtgagagcgaaccac

SEQ ID NO: 373370 - DNA, 819 bp, Homo sapiens
accgcgcggtcgctcagcagacgaggtgacacgcagcccacggtctgtactgacgcgccctcgcttcttcctctttctcgactccatcttcgcggtagctgggaccgccgttcagtcgccaatatgcagctctttgtccgcgcccaggagctacacaccttcgaggtgaccggccaggaaacggtcgcccagatcaaggctcatgtagcctcactggagggcattgccccggaagatcaagtcgtgctcctggcaggcgcgcccctggaggatgaggccactctgggccagtgcggggtggaggccctgactaccctggaagtagcaggccgcatgcttggaggtaaagtccatggttccctggcccgtgctggaaaagtgagaggtcagactcctaaggtggccaaacaggagaagaagaagaagaagacaggtcgggctaagcggcggatgcagtacaaccggcgctttgtcaacgttgtgcccacctttggcaagaagaagggccccaatgccaactcttaagtcttttgtaattctggctttctctaataaaaaagccacttagttcaaaaaaaaaacacagcaacaaaaccagcaaacaccgtggtcggccgcccttgagcccccgcgaaaagttaggcagaaccactcgtggggggcgggggcccaaagggtagcaacccgggtcaaccggatccaaggagacgcggccagactagcgcgggcagctcaccataaaacgccggcgcaccgagcgtcgcaccacccagggagtcgagtcacacggaccatcccggaacacagcacgaataatcc

SEQ ID NO: 373371 - DNA, 924 bp, Homo sapiens
  misc_feature (672)..(672): n is a, c, g, or t
ttactgaactaagtggcttttttattagagaaagccagaattacaaaagacttaagagttggcattggggcccttcttcttgccaaaggtgggcacaacgttgacaaagcgccggttgtactgcatccgccgcttagccggagctacacaccttcgaggtgaccggccaggaaacggtcgcccagatcaaggctcatgtagcctcactggagggcattgccccggaagatcaagtcgtgctcctggcaggcgcgcccctggaggatgaggccactctgggccagtgcggggtggaggccctgactaccctggaagtagcaggccgcatgcttggaggtaaagtccatggttccctggcccgtgctggaaaagtgagaggtcagactcctaaggtggccaaacaggagaagaagaagaagaagacaggtcgggctaagcggcggatgcagtacaaccggcgctttgtcaacgttgtgcccacctttggcaagaagaagggccccaatgccaactcttaagtcttttgtaattctggctttctctaataaaaaagccacttagttcagtcaaaaaaaaaaaaaaaaaaaaaaaaaacaaaaaaaaaaaaaaaaaaaaaaaaaacaaaaaaaaacaaaaaaaaaaaaaagaaaaaaaaaaaaaaaaaaaaaaaanagggggggggggccctaaaaaatatccccgcggggggccccagagctaagcgcgcgccaccccacgatgtgtggtacgaaagcggggctccccctaaggaggaggcgcgccattaaaaaaacgagagcagccggcggccgcgatgataaaacacacgcgacggtagcgcggacaacaatgcgctgccgaggagaacactggggagagaggcaccacaccggcggggaggcaacacagctgggacacaccaca

SEQ ID NO: 373372 - DNA, 1512 bp, Homo sapiens
accgcgcggtcgctcagcagacgaggtgacacgcagcccacggtctgtactgacgcgccctcgcttcttcctctttctcgactccatcttcgcggtagctgggaccgccgttcagtcgccaatatgcagctctttgtccgcgcccaggagctacacaccttcgaggtgaccggccaggaaacggtcgcccagatcaaggctcatgtagcctcactggagggcattgccccggaagatcaagtcgtgctcctggcaggcgcgcccctggaggatgaggccactctgggccagtgcggggtggaggccctgactaccctggaagtagcaggccgcatgcttggaggtaaagtccatggttccctggcccgtgctggaaaagtgagaggtcagactcctaaggtgagtgagagtattagtggtcatggtgttaggactttttttcctttcacagctaaaccaagtccctgggctcttactcggtttgccttctccctccctggagatgagcctgagggaagggatgctaggtgtggaagacaggaaccagggcctgattaaccttcccttctccaggtggccaaacaggagaagaagaagaagacgacaggaagggctaagcggcggatgcagtacaaccggcgctttgtcaacgttgtgcccacctttggcaagaagaagggccccaatgccaactcttaagtcttttgtaattctggctttctctaataaaaaagccacttagttcagtcaaaaaaaaaaaaaaaaaaaaaaaaaacaaaaaaaaaaaaaaaaaaaaaaaaaacaaaaaaaaacaaaaaaaaaaaaaagaaaaaaaaaaaaagagggggcgcggcgccgccactaattctactccctccatgggggcgcccccgcttctcgctcccccacaccttttctcggccaaagggggggcgcccccactacagagggggcgcgctaacattcacgcgacacgccgacaccgcggggcgccgccacgataacaacacacacgctctgaggaacggagaagaaaacagccgcgcgacgagggagccacactactgggagaaagaaaacagcccaacactcccctgacgcggggagagcaggaaccaacactagcggggcggcacacaactctcttcctcacctagctagcagatcttttattaagtcgtcacttctagctggggcgtgaacagtaaatacctcacctctccccgtgcggacgtattataacacggagcgctcgaccacacaccacccgccactgcactcgcatctcctccgcgccactcacggcctcctacacacacatccttcgttactcgtctacaccactagacggcgcttgcgtctatctcgtacctccctccactcaacacaccaacaactcctatttccaactcccagcaaaccgcgcgccggtctcctttcacttatctagaacaacaacacctaccccccaccctctacccgactcagaacaccgcctcacaccccgccgta

SEQ ID NO: 373373 - DNA, 1975 bp, Homo sapiens
accgcgcggtcgctcagcagacgaggtgacacgcagcccacggtctgtactgacgcgccctcgcttcttcctctttctcgactccatcttcgcggtagctgggaccgccgttcagtcgccaatatgcagctctttgtccgcgcccaggagctacacaccttcgaggtgaccggccaggaaacggtcgcccagatcaaggctcatgtagcctcactggagggcattgccccggaagatcaagtcgtgctcctggcaggcgcgcccctggaggatgaggccactctgggccagtgcggggtggaggccctgactaccctggaagtagcaggccgcatgcttggaggtgagtgagagaggaatgttctttgaagtaccggtaagcgtctagtgagtgtggggtgcatagtcctgacagctgagtgtcacacctatggtaatagagtacttctcactgtcttcagttcagagtgattcttcctgtttacatccctcatgttgaacacagacgtccatgggagactgagccagagtgtagttgtatttcagtcacatcacgagatcctagtctggttatcagcttccacactaaaattaggtcagaccagggcccccaaagtgctctataaaattagaagctggaagatcctgaaatgaaacttaagatttcaaggtcaaatatctgcaactttgttctcattacctattgggcgcagcttctctttaaaggcttgaattgagaaaagaggggttctgctgggtggcaccttcttgctcttacctgctggtgccttcctttcccactacaggtaaagtccatggttccctggcccgtgctggaaaagtgagaggtcagactcctaaggtgagtgagagtattagtggtcatggtgttaggactttttttcctttcacagctaaaccaagtccctgggctcttactcggtttgccttctccctccctggagatgagcctgagggaagggatgctaggtgtggaagacaggaaccagggcctgattaaccttcccttctccaggtggccaaacaggagaagaagaagaagacgacaggaagggctaagcggcggatgcagtacaaccggcgctttgtcaacgttgtgcccacctttggcaagaagaagggccccaatgccaactcttaagtcttttgtaattctggctttctctaataaaaaagccacttagttcagtcaaaaaaaaaaaaaaaaaaaaaaaaaacaaaaaaaaaaaaaaaaaaaaaaaaaacaaaaaaaaacaaaaaaaaaaaaaagaaaaaaaaaaaaagagggggcgcggcgccgccactaattctactccctccatgggggcgcccccgcttctcgctcccccacaccttttctcggccaaagggggggcgcccccactacagagggggcgcgctaacattcacgcgacacgccgacaccgcggggcgccgccacgataacaacacacacgctctgaggaacggagaagaaaacagccgcgcgacgagggagccacactactgggagaaagaaaacagcccaacactcccctgacgcggggagagcaggaaccaacactagcggggcggcacacaactctcttcctcacctagctagcagatcttttattaagtcgtcacttctagctggggcgtgaacagtaaatacctcacctctccccgtgcggacgtattataacacggagcgctcgaccacacaccacccgccactgcactcgcatctcctccgcgccactcacggcctcctacacacacatccttcgttactcgtctacaccactagacggcgcttgcgtctatctcgtacctccctccactcaacacaccaacaactcctatttccaactcccagcaaaccgcgcgccggtctcctttcacttatctagaacaacaacacctaccccccaccctctacccgactcagaacaccgcctcacaccccgccgta

SEQ ID NO: 373374 - DNA, 510 bp, Homo sapiens
accgcgcggtcgctcagcagacgaggtgacacgcagcccacggtctgtactgacgcgccctcgcttcttcctctttctcgactccatcttcgcggtagctgggaccgccgttcagtcgccaatatgcagctctttgtccgcgcccaggagctacacaccttcgaggtgaccggccaggaaacggtcgcccagatcaaggctcatgtagcctcactggagggcattgccccggaagatcaagtcgtgctcctggcaggcgcgcccctggaggatgaggccactctgggccagtgcggggtggaggccctgactaccctggaagtagcaggccgcatgcttggaggtaaagtccatggttccctggcccgtgctgggggctaagcggcggatgcagtacaaccggcgctttgtcaacgttgtgcccacctttggcaagaagaagggccccaatgccaactcttaagtcttttgtaattctggctttctctaataaaaaagccacttagttca

SEQ ID NO: 373375 - DNA, 454 bp, Homo sapiens
accgcgcggtcgctcagcagacgaggtgacacgcagcccacggtctgtactgacgcgccctcgcttcttcctctttctcgactccatcttcgcggtagctgggaccgccgttcagtcgccaatatgcagctctttgtccgcgcccaggagctacacaccttcgaggtgaccggccaggaaacggtcgcccagatcaaggctcatgtagcctcactggagggcattgccccggaagatcaagtcgtgctcctggcaggcgcgcccctggaggatgaggccactctgggccagtgcggggtggaggccctgactaccctggaagtagcaggccgcatgcttggaggtaaagtccatggttccctggcccgtgctggaaaagtgagaggtcagactcctaaggtggccaaacaggagaagaagaagaagaagtggggtgcagaagtgcgcctgggtt

SEQ ID NO: 373376 - DNA, 346 bp, Homo sapiens
  misc_feature (22)..(22): n is a, c, g, or t
  misc_feature (31)..(31): n is a, c, g, or t
  misc_feature (33)..(33): n is a, c, g, or t
  misc_feature (36)..(37): n is a, c, g, or t
aattcgcggccgcgtcgacacngcgcgatangncgnnagaagaggatgaggccactctgggccagtgcggggtggaggccctgactaccctggaagtagcaggccgcatgcttggaggtaaagtccatggttccctggcccgtgctggaaaagtgagaggtcagactcctaaggtggccaaacaggagaagaagaagaagaagacaggtcgggctaagcggcggatgcagtacaaccggcgctttgtcaacgttgtgcccacctttggcaagaagaagggccccaatgccaactcttaagtcttttgtaattctggctttctctaataaaaaagccacttagttca

SEQ ID NO: 373377 - DNA, 649 bp, Homo sapiens
  misc_feature (342)..(342): n is a, c, g, or t
  misc_feature (344)..(344): n is a, c, g, or t
  misc_feature (360)..(360): n is a, c, g, or t
  misc_feature (440)..(440): n is a, c, g, or t
  misc_feature (445)..(445): n is a, c, g, or t
  misc_feature (449)..(449): n is a, c, g, or t
  misc_feature (468)..(468): n is a, c, g, or t
gcggccgcctactactactactactgctcgaattcaagcttctaacgatgtacggggataaagtccatggttccctggcccgtgctggaaaagtgagaggtcagactcctaaggtggccaaacaggagaagaagaagaagaagacaggtcgggctaagcggcggatgcagtacaaccggcgctttgtcaacgttgtgcccacctttggcaagaagaagggccccaatgccaactcttaagtcttttgtaattctggctttctctaataaaaaagccacttagttcagtcaaaaaaaaaaaaaaaaaaaaaaaaaacaaaaaaaaaaaaaaaaacccgggggntntttttggggggggggnaaaaggggtttgaaggggccggggcttttttttccggccccccttttttttgcaggggggaaatcggggggccccccaanggggngcgncaaaaaatcggcgaagagngcagttgccgcggttatattctccgtgctaaaaaaggagtgagacacgacgagagcgagcagcggaggacaacccactactagacacaaagtgtggctggaaaaccaataacacaagagaaaagcaaatcagagagacaaaagagacgcaccgagacaagagaacaagacacaaccaaaag

SEQ ID NO: 373378 - DNA, 333 bp, Homo sapiens
tggtcatggtgttaggactttttttcctttcacagctaaaccaagtccctgggctcttactcggtttgccttctccctccctggagatgagcctgagggaagggatgctaggtgtggaagacaggaaccagggcctgattaaccttcccttctccaggtggccaaacaggagaagaagaagaagacgacaggaagggctaagcggcggatgcagtacaaccggcgctttgtcaacgttgtgcccacctttggcaagaagaagggccccaatgccaactcttaagtcttttgtaattctggctttctctaataaaaaagccacttagttcagtc

SEQ ID NO: 373379 - DNA, 572 bp, Homo sapiens
accgcgcggtcgctcagcagacgaggtgacacgcagcccacggtctgtactgacgcgccctcgcttcttcctctttctcgactccatcttcgcggtagctgggaccgccgttcagtcgccaatatgcagctctttgtccgcgcccaggagctacacaccttcgaggtgaccggccaggaaacggtcgcccagatcaaggctcatgtagcctcactggagggcattgccccggaagatcaagtcgtgctcctggcaggcgcgcccctggaggatgaggccactctgggccagtgcggggtggaggccctgactaccctggaagtagcaggccgcatgcttggaggtaaagtccatggttccctggcccgtgctggaaaagtgagaggtcagactcctaaggtggccaaacaggagaagaagaagaagaagacaggtcgggctaagcggcggatgcagtacaaccggcgctttgtcaacgttgtgcccacctttggcaagaagaagggccccaatgccaactcttaagtcttttgtaattctggctttctctaataaaaaagccacttagttca

SEQ ID NO: 373380 - DNA, 575 bp, Homo sapiens
ccccaccccccaccacaccttccggctaggtacgaggactcggttaatcgccgagggagcgcctcgcttcttcctctttctcgactccatcttcgcggtagctgggaccgccgttcagtcgccaatatgcagctctttgtccgcgcccaggagctacacaccttcgaggtgaccggccaggaaacggtcgcccagatcaaggctcatgtagcctcactggagggcattgccccggaagatcaagtcgtgctcctggcaggcgcgcccctggaggatgaggccactctgggccagtgcggggtggaggccctgactaccctggaagtagcaggccgcatgcttggaggtaaagtccatggttccctggcccgtgctggaaaagtgagaggtcagactcctaaggtggccaaacaggagaagaagaagaagaagacaggtcgggctaagcggcggatgcagtacaaccggcgctttgtcaacgttgtgcccacctttggcaagaagaagggccccaatgccaactcttaagtcttttgtaattctggctttctctaataaaaaagccacttagttca

SEQ ID NO: 373381 - DNA, 535 bp, Homo sapiens
aggatccttaattaaattaatccccccccccccctcccccgttctttctcgaggcatcttcgcggtagctgggatcagtcgccaatatgcagctctttgtccgcgcccaggagctacacaccttcgaggtgaccggccaggaaacggtcgcccagatcaaggctcatgtagcctcactggagggcattgccccggaagatcaagtcgtgctcctggcaggcgcgcccctggaggatgaggccactctgggccagtgcggggtggaggccctgactaccctggaagtagcaggccgcatgcttggaggtaaagtccatggttccctggcccgtgctggaaaagtgagaggtcagactcctaaggtggccaaacaggagaagaagaagaagaagacaggtcgggctaagcggcggatgcagtacaaccggcgctttgtcaacgttgtgcccacctttggcaagaagaagggccccaatgccaactcttaagtcttttgtaattctggctttctctaataaaaaagccacttagttca

SEQ ID NO: 373382 - DNA, 463 bp, Homo sapiens
ccacgcgtcgcggacgcgtgggtcgacccacgcgtcgggagctacacaccttcgaggtgaccggccaggaaacggtcgcccagatcaaggctcatgtagcctcactggagggcattgccccggaagatcaagtcgtgctcctggcaggcgcgcccctggaggatgaggccactctgggccagtgcggggtggaggccctgactaccctggaagtagcaggccgcatgcttggaggtaaagtccatggttccctggcccgtgctggaaaagtgagaggtcagactcctaaggtggccaaacaggagaagaagaagaagaagacaggtcgggctaagcggcggatgcagtacaaccggcgctttgtcaacgttgtgcccacctttggcaagaagaagggccccaatgccaactcttaagtcttttgtaattctggctttctctaataaaaaagccacttagttca

SEQ ID NO: 373383 - DNA, 1925 bp, Homo sapiens
cattttcattcattcatttaatgaggcttagcaatgatatcaaaagggtcagtctcctgacgttggggagctcacagtacatgcaaatttcttacaaattgaaatacaggttgtcatggaacaatttacagaaggctgtttctatgagggaaataaagggggtgtgccctagggcatcaaagtatatgcaaggggtggccaaggagggtcaccttcccagaaaaggccatacttgaactaaggataaataagaattagccaggcagatagtgtgaaggagggaaaggggtaatacaggaagaaggaattgcactgggcaaagacattttggggctagggagaattctctaaggctggcattttctaagatgtgcatgtggaatgacacaggtaagcctggagagtggacaaagtgctgtagtaccttgtatccaaagccaaggcacgtgggcacagagctgaagctaaggagagtacttcagttctgtaataagggctgtcaggagcagttatctcttgagtaggatctctctgacttcagggaggaaagcaagggtaggaggatgaggtggggctatgggtaatccaggaaggaagtgagcagagtacattcacgtggcagcgctgggcatggaatacagtgtgggtttgacagtgatgttaagatagaaagactggacttcatggctcattgtgtgggagtaagagagaaaggaggtctgcgtgactcccagtttctgggttgggcaactgggttgttaaagagaatacagaggagaattaagtgagcagcttcagagatgacaatgagttgggtttgacattcagagtgcgaaatgcctgaggtcagtcaggcagaatgtctaagtggaagtttgttaatcccaaatctgagatctgagccagagagagttctgagtgtcatttgcagaggagggggctgaggactgactgttgatgagagtgtcccagaagaagagaaagggacaaacctagaatggtgggaaatactgtagggatatggagcaaggaagaggagtccaaaaagaaaacaccagcaacaaagaaaaacagcttaaagaatcaggccgggcgcggtggctcagtcgccaatatgcagctctttgtccgcgcccaggagctacacaccttcgaggtgaccggccaggaaacggtcgcccagatcaaggctcatgtagcctcactggagggcattgccccggaagatcaagtcgtgctcctggcaggcgcgcccctggaggatgaggccactctgggccagtgcggggtggaggccctgactaccctggaagtagcaggccgcatgcttggaggtaaagtccatggttccctggcccgtgctggaaaagtgagaggtcagactcctaaggtggccaaacaggagaagaagaagaagaagacaggtcgggctaagcggcggatgcagtacaaccggcgctttgtcaacgttgtgcccacctttggcaagaagaagggccccaatgccaactcttaagtcttttgtaattctggctttctctaataaaaaagccacttagttcaaaaaaaaaagagaagaaaagaagagaaaggagaaaaaaaacattgcggggggcctttttagcgggggggggaaaacagcggctagaaagaaaaagggcgcccatcgggcagaagaagcgtggccccacggagcccgaagagtgctctctgtaaacaaaacggcgggctacatctgcggaggagatccgcccaccaataggagaagaggcgtgaatgaaaaatggagaggaaaacgacggaggatcacaaccgggctaaaaggaacgcggcaaaacacgacgggacgaagaagcgggaagagacgaaggagaagacaagagagggaacgcacaagggacaacaccaccgtgagagcgaaccac

SEQ ID NO: 373384 - DNA, 583 bp, Homo sapiens
  misc_feature (7)..(8): n is a, c, g, or t
gcggccnnctactactactaaattcgcggccgcgtcgacttcgcggtagctgggaccgccgttcagtcgccaatatgcagctctttgtccgcgcccaggagctacacaccttcgaggtgaccggccaggaaacggtcgcccagatcaaggctcatgtagcctcactggagggcattgccccggaagatcaagtcgtgctcctggcaggcgcgcccctggaggatgaggccactctgggccagtgcggggtggaggccctgactaccctggaagtagcaggccgcatgcttggaggtaaagtccatggttccctggcccgtgctggaaaagtgagaggtcagactcctaaggtggccaaacaggagaagaagaagaagaagacaggtcgggctaagcggcggatgcagtacaaccggcgctttgtcaacgttgtgcccacctttggcaagaagaagggccccaatgccaactcttaagtcttttgtaattctggctttctctaataaaaaagccacttagttcaaaaaaaagtcgacgcggcccggaatttagtagaagttggccgacccggggaattcccgca

SEQ ID NO: 373385 - DNA, 559 bp, Homo sapiens
  misc_feature (7)..(8): n is a, c, g, or t
gcggccnnctactactactaaattcgcggccgcgtcgatcagtcgccaatatgcagctctttgtccgcgcccaggagctacacaccttcgaggtgaccggccaggaaacggtcgcccagatcaaggctcatgtagcctcactggagggcattgccccggaagatcaagtcgtgctcctggcaggcgcgcccctggaggatgaggccactctgggccagtgcggggtggaggccctgactaccctggaagtagcaggccgcatgcttggaggtaaagtccatggttccctggcccgtgctggaaaagtgagaggtcagactcctaaggtggccaaacaggagaagaagaagaagaagacaggtcgggctaagcggcggatgcagtacaaccggcgctttgtcaacgttgtgcccacctttggcaagaagaagggccccaatgccaactcttaagtcttttgtaattctggctttctctaataaaaaagccacttagttcaaaaaaaagtcgacgcggcccggaatttagtagaagttggccgacccggggaattcccgca

SEQ ID NO: 373386 - DNA, 709 bp, Homo sapiens
  misc_feature (546)..(547): n is a, c, g, or t
  misc_feature (554)..(554): n is a, c, g, or t
ggggcttttctctcttttcttcgaccttcgctctttcgcgggtaggctggggcaccgccgttcagtcgccaatatgcagctctttgtccgcgcccaggagctacacaccttcgaggtgaccggccaggaaacggtcgcccagatcaaggctcatgtagcctcactggagggcattgccccggaagatcaagtcgtgctcctggcaggcgcgcccctggaggatgaggccactctgggccagtgcggggtggaggccctgactaccctggaagtagcaggccgcatgcttggaggtaaagtccatggttccctggcccgtgctggaaaagtgagaggtcagactcctaaggtggccaaacaggagaagaagaagaagaagacaggtcgggctaagcggcggatgcagtacaaccggcgctttgtcaacgttgtgcccacctttggcaagaagaagggccccaatgccaactcttaagtcttttgtaattctggctttctctaataaaaaagccacttagttcaaaaaaaaaaacacaacaccaaacnncaccccnaaccaccacccacaaacaaacctgggggggggccccgggccccaaatcgccctatagtggggcgtaatacaaatcaactgtgcggcgttttacaaccgcgggactgggccccgggtgtacccaactacgccttggagctcccccttttgccgggg

SEQ ID NO: 373387 - DNA, 907 bp, Homo sapiens
ccacgcgtcgcggacgcgtgggtcgacccacgcgtcgcttcgcggtagctgggaccgccgttcagtcgccaatatgcagctctttgtccgcgcccaggagctacacaccttcgaggtgaccggccaggaaacggtcgcccagatcaaggctcatgtagcctcactggagggcattgccccggaagatcaagtcgtgctcctggcaggcgcgcccctggaggatgaggccactctgggccagtgcggggtggaggccctgactaccctggaagtagcaggccgcatgcttggaggtaaagtccatggttccctggcccgtgctggaaaagtgagaggtcagactcctaaggtggccaaacaggagaagaagaagaagaagacaggtcgggctaagcggcggatgcagtacaaccggcgctttgtcaacgttgtgcccacctttggcaagaagaagggccccaatgccaactcttaagtcttttgtaattctggctttctctaataaaaaagccacttagttcagtcaaaaaaaaaaaaaaaaaaaaaaaaaacaaaaaaaaaaaaaaaaaggggggggcggcccaaaaagtttcccccgggggggcccaggtttccgggttccccggttttttttgttaacagagggggtgcccctatattaggaggagcgccggtattaataaggcgtaagggcacgggcgccggccggttttacaacaacgtttcggtcgatgtgtggcacagaccgtggctaacgcgtcgggcactcttgtgggggaaggggacccttcaactttctgggggcgtgtggaccattatttgggggcgcaatctaccccttacgggaagtttttaaacgggccttaagcgggaaaattttacgccttttccaccgtggtagcagcgg

SEQ ID NO: 373388 - DNA, 924 bp, Homo sapiens
  misc_feature (2)..(2): n is a, c, g, or t
  misc_feature (19)..(19): n is a, c, g, or t
tnccgaattcggcagaggnacgcgccctcgcttcttcctctttctcgactccatcttcgcggtagctgggaccgccgttcagtcgccaatatgcagctctttgtccgcgcccaggagctacacaccttcgaggtgaccggccaggaaacggtcgcccagatcaaggctcatgtagcctcactggagggcattgccccggaagatcaagtcgtgctcctggcaggcgcgcccctggaggatgaggccactctgggccagtgcggggtggaggccctgactaccctggaagtagcaggccgcatgcttggaggtaaagtccatggttccctggcccgtgctggaaaagtgagaggtcagactcctaaggtggccaaacaggagaagaagaagaagaagacaggtcgggctaagcggcggatgcagtacaaccggcgctttgtcaacgttgtgcccacctttggcaagaagaagggccccaatgccaactcttaagtcttttgtaattctggctttctctaataaaaaagccacttagttcagtcaaaaaaaaaaaaaaaaaaaaaaaaaacaaaaaaaaaaaaaaaaaggggggggcggcccaaaaagtttcccccgggggggcccaggtttccgggttccccggttttttttgttaacagagggggtgcccctatattaggaggagcgccggtattaataaggcgtaagggcacgggcgccggccggttttacaacaacgtttcggtcgatgtgtggcacagaccgtggctaacgcgtcgggcactcttgtgggggaaggggacccttcaactttctgggggcgtgtggaccattatttgggggcgcaatctaccccttacgggaagtttttaaacgggccttaagcgggaaaattttacgccttttccaccgtggtagcagcgg

SEQ ID NO: 373389 - DNA, 991 bp, Homo sapiens
  misc_feature (619)..(621): n is a, c, g, or t
accgcgcggtcgctcagcagacgaggtgacacgcagcccacggtctgtactgacgcgccctcgcttcttcctctttctcgactccatcttcgcggtagctgggaccgccgttcagtcgccaatatgcagctctttgtccgcgcccaggagctacacaccttcgaggtgaccggccaggaaacggtcgcccagatcaaggctcatgtagcctcactggagggcattgccccggaagatcaagtcgtgctcctggcaggcgcgcccctggaggatgaggccactctgggccagtgcggggtggaggccctgactaccctggaagtagcaggccgcatgcttggaggtaaagtccatggttccctggcccgtgctggaaaagtgagaggtcagactcctaaggtggccaaacaggagaagaagaagaagaagacaggtcgggctaagcggcggatgcagtacaaccggcgctttgtcaacgttgtgcccacctttggcaagaagaagggccccaatgccaactcttaagtcttttgtaattctggctttctctaataaaaaagccacttagttcaaaaaaaaaacaacaaaaaacacaaaaaaaaaaacaaaaaaaaaaaannngggggggggccaaaaaaaataccccggggggggcccacatttgggcagtacacccgggtttttttgtacgcagggggggccccataatggggagggcgctataaaaagaagcgaggaacgacgcggggccggtttaacacagccgtgtccgcgcggcgtggcacagcactccgtctcagctggggcactctgggggaaaggcgacacccccataccgccgggggggcgccccctgtgggcaccccacaccacacaagaattgaacgcccgagggcagacaatacaccttcccgtgtgctccggttgggcacccccaccgcatatgtcgtggccgacaagaaatcgccccgggacttgattgaaaataacg

SEQ ID NO: 373390 - DNA, 631 bp, Homo sapiens
accgcgcggtcgctcagcagacgaggtgacacgcagcccacggtctgtactgacgcgccctcgcttcttcctctttctcgactccatcttcgcggtagctgggaccgccgttcagtcgccaatatgcagctctttgtccgcgcccaggagctacacaccttcgaggtgaccggccaggaaacggtcgcccagatcaaggctcatgtagcctcactggagggcattgccccggaagatcaagtcgtgctcctggcaggcgcgcccctggaggatgaggccactctgggccagtgcggggtggaggccctgactaccctggaagtagcaggccgcatgcttggaggtaaagtccatggttccctggcccgtgctggaaaagtgagaggtcagactcctaaggtggccaaacaggagaagaagaagaagaagacaggtcgggctaagcggcggatgcagtacaaccggcgctttgtcaacgttgtgcccacctttggcaagaagaagggccccaatgccaactcttaagtcttttgtaattctggctttctctaataaaaaagccacttagttcaaaaaaaaaaaagaatcaactattaaatgaggaaatttaaaaaaagtttaggttaaaaaa

SEQ ID NO: 373391 - DNA, 746 bp, Homo sapiens
accgcgcggtcgctcagcagacgaggtgacacgcagcccacggtctgtactgacgcgccctcgcttcttcctctttctcgactccatcttcgcggtagctgggaccgccgttcagtcgccaatatgcagctctttgtccgcgcccaggagctacacaccttcgaggtgaccggccaggaaacggtcgcccagatcaaggctcatgtagcctcactggagggcattgccccggaagatcaagtcgtgctcctggcaggcgcgcccctggaggatgaggccactctgggccagtgcggggtggaggccctgactaccctggaagtagcaggccgcatgcttggaggtaaagtccatggttccctggcccgtgctggaaaagtgagaggtcagactcctaaggtgagtgagagtattagtggtcatggtgttaggactttttttcctttcacagctaaaccaagtccctgggctcttactcggtttgccttctccctccctggagatgagcctgagggaagggatgctaggtgtggaagacaggaaccagggcctgattaaccttcccttctccaggtggccaaacaggagaagaagaagaagacgacaggaagggctaagcggcggatgcagtacaaccggcgctttgtcaacgttgtgcccacctttggcaagaagaagggccccaatgccaactcttaagtcttttgtaattctggctttctctaataaaaaagccacttagttca

SEQ ID NO: 373392 - DNA, 1209 bp, Homo sapiens
accgcgcggtcgctcagcagacgaggtgacacgcagcccacggtctgtactgacgcgccctcgcttcttcctctttctcgactccatcttcgcggtagctgggaccgccgttcagtcgccaatatgcagctctttgtccgcgcccaggagctacacaccttcgaggtgaccggccaggaaacggtcgcccagatcaaggctcatgtagcctcactggagggcattgccccggaagatcaagtcgtgctcctggcaggcgcgcccctggaggatgaggccactctgggccagtgcggggtggaggccctgactaccctggaagtagcaggccgcatgcttggaggtgagtgagagaggaatgttctttgaagtaccggtaagcgtctagtgagtgtggggtgcatagtcctgacagctgagtgtcacacctatggtaatagagtacttctcactgtcttcagttcagagtgattcttcctgtttacatccctcatgttgaacacagacgtccatgggagactgagccagagtgtagttgtatttcagtcacatcacgagatcctagtctggttatcagcttccacactaaaattaggtcagaccagggcccccaaagtgctctataaaattagaagctggaagatcctgaaatgaaacttaagatttcaaggtcaaatatctgcaactttgttctcattacctattgggcgcagcttctctttaaaggcttgaattgagaaaagaggggttctgctgggtggcaccttcttgctcttacctgctggtgccttcctttcccactacaggtaaagtccatggttccctggcccgtgctggaaaagtgagaggtcagactcctaaggtgagtgagagtattagtggtcatggtgttaggactttttttcctttcacagctaaaccaagtccctgggctcttactcggtttgccttctccctccctggagatgagcctgagggaagggatgctaggtgtggaagacaggaaccagggcctgattaaccttcccttctccaggtggccaaacaggagaagaagaagaagacgacaggaagggctaagcggcggatgcagtacaaccggcgctttgtcaacgttgtgcccacctttggcaagaagaagggccccaatgccaactcttaagtcttttgtaattctggctttctctaataaaaaagccacttagttca

SEQ ID NO: 373393 - DNA, 2287 bp, Homo sapiens
ccacgcgtcgcggacgcgtgggtcgacccacgcgtcgcttcgcggtagctgggaccgccgttcaggtaagaatggggccttggctggatccgaagggcttgtagcaggttggctgcggggtcagaaggcgcggggggaaccgaagaacggggcctgctccgtggccctgctccagtccctatccgaactccttgggaggcctggccttccccacgtgagccgccgcgaccaccatcccgtcgcgatcgtttctggaccgctttccactcccaaatctcctttatcccagagcatttcttggcttctcttacaagccgtcttttctttactcagtcgccaatatgcagctctttgtccgcgcccaggagctacacaccttcgaggtgaccggccaggaaacggtcgcccagatcaaggtaaggctgcttggtgcgccctgggttccattttcttgtgctcttcactctcgcggcccgagggaacgcttacgagccttatctttccctgtaggctcatgtagcctcactggagggcattgccccggaagatcaagtcgtgctcctggcaggcgcgcccctggaggatgaggccactctgggccagtgcggggtggaggccctgactaccctggaagtagcaggccgcatgcttggaggtgagtgagagaggaatgttctttgaagtaccggtaagcgtctagtgagtgtggggtgcatagtcctgacagctgagtgtcacacctatggtaatagagtacttctcactgtcttcagttcagagtgattcttcctgtttacatccctcatgttgaacacagacgtccatgggagactgagccagagtgtagttgtatttcagtcacatcacgagatcctagtctggttatcagcttccacactaaaattaggtcagaccagggcccccaaagtgctctataaaattagaagctggaagatcctgaaatgaaacttaagatttcaaggtcaaatatctgcaactttgttctcattacctattgggcgcagcttctctttaaaggcttgaattgagaaaagaggggttctgctgggtggcaccttcttgctcttacctgctggtgccttcctttcccactacaggtaaagtccatggttccctggcccgtgctggaaaagtgagaggtcagactcctaaggtgagtgagagtattagtggtcatggtgttaggactttttttcctttcacagctaaaccaagtccctgggctcttactcggtttgccttctccctccctggagatgagcctgagggaagggatgctaggtgtggaagacaggaaccagggcctgattaaccttcccttctccaggtggccaaacaggagaagaagaagaagacgacaggaagggctaagcggcggatgcagtacaaccggcgctttgtcaacgttgtgcccacctttggcaagaagaagggccccaatgccaactcttaagtcttttgtaattctggctttctctaataaaaaagccacttagttcagtcaaaaaaaaaaaaaaaaaaaaaaaaaacaaaaaaaaaaaaaaaaaaaaaaaaaacaaaaaaaaacaaaaaaaaaaaaaagaaaaaaaaaaaaagagggggcgcggcgccgccactaattctactccctccatgggggcgcccccgcttctcgctcccccacaccttttctcggccaaagggggggcgcccccactacagagggggcgcgctaacattcacgcgacacgccgacaccgcggggcgccgccacgataacaacacacacgctctgaggaacggagaagaaaacagccgcgcgacgagggagccacactactgggagaaagaaaacagcccaacactcccctgacgcggggagagcaggaaccaacactagcggggcggcacacaactctcttcctcacctagctagcagatcttttattaagtcgtcacttctagctggggcgtgaacagtaaatacctcacctctccccgtgcggacgtattataacacggagcgctcgaccacacaccacccgccactgcactcgcatctcctccgcgccactcacggcctcctacacacacatccttcgttactcgtctacaccactagacggcgcttgcgtctatctcgtacctccctccactcaacacaccaacaactcctatttccaactcccagcaaaccgcgcgccggtctcctttcacttatctagaacaacaacacctaccccccaccctctacccgactcagaacaccgcctcacaccccgccgta

SEQ ID NO: 373394 - DNA, 348 bp, Homo sapiens
  misc_feature (2)..(2): n is a, c, g, or t
  misc_feature (19)..(19): n is a, c, g, or t
  misc_feature (320)..(320): n is a, c, g, or t
  misc_feature (323)..(323): n is a, c, g, or t
  misc_feature (335)..(335): n is a, c, g, or t
tnccgaattcggcagaggnacgcgccctcgcttcttcctctttctcgactccatcttcgcggtagctgggaccgccgttcagtcgccaatatgcagctctttgtccgcgcccaggagctacacaccttcgaggtgaccggccaggaaacggtcgcccagatcaaggctcatgtagcctcactggagggcattgccccggaagatcaagtcgtgctcctggcaggcgcgcccctggaggatgaggccactctgggccagtgcggggtggaggccctgactaccctggaagtagcaggccgcatgcttggaggtaagtcatngtncctgcccctctnaaagtagaggtag

SEQ ID NO: 373395 - DNA, 251 bp, Homo sapiens
tgcccagcaggaggtgcacatgatggcagaaggattctaaacaagggccatgcttctgagtagcggggtgctcctggtgggtgaaggttaggcaccaggttgggggtctctggatgctctttactctctagcaaggccagagaccactagggtccatggccgccctgggtggtgtcctgctctccctgcccggaggacagtgggggctgagatggacacagacatcggagggctgagaaatgagttgctct

SEQ ID NO: 373396 - DNA, 152 bp, Homo sapiens
gaatcccattctttacacctttctcctctggagtcttagttccccattggttattctgtgtcttacatttttggttttcatcatttttgattctccttccccccgctctgtgaatctgctcaacttccttcccttccttccttccctccctt

SEQ ID NO: 373397 - DNA, 501 bp, Homo sapiens
ctcacactggcttggaagagcccatcctcagatctgagtcctgcctctgctggaaagtcctcctgaaggctcagcctcctttttgcatcctcccaaaagccagaagggcagggatgatggtgggaaagttgttggtgaagccaggccgacctgggccagaagccagagcatgtcacacctgcagctgtgtgaccttgggcccaaatgcagtaacaaagccggccttgaaggattgctgcttcaagtaatgggccaaggcagacgagagcactcagcatggccaccttaccactgaaggattcaggcaatggcaggtgatccttggagcccttgcccatgtgcccctctgcaccctaagctgttcctggtcaagatcctcctgtgcccaggaggcagtgagccatttatggccatcctcacaagcatggaggagcactgatgtcctcttacccccaaatcgcccctcctccatggttcctgctctaggggccagccctacag

SEQ ID NO: 373398 - DNA, 293 bp, Homo sapiens
tttttttctgtgggtttctaactttctaaaattcctttggtgtaattttagtagggtttcaggaaagaccagaaataaatgaacatatttaatctaacacatttcatctagttgtatccccaattttagaaaactcatacctacaccaactagttagaatcccaagtgatttacatagcaagaagaaccgaagcttcttctgataggcaaggctataaactccttattgttgagactattaataattaatctctttgtctgcaacatatagccttctacttggttcattgtgg

SEQ ID NO: 373399 - DNA, 513 bp, Homo sapiens
gttgtgattgcctttatgttacatgcatagtcgtatctgtgatatacttggagcctaatctctggtcaagattgcagcattattttcatgggaaaatgtatgccatgacagtgacatgacttctggcctgcagcaataaatgcatcataccaaaactggagaagtgagcatagcccggtgtctgctgcataatcggaattcattcaaagtctgctgaatgagtgaattaattgtctatattctgttcagacacaactacgtggaacatgaaagactgagaactgttctctcaagttccatcataatcgacaacttcagacaagcccctcaactactcgctgtccccatttccttagtaagggctatccatctcataaagatcttaagaagaaaggacatggagcattagtctaaaatgccattctttaaaagtgatatttaggccgggattacaggtgtgagccagccatgcccggcctgtgtcttagtttttagtagaaagtttaaaaagtt

SEQ ID NO: 373400 - DNA, 600 bp, Homo sapiens
gagtgggctgctgatccccctctatattatctattgctgtgtgacagtattaccacaaatacagtagctgaaacaacacatttgttttctcacagtttctgtgggtgaggagttcaagcatagcttggtcctctgcaagcttacaatccaagggttggctcaggctgtattctcatctgagcactctactggggagggtttcaggcttacctgatggttggcggcattcagtccttctagactgtcagactgagggccttggtttttgctggtgcactcagttccttgcttcatatagagtagctcacaatgtagcagcttgtttcactaagacagcaaggaagagtgtttcctagtaagacagacactgtagtcttacctaatacaatcatgaaagtgacatactgtctccttcgccatattctgttagagacaggttacagctttgcccagtggcagtatcctagccaatgaggtttatctgaggcatgattattaaaataattgaaaattttcccaatacaccaaagtgacaacttacaacataggttggcaatggcaatttttgacatgtctacaaagactgaattaaaaaaaaaa

SEQ ID NO: 373401 - DNA, 762 bp, Homo sapiens
aataccttaaatacttcttgactctcttatctttaaggcttagaaggaaaacttcaggtgtgagcccagggtgtgtgctgggggtgggcgtggaggtcctgtggtgtcacggccctccttgtttgcccagggcccagtcacacagagcaggagcttctccgcctgaccgacgactcccccgtcgacctcctgtgtgcgcctgtcccctcgtgcctgccgtcccctcagctgagaccagaccccgttatcctccaatctgctgatctcattcagtttgaggagcgccctcaagagccttctggttgggtgactccatgttgtcatggggattttcttcggggtttaaaacaaaaccacgatgagatactgatatagtaaatgacggaagtgggaagggactaccccttttcaggtggaaaacactgtgctgattattcgaccttctttccccacctgggttcctgcagaatgggatgcacagcctgaggttgcctggcgagcatcaggcaagggcgatttggcagctctggagggctggtggctcggggctgtgggcgagtccacaggggtgggtggggcctcctgggcttctgctctcccagactttgtgaaggttcagctgctctcaggcacacctgtcaccagatgtacacgtcacccatggtgggggtccagagggcccaagggctttataaaggggtgaatggagggaggtgtctgtggctggagccccggactctgcccagtgatataacagacagg

SEQ ID NO: 373402 - DNA, 863 bp, Homo sapiens
tgggcttaaagttacttgacttttagatttgtcttctcctgaaaaacagaaataatctcttagagtgatactttttgacagcttgattgcttattaggtcaaccagtgaggttggtagccttaaaacttggcattcattaataatttagtttttctaccactgagaatgataggtagtttattatcttattgtaacttgccatttattttccactacaagtaattgaaaatgttaacatttcttaagggtcaccagaagttgcagtagctggacaggtgctagaaaacttaccccccattggagttttttgggatattgaaaactgctccgttccctctggccggtcagcaactgctgttgtgcaaagaatccgtgagaagttttttaaaggccacagagaagcagaattcatctgtgtatgtgacatcagtaaagaaaacaaggaagttattcaagagctgaataattgccaggtaaccgttgcccacatcaatgctactgcaaagaatgccgctgatgataaactgcggcagagtctccgcagatttgcaaatacacacactgctccagccacagtggttcttgtgtcaactgatgtcaattttgcattggaacttagtgacctgagacacaggcatggtttccacattattttggtccataaaaaccaggcctcagaagcactgctgcatcatgctaacgagctgatcagatttgaagagttcatttccgacttgccccccaggttaccactaaaaatgccagtaagtgggtttgcgttatttttgccattttccaatattacattgtggaggctgaaagacagcccataataagggggttgccaggcccagatggggct

SEQ ID NO: 373403 - DNA, 259 bp, Homo sapiens
ctcagtgggaggccttcacccgacggggtggggccagtcactaatatttctaatgctgcgttttctttttaaccaggttttcactaatgataagatggaagaatgtgtgaagctcacaagtctgtatttgtttgcaaagaatgtgcggtctttacttcatacttaccactaccagcagattttccttcatgagttttccatggcctataccaagtatgtcggagaaactctgcagcccgtcgggtggagcgggtaccgg

SEQ ID NO: 373404 - DNA, 7786 bp, Homo sapiens
tgggcttaaagttacttgacttttagatttgtcttctcctgaaaaacagaaataatctcttagagtgatactttttgacagcttgattgcttattaggtcaaccagtgaggttggtagccttaaaacttggcattcattaataatttagtttttctaccactgagaatgataggtagtttattatcttattgtaacttgccatttattttccactacaagtaattgaaaatgttaacatttcttaagggtcaccagaagttgcagtagctggacaggtgctagaaaacttaccccccattggagttttttgggatattgaaaactgctccgttccctctggccggtcagcaactgctgttgtgcaaagaatccgtgagaagttttttaaaggccacagagaagcagaattcatctgtgtatgtgacatcagtaaagaaaacaaggaagttattcaagagctgaataattgccaggtaaccgttgcccacatcaatgctactgcaaagaatgccgctgatgataaactgcggcagagtctccgcagatttgcaaatacacacactgctccagccacagtggttcttgtgtcaactgatgtcaattttgcattggaacttagtgacctgagacacaggcatggtttccacattattttggtccataaaaaccaggcctcagaagcactgctgcatcatgctaacgagctgatcagatttgaagagttcatttccgacttgccccccaggttaccactaaaaatgccacagtgccacactctgctctatgtttataacctaccagcaaataaggatggcaagagcgtcagcaacaggctcagacgcctgtccgataattgtggtgggaaagtgctgagtatcacaggctgcagtgcaattctccgcttcataaaccaagatagtgcagagcgcgctcagaagcgaatggaaaacgaagatgtctttggtaataggatcattgtgtcatttactccaaaaaatagagaactctgtgaaacaaagagttcaaatgcaattgctgataaagtgaagtctcccaaaaaacttaagaatccaaaattgtgcctcatcaaagatgcaagtgaacaatcttccagtgccaaagccacgcctggaaaagggtcacaggcaaattctggatctgctacaaaaaatacaaatgttaaaagtttacaggagctgtgccgcatggagtcaaaaactggtcatagaaacagtgagcaccagcaaggtcacctgaggctggtcgtacccactcacggtaactcaagtgctgcagtgtcgacgccgaaaaactcgggggtggcagaacccgtttacaaaaccagtcagaaaaaggagaacctcagtgcccgaagtgttaccagttctcctgtagagaaaaaagataaagaggagactgtattccaagtgagttacccgtctgcttttagcaagttagttgcatccaggcaagtcagtcctctgctcgcatctcagtcttggtcttctagagcatccccgcttgctttcaacattgcaaattcgagcagcgaagccgactgcccagacccatttgcaaatggtgctgatgtccaagtcagcaacatagactacagattatcccggaaggagctgcagcagctcctgcaggaagcatttgccaggcatggcaaggtaactttttccctcttgtgcttgctttgttatactctctggtggagtctctagtcaagaggacctaatttgatatacataaccacagccgggatagaagtgtgactgaacaagtttgaactccttccttttccctttggtctgctcagggtggtgctataaatccagtttttacaatgttagccccagagagcaagacgcctagcagtgaaaagctcttgtcttaggcagaaattgaaatggcaatttgtggccaggcatggcggctcatgcctgtaattccagcactttgggaggccaaggcggccagatcacctgaggtcaggagtttgagaccagcctggcgagtgaaaccccgtctctactaaaaaaaaattagccgggcgtggtggtgcacgcctgtagtcccagctccttaggaggctaaggcaggagaattgcttaaacacgggaggcagaggttgcagtaagctgagatgacgccactgctctctggcctgggagacagagtgagactccatctcagaaagaaaaaaaaaaaaaggcaatttgataagtaaaacattgatggatttcagttagctcttcctgctgaaatacaggtaggattctaaaataatgttggctggtcttgtttatgccttattatatttgactcattttttaggtgcaattttgctaaaaatgcacctttttagtagattcttaaaaatggccatgtcctgggttttgtagagtctagaaaagaccccaaacactcttcccatgtgttggcctctgagcctgccttggaaacctgtgtgtgccagagcacacaggcaggccgggccagtgtcacatctctaaaggtcaccctatcctcactttcttacgtcctggtcagcagaagagcagagttcagacatactccttcatggaagcgctgcagtcgacaaatgtgttccttcatggttcaccttcagttttaagacgacagggttctgggcggacatagcgtttagttttcgcttttcctgttgtaggtgaagagtgttgagctcagcccccatacagattatcaactcaaggctgttgtgcaaatggaaaacttacaagatgcgatcggtgcagtgaatagcctccacagatacaaaattggcagcaaaaagatcctggtctcacttgccaccggggctgccagcaaatcactctctttactgagtgcagaaacaatgtctgttcttcaggatgcccctgcctgttgcctgcctctgtttaaatttacagatatctatgaaaaaaagtttggacacaagttgaatgtgtcagatctatataaattaacagacacggtcgcaatccgtgaacaaggaaacggacggctggtgtgtctcctacccagcagtcaggcccgccagagccccttggggtcttcccagtcacacgacggctcctccacgaattgcagcccaattatatttgaagagttagaatatcacgagcctgtctgcagacagcattgttccaataaggatttcagcgaacatgaatttgatccagactcttacaagattccttttgtgattctttctttgaagacatttgcgccccaggttcacagtcttctccagacccacgagggcaccgtgcctttattgagctttccagattgttacattgcagagtttggcgatctagaagtagtgcaagaaaaccaaggaggtgttcccttagaacacttcattacctgtgttccaggtgtaaacattgccactgctcagaatggcatcaaagtggttaaatggattcacaacaagcccccgcctcccaacactgacccttggcttctgcgttcgaagagtcctgtaggtaacccccagctgatccagttcagtagagaagtgattgacttgctgaaaagccagccatcttgtgtcatacccatcagtcatttcatcccatcctatcaccatcattttgcaaagcagtgccgagtgtcagactacggatactccaagctgattgagttattagaagcagtgcctcatgtattgcagattcttggaatgggctccaaacgtctgctgacccttacccacagggcccaggtgaagcgctttactcaggatttactaaaacttctcaaatcccaggccagcaaacaggtcattgtgagagaattctcacaggcttatcactggtgtttctcaaaggactgggatgtcactgaatatggtgtttgtgagttgattgacatcgtatcagagattccagacacaaccatctgcttgtcccaacaagataatgaaatggtgatttgtatccccaaaagagaacgcactcaggatgaaatagaaaggacaaaacagttctccaaggatgtcgttgatttgctgcgtcaccaaccccatttccggatgccctttaataaatttatcccttcttaccatcaccactttggccggcagtgcaaacttgcgtactatgggtttaccaaactacttgaactttttgaagccatacctgatactttacaagtattggaatgtggagaagaaaagatccttactctgacagaggtggagcggttcaaagctctagctgcccagtttgttaaactccttcggtcccaaaaagataactgccttatgatgacagatctccttacagaatatgctaaaacttttggttatacatttcgtctccaagactatgatgtcagttccatttcggctttaactcagaaactctgccatgtcgtgaaggttgccgatatagaatctggcagacagattcagctgatcaaccgaaagtctctgcgatctctcactgcccagttgctggtattgttgatgtcttgggaaggaaccacccatctttctgttgaggagctcaagagacattacgaaagtacccacaacactccccttaacccctgtgaatatggattcatgaccttgaccgaactgctgaagagcctgccatacttggttgaggttttcactaatgataagatggaagaatgtgtgaagctcacaagtctgtatttgtttgcaaagaatgtgcggtctttacttcatacttaccactaccagcagattttccttcatgagttttccatggcctataccaagtatgtcggagaaactctgcagcccaagacctacggccacagcagcgtggaggagctcttgggagcaattccacaggtggttgttcagtttctgcaaaaaaatggcaaagagctctcatgtgagaactaccttaatttatatgccaaagctggtcgtttgagttcactcagtctctcccctgccaatcatgaaaaccagccctcggagggcgagcgcatcctggaggtgcccgaatcgcacacagcctcggaactcaagcttggagctgacggcagtgggcccagtcacacagagcaggagcttctccgcctgaccgacgactcccccgtcgacctcctgtgtgcgcctgtcccctcgtgcctgccgtcccctcagctgagaccagaccccgttatcctccaatctgctgatctcattcagtttgaggagcgccctcaagagccttctgaaattatgattttaaaccaagaagaaaaaatggagattccaataccaggaaagagcaaaactctgacctctgactccagctcgtcctgcatctcagcagctgtccccgtgcctccctgcccctcctcggaaacctccgagtcactgctcagcaaggaccccgtggaaagcccggccaaaaagcaacccaaaaatagagtcaaattggcagccaacttttccttagcacctataaccaagctttaactcccatttggaatatagaattaggatgggaaaacactgtctgattctgcacacaaaagtgggtttcaaaaatacatccttttctgtgtcatgaaaaccccccgaagccattgacttcatcttacctgtgttctatcatgtttttcttttccattgaacacagctttgagctgaagtctttcttttcttcttcctttttctttcttttttcaattatttgaagaacttgtggcatttgttaaagaatccttaatatattttaccaaatttttagtaactattatgaaatacaatggtgttccaaaagaagaaagcactaaaaactcaactagcaggaagcggttttgcttccattgagccacgtcggtggtgtcatcctacatgtagcataatagagtctctcagcctttgcttactggtgtttccgacagtattaacccagtgcgtggcatgtctttgaagcaaagcctgtcccgctagcctgtgtgttcacacaccaaaggagaagggtaggcgaggggttcggagtgtattttcaggttggaatgtgaaggttcctggcttccatgtgacttgtaagtgtgccttgttttttatttaaactatgtctgtagttgacaaaagtggcttcatcacaaatttttttaaacgtttctactttggggttccatttaggagctttctagaaagttgaggatgtttgaagcttcccttctgtgttccagtttgatatgggttaggttaaggaaaaggagatggtctcgatgtcatggatttaaagtcagcatttggattacaacacacattattgtgtgtcgagaggcagcattggaaagagcctgattttctaaaatatgcatcaagtgcataaattacaaatcagagctgagtggggaggtgcttcagcagcagcgggatcaatacgatttccactgggaagagacaggaattctacctacacataggaaggccaaggttgatccacttaaccttgttattgtaattttaaagctggtatcggtagctgggaagctttatgtgtgtgtatgtcagctcagcatcttttaatcgtgtctgattttactctcgttacttctcgctgttggaagcatctctgggtttcttgtggcgtctggtgtggaatggccttcctctctaggtgcctgaggtgtccgctgacgggtggcctctcacccccctctagagaaacctgacatttacaatggattgtatttgtccggcaaaaaaggcggattcattcatagagcagaaagaacctgttggcgtaaggtcttccactagttagatggtttcttttggggaaatgtttatatttggtaacttctagaaagccagaaaatggactctgatttcatagcattttgataaaatgccacaaaataagggctatagagagatttttacaagtcagattttttgttccccaaatcttttaaatgaagccagtgactcccagttctcaacacatggccccagtcaagacagaacaccatggaaaaaaccctgtaagtattatggcactctccgaatcctcctgaaggcatttcctctacagacatagtgttacaggaagtgaaatgcaaatgtgcaattttttttaaaggagcttttaaacaaagtaataataattggtgttgagaacatcagttgccttattctaagatttcataaggctgagtttgcacgcttggacttcagttctgctagcatgtaaagagtggtggactttaaaaccgtaagaggtatcattacaagtcacctggaacagactcaaagaacaggttctttgggcaacagacaaagaagaatcaagttctgtgctgtcccgtgagtgtgtctgagtaccattcactggagttgctgcttaggtctgggacgtgtgtgtgactcttaacaattgctgtctgaaaatgagagagaagacttcggaagcacattgtgttcataatgtactccacaatggccagtccaattgctatctatttttttatccagaggcttaattaaatgatgtggtaaaatgatgtttgagcattaagacaatgtaattctttatttctgggtggaaagatataccggattaaatttatctgtttaaaaaaatgacaaaagttatcaccaaaaccccctttcccatcttgcactgtttgttttggattgggtttgggggaaagagatgtttttcttagttgtctactttgtttgaacacttttgttgtggttcaagtgctgttttgtgtgttgggaccaaacagttgtcaataaactttacaagcgagcatcta

SEQ ID NO: 373405 - DNA, 7357 bp, Homo sapiens
tgggcttaaagttacttgacttttagatttgtcttctcctgaaaaacagaaataatctcttagagtgatactttttgacagcttgattgcttattaggtcaaccagtgaggttggtagccttaaaacttggcattcattaataatttagtttttctaccactgagaatgataggtagtttattatcttattgtaacttgccatttattttccactacaagtaattgaaaatgttaacatttcttaagggtcaccagaagttgcagtagctggacaggtgctagaaaacttaccccccattggagttttttgggatattgaaaactgctccgttccctctggccggtcagcaactgctgttgtgcaaagaatccgtgagaagttttttaaaggccacagagaagcagaattcatctgtgtatgtgacatcagtaaagaaaacaaggaagttattcaagagctgaataattgccaggtaaccgttgcccacatcaatgctactgcaaagaatgccgctgatgataaactgcggcagagtctccgcagatttgcaaatacacacactgctccagccacagtggttcttgtgtcaactgatgtcaattttgcattggaacttagtgacctgagacacaggcatggtttccacattattttggtccataaaaaccaggcctcagaagcactgctgcatcatgctaacgagctgatcagatttgaagagttcatttccgacttgccccccaggttaccactaaaaatgccagagctgtgccgcatggagtcaaaaactggtcatagaaacagtgagcaccagcaaggtcacctgaggctggtcgtacccactcacggtaactcaagtgctgcagtgtcgacgccgaaaaactcgggggtggcagaacccgtttacaaaaccagtcagaaaaaggagaacctcagtgcccgaagtgttaccagttctcctgtagagaaaaaagataaagaggagactgtattccaagtgagttacccgtctgcttttagcaagttagttgcatccaggcaagtcagtcctctgctcgcatctcagtcttggtcttctagagcatccccgcttgctttcaacattgcaaattcgagcagcgaagccgactgcccagacccatttgcaaatggtgctgatgtccaagtcagcaacatagactacagattatcccggaaggagctgcagcagctcctgcaggaagcatttgccaggcatggcaaggtaactttttccctcttgtgcttgctttgttatactctctggtggagtctctagtcaagaggacctaatttgatatacataaccacagccgggatagaagtgtgactgaacaagtttgaactccttccttttccctttggtctgctcagggtggtgctataaatccagtttttacaatgttagccccagagagcaagacgcctagcagtgaaaagctcttgtcttaggcagaaattgaaatggcaatttgtggccaggcatggcggctcatgcctgtaattccagcactttgggaggccaaggcggccagatcacctgaggtcaggagtttgagaccagcctggcgagtgaaaccccgtctctactaaaaaaaaattagccgggcgtggtggtgcacgcctgtagtcccagctccttaggaggctaaggcaggagaattgcttaaacacgggaggcagaggttgcagtaagctgagatgacgccactgctctctggcctgggagacagagtgagactccatctcagaaagaaaaaaaaaaaaaggcaatttgataagtaaaacattgatggatttcagttagctcttcctgctgaaatacaggtaggattctaaaataatgttggctggtcttgtttatgccttattatatttgactcattttttaggtgcaattttgctaaaaatgcacctttttagtagattcttaaaaatggccatgtcctgggttttgtagagtctagaaaagaccccaaacactcttcccatgtgttggcctctgagcctgccttggaaacctgtgtgtgccagagcacacaggcaggccgggccagtgtcacatctctaaaggtcaccctatcctcactttcttacgtcctggtcagcagaagagcagagttcagacatactccttcatggaagcgctgcagtcgacaaatgtgttccttcatggttcaccttcagttttaagacgacagggttctgggcggacatagcgtttagttttcgcttttcctgttgtaggtgaagagtgttgagctcagcccccatacagattatcaactcaaggctgttgtgcaaatggaaaacttacaagatgcgatcggtgcagtgaatagcctccacagatacaaaattggcagcaaaaagatcctggtctcacttgccaccggggctgccagcaaatcactctctttactgagtgcagaaacaatgtctgttcttcaggatgcccctgcctgttgcctgcctctgtttaaatttacagatatctatgaaaaaaagtttggacacaagttgaatgtgtcagatctatataaattaacagacacggtcgcaatccgtgaacaaggaaacggacggctggtgtgtctcctacccagcagtcaggcccgccagagccccttggggtcttcccagtcacacgacggctcctccacgaattgcagcccaattatatttgaagagttagaatatcacgagcctgtctgcagacagcattgttccaataaggatttcagcgaacatgaatttgatccagactcttacaagattccttttgtgattctttctttgaagacatttgcgccccaggttcacagtcttctccagacccacgagggcaccgtgcctttattgagctttccagattgttacattgcagagtttggcgatctagaagtagtgcaagaaaaccaaggaggtgttcccttagaacacttcattacctgtgttccaggtgtaaacattgccactgctcagaatggcatcaaagtggttaaatggattcacaacaagcccccgcctcccaacactgacccttggcttctgcgttcgaagagtcctgtaggtaacccccagctgatccagttcagtagagaagtgattgacttgctgaaaagccagccatcttgtgtcatacccatcagtcatttcatcccatcctatcaccatcattttgcaaagcagtgccgagtgtcagactacggatactccaagctgattgagttattagaagcagtgcctcatgtattgcagattcttggaatgggctccaaacgtctgctgacccttacccacagggcccaggtgaagcgctttactcaggatttactaaaacttctcaaatcccaggccagcaaacaggtcattgtgagagaattctcacaggcttatcactggtgtttctcaaaggactgggatgtcactgaatatggtgtttgtgagttgattgacatcgtatcagagattccagacacaaccatctgcttgtcccaacaagataatgaaatggtgatttgtatccccaaaagagaacgcactcaggatgaaatagaaaggacaaaacagttctccaaggatgtcgttgatttgctgcgtcaccaaccccatttccggatgccctttaataaatttatcccttcttaccatcaccactttggccggcagtgcaaacttgcgtactatgggtttaccaaactacttgaactttttgaagccatacctgatactttacaagtattggaatgtggagaagaaaagatccttactctgacagaggtggagcggttcaaagctctagctgcccagtttgttaaactccttcggtcccaaaaagataactgccttatgatgacagatctccttacagaatatgctaaaacttttggttatacatttcgtctccaagactatgatgtcagttccatttcggctttaactcagaaactctgccatgtcgtgaaggttgccgatatagaatctggcagacagattcagctgatcaaccgaaagtctctgcgatctctcactgcccagttgctggtattgttgatgtcttgggaaggaaccacccatctttctgttgaggagctcaagagacattacgaaagtacccacaacactccccttaacccctgtgaatatggattcatgaccttgaccgaactgctgaagagcctgccatacttggttgaggttttcactaatgataagatggaagaatgtgtgaagctcacaagtctgtatttgtttgcaaagaatgtgcggtctttacttcatacttaccactaccagcagattttccttcatgagttttccatggcctataccaagtatgtcggagaaactctgcagcccaagacctacggccacagcagcgtggaggagctcttgggagcaattccacaggtggttgttcagtttctgcaaaaaaatggcaaagagctctcatgtgagaactaccttaatttatatgccaaagctggtcgtttgagttcactcagtctctcccctgccaatcatgaaaaccagccctcggagggcgagcgcatcctggaggtgcccgaatcgcacacagcctcggaactcaagcttggagctgacggcagtgggcccagtcacacagagcaggagcttctccgcctgaccgacgactcccccgtcgacctcctgtgtgcgcctgtcccctcgtgcctgccgtcccctcagctgagaccagaccccgttatcctccaatctgctgatctcattcagtttgaggagcgccctcaagagccttctgaaattatgattttaaaccaagaagaaaaaatggagattccaataccaggaaagagcaaaactctgacctctgactccagctcgtcctgcatctcagcagctgtccccgtgcctccctgcccctcctcggaaacctccgagtcactgctcagcaaggaccccgtggaaagcccggccaaaaagcaacccaaaaatagagtcaaattggcagccaacttttccttagcacctataaccaagctttaactcccatttggaatatagaattaggatgggaaaacactgtctgattctgcacacaaaagtgggtttcaaaaatacatccttttctgtgtcatgaaaaccccccgaagccattgacttcatcttacctgtgttctatcatgtttttcttttccattgaacacagctttgagctgaagtctttcttttcttcttcctttttctttcttttttcaattatttgaagaacttgtggcatttgttaaagaatccttaatatattttaccaaatttttagtaactattatgaaatacaatggtgttccaaaagaagaaagcactaaaaactcaactagcaggaagcggttttgcttccattgagccacgtcggtggtgtcatcctacatgtagcataatagagtctctcagcctttgcttactggtgtttccgacagtattaacccagtgcgtggcatgtctttgaagcaaagcctgtcccgctagcctgtgtgttcacacaccaaaggagaagggtaggcgaggggttcggagtgtattttcaggttggaatgtgaaggttcctggcttccatgtgacttgtaagtgtgccttgttttttatttaaactatgtctgtagttgacaaaagtggcttcatcacaaatttttttaaacgtttctactttggggttccatttaggagctttctagaaagttgaggatgtttgaagcttcccttctgtgttccagtttgatatgggttaggttaaggaaaaggagatggtctcgatgtcatggatttaaagtcagcatttggattacaacacacattattgtgtgtcgagaggcagcattggaaagagcctgattttctaaaatatgcatcaagtgcataaattacaaatcagagctgagtggggaggtgcttcagcagcagcgggatcaatacgatttccactgggaagagacaggaattctacctacacataggaaggccaaggttgatccacttaaccttgttattgtaattttaaagctggtatcggtagctgggaagctttatgtgtgtgtatgtcagctcagcatcttttaatcgtgtctgattttactctcgttacttctcgctgttggaagcatctctgggtttcttgtggcgtctggtgtggaatggccttcctctctaggtgcctgaggtgtccgctgacgggtggcctctcacccccctctagagaaacctgacatttacaatggattgtatttgtccggcaaaaaaggcggattcattcatagagcagaaagaacctgttggcgtaaggtcttccactagttagatggtttcttttggggaaatgtttatatttggtaacttctagaaagccagaaaatggactctgatttcatagcattttgataaaatgccacaaaataagggctatagagagatttttacaagtcagattttttgttccccaaatcttttaaatgaagccagtgactcccagttctcaacacatggccccagtcaagacagaacaccatggaaaaaaccctgtaagtattatggcactctccgaatcctcctgaaggcatttcctctacagacatagtgttacaggaagtgaaatgcaaatgtgcaattttttttaaaggagcttttaaacaaagtaataataattggtgttgagaacatcagttgccttattctaagatttcataaggctgagtttgcacgcttggacttcagttctgctagcatgtaaagagtggtggactttaaaaccgtaagaggtatcattacaagtcacctggaacagactcaaagaacaggttctttgggcaacagacaaagaagaatcaagttctgtgctgtcccgtgagtgtgtctgagtaccattcactggagttgctgcttaggtctgggacgtgtgtgtgactcttaacaattgctgtctgaaaatgagagagaagacttcggaagcacattgtgttcataatgtactccacaatggccagtccaattgctatctatttttttatccagaggcttaattaaatgatgtggtaaaatgatgtttgagcattaagacaatgtaattctttatttctgggtggaaagatataccggattaaatttatctgtttaaaaaaatgacaaaagttatcaccaaaaccccctttcccatcttgcactgtttgttttggattgggtttgggggaaagagatgtttttcttagttgtctactttgtttgaacacttttgttgtggttcaagtgctgttttgtgtgttgggaccaaacagttgtcaataaactttacaagcgagcatcta

SEQ ID NO: 373406 - DNA, 2925 bp, Homo sapiens
tggtaccccagtccgttcgactgagccacggttctctcactgacatttctctctgacgggtgctctttgtcctgtaggtcgtttgagttcactcagtctctcccctgccaatcatgaaaaccagccctcggagggcgagcgcatcctggaggtgcccgaatcgcacacagcctcggaactcaagcttggagctgacggcagtgggcccagtcacacagagcaggagcttctccgcctgaccgacgactcccccgtcgacctcctgtgtgcgcctgtcccctcgtgcctgccgtcccctcagctgagaccagaccccgttatcctccaatctgctgatctcattcagtttgaggagcgccctcaagagccttctgaaattatgattttaaaccaagaagaaaaaatggagattccaataccaggaaagagcaaaactctgacctctgactccagctcgtcctgcatctcagcagctgtccccgtgcctccctgcccctcctcggaaacctccgagtcactgctcagcaaggaccccgtggaaagcccggccaaaaagcaacccaaaaatagagtcaaattggcagccaacttttccttagcacctataaccaagctttaactcccatttggaatatagaattaggatgggaaaacactgtctgattctgcacacaaaagtgggtttcaaaaatacatccttttctgtgtcatgaaaaccccccgaagccattgacttcatcttacctgtgttctatcatgtttttcttttccattgaacacagctttgagctgaagtctttcttttcttcttcctttttctttcttttttcaattatttgaagaacttgtggcatttgttaaagaatccttaatatattttaccaaatttttagtaactattatgaaatacaatggtgttccaaaagaagaaagcactaaaaactcaactagcaggaagcggttttgcttccattgagccacgtcggtggtgtcatcctacatgtagcataatagagtctctcagcctttgcttactggtgtttccgacagtattaacccagtgcgtggcatgtctttgaagcaaagcctgtcccgctagcctgtgtgttcacacaccaaaggagaagggtaggcgaggggttcggagtgtattttcaggttggaatgtgaaggttcctggcttccatgtgacttgtaagtgtgccttgttttttatttaaactatgtctgtagttgacaaaagtggcttcatcacaaatttttttaaacgtttctactttggggttccatttaggagctttctagaaagttgaggatgtttgaagcttcccttctgtgttccagtttgatatgggttaggttaaggaaaaggagatggtctcgatgtcatggatttaaagtcagcatttggattacaacacacattattgtgtgtcgagaggcagcattggaaagagcctgattttctaaaatatgcatcaagtgcataaattacaaatcagagctgagtggggaggtgcttcagcagcagcgggatcaatacgatttccactgggaagagacaggaattctacctacacataggaaggccaaggttgatccacttaaccttgttattgtaattttaaagctggtatcggtagctgggaagctttatgtgtgtgtatgtcagctcagcatcttttaatcgtgtctgattttactctcgttacttctcgctgttggaagcatctctgggtttcttgtggcgtctggtgtggaatggccttcctctctaggtgcctgaggtgtccgctgacgggtggcctctcacccccctctagagaaacctgacatttacaatggattgtatttgtccggcaaaaaaggcggattcattcatagagcagaaagaacctgttggcgtaaggtcttccactagttagatggtttcttttggggaaatgtttatatttggtaacttctagaaagccagaaaatggactctgatttcatagcattttgataaaatgccacaaaataagggctatagagagatttttacaagtcagattttttgttccccaaatcttttaaatgaagccagtgactcccagttctcaacacatggccccagtcaagacagaacaccatggaaaaaaccctgtaagtattatggcactctccgaatcctcctgaaggcatttcctctacagacatagtgttacaggaagtgaaatgcaaatgtgcaattttttttaaaggagcttttaaacaaagtaataataattggtgttgagaacatcagttgccttattctaagatttcataaggctgagtttgcacgcttggacttcagttctgctagcatgtaaagagtggtggactttaaaaccgtaagaggtatcattacaagtcacctggaacagactcaaagaacaggttctttgggcaacagacaaagaagaatcaagttctgtgctgtcccgtgagtgtgtctgagtaccattcactggagttgctgcttaggtctgggacgtgtgtgtgactcttaacaattgctgtctgaaaatgagagagaagacttcggaagcacattgtgttcataatgtactccacaatggccagtccaattgctatctatttttttatccagaggcttaattaaatgatgtggtaaaatgatgtttgagcattaagacaatgtaattctttatttctgggtggaaagatataccggattaaatttatctgtttaaaaaaatgacaaaagttatcaccaaaaccccctttcccatcttgcactgtttgttttggattgggtttgggggaaagagatgtttttcttagttgtctactttgtttgaacacttttgttgtggttcaagtgctgttttgtgtgttgggaccaaacagttgtcaataaactttacaagcgagcatcta

SEQ ID NO: 373407 - DNA, 3694 bp, Homo sapiens
cttgattctttctgtaaacctttattaaatccctatatgccaggtgagtaagtttcaggctgtaactctagaaaggtgttggttaatgggagagtcaagacccccaagcaggcaactagtcagggcggtcagggcagtgggcgcgctgaggagggccgtgtcagggcccacttcccaagcctggggagcctgttgcaaaaccttcaaggatgtgcctgagggaagcacgtgacaaggaggggagagagcattctgggcaaaggggatgatgacatgagcagatgcagggttgtgacaagtggcatggagtgtcgagaggctaagagggagctgagagctcggttagggagggcgtggctcctccaggtaaggagggaggactgtgttggagagagctggagcccaggtttgcatttgaaaagcaccccagtggtgctgtccatggtagagccgagagaagcaggcatggagaagggaactgggctaggatcctggccactgcagaggtctgggtcagtgttagatggagggattgagccagagtaaaaatagtagaatagaggaagtaggaaggacccaggcaaagcttgcctgggagctgagatcagtgacctggcgacggtgtgcacatgtagggggcctgggagcctagctccactactaccactctgcttggctgagatggagagcggcaccatcagggagaggactttaagatgctgataatgaacttagtttaaagggtctgagagattgctcttaattcttaggtggttgttcagtttctgcaaaaaaatggcaaagagctctcatgtgagaactaccttaatttatatgccaaagctggtcgtttgagttcactcagtctctcccctgccaatcatgaaaaccagccctcggagggcgagcgcatcctggaggtgcccgaatcgcacacagcctcggaactcaagcttggagctgacggcagtgggcccagtcacacagagcaggagcttctccgcctgaccgacgactcccccgtcgacctcctgtgtgcgcctgtcccctcgtgcctgccgtcccctcagctgagaccagaccccgttatcctccaatctgctgatctcattcagtttgaggagcgccctcaagagccttctgaaattatgattttaaaccaagaagaaaaaatggagattccaataccaggaaagagcaaaactctgacctctgactccagctcgtcctgcatctcagcagctgtccccgtgcctccctgcccctcctcggaaacctccgagtcactgctcagcaaggaccccgtggaaagcccggccaaaaagcaacccaaaaatagagtcaaattggcagccaacttttccttagcacctataaccaagctttaactcccatttggaatatagaattaggatgggaaaacactgtctgattctgcacacaaaagtgggtttcaaaaatacatccttttctgtgtcatgaaaaccccccgaagccattgacttcatcttacctgtgttctatcatgtttttcttttccattgaacacagctttgagctgaagtctttcttttcttcttcctttttctttcttttttcaattatttgaagaacttgtggcatttgttaaagaatccttaatatattttaccaaatttttagtaactattatgaaatacaatggtgttccaaaagaagaaagcactaaaaactcaactagcaggaagcggttttgcttccattgagccacgtcggtggtgtcatcctacatgtagcataatagagtctctcagcctttgcttactggtgtttccgacagtattaacccagtgcgtggcatgtctttgaagcaaagcctgtcccgctagcctgtgtgttcacacaccaaaggagaagggtaggcgaggggttcggagtgtattttcaggttggaatgtgaaggttcctggcttccatgtgacttgtaagtgtgccttgttttttatttaaactatgtctgtagttgacaaaagtggcttcatcacaaatttttttaaacgtttctactttggggttccatttaggagctttctagaaagttgaggatgtttgaagcttcccttctgtgttccagtttgatatgggttaggttaaggaaaaggagatggtctcgatgtcatggatttaaagtcagcatttggattacaacacacattattgtgtgtcgagaggcagcattggaaagagcctgattttctaaaatatgcatcaagtgcataaattacaaatcagagctgagtggggaggtgcttcagcagcagcgggatcaatacgatttccactgggaagagacaggaattctacctacacataggaaggccaaggttgatccacttaaccttgttattgtaattttaaagctggtatcggtagctgggaagctttatgtgtgtgtatgtcagctcagcatcttttaatcgtgtctgattttactctcgttacttctcgctgttggaagcatctctgggtttcttgtggcgtctggtgtggaatggccttcctctctaggtgcctgaggtgtccgctgacgggtggcctctcacccccctctagagaaacctgacatttacaatggattgtatttgtccggcaaaaaaggcggattcattcatagagcagaaagaacctgttggcgtaaggtcttccactagttagatggtttcttttggggaaatgtttatatttggtaacttctagaaagccagaaaatggactctgatttcatagcattttgataaaatgccacaaaataagggctatagagagatttttacaagtcagattttttgttccccaaatcttttaaatgaagccagtgactcccagttctcaacacatggccccagtcaagacagaacaccatggaaaaaaccctgtaagtattatggcactctccgaatcctcctgaaggcatttcctctacagacatagtgttacaggaagtgaaatgcaaatgtgcaattttttttaaaggagcttttaaacaaagtaataataattggtgttgagaacatcagttgccttattctaagatttcataaggctgagtttgcacgcttggacttcagttctgctagcatgtaaagagtggtggactttaaaaccgtaagaggtatcattacaagtcacctggaacagactcaaagaacaggttctttgggcaacagacaaagaagaatcaagttctgtgctgtcccgtgagtgtgtctgagtaccattcactggagttgctgcttaggtctgggacgtgtgtgtgactcttaacaattgctgtctgaaaatgagagagaagacttcggaagcacattgtgttcataatgtactccacaatggccagtccaattgctatctatttttttatccagaggcttaattaaatgatgtggtaaaatgatgtttgagcattaagacaatgtaattctttatttctgggtggaaagatataccggattaaatttatctgtttaaaaaaatgacaaaagttatcaccaaaaccccctttcccatcttgcactgtttgttttggattgggtttgggggaaagagatgtttttcttagttgtctactttgtttgaacacttttgttgtggttcaagtgctgttttgtgtgttgggaccaaacagttgtcaataaactttacaagcgagcatcta

SEQ ID NO: 373408 - DNA, 3676 bp, Homo sapiens
cttgattctttctgtaaacctttattaaatccctatatgccaggtgagtaagtttcaggctgtaactctagaaaggtgttggttaatgggagagtcaagacccccaagcaggcaactagtcagggcggtcagggcagtgggcgcgctgaggagggccgtgtcagggcccacttcccaagcctggggagcctgttgcaaaaccttcaaggatgtgcctgagggaagcacgtgacaaggaggggagagagcattctgggcaaaggggatgatgacatgagcagatgcagggttgtgacaagtggcatggagtgtcgagaggctaagagggagctgagagctcggttagggagggcgtggctcctccaggtaaggagggaggactgtgttggagagagctggagcccaggtttgcatttgaaaagcaccccagtggtgctgtccatggtagagccgagagaagcaggcatggagaagggaactgggctaggatcctggccactgcagaggtctgggtcagtgttagatggagggattgagccagagtaaaaatagtagaatagaggaagtaggaaggacccaggcaaagcttgcctgggagctgagatcagtgacctggcgacggtgtgcacatgtagggggctactaccactctgcttggctgagatggagagcggcaccatcagggagaggactttaagatgctgataatgaacttagtttaaagggtctgagagattgctcttaattcttaggtggttgttcagtttctgcaaaaaaatggcaaagagctctcatgtgagaactaccttaatttatatgccaaagctggtcgtttgagttcactcagtctctcccctgccaatcatgaaaaccagccctcggagggcgagcgcatcctggaggtgcccgaatcgcacacagcctcggaactcaagcttggagctgacggcagtgggcccagtcacacagagcaggagcttctccgcctgaccgacgactcccccgtcgacctcctgtgtgcgcctgtcccctcgtgcctgccgtcccctcagctgagaccagaccccgttatcctccaatctgctgatctcattcagtttgaggagcgccctcaagagccttctgaaattatgattttaaaccaagaagaaaaaatggagattccaataccaggaaagagcaaaactctgacctctgactccagctcgtcctgcatctcagcagctgtccccgtgcctccctgcccctcctcggaaacctccgagtcactgctcagcaaggaccccgtggaaagcccggccaaaaagcaacccaaaaatagagtcaaattggcagccaacttttccttagcacctataaccaagctttaactcccatttggaatatagaattaggatgggaaaacactgtctgattctgcacacaaaagtgggtttcaaaaatacatccttttctgtgtcatgaaaaccccccgaagccattgacttcatcttacctgtgttctatcatgtttttcttttccattgaacacagctttgagctgaagtctttcttttcttcttcctttttctttcttttttcaattatttgaagaacttgtggcatttgttaaagaatccttaatatattttaccaaatttttagtaactattatgaaatacaatggtgttccaaaagaagaaagcactaaaaactcaactagcaggaagcggttttgcttccattgagccacgtcggtggtgtcatcctacatgtagcataatagagtctctcagcctttgcttactggtgtttccgacagtattaacccagtgcgtggcatgtctttgaagcaaagcctgtcccgctagcctgtgtgttcacacaccaaaggagaagggtaggcgaggggttcggagtgtattttcaggttggaatgtgaaggttcctggcttccatgtgacttgtaagtgtgccttgttttttatttaaactatgtctgtagttgacaaaagtggcttcatcacaaatttttttaaacgtttctactttggggttccatttaggagctttctagaaagttgaggatgtttgaagcttcccttctgtgttccagtttgatatgggttaggttaaggaaaaggagatggtctcgatgtcatggatttaaagtcagcatttggattacaacacacattattgtgtgtcgagaggcagcattggaaagagcctgattttctaaaatatgcatcaagtgcataaattacaaatcagagctgagtggggaggtgcttcagcagcagcgggatcaatacgatttccactgggaagagacaggaattctacctacacataggaaggccaaggttgatccacttaaccttgttattgtaattttaaagctggtatcggtagctgggaagctttatgtgtgtgtatgtcagctcagcatcttttaatcgtgtctgattttactctcgttacttctcgctgttggaagcatctctgggtttcttgtggcgtctggtgtggaatggccttcctctctaggtgcctgaggtgtccgctgacgggtggcctctcacccccctctagagaaacctgacatttacaatggattgtatttgtccggcaaaaaaggcggattcattcatagagcagaaagaacctgttggcgtaaggtcttccactagttagatggtttcttttggggaaatgtttatatttggtaacttctagaaagccagaaaatggactctgatttcatagcattttgataaaatgccacaaaataagggctatagagagatttttacaagtcagattttttgttccccaaatcttttaaatgaagccagtgactcccagttctcaacacatggccccagtcaagacagaacaccatggaaaaaaccctgtaagtattatggcactctccgaatcctcctgaaggcatttcctctacagacatagtgttacaggaagtgaaatgcaaatgtgcaattttttttaaaggagcttttaaacaaagtaataataattggtgttgagaacatcagttgccttattctaagatttcataaggctgagtttgcacgcttggacttcagttctgctagcatgtaaagagtggtggactttaaaaccgtaagaggtatcattacaagtcacctggaacagactcaaagaacaggttctttgggcaacagacaaagaagaatcaagttctgtgctgtcccgtgagtgtgtctgagtaccattcactggagttgctgcttaggtctgggacgtgtgtgtgactcttaacaattgctgtctgaaaatgagagagaagacttcggaagcacattgtgttcataatgtactccacaatggccagtccaattgctatctatttttttatccagaggcttaattaaatgatgtggtaaaatgatgtttgagcattaagacaatgtaattctttatttctgggtggaaagatataccggattaaatttatctgtttaaaaaaatgacaaaagttatcaccaaaaccccctttcccatcttgcactgtttgttttggattgggtttgggggaaagagatgtttttcttagttgtctactttgtttgaacacttttgttgtggttcaagtgctgttttgtgtgttgggaccaaacagttgtcaataaactttacaagcgagcatcta

SEQ ID NO: 373409 - DNA, 2852 bp, Homo sapiens
aataccttaaatacttcttgactctcttatctttaaggcttagaaggaaaacttcaggtgtgagcccagggtgtgtgctgggggtgggcgtggaggtcctgtggtgtcacggccctccttgtttgcccagggcccagtcacacagagcaggagcttctccgcctgaccgacgactcccccgtcgacctcctgtgtgcgcctgtcccctcgtgcctgccgtcccctcagctgagaccagaccccgttatcctccaatctgctgatctcattcagtttgaggagcgccctcaagagccttctgaaattatgattttaaaccaagaagaaaaaatggagattccaataccaggaaagagcaaaactctgacctctgactccagctcgtcctgcatctcagcagctgtccccgtgcctccctgcccctcctcggaaacctccgagtcactgctcagcaaggaccccgtggaaagcccggccaaaaagcaacccaaaaatagagtcaaattggcagccaacttttccttagcacctataaccaagctttaactcccatttggaatatagaattaggatgggaaaacactgtctgattctgcacacaaaagtgggtttcaaaaatacatccttttctgtgtcatgaaaaccccccgaagccattgacttcatcttacctgtgttctatcatgtttttcttttccattgaacacagctttgagctgaagtctttcttttcttcttcctttttctttcttttttcaattatttgaagaacttgtggcatttgttaaagaatccttaatatattttaccaaatttttagtaactattatgaaatacaatggtgttccaaaagaagaaagcactaaaaactcaactagcaggaagcggttttgcttccattgagccacgtcggtggtgtcatcctacatgtagcataatagagtctctcagcctttgcttactggtgtttccgacagtattaacccagtgcgtggcatgtctttgaagcaaagcctgtcccgctagcctgtgtgttcacacaccaaaggagaagggtaggcgaggggttcggagtgtattttcaggttggaatgtgaaggttcctggcttccatgtgacttgtaagtgtgccttgttttttatttaaactatgtctgtagttgacaaaagtggcttcatcacaaatttttttaaacgtttctactttggggttccatttaggagctttctagaaagttgaggatgtttgaagcttcccttctgtgttccagtttgatatgggttaggttaaggaaaaggagatggtctcgatgtcatggatttaaagtcagcatttggattacaacacacattattgtgtgtcgagaggcagcattggaaagagcctgattttctaaaatatgcatcaagtgcataaattacaaatcagagctgagtggggaggtgcttcagcagcagcgggatcaatacgatttccactgggaagagacaggaattctacctacacataggaaggccaaggttgatccacttaaccttgttattgtaattttaaagctggtatcggtagctgggaagctttatgtgtgtgtatgtcagctcagcatcttttaatcgtgtctgattttactctcgttacttctcgctgttggaagcatctctgggtttcttgtggcgtctggtgtggaatggccttcctctctaggtgcctgaggtgtccgctgacgggtggcctctcacccccctctagagaaacctgacatttacaatggattgtatttgtccggcaaaaaaggcggattcattcatagagcagaaagaacctgttggcgtaaggtcttccactagttagatggtttcttttggggaaatgtttatatttggtaacttctagaaagccagaaaatggactctgatttcatagcattttgataaaatgccacaaaataagggctatagagagatttttacaagtcagattttttgttccccaaatcttttaaatgaagccagtgactcccagttctcaacacatggccccagtcaagacagaacaccatggaaaaaaccctgtaagtattatggcactctccgaatcctcctgaaggcatttcctctacagacatagtgttacaggaagtgaaatgcaaatgtgcaattttttttaaaggagcttttaaacaaagtaataataattggtgttgagaacatcagttgccttattctaagatttcataaggctgagtttgcacgcttggacttcagttctgctagcatgtaaagagtggtggactttaaaaccgtaagaggtatcattacaagtcacctggaacagactcaaagaacaggttctttgggcaacagacaaagaagaatcaagttctgtgctgtcccgtgagtgtgtctgagtaccattcactggagttgctgcttaggtctgggacgtgtgtgtgactcttaacaattgctgtctgaaaatgagagagaagacttcggaagcacattgtgttcataatgtactccacaatggccagtccaattgctatctatttttttatccagaggcttaattaaatgatgtggtaaaatgatgtttgagcattaagacaatgtaattctttatttctgggtggaaagatataccggattaaatttatctgtttaaaaaaatgacaaaagttatcaccaaaaccccctttcccatcttgcactgtttgttttggattgggtttgggggaaagagatgtttttcttagttgtctactttgtttgaacacttttgttgtggttcaagtgctgttttgtgtgttgggaccaaacagttgtcaataaactttacaagcgagcatcta

SEQ ID NO: 373410 - DNA, 3371 bp, Homo sapiens
cctggcttgctcaggtctgggtcagtgttagatggagggattgagccagagtaaaaatagtagacctgaggaggactgtgttggagagagctggagcccaggtttgcatttgaaaagcaccccagtggtgctgtccatggtagagccgagagaagcaggcatggagaagggaactgggctaggatcctggccactgcagaggtctgggtcagtgttagatggagggattgagccagagtaaaaatagtagaatagaggaagtaggaaggacccaggcaaagcttgcctgggagctgagatcagtgacctggcgacggtgtgcacatgtagggggctactaccactctgcttggctgagatggagagcggcaccatcagggagaggactttaagatgctgataatgaacttagtttaaagggtctgagagattgctcttaattcttaggtggttgttcagtttctgcaaaaaaatggcaaagagctctcatgtgagaactaccttaatttatatgccaaagctggtcgtttgagttcactcagtctctcccctgccaatcatgaaaaccagccctcggagggcgagcgcatcctggaggtgcccgaatcgcacacagcctcggaactcaagcttggagctgacggcagtgggcccagtcacacagagcaggagcttctccgcctgaccgacgactcccccgtcgacctcctgtgtgcgcctgtcccctcgtgcctgccgtcccctcagctgagaccagaccccgttatcctccaatctgctgatctcattcagtttgaggagcgccctcaagagccttctgaaattatgattttaaaccaagaagaaaaaatggagattccaataccaggaaagagcaaaactctgacctctgactccagctcgtcctgcatctcagcagctgtccccgtgcctccctgcccctcctcggaaacctccgagtcactgctcagcaaggaccccgtggaaagcccggccaaaaagcaacccaaaaatagagtcaaattggcagccaacttttccttagcacctataaccaagctttaactcccatttggaatatagaattaggatgggaaaacactgtctgattctgcacacaaaagtgggtttcaaaaatacatccttttctgtgtcatgaaaaccccccgaagccattgacttcatcttacctgtgttctatcatgtttttcttttccattgaacacagctttgagctgaagtctttcttttcttcttcctttttctttcttttttcaattatttgaagaacttgtggcatttgttaaagaatccttaatatattttaccaaatttttagtaactattatgaaatacaatggtgttccaaaagaagaaagcactaaaaactcaactagcaggaagcggttttgcttccattgagccacgtcggtggtgtcatcctacatgtagcataatagagtctctcagcctttgcttactggtgtttccgacagtattaacccagtgcgtggcatgtctttgaagcaaagcctgtcccgctagcctgtgtgttcacacaccaaaggagaagggtaggcgaggggttcggagtgtattttcaggttggaatgtgaaggttcctggcttccatgtgacttgtaagtgtgccttgttttttatttaaactatgtctgtagttgacaaaagtggcttcatcacaaatttttttaaacgtttctactttggggttccatttaggagctttctagaaagttgaggatgtttgaagcttcccttctgtgttccagtttgatatgggttaggttaaggaaaaggagatggtctcgatgtcatggatttaaagtcagcatttggattacaacacacattattgtgtgtcgagaggcagcattggaaagagcctgattttctaaaatatgcatcaagtgcataaattacaaatcagagctgagtggggaggtgcttcagcagcagcgggatcaatacgatttccactgggaagagacaggaattctacctacacataggaaggccaaggttgatccacttaaccttgttattgtaattttaaagctggtatcggtagctgggaagctttatgtgtgtgtatgtcagctcagcatcttttaatcgtgtctgattttactctcgttacttctcgctgttggaagcatctctgggtttcttgtggcgtctggtgtggaatggccttcctctctaggtgcctgaggtgtccgctgacgggtggcctctcacccccctctagagaaacctgacatttacaatggattgtatttgtccggcaaaaaaggcggattcattcatagagcagaaagaacctgttggcgtaaggtcttccactagttagatggtttcttttggggaaatgtttatatttggtaacttctagaaagccagaaaatggactctgatttcatagcattttgataaaatgccacaaaataagggctatagagagatttttacaagtcagattttttgttccccaaatcttttaaatgaagccagtgactcccagttctcaacacatggccccagtcaagacagaacaccatggaaaaaaccctgtaagtattatggcactctccgaatcctcctgaaggcatttcctctacagacatagtgttacaggaagtgaaatgcaaatgtgcaattttttttaaaggagcttttaaacaaagtaataataattggtgttgagaacatcagttgccttattctaagatttcataaggctgagtttgcacgcttggacttcagttctgctagcatgtaaagagtggtggactttaaaaccgtaagaggtatcattacaagtcacctggaacagactcaaagaacaggttctttgggcaacagacaaagaagaatcaagttctgtgctgtcccgtgagtgtgtctgagtaccattcactggagttgctgcttaggtctgggacgtgtgtgtgactcttaacaattgctgtctgaaaatgagagagaagacttcggaagcacattgtgttcataatgtactccacaatggccagtccaattgctatctatttttttatccagaggcttaattaaatgatgtggtaaaatgatgtttgagcattaagacaatgtaattctttatttctgggtggaaagatataccggattaaatttatctgtttaaaaaaatgacaaaagttatcaccaaaaccccctttcccatcttgcactgtttgttttggattgggtttgggggaaagagatgtttttcttagttgtctactttgtttgaacacttttgttgtggttcaagtgctgttttgtgtgttgggaccaaacagttgtcaataaactttacaagcgagcatcta

SEQ ID NO: 373411 - DNA, 3213 bp, Homo sapiens
ctcagtgggaggccttcacccgacggggtggggccagtcactaatatttctaatgctgcgttttctttttaaccaggttttcactaatgataagatggaagaatgtgtgaagctcacaagtctgtatttgtttgcaaagaatgtgcggtctttacttcatacttaccactaccagcagattttccttcatgagttttccatggcctataccaagtatgtcggagaaactctgcagcccaagacctacggccacagcagcgtggaggagctcttgggagcaattccacaggtggttgttcagtttctgcaaaaaaatggcaaagagctctcatgtgagaactaccttaatttatatgccaaagctggtcgtttgagttcactcagtctctcccctgccaatcatgaaaaccagccctcggagggcgagcgcatcctggaggtgcccgaatcgcacacagcctcggaactcaagcttggagctgacggcagtgggcccagtcacacagagcaggagcttctccgcctgaccgacgactcccccgtcgacctcctgtgtgcgcctgtcccctcgtgcctgccgtcccctcagctgagaccagaccccgttatcctccaatctgctgatctcattcagtttgaggagcgccctcaagagccttctgaaattatgattttaaaccaagaagaaaaaatggagattccaataccaggaaagagcaaaactctgacctctgactccagctcgtcctgcatctcagcagctgtccccgtgcctccctgcccctcctcggaaacctccgagtcactgctcagcaaggaccccgtggaaagcccggccaaaaagcaacccaaaaatagagtcaaattggcagccaacttttccttagcacctataaccaagctttaactcccatttggaatatagaattaggatgggaaaacactgtctgattctgcacacaaaagtgggtttcaaaaatacatccttttctgtgtcatgaaaaccccccgaagccattgacttcatcttacctgtgttctatcatgtttttcttttccattgaacacagctttgagctgaagtctttcttttcttcttcctttttctttcttttttcaattatttgaagaacttgtggcatttgttaaagaatccttaatatattttaccaaatttttagtaactattatgaaatacaatggtgttccaaaagaagaaagcactaaaaactcaactagcaggaagcggttttgcttccattgagccacgtcggtggtgtcatcctacatgtagcataatagagtctctcagcctttgcttactggtgtttccgacagtattaacccagtgcgtggcatgtctttgaagcaaagcctgtcccgctagcctgtgtgttcacacaccaaaggagaagggtaggcgaggggttcggagtgtattttcaggttggaatgtgaaggttcctggcttccatgtgacttgtaagtgtgccttgttttttatttaaactatgtctgtagttgacaaaagtggcttcatcacaaatttttttaaacgtttctactttggggttccatttaggagctttctagaaagttgaggatgtttgaagcttcccttctgtgttccagtttgatatgggttaggttaaggaaaaggagatggtctcgatgtcatggatttaaagtcagcatttggattacaacacacattattgtgtgtcgagaggcagcattggaaagagcctgattttctaaaatatgcatcaagtgcataaattacaaatcagagctgagtggggaggtgcttcagcagcagcgggatcaatacgatttccactgggaagagacaggaattctacctacacataggaaggccaaggttgatccacttaaccttgttattgtaattttaaagctggtatcggtagctgggaagctttatgtgtgtgtatgtcagctcagcatcttttaatcgtgtctgattttactctcgttacttctcgctgttggaagcatctctgggtttcttgtggcgtctggtgtggaatggccttcctctctaggtgcctgaggtgtccgctgacgggtggcctctcacccccctctagagaaacctgacatttacaatggattgtatttgtccggcaaaaaaggcggattcattcatagagcagaaagaacctgttggcgtaaggtcttccactagttagatggtttcttttggggaaatgtttatatttggtaacttctagaaagccagaaaatggactctgatttcatagcattttgataaaatgccacaaaataagggctatagagagatttttacaagtcagattttttgttccccaaatcttttaaatgaagccagtgactcccagttctcaacacatggccccagtcaagacagaacaccatggaaaaaaccctgtaagtattatggcactctccgaatcctcctgaaggcatttcctctacagacatagtgttacaggaagtgaaatgcaaatgtgcaattttttttaaaggagcttttaaacaaagtaataataattggtgttgagaacatcagttgccttattctaagatttcataaggctgagtttgcacgcttggacttcagttctgctagcatgtaaagagtggtggactttaaaaccgtaagaggtatcattacaagtcacctggaacagactcaaagaacaggttctttgggcaacagacaaagaagaatcaagttctgtgctgtcccgtgagtgtgtctgagtaccattcactggagttgctgcttaggtctgggacgtgtgtgtgactcttaacaattgctgtctgaaaatgagagagaagacttcggaagcacattgtgttcataatgtactccacaatggccagtccaattgctatctatttttttatccagaggcttaattaaatgatgtggtaaaatgatgtttgagcattaagacaatgtaattctttatttctgggtggaaagatataccggattaaatttatctgtttaaaaaaatgacaaaagttatcaccaaaaccccctttcccatcttgcactgtttgttttggattgggtttgggggaaagagatgtttttcttagttgtctactttgtttgaacacttttgttgtggttcaagtgctgttttgtgtgttgggaccaaacagttgtcaataaactttacaagcgagcatcta

SEQ ID NO: 373412 - DNA, 5696 bp, Homo sapiens
tgggcttaaagttacttgacttttagatttgtcttctcctgaaaaacagaaataatctcttagagtgatactttttgacagcttgattgcttattaggtcaaccagtgaggttggtagccttaaaacttggcattcattaataatttagtttttctaccactgagaatgataggtagtttattatcttattgtaacttgccatttattttccactacaagtaattgaaaatgttaacatttcttaagggtcaccagaagttgcagtagctggacaggtgctagaaaacttaccccccattggagttttttgggatattgaaaactgctccgttccctctggccggtcagcaactgctgttgtgcaaagaatccgtgagaagttttttaaaggccacagagaagcagaattcatctgtgtatgtgacatcagtaaagaaaacaaggaagttattcaagagctgaataattgccaggtaaccgttgcccacatcaatgctactgcaaagaatgccgctgatgataaactgcggcagagtctccgcagatttgcaaatacacacactgctccagccacagtggttcttgtgtcaactgatgtcaattttgcattggaacttagtgacctgagacacaggcatggtttccacattattttggtccataaaaaccaggcctcagaagcactgctgcatcatgctaacgagctgatcagatttgaagagttcatttccgacttgccccccaggttaccactaaaaatgccacagtgccacactctgctctatgtttataacctaccagcaaataaggatggcaagagcgtcagcaacaggctcagacgcctgtccgataattgtggtgggaaagtgctgagtatcacaggctgcagtgcaattctccgcttcataaaccaagatagtgcagagcgcgctcagaagcgaatggaaaacgaagatgtctttggtaataggatcattgtgtcatttactccaaaaaatagagaactctgtgaaacaaagagttcaaatgcaattgctgataaagtgaagtctcccaaaaaacttaagaatccaaaattgtgcctcatcaaagatgcaagtgaacaatcttccagtgccaaagccacgcctggaaaagggtcacaggcaaattctggatctgctacaaaaaatacaaatgttaaaagtttacaggagctgtgccgcatggagtcaaaaactggtcatagaaacagtgagcaccagcaaggtcacctgaggctggtcgtacccactcacggtaactcaagtgctgcagtgtcgacgccgaaaaactcgggggtggcagaacccgtttacaaaaccagtcagaaaaaggagaacctcagtgcccgaagtgttaccagttctcctgtagagaaaaaagataaagaggagactgtattccaagtgagttacccgtctgcttttagcaagttagttgcatccaggcaagtcagtcctctgctcgcatctcagtcttggtcttctagagcatccccgcttgctttcaacattgcaaattcgagcagcgaagccgactgcccagacccatttgcaaatggtgctgatgtccaagtcagcaacatagactacagattatcccggaaggagctgcagcagctcctgcaggaagcatttgccaggcatggcaaggtaactttttccctcttgtgcttgctttgttatactctctggtggagtctctagtcaagaggacctaatttgatatacataaccacagccgggatagaagtgtgactgaacaagtttgaactccttccttttccctttggtctgctcagggtggtgctataaatccagtttttacaatgttagccccagagagcaagacgcctagcagtgaaaagctcttgtcttaggcagaaattgaaatggcaatttgtggccaggcatggcggctcatgcctgtaattccagcactttgggaggccaaggcggccagatcacctgaggtcaggagtttgagaccagcctggcgagtgaaaccccgtctctactaaaaaaaaattagccgggcgtggtggtgcacgcctgtagtcccagctccttaggaggctaaggcaggagaattgcttaaacacgggaggcagaggttgcagtaagctgagatgacgccactgctctctggcctgggagacagagtgagactccatctcagaaagaaaaaaaaaaaaaggcaatttgataagtaaaacattgatggatttcagttagctcttcctgctgaaatacaggtaggattctaaaataatgttggctggtcttgtttatgccttattatatttgactcattttttaggtgcaattttgctaaaaatgcacctttttagtagattcttaaaaatggccatgtcctgggttttgtagagtctagaaaagaccccaaacactcttcccatgtgttggcctctgagcctgccttggaaacctgtgtgtgccagagcacacaggcaggccgggccagtgtcacatctctaaaggtcaccctatcctcactttcttacgtcctggtcagcagaagagcagagttcagacatactccttcatggaagcgctgcagtcgacaaatgtgttccttcatggttcaccttcagttttaagacgacagggttctgggcggacatagcgtttagttttcgcttttcctgttgtaggtgaagagtgttgagctcagcccccatacagattatcaactcaaggctgttgtgcaaatggaaaacttacaagatgcgatcggtgcagtgaatagcctccacagatacaaaattggcagcaaaaagatcctggtctcacttgccaccggggctgccagcaaatcactctctttactgagtgcagaaacaatgtctgttcttcaggatgcccctgcctgttgcctgcctctgtttaaatttacagatatctatgaaaaaaagtttggacacaagttgaatgtgtcagatctatataaattaacagacacggtcgcaatccgtgaacaaggaaacggacggctggtgtgtctcctacccagcagtcaggcccgccagagccccttggggtcttcccagtcacacgacggctcctccacgaattgcagcccaattatatttgaagagttagaatatcacgagcctgtctgcagacagcattgttccaataaggatttcagcgaacatgaatttgatccagactcttacaagattccttttgtgattctttctttgaagacatttgcgccccaggttcacagtcttctccagacccacgagggcaccgtgcctttattgagctttccagattgttacattgcagagtttggcgatctagaagtagtgcaagaaaaccaaggaggtgttcccttagaacacttcattacctgtgttccaggtgtaaacattgccactgctcagaatggcatcaaagtggttaaatggattcacaacaagcccccgcctcccaacactgacccttggcttctgcgttcgaagagtcctgtaggtaacccccagctgatccagttcagtagagaagtgattgacttgctgaaaagccagccatcttgtgtcatacccatcagtcatttcatcccatcctatcaccatcattttgcaaagcagtgccgagtgtcagactacggatactccaagctgattgagttattagaagcagtgcctcatgtattgcagattcttggaatgggctccaaacgtctgctgacccttacccacagggcccaggtgaagcgctttactcaggatttactaaaacttctcaaatcccaggccagcaaacaggtcattgtgagagaattctcacaggcttatcactggtgtttctcaaaggactgggatgtcactgaatatggtgtttgtgagttgattgacatcgtatcagagattccagacacaaccatctgcttgtcccaacaagataatgaaatggtgatttgtatccccaaaagagaacgcactcaggatgaaatagaaaggacaaaacagttctccaaggatgtcgttgatttgctgcgtcaccaaccccatttccggatgccctttaataaatttatcccttcttaccatcaccactttggccggcagtgcaaacttgcgtactatgggtttaccaaactacttgaactttttgaagccatacctgatactttacaagtattggaatgtggagaagaaaagatccttactctgacagaggtggagcggttcaaagctctagctgcccagtttgttaaactccttcggtcccaaaaagataactgccttatgatgacagatctccttacagaatatgctaaaacttttggttatacatttcgtctccaagactatgatgtcagttccatttcggctttaactcagaaactctgccatgtcgtgaaggttgccgatatagaatctggcagacagattcagctgatcaaccgaaagtctctgcgatctctcactgcccagttgctggtattgttgatgtcttgggaaggaaccacccatctttctgttgaggagctcaagagacattacgaaagtacccacaacactccccttaacccctgtgaatatggattcatgaccttgaccgaactgctgaagagcctgccatacttggttgaggttttcactaatgataagatggaagaatgtgtgaagctcacaagtctgtatttgtttgcaaagaatgtgcggtctttacttcatacttaccactaccagcagattttccttcatgagttttccatggcctataccaagtatgtcggagaaactctgcagcccaagacctacggccacagcagcgtggaggagctcttgggagcaattccacaggtggttgttcagtttctgcaaaaaaatggcaaagagctctcatgtgagaactaccttaatttatatgccaaagctggtcgtttgagttcactcagtctctcccctgccaatcatgaaaaccagccctcggagggcgagcgcatcctggaggtgcccgaatcgcacacagcctcggaactcaagcttggagctgacggcagtgggcccagtcacacagagcaggagcttctccgcctgaccgacgactcccccgtcgacctcctgtgtgcgcctgtcccctcgtgcctgccgtcccctcagctgagaccagaccccgttatcctccaatctgctgatctcattcagtttgaggagcgccctcaagagccttctggttgggtgactccatgttgtcatggggattttcttcggggtttaaaacaaaaccacgatgagatactgatatagtaaatgacggaagtgggaagggactaccccttttcaggtggaaaacactgtgctgattattcgaccttctttccccacctgggttcctgcagaatgggatgcacagcctgaggttgcctggcgagcatcaggcaagggcgatttggcagctctggagggctggtggctcggggctgtgggcgagtccacaggggtgggtggggcctcctgggcttctgctctcccagactttgtgaaggttcagctgctctcaggcacacctgtcaccagatgtacacgtcacccatggtgggggtccagagggcccaagggctttataaaggggtgaatggagggaggtgtctgtggctggagccccggactctgcccagtgatataacagacagg

SEQ ID NO: 373413 - DNA, 3503 bp, Homo sapiens
tgggcttaaagttacttgacttttagatttgtcttctcctgaaaaacagaaataatctcttagagtgatactttttgacagcttgattgcttattaggtcaaccagtgaggttggtagccttaaaacttggcattcattaataatttagtttttctaccactgagaatgataggtagtttattatcttattgtaacttgccatttattttccactacaagtaattgaaaatgttaacatttcttaagggtcaccagaagttgcagtagctggacaggtgctagaaaacttaccccccattggagttttttgggatattgaaaactgctccgttccctctggccggtcagcaactgctgttgtgcaaagaatccgtgagaagttttttaaaggccacagagaagcagaattcatctgtgtatgtgacatcagtaaagaaaacaaggaagttattcaagagctgaataattgccaggtaaccgttgcccacatcaatgctactgcaaagaatgccgctgatgataaactgcggcagagtctccgcagatttgcaaatacacacactgctccagccacagtggttcttgtgtcaactgatgtcaattttgcattggaacttagtgacctgagacacaggcatggtttccacattattttggtccataaaaaccaggcctcagaagcactgctgcatcatgctaacgagctgatcagatttgaagagttcatttccgacttgccccccaggttaccactaaaaatgccacagtgccacactctgctctatgtttataacctaccagcaaataaggatggcaagagcgtcagcaacaggctcagacgcctgtccgataattgtggtgggaaagtgctgagtatcacaggctgcagtgcaattctccgcttcataaaccaagatagtgcagagcgcgctcagaagcgaatggaaaacgaagatgtctttggtaataggatcattgtgtcatttactccaaaaaatagagaactctgtgaaacaaagagttcaaatgcaattgctgataaagtgaagtctcccaaaaaacttaagaatccaaaattgtgcctcatcaaagatgcaagtgaacaatcttccagtgccaaagccacgcctggaaaagggtcacaggcaaattctggatctgctacaaaaaatacaaatgttaaaagtttacaggagctgtgccgcatggagtcaaaaactggtcatagaaacagtgagcaccagcaaggtcacctgaggctggtcgtacccactcacggtaactcaagtgctgcagtgtcgacgccgaaaaactcgggggtggcagaacccgtttacaaaaccagtcagaaaaaggagaacctcagtgcccgaagtgttaccagttctcctgtagagaaaaaagataaagaggagactgtattccaagtgagttacccgtctgcttttagcaagttagttgcatccaggcaagtcagtcctctgctcgcatctcagtcttggtcttctagagcatccccgcttgctttcaacattgcaaattcgagcagcgaagccgactgcccagacccatttgcaaatggtgctgatgtccaagtcagcaacatagactacagattatcccggaaggagctgcagcagctcctgcaggaagcatttgccaggcatggcaaggtaactttttccctcttgtgcttgctttgttatactctctggtggagtctctagtcaagaggacctaatttgatatacataaccacagccgggatagaagtgtgactgaacaagtttgaactccttccttttccctttggtctgctcagggtggtgctataaatccagtttttacaatgttagccccagagagcaagacgcctagcagtgaaaagctcttgtcttaggcagaaattgaaatggcaatttgtggccaggcatggcggctcatgcctgtaattccagcactttgggaggccaaggcggccagatcacctgaggtcaggagtttgagaccagcctggcgagtgaaaccccgtctctactaaaaaaaaattagccgggcgtggtggtgcacgcctgtagtcccagctccttaggaggctaaggcaggagaattgcttaaacacgggaggcagaggttgcagtaagctgagatgacgccactgctctctggcctgggagacagagtgagactccatctcagaaagaaaaaaaaaaaaaggcaatttgataagtaaaacattgatggatttcagttagctcttcctgctgaaatacaggtaggattctaaaataatgttggctggtcttgtttatgccttattatatttgactcattttttaggtgcaattttgctaaaaatgcacctttttagtagattcttaaaaatggccatgtcctgggttttgtagagtctagaaaagaccccaaacactcttcccatgtgttggcctctgagcctgccttggaaacctgtgtgtgccagagcacacaggcaggccgggccagtgtcacatctctaaaggtcaccctatcctcactttcttacgtcctggtcagcagaagagcagagttcagacatactccttcatggaagcgctgcagtcgacaaatgtgttccttcatggttcaccttcagttttaagacgacagggttctgggcggacatagcgtttagttttcgcttttcctgttgtaggtgaagagtgttgagctcagcccccatacagattatcaactcaaggctgttgtgcaaatggaaaacttacaagatgcgatcggtgcagtgaatagcctccacagatacaaaattggcagcaaaaagatcctggtctcacttgccaccggggctgccagcaaatcactctctttactgaggtttggacacaagttgaatgtgtcagatctatataaattaacagacacggtcgcaatccgtgaacaaggaaacggacggctggtgtgtctcctacccagcagtcaggcccgccagagccccttggggtcttcccagtcacacgacggctcctccacgaattgcagcccaattatatttgaagagttagaatatcacgagcctgtctgcagacagcattgttccaataaggatttcagcgaacatgaatttgatccagactcttacaagattccttttgtgattctttctttgaagacatttgcgccccaggttcacagtcttctccagacccacgagggcaccgtgcctttattgaggtgaaccatctcaaagcctttgtcgatataatgccctagttctgctttttataggaagcctgccctttctgcccacatctctttacaaataagtactctacaatgcttcatcctcatgtgtttagccttcagtcaaagtacagtcatgcaccacataacaaaattttggccaaccatggactgtatataggacagtggtcccataagattataatcacatattttcactagacctttcgatgattagatacacaaataccattgtgttata

SEQ ID NO: 373414 - DNA, 2136 bp, Homo sapiens
tgggcttaaagttacttgacttttagatttgtcttctcctgaaaaacagaaataatctcttagagtgatactttttgacagcttgattgcttattaggtcaaccagtgaggttggtagccttaaaacttggcattcattaataatttagtttttctaccactgagaatgataggtagtttattatcttattgtaacttgccatttattttccactacaagtaattgaaaatgttaacatttcttaagggtcaccagaagttgcagtagctggacaggtgctagaaaacttaccccccattggagttttttgggatattgaaaactgctccgttccctctggccggtcagcaactgctgttgtgcaaagaatccgtgagaagttttttaaaggccacagagaagcagaattcatctgtgtatgtgacatcagtaaagaaaacaaggaagttattcaagagctgaataattgccaggtaaccgttgcccacatcaatgctactgcaaagaatgccgctgatgataaactgcggcagagtctccgcagatttgcaaatacacacactgctccagccacagtggttcttgtgtcaactgatgtcaattttgcattggaacttagtgacctgagacacaggcatggtttccacattattttggtccataaaaaccaggcctcagaagcactgctgcatcatgctaacgagctgatcagatttgaagagttcatttccgacttgccccccaggttaccactaaaaatgccacagtgccacactctgctctatgtttataacctaccagcaaataaggatggcaagagcgtcagcaacaggctcagacgcctgtccgataattgtggtgggaaagtgctgagtatcacaggctgcagtgcaattctccgcttcataaaccaagatagtgcagagcgcgctcagaagcgaatggaaaacgaagatgtctttggtaataggatcattgtgtcatttactccaaaaaatagagaactctgtgaaacaaagagttcaaatgcaattgctgataaagtgaagtctcccaaaaaacttaagaatccaaaattgtgcctcatcaaagatgcaagtgaacaatcttccagtgccaaagccacgcctggaaaagggtcacaggcaaattctggatctgctacaaaaaatacaaatgttaaaagtttacaggagctgtgccgcatggagtcaaaaactggtcatagaaacagtgagcaccagcaaggtcacctgaggctggtcgtacccactcacggtaactcaagtgctgcagtgtcgacgccgaaaaactcgggggtggcagaacccgtttacaaaaccagtcagaaaaaggagaacctcagtgcccgaagtgttaccagttctcctgtagagaaaaaagataaagaggagactgtattccaagtgagttacccgtctgcttttagcaagttagttgcatccaggcaagtcagtcctctgctcgcatctcagtcttggtcttctagcaggagtatgtctccaaaccttttaaacagagcatccccgcttgctttcaacattgcaaattcgagcagcgaagccgactgcccagacccatttgcaaatggtgctgatgtccaagtcagcaacatagactacagattatcccggaaggagctgcagcagctcctgcaggaagcatttgccaggcatggcaaggtgaagagtgttgagctcagcccccatacagattatcaactcaaggctgttgtgcaaatggaaaacttacaagatgcgatcggtgcagtgaatagcctccacagatacaaaattggcagcaaaaagatcctggtctcacttgccaccggggctgccagcaaatcactctctttactgaggtaagaaacaagcaagctgtttatttcaggaaataacatttgacccagaaacaattttagaaataataaaaatagattcaatcacattcccacccccttgtgatgattgcatgtggaataatgcttattctagattgatacagttagaaacaagccatttgactcttgtctaagtcattaatcaaagctggaatacagcttaaacttgacaggcacttgggagtaaaataatacgcaacatgttcaaataggt

SEQ ID NO: 373415 - DNA, 1727 bp, Homo sapiens
tgggcttaaagttacttgacttttagatttgtcttctcctgaaaaacagaaataatctcttagagtgatactttttgacagcttgattgcttattaggtcaaccagtgaggttggtagccttaaaacttggcattcattaataatttagtttttctaccactgagaatgataggtagtttattatcttattgtaacttgccatttattttccactacaagtaattgaaaatgttaacatttcttaagggtcaccagaagttgcagtagctggacaggtgctagaaaacttaccccccattggagttttttgggatattgaaaactgctccgttccctctggccggtcagcaactgctgttgtgcaaagaatccgtgagaagttttttaaaggccacagagaagcagaattcatctgtgtatgtgacatcagtaaagaaaacaaggaagttattcaagagctgaataattgccaggtaaccgttgcccacatcaatgctactgcaaagaatgccgctgatgataaactgcggcagagtctccgcagatttgcaaatacacacactgctccagccacagtggttcttgtgtcaactgatgtcaattttgcattggaacttagtgacctgagacacaggcatggtttccacattattttggtccataaaaaccaggcctcagaagcactgctgcatcatgctaacgagctgatcagatttgaagagttcatttccgacttgccccccaggttaccactaaaaatgccacagtgccacactctgctctatgtttataacctaccagcaaataaggatggcaagagcgtcagcaacaggctcagacgcctgtccgataattgtggtgggaaagtgctgagtatcacaggctgcagtgcaattctccgcttcataaaccaagatagtgcagagcgcgctcagaagcgaatggaaaacgaagatgtctttggtaataggatcattgtgtcatttactccaaaaaatagagaactctgtgaaacaaagagttcaaatgcaattgctgataaagtgaagtctcccaaaaaacttaagaatccaaaattgtgcctcatcaaagatgcaagtgaacaatcttccagtgccaaagccacgcctggaaaagggtcacaggcaaattctggatctgctacaaaaaatacaaatgttaaaagtttacaggagctgtgccgcatggagtcaaaaactggtcatagaaacagtgagcaccagcaaggtcacctgaggctggtcgtacccactcacggtaactcaagtgctgcagtgtcgacgccgaaaaactcgggggtggcagaacccgtttacaaaaccagtcagaaaaaggagaacctcagtgcccgaagtgttaccagttctcctgtagagaaaaaagataaagaggagactgtattccaagtgagttacccgtctgcttttagcaagttagttgcatccaggcaagtcagtcctctgctcgcatctcagtcttggtcttctagagcatccccgcttgctttcaacattgcaaattcgagcagcgaagccgactgcccagacccatttgcaaatggtgctgatgtccaagtcagcaacatagactacagattatcccggaaggagctgcagcagctcctgcaggaagcatttgccaggcatggcaagtgaagagtgttgagctcagcccccacagagagagcgtcggtaccagctatata

SEQ ID NO: 373416 - DNA, 363 bp, Homo sapiens
ttaccttgtgctcagtattaataatttttaaagtttaagttaattttcaaatttgagtctccccaacatatttgctcctttttaatactgaaagtaacatatgtgtcttggaattcttttggtaagattgtcttacattcttctgatgtgaaacgtgtttctttcctaagaaacgggggaagcaattttgaatatagtccagcctttcctttcttctcagtgggtgtcaatagagttgtctgtctttgtcaagtgtttctaatgtttggggatggggttggtctgtaccttttctttcagctgatgtcaattttgcattggaacttagtgacctgagacacaggcatggtttccacattattt

SEQ ID NO: 373417 - DNA, 389 bp, Homo sapiens
tgcagaaacaatgtctgttcttcaggatgcccctgcctgttgcctgcctctgtttaaatttacagatatctatgaaaaaaaagtaagttaggtatattttttctttatccagtcagtactgattggtggcttacatgcacaaaaccatggtaatgactcttgaggaacttcagcctggtagaggagaggagacagagacactggcattcagatttacatgtcaatgaatgtttagcagacagttttaaaacgtcttttatttttaacaaagttagacctttggtcctcagtgttgtgcttatttttcccctaattgactagctttagtttgttttttttgtttgtttgtttgttttttaatttttttggagacagagtctcgctctgtt

SEQ ID NO: 373418 - DNA, 6749 bp, Homo sapiens
tgggcttaaagttacttgacttttagatttgtcttctcctgaaaaacagaaataatctcttagagtgatactttttgacagcttgattgcttattaggtcaaccagtgaggttggtagccttaaaacttggcattcattaataatttagtttttctaccactgagaatgataggtagtttattatcttattgtaacttgccatttattttccactacaagtaattgaaaatgttaacatttcttaagggtcaccagaagttgcagtagctggacaggtgctagaaaacttaccccccattggagttttttgggatattgaaaactgctccgttccctctggccggtcagcaactgctgttgtgcaaagaatccgtgagaagttttttaaaggccacagagaagcagaattcatctgtgtatgtgacatcagtaaagaaaacaaggaagttattcaagagctgaataattgccaggtaaccgttgcccacatcaatgctactgcaaagaatgccgctgatgataaactgcggcagagtctccgcagatttgcaaatacacacactgctccagccacagtggttcttgtgtcaactgatgtcaattttgcattggaacttagtgacctgagacacaggcatggtttccacattattttggtccataaaaaccaggcctcagaagcactgctgcatcatgctaacgagctgatcagatttgaagagttcatttccgacttgccccccaggttaccactaaaaatgccacagtgccacactctgctctatgtttataacctaccagcaaataaggatggcaagagcgtcagcaacaggctcagacgcctgtccgataattgtggtgggaaagtgctgagtatcacaggctgcagtgcaattctccgcttcataaaccaagatagtgcagagcgcgctcagaagcgaatggaaaacgaagatgtctttggtaataggatcattgtgtcatttactccaaaaaatagagaactctgtgaaacaaagagttcaaatgcaattgctgataaagtgaagtctcccaaaaaacttaagaatccaaaattgtgcctcatcaaagatgcaagtgaacaatcttccagtgccaaagccacgcctggaaaagggtcacaggcaaattctggatctgctacaaaaaatacaaatgttaaaagtttacaggagctgtgccgcatggagtcaaaaactggtcatagaaacagtgagcaccagcaaggtcacctgaggctggtcgtacccactcacggtaactcaagtgctgcagtgtcgacgccgaaaaactcgggggtggcagaacccgtttacaaaaccagtcagaaaaaggagaacctcagtgcccgaagtgttaccagttctcctgtagagaaaaaagataaagaggagactgtattccaagtgagttacccgtctgcttttagcaagttagttgcatccaggcaagtcagtcctctgctcgcatctcagtcttggtcttctagagcatccccgcttgctttcaacattgcaaattcgagcagcgaagccgactgcccagacccatttgcaaatggtgctgatgtccaagtcagcaacatagactacagattatcccggaaggagctgcagcagctcctgcaggaagcatttgccaggcatggcaaggtgaagagtgttgagctcagcccccatacagattatcaactcaaggctgttgtgcaaatggaaaacttacaagatgcgatcggtgcagtgaatagcctccacagatacaaaattggcagcaaaaagatcctggtctcacttgccaccggggctgccagcaaatcactctctttactgagtgcagaaacaatgtctgttcttcaggatgcccctgcctgttgcctgcctctgtttaaatttacagatatctatgaaaaaaagtttggacacaagttgaatgtgtcagatctatataaattaacagacacggtcgcaatccgtgaacaaggaaacggacggctggtgtgtctcctacccagcagtcaggcccgccagagccccttggggtcttcccagtcacacgacggctcctccacgaattgcagcccaattatatttgaagagttagaatatcacgagcctgtctgcagacagcattgttccaataaggatttcagcgaacatgaatttgatccagactcttacaagattccttttgtgattctttctttgaagacatttgcgccccaggttcacagtcttctccagacccacgagggcaccgtgcctttattgagctttccagattgttacattgcagagtttggcgatctagaagtagtgcaagaaaaccaaggaggtgttcccttagaacacttcattacctgtgttccaggtgtaaacattgccactgctcagaatggcatcaaagtggttaaatggattcacaacaagcccccgcctcccaacactgacccttggcttctgcgttcgaagagtcctgtaggtaacccccagctgatccagttcagtagagaagtgattgacttgctgaaaagccagccatcttgtgtcatacccatcagtcatttcatcccatcctatcaccatcattttgcaaagcagtgccgagtgtcagactacggatactccaagctgattgagttattagaagcagtgcctcatgtattgcagattcttggaatgggctccaaacgtctgctgacccttacccacagggcccaggtgaagcgctttactcaggatttactaaaacttctcaaatcccaggccagcaaacaggtcattgtgagagaattctcacaggcttatcactggtgtttctcaaaggactgggatgtcactgaatatggtgtttgtgagttgattgacatcgtatcagagattccagacacaaccatctgcttgtcccaacaagataatgaaatggtgatttgtatccccaaaagagaacgcactcaggatgaaatagaaaggacaaaacagttctccaaggatgtcgttgatttgctgcgtcaccaaccccatttccggatgccctttaataaatttatcccttcttaccatcaccactttggccggcagtgcaaacttgcgtactatgggtttaccaaactacttgaactttttgaagccatacctgatactttacaagtattggaatgtggagaagaaaagatccttactctgacagaggtggagcggttcaaagctctagctgcccagtttgttaaactccttcggtcccaaaaagataactgccttatgatgacagatctccttacagaatatgctaaaacttttggttatacatttcgtctccaagactatgatgtcagttccatttcggctttaactcagaaactctgccatgtcgtgaaggttgccgatatagaatctggcagacagattcagctgatcaaccgaaagtctctgcgatctctcactgcccagttgctggtattgttgatgtcttgggaaggaaccacccatctttctgttgaggagctcaagagacattacgaaagtacccacaacactccccttaacccctgtgaatatggattcatgaccttgaccgaactgctgaagagcctgccatacttggttgaggttttcactaatgataagatggaagaatgtgtgaagctcacaagtctgtatttgtttgcaaagaatgtgcggtctttacttcatacttaccactaccagcagattttccttcatgagttttccatggcctataccaagtatgtcggagaaactctgcagcccaagacctacggccacagcagcgtggaggagctcttgggagcaattccacaggtggtctggataaaaggacatggtcataagagaattgtagtgttaaaaaatgacatgaaaagtcgtttgagttcactcagtctctcccctgccaatcatgaaaaccagccctcggagggcgagcgcatcctggaggtgcccgaatcgcacacagcctcggaactcaagcttggagctgacggcagtgggcccagtcacacagagcaggagcttctccgcctgaccgacgactcccccgtcgacctcctgtgtgcgcctgtcccctcgtgcctgccgtcccctcagctgagaccagaccccgttatcctccaatctgctgatctcattcagtttgaggagcgccctcaagagccttctgaaattatgattttaaaccaagaagaaaaaatggagattccaataccaggaaagagcaaaactctgacctctgactccagctcgtcctgcatctcagcagctgtccccgtgcctccctgcccctcctcggaaacctccgagtcactgctcagcaaggaccccgtggaaagcccggccaaaaagcaacccaaaaatagagtcaaattggcagccaacttttccttagcacctataaccaagctttaactcccatttggaatatagaattaggatgggaaaacactgtctgattctgcacacaaaagtgggtttcaaaaatacatccttttctgtgtcatgaaaaccccccgaagccattgacttcatcttacctgtgttctatcatgtttttcttttccattgaacacagctttgagctgaagtctttcttttcttcttcctttttctttcttttttcaattatttgaagaacttgtggcatttgttaaagaatccttaatatattttaccaaatttttagtaactattatgaaatacaatggtgttccaaaagaagaaagcactaaaaactcaactagcaggaagcggttttgcttccattgagccacgtcggtggtgtcatcctacatgtagcataatagagtctctcagcctttgcttactggtgtttccgacagtattaacccagtgcgtggcatgtctttgaagcaaagcctgtcccgctagcctgtgtgttcacacaccaaaggagaagggtaggcgaggggttcggagtgtattttcaggttggaatgtgaaggttcctggcttccatgtgacttgtaagtgtgccttgttttttatttaaactatgtctgtagttgacaaaagtggcttcatcacaaatttttttaaacgtttctactttggggttccatttaggagctttctagaaagttgaggatgtttgaagcttcccttctgtgttccagtttgatatgggttaggttaaggaaaaggagatggtctcgatgtcatggatttaaagtcagcatttggattacaacacacattattgtgtgtcgagaggcagcattggaaagagcctgattttctaaaatatgcatcaagtgcataaattacaaatcagagctgagtggggaggtgcttcagcagcagcgggatcaatacgatttccactgggaagagacaggaattctacctacacataggaaggccaaggttgatccacttaaccttgttattgtaattttaaagctggtatcggtagctgggaagctttatgtgtgtgtatgtcagctcagcatcttttaatcgtgtctgattttactctcgttacttctcgctgttggaagcatctctgggtttcttgtggcgtctggtgtggaatggccttcctctctaggtgcctgaggtgtccgctgacgggtggcctctcacccccctctagagaaacctgacatttacaatggattgtatttgtccggcaaaaaaggcggattcattcatagagcagaaagaacctgttggcgtaaggtcttccactagttagatggtttcttttggggaaatgtttatatttggtaacttctagaaagccagaaaatggactctgatttcatagcattttgataaaatgccacaaaataagggctatagagagatttttacaagtcagattttttgttccccaaatcttttaaatgaagccagtgactcccagttctcaacacatggccccagtcaagacagaacaccatggaaaaaaccctgtaagtattatggcactctccgaatcctcctgaaggcatttcctctacagacatagtgttacaggaagtgaaatgcaaatgtgcaattttttttaaaggagcttttaaacaaagtaataataattggtgttgagaacatcagttgccttattctaagatttcataaggctgagtttgcacgcttggacttcagttctgctagcatgtaaagagtggtggactttaaaaccgtaagaggtatcattacaagtcacctggaacagactcaaagaacaggttctttgggcaacagacaaagaagaatcaagttctgtgctgtcccgtgagtgtgtctgagtaccattcactggagttgctgcttaggtctgggacgtgtgtgtgactcttaacaattgctgtctgaaaatgagagagaagacttcggaagcacattgtgttcataatgtactccacaatggccagtccaattgctatctatttttttatccagaggcttaattaaatgatgtggtaaaatgatgtttgagcattaagacaatgtaattctttatttctgggtggaaagatataccggattaaatttatctgtttaaaaaaatgacaaaagttatcaccaaaaccccctttcccatcttgcactgtttgttttggattgggtttgggggaaagagatgtttttcttagttgtctactttgtttgaacacttttgttgtggttcaagtgctgttttgtgtgttgggaccaaacagttgtcaataaactttacaagcgagcatcta

SEQ ID NO: 373419 - DNA, 6374 bp, Homo sapiens
tgggcttaaagttacttgacttttagatttgtcttctcctgaaaaacagaaataatctcttagagtgatactttttgacagcttgattgcttattaggtcaaccagtgaggttggtagccttaaaacttggcattcattaataatttagtttttctaccactgagaatgataggtagtttattatcttattgtaacttgccatttattttccactacaagtaattgaaaatgttaacatttcttaagggtcaccagaagttgcagtagctggacaggtgctagaaaacttaccccccattggagttttttgggatattgaaaactgctccgttccctctggccggtcagcaactgctgttgtgcaaagaatccgtgagaagttttttaaaggccacagagaagcagaattcatctgtgtatgtgacatcagtaaagaaaacaaggaagttattcaagagctgaataattgccaggtaaccgttgcccacatcaatgctactgcaaagaatgccgctgatgataaactgcggcagagtctccgcagatttgcaaatacacacactgctccagccacagtggttcttgtgtcaactgatgtcaattttgcattggaacttagtgacctgagacacaggcatggtttccacattattttggtccataaaaaccaggcctcagaagcactgctgcatcatgctaacgagctgatcagatttgaagagttcatttccgacttgccccccaggttaccactaaaaatgccacagtgccacactctgctctatgtttataacctaccagcaaataaggatggcaagagcgtcagcaacaggctcagacgcctgtccgataattgtggtgggaaagtgctgagtatcacaggctgcagtgcaattctccgcttcataaaccaagatagtgcagagcgcgctcagaagcgaatggaaaacgaagatgtctttgagaaaaaagataaagaggagactgtattccaagtgagttacccgtctgcttttagcaagttagttgcatccaggcaagtcagtcctctgctcgcatctcagtcttggtcttctagagcatccccgcttgctttcaacattgcaaattcgagcagcgaagccgactgcccagacccatttgcaaatggtgctgatgtccaagtcagcaacatagactacagattatcccggaaggagctgcagcagctcctgcaggaagcatttgccaggcatggcaaggtgaagagtgttgagctcagcccccatacagattatcaactcaaggctgttgtgcaaatggaaaacttacaagatgcgatcggtgcagtgaatagcctccacagatacaaaattggcagcaaaaagatcctggtctcacttgccaccggggctgccagcaaatcactctctttactgaggtttggacacaagttgaatgtgtcagatctatataaattaacagacacggtcgcaatccgtgaacaaggaaacggacggctggtgtgtctcctacccagcagtcaggcccgccagagccccttggggtcttcccagtcacacgacggctcctccacgaattgcagcccaattatatttgaagagttagaatatcacgagcctgtctgcagacagcattgttccaataaggatttcagctttccagattgttacattgcagagtttggcgatctagaagtagtgcaagaaaaccaaggaggtgttcccttagaacacttcattacctgtgttccaggtgtaaacattgccactgctcagaatggcatcaaagtggttaaatggattcacaacaagcccccgcctcccaacactgacccttggcttctgcgttcgaagagtcctgtaggtaacccccagctgatccagttcagtagagaagtgattgacttgctgaaaagccagccatcttgtgtcatacccatcagtcatttcatcccatcctatcaccatcattttgcaaagcagtgccgagtgtcagactacggatactccaagctgattgagttattagaagcagtgcctcatgtattgcagattcttggaatgggctccaaacgtctgctgacccttacccacagggcccaggtgaagcgctttactcaggatttactaaaacttctcaaatcccaggccagcaaacaggtcattgtgagagaattctcacaggcttatcactggtgtttctcaaaggactgggatgtcactgaatatggtgtttgtgagttgattgacatcgtatcagagattccagacacaaccatctgcttgtcccaacaagataatgaaatggtgatttgtatccccaaaagagaacgcactcaggatgaaatagaaaggacaaaacagttctccaaggatgtcgttgatttgctgcgtcaccaaccccatttccggatgccctttaataaatttatcccttcttaccatcaccactttggccggcagtgcaaacttgcgtactatgggtttaccaaactacttgaactttttgaagccatacctgatactttacaagtattggaatgtggagaagaaaagatccttactctgacagaggtggagcggttcaaagctctagctgcccagtttgttaaactccttcggtcccaaaaagataactgccttatgatgacagatctccttacagaatatgctaaaacttttggttatacatttcgtctccaagactatgatgtcagttccatttcggctttaactcagaaactctgccatgtcgtgaaggttgccgatatagaatctggcagacagattcagctgatcaaccgaaagtctctgcgatctctcactgcccagttgctggtattgttgatgtcttgggaaggaaccacccatctttctgttgaggagctcaagagacattacgaaagtacccacaacactccccttaacccctgtgaatatggattcatgaccttgaccgaactgctgaagagcctgccatacttggttgagaccgctgcagccttcgacttgcaaatagaactgaagtttgctggaggctatagccttctcttggaggaaatccttgaatatatccctcctccttttctttctcctcttccttctttccttcctcctcctcctttcttcttctttgtcttttttgtcatcttcatcttcttcatctttgtctttgtccaattcgtcgtcttcgtcttctttatcgtcgtcttcgtcttcttcatcgtcgtcttcgttttcactaatgataagatggaagaatgtgtgaagctcacaagtctgtatttgtttgcaaagaatgtgcggtctttacttcatacttaccactaccagcagattttccttcatgagttttccatggcctataccaagtatgtcggagaaactctgcagcccaagacctacggccacagcagcgtggaggagctcttgggagcaattccacaggtggttgttcagtttctgcaaaaaaatggcaaagagctctcatgtgagaactaccttaatttatatgccaaagctggtcgtttgagttcactcagtctctcccctgccaatcatgaaaaccagccctcggagggcgagcgcatcctggaggtgcccgaatcgcacacagcctcggaactcaagcttggagctgacggcagtgggcccagtcacacagagcaggagcttctccgcctgaccgacgactcccccgtcgacctcctgtgtgcgcctgtcccctcgtgcctgccgtcccctcagctgagaccagaccccgttatcctccaatctgctgatctcattcagtttgaggagcgccctcaagagccttctgaaattatgattttaaaccaagaagaaaaaatggagattccaataccaggaaagagcaaaactctgacctctgactccagctcgtcctgcatctcagcagctgtccccgtgcctccctgcccctcctcggaaacctccgagtcactgctcagcaaggaccccgtggaaagcccggccaaaaagcaacccaaaaatagagtcaaattggcagccaacttttccttagcacctataaccaagctttaactcccatttggaatatagaattaggatgggaaaacactgtctgattctgcacacaaaagtgggtttcaaaaatacatccttttctgtgtcatgaaaaccccccgaagccattgacttcatcttacctgtgttctatcatgtttttcttttccattgaacacagctttgagctgaagtctttcttttcttcttcctttttctttcttttttcaattatttgaagaacttgtggcatttgttaaagaatccttaatatattttaccaaatttttagtaactattatgaaatacaatggtgttccaaaagaagaaagcactaaaaactcaactagcaggaagcggttttgcttccattgagccacgtcggtggtgtcatcctacatgtagcataatagagtctctcagcctttgcttactggtgtttccgacagtattaacccagtgcgtggcatgtctttgaagcaaagcctgtcccgctagcctgtgtgttcacacaccaaaggagaagggtaggcgaggggttcggagtgtattttcaggttggaatgtgaaggttcctggcttccatgtgacttgtaagtgtgccttgttttttatttaaactatgtctgtagttgacaaaagtggcttcatcacaaatttttttaaacgtttctactttggggttccatttaggagctttctagaaagttgaggatgtttgaagcttcccttctgtgttccagtttgatatgggttaggttaaggaaaaggagatggtctcgatgtcatggatttaaagtcagcatttggattacaacacacattattgtgtgtcgagaggcagcattggaaagagcctgattttctaaaatatgcatcaagtgcataaattacaaatcagagctgagtggggaggtgcttcagcagcagcgggatcaatacgatttccactgggaagagacaggaattctacctacacataggaaggccaaggttgatccacttaaccttgttattgtaattttaaagctggtatcggtagctgggaagctttatgtgtgtgtatgtcagctcagcatcttttaatcgtgtctgattttactctcgttacttctcgctgttggaagcatctctgggtttcttgtggcgtctggtgtggaatggccttcctctctaggtgcctgaggtgtccgctgacgggtggcctctcacccccctctagagaaacctgacatttacaatggattgtatttgtccggcaaaaaaggcggattcattcatagagcagaaagaacctgttggcgtaaggtcttccactagttagatggtttcttttggggaaatgtttatatttggtaacttctagaaagccagaaaatggactctgatttcatagcattttgataaaatgccacaaaataagggctatagagagatttttacaagtcagattttttgttccccaaatcttttaaatgaagccagtgactcccagttctcaacacatggccccagtcaagacagaacaccatggaaaaaaccctgtaagtattatggcactctccgaatcctcctgaaggcatttcctctacagacatagtgttacaggaagtgaaatgcaaatgtgcaattttttttaaaggagcttttaaacaaagtaataataattggtgttgagaacatcagttgccttattctaagatttcataaggctgagtttgcacgcttggacttcagttctgctagcatgtaaagagtggtggactttaaaaccgtaagaggtatcattacaagtcacctggaacagactcaaagaacaggttctttgggcaacagacaaagaagaatcaagttctgtgctgtcccgtgagtgtgtctgagtaccattcactggagttgctgcttaggtctgggacgtgtgtgtgactcttaacaattgctgtctgaaaatgagagagaagacttcggaagcacattgtgttcataatgtactccacaatggccagtccaattgctatctatttttttatccagaggcttaattaaatgatgtggtaaaatgatgtttgagcattaagacaatgtaattctttatttctgggtggaaagatataccggattaaatttatctgtttaaaaaaatgacaaaagttatcaccaaaaccccctttcccatcttgcactgtttgttttggattgggtttgggggaaagagatgtttttcttagttgtctactttgtttgaacacttttgttgtggttcaagtgctgttttgtgtgttgggaccaaacagttgtcaataaactttacaagcgagcatcta

SEQ ID NO: 373420 - DNA, 6794 bp, Homo sapiens
tgggcttaaagttacttgacttttagatttgtcttctcctgaaaaacagaaataatctcttagagtgatactttttgacagcttgattgcttattaggtcaaccagtgaggttggtagccttaaaacttggcattcattaataatttagtttttctaccactgagaatgataggtagtttattatcttattgtaacttgccatttattttccactacaagtaattgaaaatgttaacatttcttaagggtcaccagaagttgcagtagctggacaggtgctagaaaacttaccccccattggagttttttgggatattgaaaactgctccgttccctctggccggtcagcaactgctgttgtgcaaagaatccgtgagaagttttttaaaggccacagagaagcagaattcatctgtgtatgtgacatcagtaaagaaaacaaggaagttattcaagagctgaataattgccaggtaaccgttgcccacatcaatgctactgcaaagaatgccgctgatgataaactgcggcagagtctccgcagatttgcaaatacacacactgctccagccacagtggttcttgtgtcaactgatgtcaattttgcattggaacttagtgacctgagacacaggcatggtttccacattattttggtccataaaaaccaggcctcagaagcactgctgcatcatgctaacgagctgatcagatttgaagagttcatttccgacttgccccccaggttaccactaaaaatgccacagtgccacactctgctctatgtttataacctaccagcaaataaggatggcaagagcgtcagcaacaggctcagacgcctgtccgataattgtggtgggaaagtgctgagtatcacaggctgcagtgcaattctccgcttcataaaccaagatagtgcagagcgcgctcagaagcgaatggaaaacgaagatgtctttggtaataggatcattgtgtcatttactccaaaaaatagagaactctgtgaaacaaagagttcaaatgcaattgctgataaagtgaagtctcccaaaaaacttaagaatccaaaattgtgcctcatcaaagatgcaagtgaacaatcttccagtgccaaagccacgcctggaaaagggtcacaggcaaattctggatctgctacaaaaaatacaaatgttaaaagtttacaggagctgtgccgcatggagtcaaaaactggtcatagaaacagtgagcaccagcaaggtcacctgaggctggtcgtacccactcacggtaactcaagtgctgcagtgtcgacgccgaaaaactcgggggtggcagaacccgtttacaaaaccagtcagaaaaaggagaacctcagtgcccgaagtgttaccagttctcctgtagagaaaaaagataaagaggagactgtattccaagtgagttacccgtctgcttttagcaagttagttgcatccaggcaagtcagtcctctgctcgcatctcagtcttggtcttctagcaggagtatgtctccaaaccttttaaacagagcatccccgcttgctttcaacattgcaaattcgagcagcgaagccgactgcccagacccatttgcaaatggtgctgatgtccaagtcagcaacatagactacagattatcccggaaggagctgcagcagctcctgcaggaagcatttgccaggcatggcaaggtgaagagtgttgagctcagcccccatacagattatcaactcaaggctgttgtgcaaatggaaaacttacaagatgcgatcggtgcagtgaatagcctccacagatacaaaattggcagcaaaaagatcctggtctcacttgccaccggggctgccagcaaatcactctctttactgagtgcagaaacaatgtctgttcttcaggatgcccctgcctgttgcctgcctctgtttaaatttacagatatctatgaaaaaaagtttggacacaagttgaatgtgtcagatctatataaattaacagacacggtcgcaatccgtgaacaaggaaacggacggctggtgtgtctcctacccagcagtcaggcccgccagagccccttggggtcttcccagtcacacgacggctcctccacgaattgcagcccaattatatttgaagagttagaatatcacgagcctgtctgcagacagcattgttccaataaggatttcagcgaacatgaatttgatccagactcttacaagattccttttgtgattctttctttgaagacatttgcgccccaggttcacagtcttctccagacccacgagggcaccgtgcctttattgagctttccagattgttacattgcagagtttggcgatctagaagtagtgcaagaaaaccaaggaggtgttcccttagaacacttcattacctgtgttccaggtgtaaacattgccactgctcagaatggcatcaaagtggttaaatggattcacaacaagcccccgcctcccaacactgacccttggcttctgcgttcgaagagtcctgtaggtaacccccagctgatccagttcagtagagaagtgattgacttgctgaaaagccagccatcttgtgtcatacccatcagtcatttcatcccatcctatcaccatcattttgcaaagcagtgccgagtgtcagactacggatactccaagctgattgagttattagaagcagtgcctcatgtattgcagattcttggaatgggctccaaacgtctgctgacccttacccacagggcccaggtgaagcgctttactcaggatttactaaaacttctcaaatcccaggccagcaaacaggtcattgtgagagaattctcacaggcttatcactggtgtttctcaaaggactgggatgtcactgaatatggtgtttgtgagttgattgacatcgtatcagagattccagacacaaccatctgcttgtcccaacaagataatgaaatggtgatttgtatccccaaaagagaacgcactcaggatgaaatagaaaggacaaaacagttctccaaggatgtcgttgatttgctgcgtcaccaaccccatttccggatgccctttaataaatttatcccttcttaccatcaccactttggccggcagtgcaaacttgcgtactatgggtttaccaaactacttgaactttttgaagccatacctgatactttacaagtattggaatgtggagaagaaaagatccttactctgacagaggtggagcggttcaaagctctagctgcccagtttgttaaactccttcggtcccaaaaagataactgccttatgatgacagatctccttacagaatatgctaaaacttttggttatacatttcgtctccaagactatgatgtcagttccatttcggctttaactcagaaactctgccatgtcgtgaaggttgccgatatagaatctggcagacagattcagctgatcaaccgaaagtctctgcgatctctcactgcccagttgctggtattgttgatgtcttgggaaggaaccacccatctttctgttgaggagctcaagagacattacgaaagtacccacaacactccccttaacccctgtgaatatggattcatgaccttgaccgaactgctgaagagcctgccatacttggttgaggttttcactaatgataagatggaagaatgtgtgaagctcacaagtctgtatttgtttgcaaagaatgtgcggtctttacttcatacttaccactaccagcagattttccttcatgagttttccatggcctataccaagtatgtcggagaaactctgcagcccaagacctacggccacagcagcgtggaggagctcttgggagcaattccacaggtggttgttcagtttctgcaaaaaaatggcaaagagctctcatgtgagaactaccttaatttatatgccaaagctggtcgtttgagttcactcagtctctcccctgccaatcatgaaaaccagccctcggagggcgagcgcatcctggaggtgcccgaatcgcacacagcctcggaactcaagcttggagctgacggcagtgggcccagtcacacagagcaggagcttctccgcctgaccgacgactcccccgtcgacctcctgtgtgcgcctgtcccctcgtgcctgccgtcccctcagctgagaccagaccccgttatcctccaatctgctgatctcattcagtttgaggagcgccctcaagagccttctgaaattatgattttaaaccaagaagaaaaaatggagattccaataccaggaaagagcaaaactctgacctctgactccagctcgtcctgcatctcagcagctgtccccgtgcctccctgcccctcctcggaaacctccgagtcactgctcagcaaggaccccgtggaaagcccggccaaaaagcaacccaaaaatagagtcaaattggcagccaacttttccttagcacctataaccaagctttaactcccatttggaatatagaattaggatgggaaaacactgtctgattctgcacacaaaagtgggtttcaaaaatacatccttttctgtgtcatgaaaaccccccgaagccattgacttcatcttacctgtgttctatcatgtttttcttttccattgaacacagctttgagctgaagtctttcttttcttcttcctttttctttcttttttcaattatttgaagaacttgtggcatttgttaaagaatccttaatatattttaccaaatttttagtaactattatgaaatacaatggtgttccaaaagaagaaagcactaaaaactcaactagcaggaagcggttttgcttccattgagccacgtcggtggtgtcatcctacatgtagcataatagagtctctcagcctttgcttactggtgtttccgacagtattaacccagtgcgtggcatgtctttgaagcaaagcctgtcccgctagcctgtgtgttcacacaccaaaggagaagggtaggcgaggggttcggagtgtattttcaggttggaatgtgaaggttcctggcttccatgtgacttgtaagtgtgccttgttttttatttaaactatgtctgtagttgacaaaagtggcttcatcacaaatttttttaaacgtttctactttggggttccatttaggagctttctagaaagttgaggatgtttgaagcttcccttctgtgttccagtttgatatgggttaggttaaggaaaaggagatggtctcgatgtcatggatttaaagtcagcatttggattacaacacacattattgtgtgtcgagaggcagcattggaaagagcctgattttctaaaatatgcatcaagtgcataaattacaaatcagagctgagtggggaggtgcttcagcagcagcgggatcaatacgatttccactgggaagagacaggaattctacctacacataggaaggccaaggttgatccacttaaccttgttattgtaattttaaagctggtatcggtagctgggaagctttatgtgtgtgtatgtcagctcagcatcttttaatcgtgtctgattttactctcgttacttctcgctgttggaagcatctctgggtttcttgtggcgtctggtgtggaatggccttcctctctaggtgcctgaggtgtccgctgacgggtggcctctcacccccctctagagaaacctgacatttacaatggattgtatttgtccggcaaaaaaggcggattcattcatagagcagaaagaacctgttggcgtaaggtcttccactagttagatggtttcttttggggaaatgtttatatttggtaacttctagaaagccagaaaatggactctgatttcatagcattttgataaaatgccacaaaataagggctatagagagatttttacaagtcagattttttgttccccaaatcttttaaatgaagccagtgactcccagttctcaacacatggccccagtcaagacagaacaccatggaaaaaaccctgtaagtattatggcactctccgaatcctcctgaaggcatttcctctacagacatagtgttacaggaagtgaaatgcaaatgtgcaattttttttaaaggagcttttaaacaaagtaataataattggtgttgagaacatcagttgccttattctaagatttcataaggctgagtttgcacgcttggacttcagttctgctagcatgtaaagagtggtggactttaaaaccgtaagaggtatcattacaagtcacctggaacagactcaaagaacaggttctttgggcaacagacaaagaagaatcaagttctgtgctgtcccgtgagtgtgtctgagtaccattcactggagttgctgcttaggtctgggacgtgtgtgtgactcttaacaattgctgtctgaaaatgagagagaagacttcggaagcacattgtgttcataatgtactccacaatggccagtccaattgctatctatttttttatccagaggcttaattaaatgatgtggtaaaatgatgtttgagcattaagacaatgtaattctttatttctgggtggaaagatataccggattaaatttatctgtttaaaaaaatgacaaaagttatcaccaaaaccccctttcccatcttgcactgtttgttttggattgggtttgggggaaagagatgtttttcttagttgtctactttgtttgaacacttttgttgtggttcaagtgctgttttgtgtgttgggaccaaacagttgtcaataaactttacaagcgagcatcta

SEQ ID NO: 373421 - DNA, 5307 bp, Homo sapiens
taatgtcaatatgtgtgttttaagcaggagtatgtctccaaaccttttaaacagagcatccccgcttgctttcaacattgcaaattcgagcagcgaagccgactgcccagacccatttgcaaatggtgctgatgtccaagtcagcaacatagactacagattatcccggaaggagctgcagcagctcctgcaggaagcatttgccaggcatggcaaggtgaagagtgttgagctcagcccccatacagattatcaactcaaggctgttgtgcaaatggaaaacttacaagatgcgatcggtgcagtgaatagcctccacagatacaaaattggcagcaaaaagatcctggtctcacttgccaccggggctgccagcaaatcactctctttactgagtgcagaaacaatgtctgttcttcaggatgcccctgcctgttgcctgcctctgtttaaatttacagatatctatgaaaaaaagtttggacacaagttgaatgtgtcagatctatataaattaacagacacggtcgcaatccgtgaacaaggaaacggacggctggtgtgtctcctacccagcagtcaggcccgccagagccccttggggtcttcccagtcacacgacggctcctccacgaattgcagcccaattatatttgaagagttagaatatcacgagcctgtctgcagacagcattgttccaataaggatttcagcgaacatgaatttgatccagactcttacaagattccttttgtgattctttctttgaagacatttgcgccccaggttcacagtcttctccagacccacgagggcaccgtgcctttattgagctttccagattgttacattgcagagtttggcgatctagaagtagtgcaagaaaaccaaggaggtgttcccttagaacacttcattacctgtgttccaggtgtaaacattgccactgctcagaatggcatcaaagtggttaaatggattcacaacaagcccccgcctcccaacactgacccttggcttctgcgttcgaagagtcctgtaggtaacccccagctgatccagttcagtagagaagtgattgacttgctgaaaagccagccatcttgtgtcatacccatcagtcatttcatcccatcctatcaccatcattttgcaaagcagtgccgagtgtcagactacggatactccaagctgattgagttattagaagcagtgcctcatgtattgcagattcttggaatgggctccaaacgtctgctgacccttacccacagggcccaggtgaagcgctttactcaggatttactaaaacttctcaaatcccaggccagcaaacaggtcattgtgagagaattctcacaggcttatcactggtgtttctcaaaggactgggatgtcactgaatatggtgtttgtgagttgattgacatcgtatcagagattccagacacaaccatctgcttgtcccaacaagataatgaaatggtgatttgtatccccaaaagagaacgcactcaggatgaaatagaaaggacaaaacagttctccaaggatgtcgttgatttgctgcgtcaccaaccccatttccggatgccctttaataaatttatcccttcttaccatcaccactttggccggcagtgcaaacttgcgtactatgggtttaccaaactacttgaactttttgaagccatacctgatactttacaagtattggaatgtggagaagaaaagatccttactctgacagaggtggagcggttcaaagctctagctgcccagtttgttaaactccttcggtcccaaaaagataactgccttatgatgacagatctccttacagaatatgctaaaacttttggttatacatttcgtctccaagactatgatgtcagttccatttcggctttaactcagaaactctgccatgtcgtgaaggttgccgatatagaatctggcagacagattcagctgatcaaccgaaagtctctgcgatctctcactgcccagttgctggtattgttgatgtcttgggaaggaaccacccatctttctgttgaggagctcaagagacattacgaaagtacccacaacactccccttaacccctgtgaatatggattcatgaccttgaccgaactgctgaagagcctgccatacttggttgaggttttcactaatgataagatggaagaatgtgtgaagctcacaagtctgtatttgtttgcaaagaatgtgcggtctttacttcatacttaccactaccagcagattttccttcatgagttttccatggcctataccaagtatgtcggagaaactctgcagcccaagacctacggccacagcagcgtggaggagctcttgggagcaattccacaggtggttgttcagtttctgcaaaaaaatggcaaagagctctcatgtgagaactaccttaatttatatgccaaagctggtcgtttgagttcactcagtctctcccctgccaatcatgaaaaccagccctcggagggcgagcgcatcctggaggtgcccgaatcgcacacagcctcggaactcaagcttggagctgacggcagtgggcccagtcacacagagcaggagcttctccgcctgaccgacgactcccccgtcgacctcctgtgtgcgcctgtcccctcgtgcctgccgtcccctcagctgagaccagaccccgttatcctccaatctgctgatctcattcagtttgaggagcgccctcaagagccttctgaaattatgattttaaaccaagaagaaaaaatggagattccaataccaggaaagagcaaaactctgacctctgactccagctcgtcctgcatctcagcagctgtccccgtgcctccctgcccctcctcggaaacctccgagtcactgctcagcaaggaccccgtggaaagcccggccaaaaagcaacccaaaaatagagtcaaattggcagccaacttttccttagcacctataaccaagctttaactcccatttggaatatagaattaggatgggaaaacactgtctgattctgcacacaaaagtgggtttcaaaaatacatccttttctgtgtcatgaaaaccccccgaagccattgacttcatcttacctgtgttctatcatgtttttcttttccattgaacacagctttgagctgaagtctttcttttcttcttcctttttctttcttttttcaattatttgaagaacttgtggcatttgttaaagaatccttaatatattttaccaaatttttagtaactattatgaaatacaatggtgttccaaaagaagaaagcactaaaaactcaactagcaggaagcggttttgcttccattgagccacgtcggtggtgtcatcctacatgtagcataatagagtctctcagcctttgcttactggtgtttccgacagtattaacccagtgcgtggcatgtctttgaagcaaagcctgtcccgctagcctgtgtgttcacacaccaaaggagaagggtaggcgaggggttcggagtgtattttcaggttggaatgtgaaggttcctggcttccatgtgacttgtaagtgtgccttgttttttatttaaactatgtctgtagttgacaaaagtggcttcatcacaaatttttttaaacgtttctactttggggttccatttaggagctttctagaaagttgaggatgtttgaagcttcccttctgtgttccagtttgatatgggttaggttaaggaaaaggagatggtctcgatgtcatggatttaaagtcagcatttggattacaacacacattattgtgtgtcgagaggcagcattggaaagagcctgattttctaaaatatgcatcaagtgcataaattacaaatcagagctgagtggggaggtgcttcagcagcagcgggatcaatacgatttccactgggaagagacaggaattctacctacacataggaaggccaaggttgatccacttaaccttgttattgtaattttaaagctggtatcggtagctgggaagctttatgtgtgtgtatgtcagctcagcatcttttaatcgtgtctgattttactctcgttacttctcgctgttggaagcatctctgggtttcttgtggcgtctggtgtggaatggccttcctctctaggtgcctgaggtgtccgctgacgggtggcctctcacccccctctagagaaacctgacatttacaatggattgtatttgtccggcaaaaaaggcggattcattcatagagcagaaagaacctgttggcgtaaggtcttccactagttagatggtttcttttggggaaatgtttatatttggtaacttctagaaagccagaaaatggactctgatttcatagcattttgataaaatgccacaaaataagggctatagagagatttttacaagtcagattttttgttccccaaatcttttaaatgaagccagtgactcccagttctcaacacatggccccagtcaagacagaacaccatggaaaaaaccctgtaagtattatggcactctccgaatcctcctgaaggcatttcctctacagacatagtgttacaggaagtgaaatgcaaatgtgcaattttttttaaaggagcttttaaacaaagtaataataattggtgttgagaacatcagttgccttattctaagatttcataaggctgagtttgcacgcttggacttcagttctgctagcatgtaaagagtggtggactttaaaaccgtaagaggtatcattacaagtcacctggaacagactcaaagaacaggttctttgggcaacagacaaagaagaatcaagttctgtgctgtcccgtgagtgtgtctgagtaccattcactggagttgctgcttaggtctgggacgtgtgtgtgactcttaacaattgctgtctgaaaatgagagagaagacttcggaagcacattgtgttcataatgtactccacaatggccagtccaattgctatctatttttttatccagaggcttaattaaatgatgtggtaaaatgatgtttgagcattaagacaatgtaattctttatttctgggtggaaagatataccggattaaatttatctgtttaaaaaaatgacaaaagttatcaccaaaaccccctttcccatcttgcactgtttgttttggattgggtttgggggaaagagatgtttttcttagttgtctactttgtttgaacacttttgttgtggttcaagtgctgttttgtgtgttgggaccaaacagttgtcaataaactttacaagcgagcatcta

SEQ ID NO: 373422 - DNA, 8002 bp, Homo sapiens
tgggcttaaagttacttgacttttagatttgtcttctcctgaaaaacagaaataatctcttagagtgatactttttgacagcttgattgcttattaggtcaaccagtgaggttggtagccttaaaacttggcattcattaataatttagtttttctaccactgagaatgataggtagtttattatcttattgtaacttgccatttattttccactacaagtaattgaaaatgttaacatttcttaagggtcaccagaagttgcagtagctggacaggtgctagaaaacttaccccccattggagttttttgggatattgaaaactgctccgttccctctggccggtcagcaactgctgttgtgcaaagaatccgtgagaagttttttaaaggccacagagaagcagaattcatctgtgtatgtgacatcagtaaagaaaacaaggaagttattcaagagctgaataattgccaggtaaccgttgcccacatcaatgctactgcaaagaatgccgctgatgataaactgcggcagagtctccgcagatttgcaaatacacacactgctccagccacagtggttcttgtgtcaactgatgtcaattttgcattggaacttagtgacctgagacacaggcatggtttccacattattttggtccataaaaaccaggcctcagaagcactgctgcatcatgctaacgagctgatcagatttgaagagttcatttccgacttgccccccaggttaccactaaaaatgccacagtgccacactctgctctatgtttataacctaccagcaaataaggatggcaagagcgtcagcaacaggctcagacgcctgtccgataattgtggtgggaaagtgctgagtatcacaggctgcagtgcaattctccgcttcataaaccaagatagtgcagagcgcgctcagaagcgaatggaaaacgaagatgtctttggtaataggatcattgtgtcatttactccaaaaaatagagaactctgtgaaacaaagagttcaaatgcaattgctgataaagtgaagtctcccaaaaaacttaagaatccaaaattgtgcctcatcaaagatgcaagtgaacaatcttccagtgccaaagccacgcctggaaaagggtcacaggcaaattctggatctgctacaaaaaatacaaatgttaaaagtttacaggagctgtgccgcatggagtcaaaaactggtcatagaaacagtgagcaccagcaaggtcacctgaggctggtcgtacccactcacggtaactcaagtgctgcagtgtcgacgccgaaaaactcgggggtggcagaacccgtttacaaaaccagtcagaaaaaggagaacctcagtgcccgaagtgttaccagttctcctgtagagaaaaaagataaagaggagactgtattccaagtgagttacccgtctgcttttagcaagttagttgcatccaggcaagtcagtcctctgctcgcatctcagtcttggtcttctagagcatccccgcttgctttcaacattgcaaattcgagcagcgaagccgactgcccagacccatttgcaaatggtgctgatgtccaagtcagcaacatagactacagattatcccggaaggagctgcagcagctcctgcaggaagcatttgccaggcatggcaaggtaactttttccctcttgtgcttgctttgttatactctctggtggagtctctagtcaagaggacctaatttgatatacataaccacagccgggatagaagtgtgactgaacaagtttgaactccttccttttccctttggtctgctcagggtggtgctataaatccagtttttacaatgttagccccagagagcaagacgcctagcagtgaaaagctcttgtcttaggcagaaattgaaatggcaatttgtggccaggcatggcggctcatgcctgtaattccagcactttgggaggccaaggcggccagatcacctgaggtcaggagtttgagaccagcctggcgagtgaaaccccgtctctactaaaaaaaaattagccgggcgtggtggtgcacgcctgtagtcccagctccttaggaggctaaggcaggagaattgcttaaacacgggaggcagaggttgcagtaagctgagatgacgccactgctctctggcctgggagacagagtgagactccatctcagaaagaaaaaaaaaaaaaggcaatttgataagtaaaacattgatggatttcagttagctcttcctgctgaaatacaggtaggattctaaaataatgttggctggtcttgtttatgccttattatatttgactcattttttaggtgcaattttgctaaaaatgcacctttttagtagattcttaaaaatggccatgtcctgggttttgtagagtctagaaaagaccccaaacactcttcccatgtgttggcctctgagcctgccttggaaacctgtgtgtgccagagcacacaggcaggccgggccagtgtcacatctctaaaggtcaccctatcctcactttcttacgtcctggtcagcagaagagcagagttcagacatactccttcatggaagcgctgcagtcgacaaatgtgttccttcatggttcaccttcagttttaagacgacagggttctgggcggacatagcgtttagttttcgcttttcctgttgtaggtgaagagtgttgagctcagcccccatacagattatcaactcaaggctgttgtgcaaatggaaaacttacaagatgcgatcggtgcagtgaatagcctccacagatacaaaattggcagcaaaaagatcctggtctcacttgccaccggggctgccagcaaatcactctctttactgagtgcagaaacaatgtctgttcttcaggatgcccctgcctgttgcctgcctctgtttaaatttacagatatctatgaaaaaaagtttggacacaagttgaatgtgtcagatctatataaattaacagacacggtcgcaatccgtgaacaaggaaacggacggctggtgtgtctcctacccagcagtcaggcccgccagagccccttggggtcttcccagtcacacgacggctcctccacgaattgcagcccaattatatttgaagagttagaatatcacgagcctgtctgcagacagcattgttccaataaggatttcagcgaacatgaatttgatccagactcttacaagattccttttgtgattctttctttgaagacatttgcgccccaggttcacagtcttctccagacccacgagggcaccgtgcctttattgagctttccagattgttacattgcagagtttggcgatctagaagtagtgcaagaaaaccaaggaggtgttcccttagaacacttcattacctgtgttccaggtgtaaacattgccactgctcagaatggcatcaaagtggttaaatggattcacaacaagcccccgcctcccaacactgacccttggcttctgcgttcgaagagtcctgtaggtaacccccagctgatccagttcagtagagaagtgattgacttgctgaaaagccagccatcttgtgtcatacccatcagtcatttcatcccatcctatcaccatcattttgcaaagcagtgccgagtgtcagactacggatactccaagctgattgagttattagaagcagtgcctcatgtattgcagattcttggaatgggctccaaacgtctgctgacccttacccacagggcccaggtgaagcgctttactcaggatttactaaaacttctcaaatcccaggccagcaaacaggtcattgtgagagaattctcacaggcttatcactggtgtttctcaaaggactgggatgtcactgaatatggtgtttgtgagttgattgacatcgtatcagagattccagacacaaccatctgcttgtcccaacaagataatgaaatggtgatttgtatccccaaaagagaacgcactcaggatgaaatagaaaggacaaaacagttctccaaggatgtcgttgatttgctgcgtcaccaaccccatttccggatgccctttaataaatttatcccttcttaccatcaccactttggccggcagtgcaaacttgcgtactatgggtttaccaaactacttgaactttttgaagccatacctgatactttacaagtattggaatgtggagaagaaaagatccttactctgacagaggtggagcggttcaaagctctagctgcccagtttgttaaactccttcggtcccaaaaagataactgccttatgatgacagatctccttacagaatatgctaaaacttttggttatacatttcgtctccaagactatgatgtcagttccatttcggctttaactcagaaactctgccatgtcgtgaaggttgccgatatagaatctggcagacagattcagctgatcaaccgaaagtctctgcgatctctcactgcccagttgctggtattgttgatgtcttgggaaggaaccacccatctttctgttgaggagctcaagagacattacgaaagtacccacaacactccccttaacccctgtgaatatggattcatgaccttgaccgaactgctgaagagcctgccatacttggttgaggttttcactaatgataagatggaagaatgtgtgaagctcacaagtctgtatttgtttgcaaagaatgtgcggtctttacttcatacttaccactaccagcagattttccttcatgagttttccatggcctataccaagtatgtcggagaaactctgcagcccaagacctacggccacagcagcgtggaggagctcttgggagcaattccacaggtggttgttcagtttctgcaaaaaaatggcaaagagctctcatgtgagaactaccttaatttatatgccaaagctggtcgtttgagttcactcagtctctcccctgccaatcatgaaaaccagccctcggagggcgagcgcatcctggaggtgcccgaatcgcacacagcctcggaactcaagcttggagctgacggcagtgggcccagtcacacagagcaggagcttctccgcctgaccgacgactcccccgtcgacctcctgtgtgcgcctgtcccctcgtgcctgccgtcccctcagctgagaccagaccccgttatcctccaatctgctgatctcattcagtttgaggagcgccctcaagagccttctgaaattatgattttaaaccaagaagaaaaaatggagattccaataccaggaaagagcaaaactctgacctctgactccagctcgtcctgcatctcagcagctgtccccgtgcctccctgcccctcctcggaaacctccgagtcactgctcagcaaggaccccgtggaaagcccggccaaaaagcaacccaaaaatagagtcaaattggcagccaacttttccttagcacctataaccaagctttaactcccatttggaatatagaattaggatgggaaaacactgtctgattctgcacacaaaagtgggtttcaaaaatacatccttttctgtgtcatgaaaaccccccgaagccattgacttcatcttacctgtgttctatcatgtttttcttttccattgaacacagctttgagctgaagtctttcttttcttcttcctttttctttcttttttcaattatttgaagaacttgtggcatttgttaaagaatccttaatatattttaccaaatttttagtaactattatgaaatacaatggtgttccaaaagaagaaagcactaaaaactcaactagcaggaagcggttttgcttccattgagccacgtcggtggtgtcatcctacatgtagcataatagagtctctcagcctttgcttactggtgtttccgacagtattaacccagtgcgtggcatgtctttgaagcaaagcctgtcccgctagcctgtgtgttcacacaccaaaggagaagggtaggcgaggggttcggagtgtattttcaggttggaatgtgaaggttcctggcttccatgtgacttgtaagtgtgccttgttttttatttaaactatgtctgtagttgacaaaagtggcttcatcacaaatttttttaaacgtttctactttggggttccatttaggagctttctagaaagttgaggatgtttgaagcttcccttctgtgttccagtttgatatgggttaggttaaggaaaaggagatggtctcgatgtcatggatttaaagtcagcatttggattacaacacacattattgtgtgtcgagaggcagcattggaaagagcctgattttctaaaatatgcatcaagtgcataaattacaaatcagagctgagtggggaggtgcttcagcagcagcgggatcaatacgatttccactgggaagagacaggaattctacctacacataggaaggccaaggttgatccacttaaccttgttattgtaattttaaagctggtatcggtagctgggaagctttatgtgtgtgtatgtcagctcagcatcttttaatcgtgtctgattttactctcgttacttctcgctgttggaagcatctctgggtttcttgtggcgtctggtgtggaatggccttcctctctaggtgcctgaggtgtccgctgacgggtggcctctcacccccctctagagaaacctgacatttacaatggattgtatttgtccggcaaaaaaggcggattcattcatagagcagaaagaacctgttggcgtaaggtcttccactagttagatggtttcttttggggaaatgtttatatttggtaacttctagaaagccagaaaatggactctgatttcatagcattttgataaaatgccacaaaataagggctatagagagatttttacaagtcagattttttgttccccaaatcttttaaatgaagccagtgactcccagttctcaacacatggccccagtcaagacagaacaccatggaaaaaaccctgtaagtattatggcactctccgaatcctcctgaaggcatttcctctacagacatagtgttacaggaagtgaaatgcaaatgtgcaattttttttaaaggagcttttaaacaaagtaataataattggtgttgagaacatcagttgccttattctaagatttcataaggctgagtttgcacgcttggacttcagttctgctagcatgtaaagagtggtggactttaaaaccgtaagaggtatcattacaagtcacctggaacagactcaaagaacaggttctttgggcaacagacaaagaagaatcaagttctgtgctgtcccgtgagtgtgtctgagtaccattcactggagttgctgcttaggtctgggacgtgtgtgtgactcttaacaattgctgtctgaaaatgagagagaagacttcggaagcacattgtgttcataatgtactccacaatggccagtccaattgctatctatttttttatccagaggcttaattaaatgatgtggtaaaatgatgtttgagcattaagacaatgtaattctttatttctgggtggaaagatataccggattaaatttatctgtttaaaaaaatgacaaaagttatcaccaaaaccccctttcccatcttgcactgtttgttttggattgggtttgggggaaagagatgtttttcttagttgtctactttgtttgaacacttttgttgtggttcaagtgctgttttgtgtgttgggaccaaacagttgtcaataaactttacaagcgagcatctaaaaaaagacaaaaaatgcaaagcacagcacaggcgcgagagccgcccgcgcgagccagcaccgggacacccagacgacgactccacacgccacacaccaggacccgggcgaaaacctaccaggagacacaaccacgtgtgagcgcgccccgagtgcaaaacagcgcacacacaggaacaccgctaaacccggtacaacacaagcggaatgtgcacg

SEQ ID NO: 373423 - DNA, 4786 bp, Homo sapiens
tgggcttaaagttacttgacttttagatttgtcttctcctgaaaaacagaaataatctcttagagtgatactttttgacagcttgattgcttattaggtcaaccagtgaggttggtagccttaaaacttggcattcattaataatttagtttttctaccactgagaatgataggtagtttattatcttattgtaacttgccatttattttccactacaagtaattgaaaatgttaacatttcttaagggtcaccagaagttgcagtagctggacaggtgctagaaaacttaccccccattggagttttttgggatattgaaaactgctccgttccctctggccggtcagcaactgctgttgtgcaaagaatccgtgagaagttttttaaaggccacagagaagcagaattcatctgtgtatgtgacatcagtaaagaaaacaaggaagttattcaagagctgaataattgccaggtaaccgttgcccacatcaatgctactgcaaagaatgccgctgatgataaactgcggcagagtctccgcagatttgcaaatacacacactgctccagccacagtggttcttgtgtcaactgatgtcaattttgcattggaacttagtgacctgagacacaggcatggtttccacattattttggtccataaaaaccaggcctcagaagcactgctgcatcatgctaacgagctgatcagatttgaagagttcatttccgacttgccccccaggttaccactaaaaatgccacagtgccacactctgctctatgtttataacctaccagcaaataaggatggcaagagcgtcagcaacaggctcagacgcctgtccgataattgtggtgggaaagtgctgagtatcacaggctgcagtgcaattctccgcttcataaaccaagatagtgcagagcgcgctcagaagcgaatggaaaacgaagatgtctttggtaataggatcattgtgtcatttactccaaaaaatagagaactctgtgaaacaaagagttcaaatgcaattgctgataaagtgaagtctcccaaaaaacttaagaatccaaaattgtgcctcatcaaagatgcaagtgaacaatcttccagtgccaaagccacgcctggaaaagggtcacaggcaaattctggatctgctacaaaaaatacaaatgttaaaagtttacaggagctgtgccgcatggagtcaaaaactggtcatagaaacagtgagcaccagcaaggtcacctgaggctggtcgtacccactcacggtaactcaagtgctgcagtgtcgacgccgaaaaactcgggggtggcagaacccgtttacaaaaccagtcagaaaaaggagaacctcagtgcccgaagtgttaccagttctcctgtagagaaaaaagataaagaggagactgtattccaagtgagttacccgtctgcttttagcaagttagttgcatccaggcaagtcagtcctctgctcgcatctcagtcttggtcttctagagcatccccgcttgctttcaacattgcaaattcgagcagcgaagccgactgcccagacccatttgcaaatggtgctgatgtccaagtcagcaacatagactacagattatcccggaaggagctgcagcagctcctgcaggaagcatttgccaggcatggcaaggtaactttttccctcttgtgcttgctttgttatactctctggtggagtctctagtcaagaggacctaatttgatatacataaccacagccgggatagaagtgtgactgaacaagtttgaactccttccttttccctttggtctgctcagggtggtgctataaatccagtttttacaatgttagccccagagagcaagacgcctagcagtgaaaagctcttgtcttaggcagaaattgaaatggcaatttgtggccaggcatggcggctcatgcctgtaattccagcactttgggaggccaaggcggccagatcacctgaggtcaggagtttgagaccagcctggcgagtgaaaccccgtctctactaaaaaaaaattagccgggcgtggtggtgcacgcctgtagtcccagctccttaggaggctaaggcaggagaattgcttaaacacgggaggcagaggttgcagtaagctgagatgacgccactgctctctggcctgggagacagagtgagactccatctcagaaagaaaaaaaaaaaaaggcaatttgataagtaaaacattgatggatttcagttagctcttcctgctgaaatacaggtaggattctaaaataatgttggctggtcttgtttatgccttattatatttgactcattttttaggtgcaattttgctaaaaatgcacctttttagtagattcttaaaaatggccatgtcctgggttttgtagagtctagaaaagaccccaaacactcttcccatgtgttggcctctgagcctgccttggaaacctgtgtgtgccagagcacacaggcaggccgggccagtgtcacatctctaaaggtcaccctatcctcactttcttacgtcctggtcagcagaagagcagagttcagacatactccttcatggaagcgctgcagtcgacaaatgtgttccttcatggttcaccttcagttttaagacgacagggttctgggcggacatagcgtttagttttcgcttttcctgttgtaggtgaagagtgttgagctcagcccccatacagattatcaactcaaggctgttgtgcaaatggaaaacttacaagatgcgatcggtgcagtgaatagcctccacagatacaaaattggcagcaaaaagatcctggtctcacttgccaccggggctgccagcaaatcactctctttactgagtgcagaaacaatgtctgttcttcaggatgcccctgcctgttgcctgcctctgtttaaatttacagatatctatgaaaaaaagtttggacacaagttgaatgtgtcagatctatataaattaacagacacggtcgcaatccgtgaacaaggaaacggacggctggtgtgtctcctacccagcagtcaggcccgccagagccccttggggtcttcccagtcacacgacggctcctccacgaattgcagcccaattatatttgaagagttagaatatcacgagcctgtctgcagacagcattgttccaataaggatttcagcgaacatgaatttgatccagactcttacaagattccttttgtgattctttctttgaagacatttgcgccccaggttcacagtcttctccagacccacgagggcaccgtgcctttattgagctttccagattgttacattgcagagtttggcgatctagaagtagtgcaagaaaaccaaggaggtgttcccttagaacacttcattacctgtgttccaggtgtaaacattgccactgctcagaatggcatcaaagtggttaaatggattcacaacaagcccccgcctcccaacactgacccttggcttctgcgttcgaagagtcctgtaggtaacccccagctgatccagttcagtagagaagtgattgacttgctgaaaagccagccatcttgtgtcatacccatcagtcatttcatcccatcctatcaccatcattttgcaaagcagtgccgagtgtcagactacggatactccaagctgattgagttattagaagcagtgcctcatgtattgcagattcttggaatgggctccaaacgtctgctgacccttacccacagggcccaggtgaagcgctttactcaggatttactaaaacttctcaaatcccaggccagcaaacaggtcattgtgagagaattctcacaggcttatcactggtgtttctcaaaggactgggatgtcactgaatatggtgtttgtgagttgattgacatcgtatcagagattccagacacaaccatctgcttgtcccaacaagataatgaaatggtgatttgtatccccaaaagagaacgcactcaggatgaaatagaaaggacaaaacagttctccaaggatgtcgttgatttgctgcgtcaccaaccccatttccggatgccctttaataaatttatcccttcttaccatcaccactttggccggcagtgcaaacttgcgtactatgggtttaccaaactacttgaactttttgaagccatacctgatactttacaagtattggaatgtggagaagaaaagatccttactctgacagaggtggagcggttcaaagctctagctgcccagtttgttaaactccttcggtcccaaaaagataactgccttatgatgacagatctccttacagaatatgctaaaacttttggttatacatttcgtctccaagactatgatgtcagttccatttcggctttaactcagaaactctgccatgtcgtgaaggttgccgatatagaatctggcagacagattcagctgatcaaccgaaagtctctgcgatctctcactgcccagttgctggtattgttgatgtcttgggaaggaaccacccatctttctgttgaggagctcaagagacattacgaaagtacccacaacactccccttaacccctgtgaatatggattcatgaccttgaccgaactgctgaagagcctgccatacttggttgaggttttcactaatgataagatggaagaatgtgtgaagctcacaagtctgtatttgtttgcaaagaatgtgcggtcaaggtcatgaatccatattcacaggggttaaggggagtgttgtgggtactttcgtgtcgacgc

SEQ ID NO: 373424 - DNA, 2190 bp, Homo sapiens
tgggcttaaagttacttgacttttagatttgtcttctcctgaaaaacagaaataatctcttagagtgatactttttgacagcttgattgcttattaggtcaaccagtgaggttggtagccttaaaacttggcattcattaataatttagtttttctaccactgagaatgataggtagtttattatcttattgtaacttgccatttattttccactacaagtaattgaaaatgttaacatttcttaagggtcaccagaagttgcagtagctggacaggtgctagaaaacttaccccccattggagttttttgggatattgaaaactgctccgttccctctggccggtcagcaactgctgttgtgcaaagaatccgtgagaagttttttaaaggccacagagaagcagaattcatctgtgtatgtgacatcagtaaagaaaacaaggaagttattcaagagctgaataattgccaggtaaccgttgcccacatcaatgctactgcaaagaatgccgctgatgataaactgcggcagagtctccgcagatttgcaaatacacacactgctccagccacagtggttcttgtgtcaactgatgtcaattttgcattggaacttagtgacctgagacacaggcatggtttccacattattttggtccataaaaaccaggcctcagaagcactgctgcatcatgctaacgagctgatcagatttgaagagttcatttccgacttgccccccaggttaccactaaaaatgccacagtgccacactctgctctatgtttataacctaccagcaaataaggatggcaagagcgtcagcaacaggctcagacgcctgtccgataattgtggtgggaaagtgctgagtatcacaggctgcagtgcaattctccgcttcataaaccaagatagtgcagagcgcgctcagaagcgaatggaaaacgaagatgtctttggtaataggatcattgtgtcatttactccaaaaaatagagaactctgtgaaacaaagagttcaaatgcaattgctgataaagtgaagtctcccaaaaaacttaagaatccaaaattgtgcctcatcaaagatgcaagtgaacaatcttccagtgccaaagccacgcctggaaaagggtcacaggcaaattctggatctgctacaaaaaatacaaatgttaaaagtttacaggagctgtgccgcatggagtcaaaaactggtcatagaaacagtgagcaccagcaaggtcacctgaggctggtcgtacccactcacggtaactcaagtgctgcagtgtcgacgccgaaaaactcgggggtggcagaacccgtttacaaaaccagtcagaaaaaggagaacctcagtgcccgaagtgttaccagttctcctgtagagaaaaaagataaagaggagactgtattccaagtgagttacccgtctgcttttagcaagttagttgcatccaggcaagtcagtcctctgctcgcatctcagtcttggtcttctagcaggagtatgtctccaaaccttttaaacagagcatccccgcttgctttcaacattgcaaattcgagcagcgaagccgactgcccagacccatttgcaaatggtgctgatgtccaagtcagcaacatagactacagattatcccggaaggagctgcagcagctcctgcaggaagcatttgccaggcatggcaaggtgaagagtgttgagctcagcccccatacagattatcaactcaaggctgttgtgcaaatggaaaacttacaagatgcgatcggtgcagtgaatagcctccacagatacaaaattggcagcaaaaagatcctggtctcacttgccaccggggctgccagcaaatcactctctttactgagtgcagaaacaatgtctgttcttcaggatgcccctgcctgttgcctgcctctgtttaaatttacagatatctatgaaaaaaagttggcacagtgatgtgtcagatctatataaattacagacacgtcgcatcggaccagaagacgtgggtgttctaccgagtcaggcgcaagcctgggtttcagtaacgaggtcccagaatgggcactttgaagtgattcggcgtggaggtgcaagtggggggggtcaaatttaagggggggaggaaaaccgggaagtttgagccaaaagtgggggggccttggtgaa

SEQ ID NO: 373425 - DNA, 1574 bp, Homo sapiens
cgagccagtggagggcggtgggggcggggcaagcgcggaggaccaggaccggctccggaccgcgcagttagcgccgcctggcctgggccggacccggtcagggttctcaagctgtcgtccctatggggctgtgttttccttgtcccggggagtccgcgcctcccacgccggacctggaagagaaaagagcaaagcttgcagaggctgcagagagaagacaaaaagaggctgcatctcggggaattttagatgttcaatctgtgcaagaaaagagaaagaaaaaggaaaaaatagaaaaacaaattgctacatccgggcccccaccagaaggtggacttaggtggacagtttcataaagcataacatgagtagaagaatctactgccaataactgtttattatctgcaatcaagtgggcttcatcaatttaatttcttctctttgagtaaatgaagattcagactttgtaatattattgcccttaagtgcaatgctaaaaaaacgttgattttcaagcttagagaatggctagacttttcattaaatactgattttcctacatttgctcttctgcagttagtgggtgatttgctatttttcttagtagttaaaaaatggaactaaatagtgaatatacatacactgcatgtaaacattctgcatatacctctaagattaaaattcgcagttgtcttttcatcctttataaaatgatctaactacttatatttgtgctgcatcgcgttacatctgtttttatttcactatgaagatgtttgattaaacttatggacttagtgcctttaaactgatcatcagggagaatcttgaaaaaatcatttgaagggctgatgtgaaggagcactgtaaatttttataacttagtaatgagtattcttaggcagatgtaaaattttttccaatttatttttatttatgtagcttataaaattaacataccctgttttactttatgataaaggattttttgtttgctgaatttaaaattatatattagtgataccatcagagggcagtgatgttctattgtatattaaattcagctctgtaaggatctttgtagtaattgaatgagttaaactaataatctggatgggttataatgagtagtaatatatttgtccatatttcataagtagtgttaatcttgtgtacttattagagaacgatcataagatttatacagatgtgaaactgcgaaggcaagtatgaatgtatgaaaaaaacatgtaggtactgtacttacaaaaggtctacttcagatataaaaatattaggtaattctatacaatgcatagtcataaaccttaacatttttgttcattagaaacatgaattttatagcattttttgtttctcctatataatacactgaaataaaagaatttgtgttagctattaaggctgatagctcttttaaatggcaaggccacatgttgagccctaaattaaaatttgcagatattaagtgctaatagaaattttaagttaaatcgaccaagttcacttgctttacacaaaggaaactgagccactatcttcatctacccctc

SEQ ID NO: 373426 - DNA, 725 bp, Homo sapiens
cgagccagtggagggcggtgggggcggggcaagcgcggaggaccaggaccggctccggaccgcgcagttagcgccgcctggcctgggccggacccggtcagggttctcaagctgtcgtccctatggggctgtgttttccttgtcccggggagtccgcgcctcccacgccggacctggaagagaaaagagcaaagcttgcagaggctgcagagagaagacaaaaagaggctgcatctcggggaattttagatgttcaatctgtgcaagaaaagagaaagaaaaaggaaaaaatagaaaaacaaattgctacatccgggcccccaccagaaggtggacttaggtggacagtttcataaagcataacatgagtagaagaatctactgccaataactgtttattatctgcaatcaagtgggcttcatcaatttaatttcttctctttgagtaaatgaagattcagactttgtaatattattgcccttaagtgcaatgctaaaaaaacgttgattttcaagcttagagaatggctagacttttcattaaatactgattttcctacatttgctcttctgcagttagtgggtgatttgctatttttcttagtagttaaaaaatggaactaaatagtgaatatacatacactgcatgtaaacattctgcatatacctctaagattaaaattcgcagttgtcttttcatcctttataaaatgatctaactactt

SEQ ID NO: 373427 - DNA, 1675 bp, Homo sapiens
gcgaggacgggtggacgcgtcaggagggtcgttgggtcctgtcagagcgacctaggccgtcgcctccgtgtagatctccacttttgtaacaaaaagttgtcgaaaggcggctgtggcgtctttctaccttccactgactttagctgcgccggatcttcatagggcgccggcgcacgcagagggcgttacgcgtgggacattccgggggatgtggtagatggaattcggcgcgaaaagacattgctttctccgggagctctttagtcgtctaggagatgaagagaaaagagcaaagcttgcagaggctgcagagagaagacaaaaagaggctgcatctcggggaattttagatgttcaatctgtgcaagaaaagagaaagaaaaaggaaaaaatagaaaaacaaattgctacatccgggcccccaccagaaggtggacttaggtggacagtttcataaagcataacatgagtagaagaatctactgccaataactgtttattatctgcaatcaagtgggcttcatcaatttaatttcttctctttgagtaaatgaagattcagactttgtaatattattgcccttaagtgcaatgctaaaaaaacgttgattttcaagcttagagaatggctagacttttcattaaatactgattttcctacatttgctcttctgcagttagtgggtgatttgctatttttcttagtagttaaaaaatggaactaaatagtgaatatacatacactgcatgtaaacattctgcatatacctctaagattaaaattcgcagttgtcttttcatcctttataaaatgatctaactacttatatttgtgctgcatcgcgttacatctgtttttatttcactatgaagatgtttgattaaacttatggacttagtgcctttaaactgatcatcagggagaatcttgaaaaaatcatttgaagggctgatgtgaaggagcactgtaaatttttataacttagtaatgagtattcttaggcagatgtaaaattttttccaatttatttttatttatgtagcttataaaattaacataccctgttttactttatgataaaggattttttgtttgctgaatttaaaattatatattagtgataccatcagagggcagtgatgttctattgtatattaaattcagctctgtaaggatctttgtagtaattgaatgagttaaactaataatctggatgggttataatgagtagtaatatatttgtccatatttcataagtagtgttaatcttgtgtacttattagagaacgatcataagatttatacagatgtgaaactgcgaaggcaagtatgaatgtatgaaaaaaacatgtaggtactgtacttacaaaaggtctacttcagatataaaaatattaggtaattctatacaatgcatagtcataaaccttaacatttttgttcattagaaacatgaattttatagcattttttgtttctcctatataatacactgaaataaaagaatttgtgttagctattaaggctgatagctcttttaaatggcaaggccacatgttgagccctaaattaaaatttgcagatattaagtgctaatagaaattttaagttaaatcgaccaagttcacttgctttacacaaaggaaactgagccactatcttcatctacccctc

SEQ ID NO: 373428 - DNA, 589 bp, Homo sapiens
gtttcatgtgaaatttctagtttaatatgtcctcttttctagaaacagaaagacaagcttgcagaggctgcagcagagaagacaaaaagaggctgcatctcggggaattttagatgttcaatctgtgcaagaaaagagaaagaaaaaggaaaaaatagaaaaacaaattgctacatccgggcccccaccagaaggtggacttaggtggacagtttcataaagcataacatgagtagaagaatctactgccaataactgtttattatctgcaatcaagtgggcttcatcaatttaatttcttctctttgagtaaatgaagattcagactttgtaatattattgcccttaagtgcaatgctaaaaaaacgttgattttcaagcttagagaatggctagacttttcattaaatactgattttcctacatttgctcttctgcagttagtgggtgatttgctatttttcttagtagttaaaaaatggaactaaatagtgaatatacatacactgcatgtaaacattctgcatatacctctaagattaaaattcgcagttgtcttttcatcctttataaaatgatctaactactt

SEQ ID NO: 373429 - DNA, 665 bp, Homo sapiens
gtccttctttggatcttacatctagctgagaataaggtgacattaacctacttggtctatgtcctggccagtcttcaataaggagttgaggagtaagaggctgaatatagtctcagtttttttcacatccctggttggtgccgattgactagcagctagactccagtgccagttgtgaccatgttttcagtgacacttaaaagaccatcttagatgtggtatgggtatcataatccttccctccctgccaaacatgttcatgtcctaatccctggaagctgtgaatatgttgttacatggcaaagtcgattctttagatgtgcctcaagttagtgaccttaaaatagattatccaggtagatccaagctaatcatgtgattgttaaaagcagaaaacctttccaacctatgagagaaagagatgtgaagaaagaagacgggtcatagagatgctacattgctgattttgaagatggaggaaggaaatcatggagcttaggaatgcaggtggcctctagaagatggaaaaggaaaggaaatggatgctcccctagactcttcaggaaggaaaacagccttggtgacactctgattttagcctattgaaaccatgttgaatgactgcagaaatgtgagataataaacatgcttattcagctaccaag

SEQ ID NO: 373430 - DNA, 395 bp, Homo sapiens
  misc_feature (35)..(35): n is a, c, g, or t
cggccgctccaacatctaaaattccccgagatgcncctctttttgtcttctctctgcagcatgttcaatctgtgcaagaaaagagaaagaaaaaggaaaaaatagaaaaacaaattgctacatccgggcccccaccagaaggtggacttaggtggacagtttcataaagcataacatgagtagaagaatctactgccaataactgtttattatctgcaatcaagtgggcttcatcaatttaatttcttctctttgagtaaatgaagattcagactttgtaatattattgcccttaagtgcaatgctaaaaaaacgttgattttcaagcttagagaatggctagacttttcattaaatactgattttcctaaaaaaaaaactcgtgccgaattctt

SEQ ID NO: 373431 - DNA, 1628 bp, Homo sapiens
gtaatagagagctcgctctgccacctggaagtatgggctggagacacatttggccaactgccggaagaggggttccatgatcttcacaaattctgatggttcctcgtgccgggacgcgcagttagcgccgcctggcctgggccggacccggtcagggttctcaagctgtcgtccctatggggctgtgttttccttgtcccggggagtccgcgcctcccacgccggacctggaagagaaaagagcaaagcttgcagaggctgcagagagaagacaaaaagaggctgcatctcggggaattttagatgttcaatctgtgcaagaaaagagaaagaaaaaggaaaaaatagaaaaacaaattgctacatccgggcccccaccagaaggtggacttaggtggacagtttcataaagcataacatgagtagaagaatctactgccaataactgtttattatctgcaatcaagtgggcttcatcaatttaatttcttctctttgagtaaatgaagattcagactttgtaatattattgcccttaagtgcaatgctaaaaaaacgttgattttcaagcttagagaatggctagacttttcattaaatactgattttcctacatttgctcttctgcagttagtgggtgatttgctatttttcttagtagttaaaaaatggaactaaatagtgaatatacatacactgcatgtaaacattctgcatatacctctaagattaaaattcgcagttgtcttttcatcctttataaaatgatctaactacttatatttgtgctgcatcgcgttacatctgtttttatttcactatgaagatgtttgattaaacttatggacttagtgcctttaaactgatcatcagggagaatcttgaaaaaatcatttgaagggctgatgtgaaggagcactgtaaatttttataacttagtaatgagtattcttaggcagatgtaaaattttttccaatttatttttatttatgtagcttataaaattaacataccctgttttactttatgataaaggattttttgtttgctgaatttaaaattatatattagtgataccatcagagggcagtgatgttctattgtatattaaattcagctctgtaaggatctttgtagtaattgaatgagttaaactaataatctggatgggttataatgagtagtaatatatttgtccatatttcataagtagtgttaatcttgtgtacttattagagaacgatcataagatttatacagatgtgaaactgcgaaggcaagtatgaatgtatgaaaaaaacatgtaggtactgtacttacaaaaggtctacttcagatataaaaatattaggtaattctatacaatgcatagtcataaaccttaacatttttgttcattagaaacatgaattttatagcattttttgtttctcctatataatacactgaaataaaagaatttgtgttagctattaaggctgatagctcttttaaatggcaaggccacatgttgagccctaaattaaaatttgcagatattaagtgctaatagaaattttaagttaaatcgaccaagttcacttgctttacacaaaggaaactgagccactatcttcatctacccctc

SEQ ID NO: 373432 - DNA, 559 bp, Homo sapiens
cgagccagtggagggcggtgggggcggggcaagcgcggaggaccaggaccggctccggaccgcgcagttagcgccgcctggcctgggccggacccggtcagggttctcaagctgtcgtccctatggggctgtgttttccttgtcccggggagtccgcgcctcccacgccggacctggaagagaaaagagcaaagcttgcagaggctgcagagagaagacaaaaagaggctgcatctcggggaattttagatgttcaatctgtgcaagaaaagagaaagaaaaaggaaaaaatagaaaaacaaattgctacatccgggcccccaccagaaggtggacttaggtggacagtttcataaagcataacatgagtagaagaatctactgccaataactgtttattatctgcaatcaagtgggcttcatcaatttaatttcttctctttgagtaaatgaagattcagactttgtaatattattgcccttaagtgcaatgctaaaaaaacgttgattttcaagcttagagaatggctagacttttcattaaatactgattttccta

SEQ ID NO: 373433 - DNA, 623 bp, Homo sapiens
attttaatcacattgggattcagaagagcaacagaaccaaaggttgtttggtgtgttcatacaatccctggatttataggtggattttctataaaggaaaaatgatgtaattagtatcctgttttttcctaaagaaataatactatcataaaaattctgtctatcctttgtaccccaggaaaatggacatgaactttgaattttccctttctccaaatgtttgactttttattttcactgataagcattatgctatgttcttagaagacaaaagcagctcttgccagttttgaataatttctgcatgaatagaccagtaagaggtaagtagccatgactgcctatatgtgttgagacataaggtatatttctttaacatctccaagcaagcatttcaaattctcttaactactaaacatgctctaagctaattcaaatatagtattgtggcttttttcttcaattttctcaaaagctacagacacaaggcatttgtatgtataacagactttgatgaagttttggttccagtaactcaaaacactaagtttcccatttgatatggctttttattgttctagtctccctcttctagttatgcttcatcttgcaaatattgactt

SEQ ID NO: 373434 - DNA, 1713 bp, Homo sapiens
gcgaggacgggtggacgcgtcaggagggtcgttgggtcctgtcagagcgacctaggccgtcgcctccgtgtagatctccacttttgtaacaaaaagttgtcgaaaggcggctgtggcgtctttctaccttccactgactttagctgcgccggatcttcatagggcgccggcgcacgcagagggcgttacgcgtgggacattccgggggatgtggtagatggaattcggcgcgaaaagacattgctttctccgggagctctttagtcgtctaggagatgtgcgttttcaactgtgtctaccatcttttaaaagaaggaagagaaaagagcaaagcttgcagaggctgcagagagaagacaaaaagaggctgcatctcggggaattttagatgttcaatctgtgcaagaaaagagaaagaaaaaggaaaaaatagaaaaacaaattgctacatccgggcccccaccagaaggtggacttaggtggacagtttcataaagcataacatgagtagaagaatctactgccaataactgtttattatctgcaatcaagtgggcttcatcaatttaatttcttctctttgagtaaatgaagattcagactttgtaatattattgcccttaagtgcaatgctaaaaaaacgttgattttcaagcttagagaatggctagacttttcattaaatactgattttcctacatttgctcttctgcagttagtgggtgatttgctatttttcttagtagttaaaaaatggaactaaatagtgaatatacatacactgcatgtaaacattctgcatatacctctaagattaaaattcgcagttgtcttttcatcctttataaaatgatctaactacttatatttgtgctgcatcgcgttacatctgtttttatttcactatgaagatgtttgattaaacttatggacttagtgcctttaaactgatcatcagggagaatcttgaaaaaatcatttgaagggctgatgtgaaggagcactgtaaatttttataacttagtaatgagtattcttaggcagatgtaaaattttttccaatttatttttatttatgtagcttataaaattaacataccctgttttactttatgataaaggattttttgtttgctgaatttaaaattatatattagtgataccatcagagggcagtgatgttctattgtatattaaattcagctctgtaaggatctttgtagtaattgaatgagttaaactaataatctggatgggttataatgagtagtaatatatttgtccatatttcataagtagtgttaatcttgtgtacttattagagaacgatcataagatttatacagatgtgaaactgcgaaggcaagtatgaatgtatgaaaaaaacatgtaggtactgtacttacaaaaggtctacttcagatataaaaatattaggtaattctatacaatgcatagtcataaaccttaacatttttgttcattagaaacatgaattttatagcattttttgtttctcctatataatacactgaaataaaagaatttgtgttagctattaaggctgatagctcttttaaatggcaaggccacatgttgagccctaaattaaaatttgcagatattaagtgctaatagaaattttaagttaaatcgaccaagttcacttgctttacacaaaggaaactgagccactatcttcatctacccctc

SEQ ID NO: 373435 - DNA, 481 bp, Homo sapiens
  misc_feature (71)..(71): n is a, c, g, or t
atacaaattgtcaacatgggacggagatctacatcatccaccaagagtggaaaatttatgaaccccacagnccaagcccgaaaggaagcccggaagaggaagagaaaagagcaaagcttgcagaggctgcagagagaagacaaaaagaggctgcatctcggggaattttagatgttcaatctgtgcaagaaaagagaaagaaaaaggaaaaaatagaaaaacaaattgctacatccgggcccccaccagaaggtggacttaggtggacagtttcataaagcataacatgagtagaagaatctactgccaataactgtttattatctgcaatcaagtgggcttcatcaatttaatttcttctctttgagtaaatgaagattcagactttgtaatattattgcccttaagtgcaatgctaaaaaaacgttgattttcaagcttagagaatggctagacttttcattaaatactgattttccta

SEQ ID NO: 373436 - DNA, 555 bp, Homo sapiens
agcgtagcgccgagcgtgatgatgcgacagagccggtgcaggcctgtctccatgctgtgcgtcccctatggatgctgtagattgtacccttgttcccgtccgaagtgcgtgctgtcgcacgccggacctgcaagagaacatcagcaagagcttgcagaggctgcacgagagatacgatcacatcacagaggctgcatctcggggaattttagatgttcaatctgtgcaagaaaagagaaagaaaaaggaaaaaatagaaaaacaaattgctacatccgggcccccaccagaaggtggacttaggtggacagtttcataaagcataacatgagtagaagaatctactgccaataactgtttattatctgcaatcaagtgggcttcatcaatttaatttcttctctttgagtaaatgaagattcagactttgtaatattattgcccttaagtgcaatgctaaaaaaacgttgattttcaagcttagagaatggctagacttttcattaaatactgattttcctacaaaacaaaaaaaaaaattctccagccgcttga

SEQ ID NO: 373437 - DNA, 813 bp, Homo sapiens
gtaatagagagctcgctctgccacctggaagtatgggctggagacacatttggccaactgccggaagaggggttccatgatcttcacaaattctgatggttcctcgtgccgggacgcgcagttagcgccgcctggcctgggccggacccggtcagggttctcaagctgtcgtccctatggggctgtgttttccttgtcccggggagtccgcgcctcccacgccggacctggaagagaaaagagcaaagcttgcagaggctgcagagagaagacaaaaagaggctgcatctcggggaattttagatgttcaatctgtgcaagaaaagagaaagaaaaaggaaaaaatagaaaaacaaattgctacatccgggcccccaccagaaggtggacttagggaaaatggacatgaactttgaattttccctttctccaaatgtttgactttttattttcactgataagcattatgctatgttcttagaagacaaaagcagctcttgccagttttgaataatttctgcatgaatagaccagtaagagaaaacctttccaacctatgagagaaagagatgtgaagaaagaagacgggtcatagagatgctacattgctgattttgaagatggaggaaggaaatcatggagcttaggaatgcaggtggcctctagaagatggaaaaggaaaggaaatggatgctcccctagactcttcaggaaggaaaacagccttggtgacactctgattttagcctattgaaaccatgttgaatgactgcagaaatgtgagataataaacatgcttattcagctaccaag

SEQ ID NO: 373438 - DNA, 2194 bp, Homo sapiens
gtgacccgcgcggggccgggccgccggcgcagtcgctgcagccgccgcgggaggcgtccgtgacaagatgaagctcatcatcctggagcactattctcaggcgagcgagtgggcggctaaatacatcaggaaccgtatcatccagtttaacccagggccagagaagtacttcaccctggggctccccactggccttcctcgagaccacccggagagttaccactccttcatgtggaacaacttcttcaagcacattgacatccacccagaaaacacccacattctggatgggaatgcagtcgacctacaggcagaatgtgatgcctttgaagagaagatcaaggctgcaggtgggatcgagctatttgttggaggcatcggccctgatggacacattgccttcaacgagccaggctccagtctggtgtccaggacccgtgtgaagacgctggccatggataccatcctggccaatgctaggttcttcgatggagaactcaccaaggtgcccaccatggccttgacggtgggggtgggcactgtcatggatgctagagaggtgatgatccttatcacaggtgctcacaaggcatttgctctgtacaaggccatcgaggagggagtgaaccacatgtggaccgtgtctgccttccagcagcatccccgcaccgtgtttgtgtgtgacgaggatgccaccttggagctgaaagtgaagactgtcaagtatttcaaaggtttaatgcttgttcataacaagttggtggaccccttgtacagtatcaaagagaaagaaactgagaaaagccaatcttcgaagaaaccatacagcgattagcctgtgctgggacctagtgtcaagtacccatagggaaaggcaggtctttctggaaattgtctttagaagaaagaattgtatttctttaatctagtatggttactccagataagtgggtgaacttattgttcttggccatgaggctgggagcctagtcacggagtttagctatagggagaatgtttgtaacttaatcagaaaaaaaatatctgcaaaatgtactccatcattttgatgtctgccaaacccaggttgggagttttaaactttttgttctgcttcagccatggttcacacatatgacacactcccgtcaggaatttctctccttacacgcactgattttcaagtgggagggaattaggggcttatgtatattggataccacctcttgttgagagtccttcttgcacaggcctgccccttggttgagaaccattgttccaagtgaaggcacaaactctcaatatctaaaataagtgcaaggaagcagtctctttggtcagtaacaagtgcaatggaaagaaaacgatcccttccttcttccactttcacagcttttctctgaactaggagaacctgggggtggatttgggtgggtggggccaaagaggaggcttctattgataaatccagagcctcaaggggcccagccacgtcaaacttctctccctcagggactctccagcaccaaaaggcagaaggtggaagccgtttttcccccagagccctgtgtttttgtgaaaggcctcactgtggctcctctgttttacatactcattagtaagtgggaggtccactggggcaacagacactgccacaatttcagtgttgtgttcagccaaggggacggtctggacaggcagcttaagtgtgagtttagtcacaactcctgagtgtcccgctctcctgcttacctaggaggtgagtgccaggaaaatacaccaaatgcttctagtattgtttccccacttaaaatagtcctgcttaaattcacatggtgtggtctgatgttctgagagcatcaggaaatacaacccttttgcccatttacccttctccccggatcccaaggtggtctgttgctctggcttcctttcattgtcttaggccttcatggagtggatgctgcctcctcctggctgtttttgtgcctgtttgaagctactgctgcctccatttctgggaaagacctttgagagcctagcccaggcctaagggctatgtttggtaccagtgttttgtctttagcttttctatgtgattgtgccgtcattctgttttaagctcatggatcaatggatttgtttacaatgtgatattttctattaaatccagtattttcaaataacaaatcat

SEQ ID NO: 373439 - DNA, 3252 bp, Homo sapiens
gtgacccgcgcggggccgggccgccggcgcagtcgctgcagccgccgcgggaggcgtccgtgtaagtgggtagcagggctggcggggaccttcctcgcgggccggagcgcggagcgctgccccagccctacggcactcggggtcgggaccccggggagccgccctcacacattttccaggagggatcggaggggcgatggggtggtaatgggggtgggggacacgctgtaccccaccgacgaccgcgcgggccaccttcgcctctttccttcacactcccactaaccgcagtgctgggggaacaaaatgtcctccttctggagcgattaccttttcccttttgtgctttgggggaaactgaagacccagaggggttcgcaaagcaaggtgggccagtaggaagacccctccgctagtccagagagagcacacagctccccaggcagagctcattgccccacctgctctagtggcccagcatgatcccatgacctctctacttctggaggaagagtcttggggtagacggcggggagggggtagggtatcccgttccggtaggggcagggatgagggaggcggggctgagccgagcatctatctggatggtaacagccaacgtagaaaatactaagttgtttacatgcattctctcatttcatattacccgtcgtgaagtctgtgaagtaggtactattgtcccaatttttacataggaggaaacggctcagagagaacttaggtcctttgaccgaggtcctgcaggtggtaagtgaaggagctgagattagaacccagatctgcccccagtggcgcctcctcgtggtctgtgggtggtggagacgactggcctagcctcttagctcctctgtgaatagaaaggcctttttcctggctcagacagcttgggaaggggattgttgctgggtaagagaagcttctcccaccacctccatctctttctctgccccttaccattgattcctttctgtcatcccctctcccccactgcaggacgacaagatgaagctcatcatcctggagcactattctcaggcgagcgagtgggcggctaaatacatcaggaaccgtatcatccagtttaacccagggccagagaagtacttcaccctggggctccccactgggagtaccccacttggctgctacaagaagctgattgaatactataagaatggggacctgtcctttaaatatgtgaagaccttcaacatggatgagtacgtgggccttcctcgagaccacccggagagttaccactccttcatgtggaacaacttcttcaagcacattgacatccacccagaaaacacccacattctggatgggaatgcagtcgacctacaggcagaatgtgatgcctttgaagagaagatcaaggctgcaggtgggatcgagctatttgttggaggcatcggccctgatggacacattgccttcaacgagccaggctccagtctggtgtccaggacccgtgtgaagacgctggccatggataccatcctggccaatgctaggttcttcgatggagaactcaccaaggtgcccaccatggccttgacggtgggggtgggcactgtcatggatgctagagaggtgatgatccttatcacaggtgctcacaaggcatttgctctgtacaaggccatcgaggagggagtgaaccacatgtggaccgtgtctgccttccagcagcatccccgcaccgtgtttgtgtgtgacgaggatgccaccttggagctgaaagtgaagactgtcaagtatttcaaaggtttaatgcttgttcataacaagttggtggaccccttgtacagtatcaaagagaaagaaactgagaaaagccaatcttcgaagaaaccatacagcgattagcctgtgctgggacctagtgtcaagtacccatagggaaaggcaggtctttctggaaattgtctttagaagaaagaattgtatttctttaatctagtatggttactccagataagtgggtgaacttattgttcttggccatgaggctgggagcctagtcacggagtttagctatagggagaatgtttgtaacttaatcagaaaaaaaatatctgcaaaatgtactccatcattttgatgtctgccaaacccaggttgggagttttaaactttttgttctgcttcagccatggttcacacatatgacacactcccgtcaggaatttctctccttacacgcactgattttcaagtgggagggaattaggggcttatgtatattggataccacctcttgttgagagtccttcttgcacaggcctgccccttggttgagaaccattgttccaagtgaaggcacaaactctcaatatctaaaataagtgcaaggaagcagtctctttggtcagtaacaagtgcaatggaaagaaaacgatcccttccttcttccactttcacagcttttctctgaactaggagaacctgggggtggatttgggtgggtggggccaaagaggaggcttctattgataaatccagagcctcaaggggcccagccacgtcaaacttctctccctcagggactctccagcaccaaaaggcagaaggtggaagccgtttttcccccagagccctgtgtttttgtgaaaggcctcactgtggctcctctgttttacatactcattagtaagtgggaggtccactggggcaacagacactgccacaatttcagtgttgtgttcagccaaggggacggtctggacaggcagcttaagtgtgagtttagtcacaactcctgagtgtcccgctctcctgcttacctaggaggtgagtgccaggaaaatacaccaaatgcttctagtattgtttccccacttaaaatagtcctgcttaaattcacatggtgtggtctgatgttctgagagcatcaggaaatacaacccttttgcccatttacccttctccccggatcccaaggtggtctgttgctctggcttcctttcattgtcttaggccttcatggagtggatgctgcctcctcctggctgtttttgtgcctgtttgaagctactgctgcctccatttctgggaaagacctttgagagcctagcccaggcctaagggctatgtttggtaccagtgttttgtctttagcttttctatgtgattgtgccgtcattctgttttaagctcatggatcaatggatttgtttacaatgtgatattttctattaaatccagtattttcaaataacaaatcat

SEQ ID NO: 373440 - DNA, 2296 bp, Homo sapiens
gtgacccgcgcggggccgggccgccggcgcagtcgctgcagccgccgcgggaggcgtccgtgacaagatgaagctcatcatcctggagcactattctcaggcgagcgagtgggcggctaaatacatcaggaaccgtatcatccagtttaacccagggccagagaagtacttcaccctggggctccccactgggagtaccccacttggctgctacaagaagctgattgaatactataagaatggggacctgtcctttaaatatgtgaagaccttcaacatggatgagtacgtgggccttcctcgagaccacccggagagttaccactccttcatgtggaacaacttcttcaagcacattgacatccacccagaaaacacccacattctggatgggaatgcagtcgacctacaggcagaatgtgatgcctttgaagagaagatcaaggctgcaggtgggatcgagctatttgttggaggcatcggccctgatggacacattgccttcaacgagccaggctccagtctggtgtccaggacccgtgtgaagacgctggccatggataccatcctggccaatgctaggttcttcgatggagaactcaccaaggtgcccaccatggccttgacggtgggggtgggcactgtcatggatgctagagaggtgatgatccttatcacaggtgctcacaaggcatttgctctgtacaaggccatcgaggagggagtgaaccacatgtggaccgtgtctgccttccagcagcatccccgcaccgtgtttgtgtgtgacgaggatgccaccttggagctgaaagtgaagactgtcaagtatttcaaaggtttaatgcttgttcataacaagttggtggaccccttgtacagtatcaaagagaaagaaactgagaaaagccaatcttcgaagaaaccatacagcgattagcctgtgctgggacctagtgtcaagtacccatagggaaaggcaggtctttctggaaattgtctttagaagaaagaattgtatttctttaatctagtatggttactccagataagtgggtgaacttattgttcttggccatgaggctgggagcctagtcacggagtttagctatagggagaatgtttgtaacttaatcagaaaaaaaatatctgcaaaatgtactccatcattttgatgtctgccaaacccaggttgggagttttaaactttttgttctgcttcagccatggttcacacatatgacacactcccgtcaggaatttctctccttacacgcactgattttcaagtgggagggaattaggggcttatgtatattggataccacctcttgttgagagtccttcttgcacaggcctgccccttggttgagaaccattgttccaagtgaaggcacaaactctcaatatctaaaataagtgcaaggaagcagtctctttggtcagtaacaagtgcaatggaaagaaaacgatcccttccttcttccactttcacagcttttctctgaactaggagaacctgggggtggatttgggtgggtggggccaaagaggaggcttctattgataaatccagagcctcaaggggcccagccacgtcaaacttctctccctcagggactctccagcaccaaaaggcagaaggtggaagccgtttttcccccagagccctgtgtttttgtgaaaggcctcactgtggctcctctgttttacatactcattagtaagtgggaggtccactggggcaacagacactgccacaatttcagtgttgtgttcagccaaggggacggtctggacaggcagcttaagtgtgagtttagtcacaactcctgagtgtcccgctctcctgcttacctaggaggtgagtgccaggaaaatacaccaaatgcttctagtattgtttccccacttaaaatagtcctgcttaaattcacatggtgtggtctgatgttctgagagcatcaggaaatacaacccttttgcccatttacccttctccccggatcccaaggtggtctgttgctctggcttcctttcattgtcttaggccttcatggagtggatgctgcctcctcctggctgtttttgtgcctgtttgaagctactgctgcctccatttctgggaaagacctttgagagcctagcccaggcctaagggctatgtttggtaccagtgttttgtctttagcttttctatgtgattgtgccgtcattctgttttaagctcatggatcaatggatttgtttacaatgtgatattttctattaaatccagtattttcaaataacaaatcat

SEQ ID NO: 373441 - DNA, 2348 bp, Homo sapiens
gtgacccgcgcggggccgggccgccggcgcagtcgctgcagccgccgcgggaggcgtccgtgaggaaacggctcagagagaacttaggtcctttgaccgaggtcctgcaggtggacaagatgaagctcatcatcctggagcactattctcaggcgagcgagtgggcggctaaatacatcaggaaccgtatcatccagtttaacccagggccagagaagtacttcaccctggggctccccactgggagtaccccacttggctgctacaagaagctgattgaatactataagaatggggacctgtcctttaaatatgtgaagaccttcaacatggatgagtacgtgggccttcctcgagaccacccggagagttaccactccttcatgtggaacaacttcttcaagcacattgacatccacccagaaaacacccacattctggatgggaatgcagtcgacctacaggcagaatgtgatgcctttgaagagaagatcaaggctgcaggtgggatcgagctatttgttggaggcatcggccctgatggacacattgccttcaacgagccaggctccagtctggtgtccaggacccgtgtgaagacgctggccatggataccatcctggccaatgctaggttcttcgatggagaactcaccaaggtgcccaccatggccttgacggtgggggtgggcactgtcatggatgctagagaggtgatgatccttatcacaggtgctcacaaggcatttgctctgtacaaggccatcgaggagggagtgaaccacatgtggaccgtgtctgccttccagcagcatccccgcaccgtgtttgtgtgtgacgaggatgccaccttggagctgaaagtgaagactgtcaagtatttcaaaggtttaatgcttgttcataacaagttggtggaccccttgtacagtatcaaagagaaagaaactgagaaaagccaatcttcgaagaaaccatacagcgattagcctgtgctgggacctagtgtcaagtacccatagggaaaggcaggtctttctggaaattgtctttagaagaaagaattgtatttctttaatctagtatggttactccagataagtgggtgaacttattgttcttggccatgaggctgggagcctagtcacggagtttagctatagggagaatgtttgtaacttaatcagaaaaaaaatatctgcaaaatgtactccatcattttgatgtctgccaaacccaggttgggagttttaaactttttgttctgcttcagccatggttcacacatatgacacactcccgtcaggaatttctctccttacacgcactgattttcaagtgggagggaattaggggcttatgtatattggataccacctcttgttgagagtccttcttgcacaggcctgccccttggttgagaaccattgttccaagtgaaggcacaaactctcaatatctaaaataagtgcaaggaagcagtctctttggtcagtaacaagtgcaatggaaagaaaacgatcccttccttcttccactttcacagcttttctctgaactaggagaacctgggggtggatttgggtgggtggggccaaagaggaggcttctattgataaatccagagcctcaaggggcccagccacgtcaaacttctctccctcagggactctccagcaccaaaaggcagaaggtggaagccgtttttcccccagagccctgtgtttttgtgaaaggcctcactgtggctcctctgttttacatactcattagtaagtgggaggtccactggggcaacagacactgccacaatttcagtgttgtgttcagccaaggggacggtctggacaggcagcttaagtgtgagtttagtcacaactcctgagtgtcccgctctcctgcttacctaggaggtgagtgccaggaaaatacaccaaatgcttctagtattgtttccccacttaaaatagtcctgcttaaattcacatggtgtggtctgatgttctgagagcatcaggaaatacaacccttttgcccatttacccttctccccggatcccaaggtggtctgttgctctggcttcctttcattgtcttaggccttcatggagtggatgctgcctcctcctggctgtttttgtgcctgtttgaagctactgctgcctccatttctgggaaagacctttgagagcctagcccaggcctaagggctatgtttggtaccagtgttttgtctttagcttttctatgtgattgtgccgtcattctgttttaagctcatggatcaatggatttgtttacaatgtgatattttctattaaatccagtattttcaaataacaaatcat

SEQ ID NO: 373442 - DNA, 2194 bp, Homo sapiens
gtgacccgcgcggggccgggccgccggcgcagtcgctgcagccgccgcgggaggcgtccgtgacaagatgaagctcatcatcctggagcactattctcaggcgagcgagtgggcggctaaatacatcaggaaccgtatcatccagtttaacccagggccagagaagtacttcaccctggggctccccactgggagtaccccacttggctgctacaagaagctgattgaatactataagaatggggacctgtcctttaaatatgtgaagaccttcaacatggatgagtacgtgggccttcctcgagaccacccggagagttaccactccttcatgtggaacaacttcttcaagcacattgacatccacccagaaaacacccacattctggatgggaatgcagtcgacctacaggcagaatgtgatgcctttgaagagaagatcaaggctgcaggtgggatcgagctatttgttggaggcatcggccctgatggacacattgccttcaacgagccaggctccagtctggtgtccaggacccgtgtgaagacgctggccatggataccatcctggccaatgctaggttcttcgatggagaactcaccaaggccatcgaggagggagtgaaccacatgtggaccgtgtctgccttccagcagcatccccgcaccgtgtttgtgtgtgacgaggatgccaccttggagctgaaagtgaagactgtcaagtatttcaaaggtttaatgcttgttcataacaagttggtggaccccttgtacagtatcaaagagaaagaaactgagaaaagccaatcttcgaagaaaccatacagcgattagcctgtgctgggacctagtgtcaagtacccatagggaaaggcaggtctttctggaaattgtctttagaagaaagaattgtatttctttaatctagtatggttactccagataagtgggtgaacttattgttcttggccatgaggctgggagcctagtcacggagtttagctatagggagaatgtttgtaacttaatcagaaaaaaaatatctgcaaaatgtactccatcattttgatgtctgccaaacccaggttgggagttttaaactttttgttctgcttcagccatggttcacacatatgacacactcccgtcaggaatttctctccttacacgcactgattttcaagtgggagggaattaggggcttatgtatattggataccacctcttgttgagagtccttcttgcacaggcctgccccttggttgagaaccattgttccaagtgaaggcacaaactctcaatatctaaaataagtgcaaggaagcagtctctttggtcagtaacaagtgcaatggaaagaaaacgatcccttccttcttccactttcacagcttttctctgaactaggagaacctgggggtggatttgggtgggtggggccaaagaggaggcttctattgataaatccagagcctcaaggggcccagccacgtcaaacttctctccctcagggactctccagcaccaaaaggcagaaggtggaagccgtttttcccccagagccctgtgtttttgtgaaaggcctcactgtggctcctctgttttacatactcattagtaagtgggaggtccactggggcaacagacactgccacaatttcagtgttgtgttcagccaaggggacggtctggacaggcagcttaagtgtgagtttagtcacaactcctgagtgtcccgctctcctgcttacctaggaggtgagtgccaggaaaatacaccaaatgcttctagtattgtttccccacttaaaatagtcctgcttaaattcacatggtgtggtctgatgttctgagagcatcaggaaatacaacccttttgcccatttacccttctccccggatcccaaggtggtctgttgctctggcttcctttcattgtcttaggccttcatggagtggatgctgcctcctcctggctgtttttgtgcctgtttgaagctactgctgcctccatttctgggaaagacctttgagagcctagcccaggcctaagggctatgtttggtaccagtgttttgtctttagcttttctatgtgattgtgccgtcattctgttttaagctcatggatcaatggatttgtttacaatgtgatattttctattaaatccagtattttcaaataacaaatcat

SEQ ID NO: 373443 - DNA, 389 bp, Homo sapiens
aagagagaagtgtcagctctaagacaaaatttgagagctcctggatgttatgattgataatcaaggaactcttgccactgcctgaattaactactttttgtttttaattttttgtaggtttaatgcttgttcataacaagttggtggaccccttgtacagtatcaaagagaaagaaactgagaaaagccaatcttcgaagaaaccatacagcgattagcctgtgctgggacctagtgtcaagtacccatagggaaaggcaggtctttctggaaattgtctttagaagaaagaattgtatttctttaatctagtatggttactccagataagtgggtgaacttattgttcttggccatgaggctgggagcctagtcacggagtttagcta

SEQ ID NO: 373444 - DNA, 2712 bp, Homo sapiens
gtgacccgcgcggggccgggccgccggcgcagtcgctgcagccgccgcgggaggcgtccgtgtaagtgggtagcagggctggcggggaccttcctcgcgggccggagcgcggagcgctgccccagccctacggcactcggggtcgggaccccggggagccgccctcacacattttccaggagggatcggaggggcgatggggtggtaatgggggtgggggacacgctgtaccccaccgacgaccgcgcgggccaccttcgcctctttccttcacactcccactaaccgcagtgctgggggaacaaaatgtcctccttctggagcgattaccttttcccttttgtgctttgggggaaactgaagacccagaggggttcgcaaagcaagtctgtgaagtaggtactattgtcccaatttttacataggaggaaacggctcagagagaacttaggtcctttgaccgaggtcctgcaggtggacaagatgaagctcatcatcctggagcactattctcaggcgagcgagtgggcggctaaatacatcaggaaccgtatcatccagtttaacccagggccagagaagtacttcaccctggggctccccactgggagtaccccacttggctgctacaagaagctgattgaatactataagaatggggacctgtcctttaaatatgtgaagaccttcaacatggatgagtacgtgggccttcctcgagaccacccggagagttaccactccttcatgtggaacaacttcttcaagcacattgacatccacccagaaaacacccacattctggatgggaatgcagtcgacctacaggcagaatgtgatgcctttgaagagaagatcaaggctgcaggtgggatcgagctatttgttggaggcatcggccctgatggacacattgccttcaacgagccaggctccagtctggtgtccaggacccgtgtgaagacgctggccatggataccatcctggccaatgctaggttcttcgatggagaactcaccaaggtgcccaccatggccttgacggtgggggtgggcactgtcatggatgctagagaggtgatgatccttatcacaggtgctcacaaggcatttgctctgtacaaggccatcgaggagggagtgaaccacatgtggaccgtgtctgccttccagcagcatccccgcaccgtgtttgtgtgtgacgaggatgccaccttggagctgaaagtgaagactgtcaagtatttcaaaggtttaatgcttgttcataacaagttggtggaccccttgtacagtatcaaagagaaagaaactgagaaaagccaatcttcgaagaaaccatacagcgattagcctgtgctgggacctagtgtcaagtacccatagggaaaggcaggtctttctggaaattgtctttagaagaaagaattgtatttctttaatctagtatggttactccagataagtgggtgaacttattgttcttggccatgaggctgggagcctagtcacggagtttagctatagggagaatgtttgtaacttaatcagaaaaaaaatatctgcaaaatgtactccatcattttgatgtctgccaaacccaggttgggagttttaaactttttgttctgcttcagccatggttcacacatatgacacactcccgtcaggaatttctctccttacacgcactgattttcaagtgggagggaattaggggcttatgtatattggataccacctcttgttgagagtccttcttgcacaggcctgccccttggttgagaaccattgttccaagtgaaggcacaaactctcaatatctaaaataagtgcaaggaagcagtctctttggtcagtaacaagtgcaatggaaagaaaacgatcccttccttcttccactttcacagcttttctctgaactaggagaacctgggggtggatttgggtgggtggggccaaagaggaggcttctattgataaatccagagcctcaaggggcccagccacgtcaaacttctctccctcagggactctccagcaccaaaaggcagaaggtggaagccgtttttcccccagagccctgtgtttttgtgaaaggcctcactgtggctcctctgttttacatactcattagtaagtgggaggtccactggggcaacagacactgccacaatttcagtgttgtgttcagccaaggggacggtctggacaggcagcttaagtgtgagtttagtcacaactcctgagtgtcccgctctcctgcttacctaggaggtgagtgccaggaaaatacaccaaatgcttctagtattgtttccccacttaaaatagtcctgcttaaattcacatggtgtggtctgatgttctgagagcatcaggaaatacaacccttttgcccatttacccttctccccggatcccaaggtggtctgttgctctggcttcctttcattgtcttaggccttcatggagtggatgctgcctcctcctggctgtttttgtgcctgtttgaagctactgctgcctccatttctgggaaagacctttgagagcctagcccaggcctaagggctatgtttggtaccagtgttttgtctttagcttttctatgtgattgtgccgtcattctgttttaagctcatggatcaatggatttgtttacaatgtgatattttctattaaatccagtattttcaaataacaaatcat

SEQ ID NO: 373445 - DNA, 2272 bp, Homo sapiens
gtgacccgcgcggggccgggccgccggcgcagtcgctgcagccgccgcgggaggcgtccgtgacaagatgaagctcatcatcctggagcactattctcaggcgagcgagtgggcggctaaatacatcaggaaccgtatcatccagtttaacccagggccagagaagtacttcaccctggggctccccactgggagtaccccacttggctgctacaagaagctgattgaatactataagaatggggacctgtcctttaaatatgtgaagaccttcaacatggatgagtacgtgggccttcctcgagaccacccggagagttaccactccttcatgtggaacaacttcttcaagcacattgacatccacccagaaaacacccacattctggatgggaatgcagtcgacctacaggcagaatgtgatgcctttgaagagaagatcaaggctgcaggcatcggccctgatggacacattgccttcaacgagccaggctccagtctggtgtccaggacccgtgtgaagacgctggccatggataccatcctggccaatgctaggttcttcgatggagaactcaccaaggtgcccaccatggccttgacggtgggggtgggcactgtcatggatgctagagaggtgatgatccttatcacaggtgctcacaaggcatttgctctgtacaaggccatcgaggagggagtgaaccacatgtggaccgtgtctgccttccagcagcatccccgcaccgtgtttgtgtgtgacgaggatgccaccttggagctgaaagtgaagactgtcaagtatttcaaaggtttaatgcttgttcataacaagttggtggaccccttgtacagtatcaaagagaaagaaactgagaaaagccaatcttcgaagaaaccatacagcgattagcctgtgctgggacctagtgtcaagtacccatagggaaaggcaggtctttctggaaattgtctttagaagaaagaattgtatttctttaatctagtatggttactccagataagtgggtgaacttattgttcttggccatgaggctgggagcctagtcacggagtttagctatagggagaatgtttgtaacttaatcagaaaaaaaatatctgcaaaatgtactccatcattttgatgtctgccaaacccaggttgggagttttaaactttttgttctgcttcagccatggttcacacatatgacacactcccgtcaggaatttctctccttacacgcactgattttcaagtgggagggaattaggggcttatgtatattggataccacctcttgttgagagtccttcttgcacaggcctgccccttggttgagaaccattgttccaagtgaaggcacaaactctcaatatctaaaataagtgcaaggaagcagtctctttggtcagtaacaagtgcaatggaaagaaaacgatcccttccttcttccactttcacagcttttctctgaactaggagaacctgggggtggatttgggtgggtggggccaaagaggaggcttctattgataaatccagagcctcaaggggcccagccacgtcaaacttctctccctcagggactctccagcaccaaaaggcagaaggtggaagccgtttttcccccagagccctgtgtttttgtgaaaggcctcactgtggctcctctgttttacatactcattagtaagtgggaggtccactggggcaacagacactgccacaatttcagtgttgtgttcagccaaggggacggtctggacaggcagcttaagtgtgagtttagtcacaactcctgagtgtcccgctctcctgcttacctaggaggtgagtgccaggaaaatacaccaaatgcttctagtattgtttccccacttaaaatagtcctgcttaaattcacatggtgtggtctgatgttctgagagcatcaggaaatacaacccttttgcccatttacccttctccccggatcccaaggtggtctgttgctctggcttcctttcattgtcttaggccttcatggagtggatgctgcctcctcctggctgtttttgtgcctgtttgaagctactgctgcctccatttctgggaaagacctttgagagcctagcccaggcctaagggctatgtttggtaccagtgttttgtctttagcttttctatgtgattgtgccgtcattctgttttaagctcatggatcaatggatttgtttacaatgtgatattttctattaaatccagtattttcaaataacaaatcat

SEQ ID NO: 373446 - DNA, 2242 bp, Homo sapiens
gtgacccgcgcggggccgggccgccggcgcagtcgctgcagccgccgcgggaggcgtccgtgacaagatgaagctcatcatcctggagcactattctcaggcgagcgagtgggcggctaaatacatcaggaaccgtatcatccagtttaacccagggccagagaagtacttcaccctggggctccccactgggagtaccccacttggctgctacaagaagctgattgaatactataagaatggggacctgtcctttaaatatgtgaagaccttcaacatggatgagtacgtgggccttcctcgagaccacccggagagttaccactccttcatgtggaacaacttcttcaagcacattgacatccacccagaaaacacccacattctggatgggaatgcagtcgacctacaggcagaatgtgatgcctttgaagagaagatcaaggctgcaggtgggatcgagctatttgttggaggcatcggccctgatggacacattgccttcaacgagccaggctccagtctggtgtccaggacccgtgtgaagacgctggccatggataccatcctggccaatgctaggttcttcgatggagaactcaccaaggtgatgatccttatcacaggtgctcacaaggcatttgctctgtacaaggccatcgaggagggagtgaaccacatgtggaccgtgtctgccttccagcagcatccccgcaccgtgtttgtgtgtgacgaggatgccaccttggagctgaaagtgaagactgtcaagtatttcaaaggtttaatgcttgttcataacaagttggtggaccccttgtacagtatcaaagagaaagaaactgagaaaagccaatcttcgaagaaaccatacagcgattagcctgtgctgggacctagtgtcaagtacccatagggaaaggcaggtctttctggaaattgtctttagaagaaagaattgtatttctttaatctagtatggttactccagataagtgggtgaacttattgttcttggccatgaggctgggagcctagtcacggagtttagctatagggagaatgtttgtaacttaatcagaaaaaaaatatctgcaaaatgtactccatcattttgatgtctgccaaacccaggttgggagttttaaactttttgttctgcttcagccatggttcacacatatgacacactcccgtcaggaatttctctccttacacgcactgattttcaagtgggagggaattaggggcttatgtatattggataccacctcttgttgagagtccttcttgcacaggcctgccccttggttgagaaccattgttccaagtgaaggcacaaactctcaatatctaaaataagtgcaaggaagcagtctctttggtcagtaacaagtgcaatggaaagaaaacgatcccttccttcttccactttcacagcttttctctgaactaggagaacctgggggtggatttgggtgggtggggccaaagaggaggcttctattgataaatccagagcctcaaggggcccagccacgtcaaacttctctccctcagggactctccagcaccaaaaggcagaaggtggaagccgtttttcccccagagccctgtgtttttgtgaaaggcctcactgtggctcctctgttttacatactcattagtaagtgggaggtccactggggcaacagacactgccacaatttcagtgttgtgttcagccaaggggacggtctggacaggcagcttaagtgtgagtttagtcacaactcctgagtgtcccgctctcctgcttacctaggaggtgagtgccaggaaaatacaccaaatgcttctagtattgtttccccacttaaaatagtcctgcttaaattcacatggtgtggtctgatgttctgagagcatcaggaaatacaacccttttgcccatttacccttctccccggatcccaaggtggtctgttgctctggcttcctttcattgtcttaggccttcatggagtggatgctgcctcctcctggctgtttttgtgcctgtttgaagctactgctgcctccatttctgggaaagacctttgagagcctagcccaggcctaagggctatgtttggtaccagtgttttgtctttagcttttctatgtgattgtgccgtcattctgttttaagctcatggatcaatggatttgtttacaatgtgatattttctattaaatccagtattttcaaataacaaatcat

SEQ ID NO: 373447 - DNA, 2231 bp, Homo sapiens
ctggctctggggagaagccgcgtgagatccgcgcgggtgctagctagtcctttctcgtcgctgctcggctcgcggcccgtggggtcggccccgccaccgttgccgccatgcccatgaagggccgcttccccatccgccgcaccctgcaatatctgagccaggggaacgtggtgttcaaggactccgtgaaggtcatgacagtgaattacaacacgcatggggagctgggcgagggcgccaggaagtttgtgtttttcaacatacctcagattcaatacaaaaacccttgggtgcagatcatgatgtttaagaacatgacgccgtcacccttcctgcgattctacttagattctggggagcaggtcctggtggatgtggagaccaagagcaataaggagatcatggagcacatcagaaaaatcttggggaagaatgaggaaaccctcagggaagaggaggaggagaaaaagcagctttctcacccagccaacttcggccctcgaaagtactgcctgcgggagtgcatctgtgaagtggaagggcaggtgccctgccccagcctggtgccattacccaaggagatgagggggaagtacaaagccgctctgaaagccgatgcccaggactaaggcccacggtcactgtgggctggggtgatggtgtctgaccagtggggagattggaatgggattactttggcccagggaagcccctggttctgtccctggagactctggaaatccttttgcattaaaaggactttacacacctgtgtaaaaggatgtgggagaggagggtctgaagctgagctgctaaatgaatatccctgctctgctggtcaataaaacgcttcctaatagcagcttggcgtgtatctggtcctagtgaagaggaaggcctgtgtagcagaaaggctttgggcctgagaggttaaggccacagcctgttgacacctgttttggtcctgcgaccctttactggtctccgctggctttgaatcttcctctgggctctactctggagaacataagggctgctgtggttgagtctggctagcactgtctgtggttggcagtgtgtacacccctccgttcagttccttgggggtatttttcagaaatccaaaggcaacccttcgtgcagtgctcacttttttaagtacagttgattacccttgcctgctggggggcctagccatgggccagagatggaggagccccagtggctgacaggccagcctcactcaggcacgtacctgctgaccagtcagccactgccaacccatggcccagccactgtgtgcattagcagggaggtttgtaggccatggaggaaatgaggagacaccacctagtggagacattggggccctgctggggggatggtgtctatagctggctctgctggctccctcaggccctgcttaccaagctctggaggagggagtgctgcattactgagcaccttccttgttctttcctcataggacactgatgttactgtcactttagttatgctaaagtggaggtttcagcctccagaagacagcagagccttctagggtcaccttaagaataggtttagctaggctgggtgtggtggctcatgcctgtaatcccagcactttgggaggctgatgtgggcggatagttgagcccaggagttcgagaccagcctgggcaacatggcaagaccttgtctctacaaaaagtacaaaaattagatgggtgtggtgtttcgcgtctgtagtcccagctatttgggaagctgaggtgggaggatctcgagcctgcgagatcaaggctgcagtgaatcatgatcgtgcgctactgcactccagcctgggccacagagcaagactgtctcaagaaaaaaaattttttaaataagtttaattataaagtgaaggaccagttggaccacggacccctagaaactcagccaaggagacctgactttatctgagacaggaaggcagtggttaaaagaattaaaaaaggacagtggtgcttgacagagcaggactgaagttttcattcctctacctgctggggccttggtcaagtcctaaaagctttccaggtctgtaactggttttgtctgtaaaatggggaaaaggttaccttttctgccacatgaagtagctggctggtgaaatgatgtcatactacgatgtgtttcattaactgttggagattatcacattaaattgagcagatttggatctttta

SEQ ID NO: 373448 - DNA, 992 bp, Homo sapiens
  misc_feature (862)..(862): n is a, c, g, or t
  misc_feature (879)..(879): n is a, c, g, or t
  misc_feature (883)..(883): n is a, c, g, or t
  misc_feature (900)..(901): n is a, c, g, or t
  misc_feature (909)..(909): n is a, c, g, or t
  misc_feature (917)..(917): n is a, c, g, or t
ctggctctggggagaagccgcgtgagatccgcgcgggtgctagctagtcctttctcgtcgctgctcggctcgcggcccgtggggtcggccccgccaccgttgccgccatgcccatgaagggccgcttccccatccgccgcaccctgcaatatctgagccaggggaacgtggtgttcaaggactccgtgaaggtcatgacagtgaattacaacacgcatggggagctgggcgagggcgccagattctggggagcaggtcctggtggatgtggagaccaagagcaataaggagatcatggagcacatcagaaaaatcttggggaagaatgaggaaaccctcagggaagaggaggaggagaaaaagcagctttctcacccagccaacttcggccctcgaaagtactgcctgcgggagtgcatctgtgaagtggaagggcaggtgccctgccccagcctggtgccattacccaaggagatgagggggaagtacaaagccgctctgaaagccgatgcccaggactaaggcccacggtcactgtgggctggggtgatggtgtctgaccagtggggagattggaatgggattactttggcccagggaagcccctggttctgtccctggagactctggaaatccttttgcattaaaaggactttacacacctgtgtaaaaggatgtgggagaggagggtctgaagctgagctgctaaatgaatatccctgctctgctggtcaataaaacgcttcctaatagcagcttggcgtgtatctggtcctagtgaagaggaaggcctgtgtagcagaaaggctttgggcctgagaggttaaggccacagcctgttgaccggtttggctggacttanggtccgggtgaactccnggcnctggaacaggggggggnngcaccgtngggtgggnaccccaaccggggtcagaccgacctggggctaaaggccccggggccccaaaccggcacattccccccctgtggac

SEQ ID NO: 373449 - DNA, 1723 bp, Homo sapiens
ggagcatgaacgtggctccatggagttcagtagccagaggacaggtctcacttcatgaaacccaaagtttcacaaactgctaataagggctataagccctgtgaaagttggagcccaaatatttggtttgcatctctttaagtaattcttgactttgggctgactttacttaaccaacctgacaggagatgaaatggacctgcagtcagaggcttgaaatgagttaaagcagcaagaatacaggttacgtggacatgatccttaaagaaaaggccacttcaaagtaaggccaagaggatctcagaaaccaaccaagaggtgttcaaagcccaaaacagtccctggaatcagccatcaccagcaaggggacttaaagagcaggaccaggttagaatcagcacctttccaagcaaaatcacgttttctgcaaggttgtttcaccacagcccaacacttccttatccagcctgagtctaagcagcctactggctgccactgaatgacctgggaatgagaggaggggctggtggagaccttttcaccaacaccaagaactgggatctgaaagctgttatgcttgtattcccagggaactgcaacatggccctcatggtcactctcaaggatcaaaacgacggaaggcaggcaacaatctgtgttagaggcaccactgagctgcaggatgcctgctactaaaagccttcacaagcagaaatgaaacaaacctgccctaattccattgtctcagctggttttttgtcttaattttgaaactgaaaacacatcagggttagaaaagtaaaaattactttaagctggcaaaattaaatcctttccatcattttataatggccactcccactactctccaaaatttgctgccaaggcaagaattataaaatgatataattaaatccaaacaagaatttagaagttggaaacactgttcccacttaccctactaacactgacttgcgtaaagtgctgctaacccttcaggatcaagcatcctgttctgccttgagcctgcagcagcttccattctgtccaatgtggcaccacaggggcgtctgtagctggccagactgcacccctgtggagcacatgtggcgccagcctgagccagatcagagcacctgtgagtcaggggagtgtccagggatctttttggatatcatctgattaacaaatcaagagaggcaaatttaacccaacagggtgtattttcttaatctggactatttaaaaagcaaaagacaaagcaattgaccgggtcttccacatgccactgttctcaaacaggaaaagcttgctatatattcacatccgtgggaatttacgggtgtttgaagttagacataacttccttttaagcgcatactgttcttgctgtaaactctggttgctacaatttatgaggagaaagactatcaccctggaaattgagggttgtttttaaggagcaagcagcctgcatttaaaatgctccggggtggtcggctggcacacacctgggggaaccaaagtgcacagtgtgctggtaacattaacagacttgccaacagagatgctgagtctatacacatttttaaaatctctggtatttaaggtcaacaggaagaaattgtcctgaaaccttccatccagctttaccaggccctaaccactctcgccaggcggcagcaggctcctgcccagccccaatccagcctcacagttatga

SEQ ID NO: 373450 - DNA, 684 bp, Homo sapiens
ctggctctggggagaagccgcgtgagatccgcgcgggtgctagctagtcctttctcgtcgctgctcggctcgcggcccgtggggtcggccccgccaccgttgccgccatgcccatgaagggccgcttccccatccgccgcaccctgcaatatctgagccaggggaacgtggtgttcaaggactccgtgaaggtcatgacagtgaattacaacacgcatggggagctgggcgagggcgccaggaagtttgtgtttttcaacatacctcagattcaatacaaaaacccttgggtgcagatcatgatgtttaagaacatgacgccgtcacccttcctgcgattctacttaggtgagtggggccctcgccatggtccaggggctgtcccagacatgcctggagagactgcgtccttcctatgggagcgtcaggatgagctgcagtgtgcgctgtcatggtgtgtctgtgactcctggcacctttggcttccccataccgaggcactcagcagccactgaggtctggactctttccctctccagcctcacctcttcttaccctctgcctcacaccatgggggtaatttttccaaagtcccttgtcacaccaggctgtgatgcctttgctcaagattgttcctggcctggaatcccatttctacctgcgtttgcttatttaactgaaaaa

SEQ ID NO: 373451 - DNA, 502 bp, Homo sapiens
  misc_feature (2)..(3): n is a, c, g, or t
  misc_feature (10)..(11): n is a, c, g, or t
  misc_feature (14)..(14): n is a, c, g, or t
  misc_feature (37)..(37): n is a, c, g, or t
gnnggggggnnttnaccatatacttattagccgtctnacttgtttgggggatagttacggcaaggagctaaaaatcagtccctcttgagggcaattacacatcttagaagtgactacacctgaaattaaatataaagcccagaacagcaaaagaacctcaaaccacagccttatggcaagggttagacaataaatgtaactcctcaggacacagaaatgtcaaattaggagagtatggtaggtaacacacttccttaaaaacaccttccaggagtaacttgaaaagtattacttgctcaactaatttggtctttcaaaaaatctcttcctgtcctgttttatgctaatgtgtaatgatctccaccattttcaacatctatctgtcttaacccaacattatctgagatacttctggaaaagagctcacttaactgatgacagcatgtgtctgtcccacctctctgagccagctgcctctcctcattgagggaggagcagccag

SEQ ID NO: 373452 - DNA, 7224 bp, Homo sapiens
ctggctctggggagaagccgcgtgagatccgcgcgggtgctagctagtcctttctcgtcgctgctcggctcgcggcccgtggggtcggccccgccaccgttgccgccatgcccatgaagggccgcttccccatccgccgcaccctgcaatatctgagccaggggaacgtggtgttcaaggactccgtgaaggtcatgacagtgaattacaacacgcatggggagctgggcgagggcgccaggaagtttgtgtttttcaacatacctcagattcaatacaaaaacccttgggtgcagatcatgatgtttaagaacatgacgccgtcacccttcctgcgattctacttagattctggggagcaggtcctggtggatgtggagaccaagagcaataaggagatcatggagcacatcagaaaaatcttggggaagaatgaggaaaccctcagggaagaggaggaggagaaaaagcagctttctcacccagccaacttcggccctcgaaagtactgcctgcgggagtgcatctgtgaagtggaagggcaggtgccctgccccagcctggtgccattacccaaggagatgagggggaagtacaaagccgctctgaaagccgatgcccaggactaaggcccacggtcactgtgggctggggtgatggtgtctgaccagtggggagattggaatgggattactttggcccagggaagcccctggttctgtccctggagactctggaaatccttttgcattaaaaggactttacacacctgtgtaaaaggatgtgggagaggagggtctgaagctgagctgctaaatgaatatccctgctctgctggtcaataaaacgcttcctaatagcagcttggcgtgtatctggtcctagtgaagaggaaggcctgtgtagcagaaaggctttgggcctgagaggttaaggccacagcctgttgacacctgttttggtcctgcgaccctttactggtctccgctggctttgaatcttcctctgggctctactctggagaacataagggctgctgtggttgagtctggctagcactgtctgtggttggcagtgtgtacacccctccgttcagttccttgggggtatttttcagaaatccaaaggcaacccttcgtgcagtgctcacttttttaagtacagttgattacccttgcctgctggggggcctagccatgggccagagatggaggagccccagtggctgacaggccagcctcactcaggcacgtacctgctgaccagtcagccactgccaacccatggcccagccactgtgtgcattagcagggaggtttgtaggccatggaggaaatgaggagacaccacctagtggagacattggggccctgctggggggatggtgtctatagctggctctgctggctccctcaggccctgcttaccaagctctggaggagggagtgctgcattactgagcaccttccttgttctttcctcataggacactgatgttactgtcactttagttatgctaaagtggaggtttcagcctccagaagacagcagagccttctagggtcaccttaagaataggtttagctaggctgggtgtggtggctcatgcctgtaatcccagcactttgggaggctgatgtgggcggatagttgagcccaggagttcgagaccagcctgggcaacatggcaagaccttgtctctacaaaaagtacaaaaattagatgggtgtggtgtttcgcgtctgtagtcccagctatttgggaagctgaggtgggaggatctcgagcctgcgagatcaaggctgcagtgaatcatgatcgtgcgctactgcactccagcctgggccacagagcaagactgtctcaagaaaaaaaattttttaaataagtttaattataaagtgaaggaccagttggaccacggacccctagaaactcagccaaggagacctgactttatctgagacaggaaggcagtggttaaaagaattaaaaaaggacagtggtgcttgacagagcaggactgaagttttcattcctctacctgctggggccttggtcaagtcctaaaagctttccaggtctgtaactggttttgtctgtaaaatggggaaaaggttaccttttctgccacatgaagtagctggctggtgaaatgatgtcatactacgatgtgtttcattaactgttggagattatcacattaaattgagcagatttggatcttttacatttgatgctcaagtttgattctgtaccagatctgggtttggggtgatggcttgtcgggggtgggaggggaaggtgggcagagactgatgtataatggacaggtgttccttgagtgacagacttacaaagggagtgtttaattgaaatctagcatcttgtctctctgctatcagcattttggctgggtggaaaaagctctcctccacagagagccctcccatgtctgctggtttcagttccccacccaactgactgaagtcttgaccttgataccacctgcctgggcgttctacttggctgcaagggctcttcagaaagcacctagttccttttggctttcatctgcagtgtaggtctccatagctagtgacacacaaagccttatgagagtattccttccctctagggcccaaagaggctgctaaccagcaggaatgtcctgaaccaaaaggagtggtgaccattctctagacagaataaatgtctggtccctaatgggacagataactagggtttgagttcaggcttgacacaggagcaatgggcagtgaggtggacagcccagaccctgaaaggacgtgtggagacagcagcagtcctgtggtgcagttactgcctgtgtggccagcttcacaggcagcagataatttgtggaaataaacattattttctttttttgttccctgtaggctacttgatcctggatagtttctctttaaacctttgtctttccctattttgtttagtagtgatgaaagatgggtttaaaatatacagaaatgggagaaaattaattagagaaaatgtgaggattttataattgataacatgttcttaattttacttgcacaagcagtgttcacagccttattctgaagtgaccacttttcttctctttgaggcactacctggcagcaccatctaaacctgtatcatctgctgtggtcccagttactcaggaggctgaggcaggaggatcacttgagcccaggaggttgaggctggagtgagccatgactgtaccactgcattccagcctgggtgacggagtgaggccctatctgcctgccagtgagttctgtcatgcatcagactttggacctcagaattttcacctggaacatgagaggtcagatgacataatgaatatgttctaacttctgaaacttttggagcttgtttttgcccttgatagcacgtatccttagagaataagcttgccaatttaaggcctgtctgtaatggcatctgaatgttccagcagcctaactgtgctctgctccagaaacatgtgtgtggcttccctacctccacaccaaggagctgccttgctgggtggatgtaaagactgtcctgccagggtttcccactaaaggtattaataagtccagtggaccacagagggcccaatccctcttggccgctaaggctaaggtaggagccagagagctgtagagacaggaccaccaggatgcttcatgtccataacacaagagagcgctgcattgtttgggggccaggcattactactatcatgaagaaaaatgaagagcaggatgcatgttagtctttaattcacttttaatagtataaacctcatttaggtagtagtattaagccacaacaataatgccacattgaaacagcatttaataaaatgcataaagctaattcatgcactgcaatactctatatacaaacacaacaatgcaaattcttcttcaagactgaagacattgattagatataaaattcagtttaaaaagaacatgctattttttaaatgccatcacataaacaaagtgatttcacagggagaagaaagctgtataaagctgcagctttcaacaggttttaaacctggcattaaaatgtaatggcaaaaccaatattttctatattgtgaagggcaaaggttacagaaacggtcccaagaaaatctaacacccaaattttcctttgatagatagatgcctttaaaagggctggtaatgcagttacattctaacagagaagtccaaactacaggtaaaaactacggcttgtactgtgaaaaatgtgcagcttttcagttataaaactagttgaacactggtttacaagataatccgtagaacagagagactgtagaaaaatattccagcacttgagttgtgtgtggcagcagcatttgagtccatgaatgctatggtcattaaaataattgattatactttcctaaagaaaagccattttttaatgcaaagtctactacttccaaatgttattccaaacattaaattttaacagtctatcaatcaataaatgttgaacattttttttctattttgcatgtataaatatcaagacaccaaaattatttatagctgggcattaaaaatatctgacatttttctccccgcaaagatacttttcttaagctcacactttaattatttgtagactgctgttaagctaaatagccccaaaggaaacttttaattcatttagagactgtcaagtttccaattgcattttaactagaaagccactttcaatagcgtgattgtcacgacaggctatgacggggaaaggtcgcacaatcttgtgggatgaggccagtgaaatagaagctttctctacatcaaaaacagggaagctgaaggctaaatgacccactgtctcacaaaaggcactgagtactatggtctcataaagtgtttttaaaacattttgataacttattttaaaaagaaaaagaggaaactgtggattatgtgagtttttgcagcaatctagtgattccttccagcaggcccctgcttcccaggtctatgagcaactactgctgggccaggccctggctctcaagggccgagtctcagtttaaggccagattaagggggaaaattcgtccgagtagacctggacgaggaaaatttggtatctgtagcttttaagggcacacatatccatattaaaatgcaattcttatctgaaaatttaaaatcataacttatagaaaggagttaaagtcatttacatgcttacagttagagaagtaacttgagatctgtagcttatatgccgcagaagttagccatcaacatccatgcttagttttaaagaataatacttggtaggttgtttatttttaactggcgatagaaagatgggaattactatttattcagtcataggacagtgccccacatcttgctgactgagcacagcgcaagcctgggaaattgctaccatctttgggagtcaggcctcactgacacagaccgttctgaatctctgaccgtgacgcctgtctctgggctactcaacagagctgaatagctgggaaggctgatggctcaacccaactgccaagttccttccaggtagggccatgaataggtgcatgaaaaggttaaaaattcccacttagttttggatattaagataaactgtcttccagcttcctggctcttgtccgaacctagagaatatacggaaatgtcaccctgtcagaacctcttctgcctggaattcttccttttgcagagtggagattctgacttcatggcccttcccaggcaggctcacccaaaggaaaatggagtgaagaaaatcaccagcaaatcttccctgccgagggaccttggaacacccatatcagtttacattagcaactttatgaaaaactctctttaaaggaaagtttggatacatgtctgtatacataatatacatctatgtacacatacacacactatatacactgtacatatggagaggatataaacacatgtacattcattcagtcttacagcctagaaacctgtacacgcacaatgctgctgaagggacccagggctggacatacgaagtgcacgctggtgggaggcacacaatgagaaggtccagaccctgtgtacaaaagacccaaaccaaccctgtcttgatgaggggttggctttaaaaatttacatcaaagttaagacattttcaaagagcctcataactgagagaatggaagctggataaaggaagcacgtggggcatctgctctgctggctcaggcattcccagggcccagtgggcaccgccttccctgggagaaaagtggctgtcagatgatgagacttcctatgacctggactaagaaaagagttaaaatgttacctatgaccccattgcacataaagtcatttacactggaaagtgggcaacaagcttctggactccaatgagatcaggtcccagaacatggatgtacacatgtggcatgaactgctgattgcggccaggggctggaagccctgcagagggcgggctgtgagcaagagtgctctgcaggaaatgtcctcaaaggactatgaaagtaaaagcactagaaacagctagagtccttagaattttttgctccttgccgtaactatcccccaaacaagtaagacagctaataagtatgtgtgtagcgtggatattgccttgagattaaggagcctaacgcatccactgttaacaccatggctggtgtcctaactgcctcagaagagtccacattcaatactgacaatgacaagctaaaaatcagtccctcttgagggcaattacacatcttagaagtgactacacctgaaattaaatataaagcccagaacagcaaaagaacctcaaaccacagccttatggcaagggttagacaataaatgtaactcctcaggacacagaaatgtcaaattaggagagtatggtaggtaacacacttccttaaaaacaccttccaggagtaacttgaaaagtattacttgctcaactaatttggtctttcaaaaaatctcttcctgtcctgttttatgctaatgtgtaatgatctccaccattttcaacatctatctgtcttaacccaacattatctgagatacttctggaaaagagctcacttaactgatgacagcatgtgtctgtcccacctctctgagccagctgcctctcctcattgagggaggagcagccag

SEQ ID NO: 373453 - DNA, 7028 bp, Homo sapiens
ctggctctggggagaagccgcgtgagatccgcgcgggtgctagctagtcctttctcgtcgctgctcggctcgcggcccgtggggtcggccccgccaccgttgccgccatgcccatgaagggccgcttccccatccgccgcaccctgcaatatctgagccaggggaacgtggtgttcaaggactccgtgaaggtcatgacagtgaattacaacacgcatggggagctgggcgagggcgccaggaagtttgtgtttttcaacatacctcagattcaatacaaaaacccttgggtgcagatcatgatgtttaagaacatgacgccgtcacccttcctgcgattctacttagattctggggagcaggtcctggtggatgtggagaccaagagcaataaggagatcatggagcacatcagaaaaatcttggggaagaatgaggaaaccctcagggaagaggaggaggagaaaaagcagctttctcacccagccaacttcggccctcgaaagtactgcctgcgggagtgcatctgtgaagtggaagggcaggtgccctgccccagcctggtgccattacccaaggagatgagggggaagtacaaagccgctctgaaagccgatgcccaggactaaggcccacggtcactgtgggctggggtgatggtgtctgaccagtggggagattggaatgggattactttggcccagggaagcccctggttctgtccctggagactctggaaatccttttgcattaaaaggactttacacacctgtgtaaaaggatgtgggagaggagggtctgaagctgagctgctaaatgaatatccctgctctgctggtcaataaaacgcttcctaatagcagcttggcgtgtatctggtcctagtgaagaggaaggcctgtgtagcagaaaggctttgggcctgagaggttaaggccacagcctgttgacacctgttttggtcctgcgaccctttactggtctccgctggctttgaatcttcctctgggctctactctggagaacataagggctgctgtggttgagtctggctagcactgtctgtggttggcagtgtgtacacccctccgttcagttccttgggggtatttttcagaaatccaaaggcaacccttcgtgcagtgctcacttttttaagtacagttgattacccttgcctgctggggggcctagccatgggccagagatggaggagccccagtggctgacaggccagcctcactcaggcacgtacctgctgaccagtcagccactgccaacccatggcccagccactgtgtgcattagcagggaggtttgtaggccatggaggaaatgaggagacaccacctagtggagacattggggccctgctggggggatggtgtctatagctggctctgctggctccctcaggccctgcttaccaagctctggaggagggagtgctgcattactgagcaccttccttgttctttcctcataggacagctgatgtgggcggatagttgagcccaggagttcgagaccagcctgggcaacatggcaagaccttgtctctacaaaaagtactgaggtgggaggatctcgagcctgcgagatcaaggctgcagtgaatcatgatcgtgcgctactgcactccagcctgggccacagagcaagactgtctcaagaaaaaaaattttttaaataagtttaattataaagtgaaggaccagttggaccacggacccctagaaactcagccaaggagacctgactttatctgagacaggaaggcagtggttaaaagaattaaaaaaggacagtggtgcttgacagagcaggactgaagttttcattcctctacctgctggggccttggtcaagtcctaaaagctttccaggtctgtaactggttttgtctgtaaaatggggaaaaggttaccttttctgccacatgaagtagctggctggtgaaatgatgtcatactacgatgtgtttcattaactgttggagattatcacattaaattgagcagatttggatcttttacatttgatgctcaagtttgattctgtaccagatctgggtttggggtgatggcttgtcgggggtgggaggggaaggtgggcagagactgatgtataatggacaggtgttccttgagtgacagacttacaaagggagtgtttaattgaaatctagcatcttgtctctctgctatcagcattttggctgggtggaaaaagctctcctccacagagagccctcccatgtctgctggtttcagttccccacccaactgactgaagtcttgaccttgataccacctgcctgggcgttctacttggctgcaagggctcttcagaaagcacctagttccttttggctttcatctgcagtgtaggtctccatagctagtgacacacaaagccttatgagagtattccttccctctagggcccaaagaggctgctaaccagcaggaatgtcctgaaccaaaaggagtggtgaccattctctagacagaataaatgtctggtccctaatgggacagataactagggtttgagttcaggcttgacacaggagcaatgggcagtgaggtggacagcccagaccctgaaaggacgtgtggagacagcagcagtcctgtggtgcagttactgcctgtgtggccagcttcacaggcagcagataatttgtggaaataaacattattttctttttttgttccctgtaggctacttgatcctggatagtttctctttaaacctttgtctttccctattttgtttagtagtgatgaaagatgggtttaaaatatacagaaatgggagaaaattaattagagaaaatgtgaggattttataattgataacatgttcttaattttacttgcacaagcagtgttcacagccttattctgaagtgaccacttttcttctctttgaggcactacctggcagcaccatctaaacctgtatcatctgctgtggtcccagttactcaggaggctgaggcaggaggatcacttgagcccaggaggttgaggctggagtgagccatgactgtaccactgcattccagcctgggtgacggagtgaggccctatctgcctgccagtgagttctgtcatgcatcagactttggacctcagaattttcacctggaacatgagaggtcagatgacataatgaatatgttctaacttctgaaacttttggagcttgtttttgcccttgatagcacgtatccttagagaataagcttgccaatttaaggcctgtctgtaatggcatctgaatgttccagcagcctaactgtgctctgctccagaaacatgtgtgtggcttccctacctccacaccaaggagctgccttgctgggtggatgtaaagactgtcctgccagggtttcccactaaaggtattaataagtccagtggaccacagagggcccaatccctcttggccgctaaggctaaggtaggagccagagagctgtagagacaggaccaccaggatgcttcatgtccataacacaagagagcgctgcattgtttgggggccaggcattactactatcatgaagaaaaatgaagagcaggatgcatgttagtctttaattcacttttaatagtataaacctcatttaggtagtagtattaagccacaacaataatgccacattgaaacagcatttaataaaatgcataaagctaattcatgcactgcaatactctatatacaaacacaacaatgcaaattcttcttcaagactgaagacattgattagatataaaattcagtttaaaaagaacatgctattttttaaatgccatcacataaacaaagtgatttcacagggagaagaaagctgtataaagctgcagctttcaacaggttttaaacctggcattaaaatgtaatggcaaaaccaatattttctatattgtgaagggcaaaggttacagaaacggtcccaagaaaatctaacacccaaattttcctttgatagatagatgcctttaaaagggctggtaatgcagttacattctaacagagaagtccaaactacaggtaaaaactacggcttgtactgtgaaaaatgtgcagcttttcagttataaaactagttgaacactggtttacaagataatccgtagaacagagagactgtagaaaaatattccagcacttgagttgtgtgtggcagcagcatttgagtccatgaatgctatggtcattaaaataattgattatactttcctaaagaaaagccattttttaatgcaaagtctactacttccaaatgttattccaaacattaaattttaacagtctatcaatcaataaatgttgaacattttttttctattttgcatgtataaatatcaagacaccaaaattatttatagctgggcattaaaaatatctgacatttttctccccgcaaagatacttttcttaagctcacactttaattatttgtagactgctgttaagctaaatagccccaaaggaaacttttaattcatttagagactgtcaagtttccaattgcattttaactagaaagccactttcaatagcgtgattgtcacgacaggctatgacggggaaaggtcgcacaatcttgtgggatgaggccagtgaaatagaagctttctctacatcaaaaacagggaagctgaaggctaaatgacccactgtctcacaaaaggcactgagtactatggtctcataaagtgtttttaaaacattttgataacttattttaaaaagaaaaagaggaaactgtggattatgtgagtttttgcagcaatctagtgattccttccagcaggcccctgcttcccaggtctatgagcaactactgctgggccaggccctggctctcaagggccgagtctcagtttaaggccagattaagggggaaaattcgtccgagtagacctggacgaggaaaatttggtatctgtagcttttaagggcacacatatccatattaaaatgcaattcttatctgaaaatttaaaatcataacttatagaaaggagttaaagtcatttacatgcttacagttagagaagtaacttgagatctgtagcttatatgccgcagaagttagccatcaacatccatgcttagttttaaagaataatacttggtaggttgtttatttttaactggcgatagaaagatgggaattactatttattcagtcataggacagtgccccacatcttgctgactgagcacagcgcaagcctgggaaattgctaccatctttgggagtcaggcctcactgacacagaccgttctgaatctctgaccgtgacgcctgtctctgggctactcaacagagctgaatagctgggaaggctgatggctcaacccaactgccaagttccttccaggtagggccatgaataggtgcatgaaaaggttaaaaattcccacttagttttggatattaagataaactgtcttccagcttcctggctcttgtccgaacctagagaatatacggaaatgtcaccctgtcagaacctcttctgcctggaattcttccttttgcagagtggagattctgacttcatggcccttcccaggcaggctcacccaaaggaaaatggagtgaagaaaatcaccagcaaatcttccctgccgagggaccttggaacacccatatcagtttacattagcaactttatgaaaaactctctttaaaggaaagtttggatacatgtctgtatacataatatacatctatgtacacatacacacactatatacactgtacatatggagaggatataaacacatgtacattcattcagtcttacagcctagaaacctgtacacgcacaatgctgctgaagggacccagggctggacatacgaagtgcacgctggtgggaggcacacaatgagaaggtccagaccctgtgtacaaaagacccaaaccaaccctgtcttgatgaggggttggctttaaaaatttacatcaaagttaagacattttcaaagagcctcataactgagagaatggaagctggataaaggaagcacgtggggcatctgctctgctggctcaggcattcccagggcccagtgggcaccgccttccctgggagaaaagtggctgtcagatgatgagacttcctatgacctggactaagaaaagagttaaaatgttacctatgaccccattgcacataaagtcatttacactggaaagtgggcaacaagcttctggactccaatgagatcaggtcccagaacatggatgtacacatgtggcatgaactgctgattgcggccaggggctggaagccctgcagagggcgggctgtgagcaagagtgctctgcaggaaatgtcctcaaaggactatgaaagtaaaagcactagaaacagctagagtccttagaattttttgctccttgccgtaactatcccccaaacaagtaagacagctaataagtatgtgtgtagcgtggatattgccttgagattaaggagcctaacgcatccactgttaacaccatggctggtgtcctaactgcctcagaagagtccacattcaatactgacaatgacaagctaaaaatcagtccctcttgagggcaattacacatcttagaagtgactacacctgaaattaaatataaagcccagaacagcaaaagaacctcaaaccacagccttatggcaagggttagacaataaatgtaactcctcaggacacagaaatgtcaaattaggagagtatggtaggtaacacacttccttaaaaacaccttccaggagtaacttgaaaagtattacttgctcaactaatttggtctttcaaaaaatctcttcctgtcctgttttatgctaatgtgtaatgatctccaccattttcaacatctatctgtcttaacccaacattatctgagatacttctggaaaagagctcacttaactgatgacagcatgtgtctgtcccacctctctgagccagctgcctctcctcattgagggaggagcagccag

SEQ ID NO: 373454 - DNA, 7313 bp, Homo sapiens
ctggctctggggagaagccgcgtgagatccgcgcgggtgctagctagtcctttctcgtcgctgctcggctcgcggcccgtggggtcggccccgccaccgttgccgccatgcccatgaagggccgcttccccatccgccgcaccctgcaatatctgagccaggggaacgtggtgttcaaggactccgtgaaggtcatgacagtgaattacaacacgcatggggagctgggcgagggcgccaggaagtttgtgtttttcaacatacctcagattcaatacaaaaacccttgggtgcagatcatgatgtttaagaacatgacgccgtcacccttcctgcgattctacttagattctggggagcaggtcctggtggatgtggagaccaagagcaataaggagatcatggagcacatcagaaaaatcttggggaagaatgagtgagttgtttggtttgacctggaaggaacaaacttctcagcccagagaatttgaggaagaaaggggtgtgtgggaagggtgttgagagggaaaccctcagggaagaggaggaggagaaaaagcagctttctcacccagccaacttcggccctcgaaagtactgcctgcgggagtgcatctgtgaagtggaagggcaggtgccctgccccagcctggtgccattacccaaggagatgagggggaagtacaaagccgctctgaaagccgatgcccaggactaaggcccacggtcactgtgggctggggtgatggtgtctgaccagtggggagattggaatgggattactttggcccagggaagcccctggttctgtccctggagactctggaaatccttttgcattaaaaggactttacacacctgtgtaaaaggatgtgggagaggagggtctgaagctgagctgctaaatgaatatccctgctctgctggtcaataaaacgcttcctaatagcagcttggcgtgtatctggtcctagtgaagaggaaggcctgtgtagcagaaaggctttgggcctgagaggttaaggccacagcctgttgacacctgttttggtcctgcgaccctttactggtctccgctggctttgaatcttcctctgggctctactctggagaacataagggctgctgtggttgagtctggctagcactgtctgtggttggcagtgtgtacacccctccgttcagttccttgggggtatttttcagaaatccaaaggcaacccttcgtgcagtgctcacttttttaagtacagttgattacccttgcctgctggggggcctagccatgggccagagatggaggagccccagtggctgacaggccagcctcactcaggcacgtacctgctgaccagtcagccactgccaacccatggcccagccactgtgtgcattagcagggaggtttgtaggccatggaggaaatgaggagacaccacctagtggagacattggggccctgctggggggatggtgtctatagctggctctgctggctccctcaggccctgcttaccaagctctggaggagggagtgctgcattactgagcaccttccttgttctttcctcataggacactgatgttactgtcactttagttatgctaaagtggaggtttcagcctccagaagacagcagagccttctagggtcaccttaagaataggtttagctaggctgggtgtggtggctcatgcctgtaatcccagcactttgggaggctgatgtgggcggatagttgagcccaggagttcgagaccagcctgggcaacatggcaagaccttgtctctacaaaaagtacaaaaattagatgggtgtggtgtttcgcgtctgtagtcccagctatttgggaagctgaggtgggaggatctcgagcctgcgagatcaaggctgcagtgaatcatgatcgtgcgctactgcactccagcctgggccacagagcaagactgtctcaagaaaaaaaattttttaaataagtttaattataaagtgaaggaccagttggaccacggacccctagaaactcagccaaggagacctgactttatctgagacaggaaggcagtggttaaaagaattaaaaaaggacagtggtgcttgacagagcaggactgaagttttcattcctctacctgctggggccttggtcaagtcctaaaagctttccaggtctgtaactggttttgtctgtaaaatggggaaaaggttaccttttctgccacatgaagtagctggctggtgaaatgatgtcatactacgatgtgtttcattaactgttggagattatcacattaaattgagcagatttggatcttttacatttgatgctcaagtttgattctgtaccagatctgggtttggggtgatggcttgtcgggggtgggaggggaaggtgggcagagactgatgtataatggacaggtgttccttgagtgacagacttacaaagggagtgtttaattgaaatctagcatcttgtctctctgctatcagcattttggctgggtggaaaaagctctcctccacagagagccctcccatgtctgctggtttcagttccccacccaactgactgaagtcttgaccttgataccacctgcctgggcgttctacttggctgcaagggctcttcagaaagcacctagttccttttggctttcatctgcagtgtaggtctccatagctagtgacacacaaagccttatgagagtattccttccctctagggcccaaagaggctgctaaccagcaggaatgtcctgaaccaaaaggagtggtgaccattctctagacagaataaatgtctggtccctaatgggacagataactagggtttgagttcaggcttgacacaggagcaatgggcagtgaggtggacagcccagaccctgaaaggacgtgtggagacagcagcagtcctgtggtgcagttactgcctgtgtggccagcttcacaggcagcagataatttgtggaaataaacattattttctttttttgttccctgtaggctacttgatcctggatagtttctctttaaacctttgtctttccctattttgtttagtagtgatgaaagatgggtttaaaatatacagaaatgggagaaaattaattagagaaaatgtgaggattttataattgataacatgttcttaattttacttgcacaagcagtgttcacagccttattctgaagtgaccacttttcttctctttgaggcactacctggcagcaccatctaaacctgtatcatctgctgtggtcccagttactcaggaggctgaggcaggaggatcacttgagcccaggaggttgaggctggagtgagccatgactgtaccactgcattccagcctgggtgacggagtgaggccctatctgcctgccagtgagttctgtcatgcatcagactttggacctcagaattttcacctggaacatgagaggtcagatgacataatgaatatgttctaacttctgaaacttttggagcttgtttttgcccttgatagcacgtatccttagagaataagcttgccaatttaaggcctgtctgtaatggcatctgaatgttccagcagcctaactgtgctctgctccagaaacatgtgtgtggcttccctacctccacaccaaggagctgccttgctgggtggatgtaaagactgtcctgccagggtttcccactaaaggtattaataagtccagtggaccacagagggcccaatccctcttggccgctaaggctaaggtaggagccagagagctgtagagacaggaccaccaggatgcttcatgtccataacacaagagagcgctgcattgtttgggggccaggcattactactatcatgaagaaaaatgaagagcaggatgcatgttagtctttaattcacttttaatagtataaacctcatttaggtagtagtattaagccacaacaataatgccacattgaaacagcatttaataaaatgcataaagctaattcatgcactgcaatactctatatacaaacacaacaatgcaaattcttcttcaagactgaagacattgattagatataaaattcagtttaaaaagaacatgctattttttaaatgccatcacataaacaaagtgatttcacagggagaagaaagctgtataaagctgcagctttcaacaggttttaaacctggcattaaaatgtaatggcaaaaccaatattttctatattgtgaagggcaaaggttacagaaacggtcccaagaaaatctaacacccaaattttcctttgatagatagatgcctttaaaagggctggtaatgcagttacattctaacagagaagtccaaactacaggtaaaaactacggcttgtactgtgaaaaatgtgcagcttttcagttataaaactagttgaacactggtttacaagataatccgtagaacagagagactgtagaaaaatattccagcacttgagttgtgtgtggcagcagcatttgagtccatgaatgctatggtcattaaaataattgattatactttcctaaagaaaagccattttttaatgcaaagtctactacttccaaatgttattccaaacattaaattttaacagtctatcaatcaataaatgttgaacattttttttctattttgcatgtataaatatcaagacaccaaaattatttatagctgggcattaaaaatatctgacatttttctccccgcaaagatacttttcttaagctcacactttaattatttgtagactgctgttaagctaaatagccccaaaggaaacttttaattcatttagagactgtcaagtttccaattgcattttaactagaaagccactttcaatagcgtgattgtcacgacaggctatgacggggaaaggtcgcacaatcttgtgggatgaggccagtgaaatagaagctttctctacatcaaaaacagggaagctgaaggctaaatgacccactgtctcacaaaaggcactgagtactatggtctcataaagtgtttttaaaacattttgataacttattttaaaaagaaaaagaggaaactgtggattatgtgagtttttgcagcaatctagtgattccttccagcaggcccctgcttcccaggtctatgagcaactactgctgggccaggccctggctctcaagggccgagtctcagtttaaggccagattaagggggaaaattcgtccgagtagacctggacgaggaaaatttggtatctgtagcttttaagggcacacatatccatattaaaatgcaattcttatctgaaaatttaaaatcataacttatagaaaggagttaaagtcatttacatgcttacagttagagaagtaacttgagatctgtagcttatatgccgcagaagttagccatcaacatccatgcttagttttaaagaataatacttggtaggttgtttatttttaactggcgatagaaagatgggaattactatttattcagtcataggacagtgccccacatcttgctgactgagcacagcgcaagcctgggaaattgctaccatctttgggagtcaggcctcactgacacagaccgttctgaatctctgaccgtgacgcctgtctctgggctactcaacagagctgaatagctgggaaggctgatggctcaacccaactgccaagttccttccaggtagggccatgaataggtgcatgaaaaggttaaaaattcccacttagttttggatattaagataaactgtcttccagcttcctggctcttgtccgaacctagagaatatacggaaatgtcaccctgtcagaacctcttctgcctggaattcttccttttgcagagtggagattctgacttcatggcccttcccaggcaggctcacccaaaggaaaatggagtgaagaaaatcaccagcaaatcttccctgccgagggaccttggaacacccatatcagtttacattagcaactttatgaaaaactctctttaaaggaaagtttggatacatgtctgtatacataatatacatctatgtacacatacacacactatatacactgtacatatggagaggatataaacacatgtacattcattcagtcttacagcctagaaacctgtacacgcacaatgctgctgaagggacccagggctggacatacgaagtgcacgctggtgggaggcacacaatgagaaggtccagaccctgtgtacaaaagacccaaaccaaccctgtcttgatgaggggttggctttaaaaatttacatcaaagttaagacattttcaaagagcctcataactgagagaatggaagctggataaaggaagcacgtggggcatctgctctgctggctcaggcattcccagggcccagtgggcaccgccttccctgggagaaaagtggctgtcagatgatgagacttcctatgacctggactaagaaaagagttaaaatgttacctatgaccccattgcacataaagtcatttacactggaaagtgggcaacaagcttctggactccaatgagatcaggtcccagaacatggatgtacacatgtggcatgaactgctgattgcggccaggggctggaagccctgcagagggcgggctgtgagcaagagtgctctgcaggaaatgtcctcaaaggactatgaaagtaaaagcactagaaacagctagagtccttagaattttttgctccttgccgtaactatcccccaaacaagtaagacagctaataagtatgtgtgtagcgtggatattgccttgagattaaggagcctaacgcatccactgttaacaccatggctggtgtcctaactgcctcagaagagtccacattcaatactgacaatgacaagctaaaaatcagtccctcttgagggcaattacacatcttagaagtgactacacctgaaattaaatataaagcccagaacagcaaaagaacctcaaaccacagccttatggcaagggttagacaataaatgtaactcctcaggacacagaaatgtcaaattaggagagtatggtaggtaacacacttccttaaaaacaccttccaggagtaacttgaaaagtattacttgctcaactaatttggtctttcaaaaaatctcttcctgtcctgttttatgctaatgtgtaatgatctccaccattttcaacatctatctgtcttaacccaacattatctgagatacttctggaaaagagctcacttaactgatgacagcatgtgtctgtcccacctctctgagccagctgcctctcctcattgagggaggagcagccag

SEQ ID NO: 373455 - DNA, 7029 bp, Homo sapiens
ctggctctggggagaagccgcgtgagatccgcgcgggtgctagctagtcctttctcgtcgctgctcggctcgcggcccgtggggtcggccccgccaccgttgccgccatgcccatgaagggccgcttccccatccgccgcaccctgcaatatctgagccaggggaacgtggtgttcaaggactccgtgaaggtcatgacagtgaattacaacacgcatggggagctgggcgagggcgccagggaaaccctcagggaagaggaggaggagaaaaagcagctttctcacccagccaacttcggccctcgaaagtactgcctgcgggagtgcatctgtgaagtggaagggcaggtgccctgccccagcctggtgccattacccaaggagatgagggggaagtacaaagccgctctgaaagccgatgcccaggactaaggcccacggtcactgtgggctggggtgatggtgtctgaccagtggggagattggaatgggattactttggcccagggaagcccctggttctgtccctggagactctggaaatccttttgcattaaaaggactttacacacctgtgtaaaaggatgtgggagaggagggtctgaagctgagctgctaaatgaatatccctgctctgctggtcaataaaacgcttcctaatagcagcttggcgtgtatctggtcctagtgaagaggaaggcctgtgtagcagaaaggctttgggcctgagaggttaaggccacagcctgttgacacctgttttggtcctgcgaccctttactggtctccgctggctttgaatcttcctctgggctctactctggagaacataagggctgctgtggttgagtctggctagcactgtctgtggttggcagtgtgtacacccctccgttcagttccttgggggtatttttcagaaatccaaaggcaacccttcgtgcagtgctcacttttttaagtacagttgattacccttgcctgctggggggcctagccatgggccagagatggaggagccccagtggctgacaggccagcctcactcaggcacgtacctgctgaccagtcagccactgccaacccatggcccagccactgtgtgcattagcagggaggtttgtaggccatggaggaaatgaggagacaccacctagtggagacattggggccctgctggggggatggtgtctatagctggctctgctggctccctcaggccctgcttaccaagctctggaggagggagtgctgcattactgagcaccttccttgttctttcctcataggacactgatgttactgtcactttagttatgctaaagtggaggtttcagcctccagaagacagcagagccttctagggtcaccttaagaataggtttagctaggctgggtgtggtggctcatgcctgtaatcccagcactttgggaggctgatgtgggcggatagttgagcccaggagttcgagaccagcctgggcaacatggcaagaccttgtctctacaaaaagtacaaaaattagatgggtgtggtgtttcgcgtctgtagtcccagctatttgggaagctgaggtgggaggatctcgagcctgcgagatcaaggctgcagtgaatcatgatcgtgcgctactgcactccagcctgggccacagagcaagactgtctcaagaaaaaaaattttttaaataagtttaattataaagtgaaggaccagttggaccacggacccctagaaactcagccaaggagacctgactttatctgagacaggaaggcagtggttaaaagaattaaaaaaggacagtggtgcttgacagagcaggactgaagttttcattcctctacctgctggggccttggtcaagtcctaaaagctttccaggtctgtaactggttttgtctgtaaaatggggaaaaggttaccttttctgccacatgaagtagctggctggtgaaatgatgtcatactacgatgtgtttcattaactgttggagattatcacattaaattgagcagatttggatcttttacatttgatgctcaagtttgattctgtaccagatctgggtttggggtgatggcttgtcgggggtgggaggggaaggtgggcagagactgatgtataatggacaggtgttccttgagtgacagacttacaaagggagtgtttaattgaaatctagcatcttgtctctctgctatcagcattttggctgggtggaaaaagctctcctccacagagagccctcccatgtctgctggtttcagttccccacccaactgactgaagtcttgaccttgataccacctgcctgggcgttctacttggctgcaagggctcttcagaaagcacctagttccttttggctttcatctgcagtgtaggtctccatagctagtgacacacaaagccttatgagagtattccttccctctagggcccaaagaggctgctaaccagcaggaatgtcctgaaccaaaaggagtggtgaccattctctagacagaataaatgtctggtccctaatgggacagataactagggtttgagttcaggcttgacacaggagcaatgggcagtgaggtggacagcccagaccctgaaaggacgtgtggagacagcagcagtcctgtggtgcagttactgcctgtgtggccagcttcacaggcagcagataatttgtggaaataaacattattttctttttttgttccctgtaggctacttgatcctggatagtttctctttaaacctttgtctttccctattttgtttagtagtgatgaaagatgggtttaaaatatacagaaatgggagaaaattaattagagaaaatgtgaggattttataattgataacatgttcttaattttacttgcacaagcagtgttcacagccttattctgaagtgaccacttttcttctctttgaggcactacctggcagcaccatctaaacctgtatcatctgctgtggtcccagttactcaggaggctgaggcaggaggatcacttgagcccaggaggttgaggctggagtgagccatgactgtaccactgcattccagcctgggtgacggagtgaggccctatctgcctgccagtgagttctgtcatgcatcagactttggacctcagaattttcacctggaacatgagaggtcagatgacataatgaatatgttctaacttctgaaacttttggagcttgtttttgcccttgatagcacgtatccttagagaataagcttgccaatttaaggcctgtctgtaatggcatctgaatgttccagcagcctaactgtgctctgctccagaaacatgtgtgtggcttccctacctccacaccaaggagctgccttgctgggtggatgtaaagactgtcctgccagggtttcccactaaaggtattaataagtccagtggaccacagagggcccaatccctcttggccgctaaggctaaggtaggagccagagagctgtagagacaggaccaccaggatgcttcatgtccataacacaagagagcgctgcattgtttgggggccaggcattactactatcatgaagaaaaatgaagagcaggatgcatgttagtctttaattcacttttaatagtataaacctcatttaggtagtagtattaagccacaacaataatgccacattgaaacagcatttaataaaatgcataaagctaattcatgcactgcaatactctatatacaaacacaacaatgcaaattcttcttcaagactgaagacattgattagatataaaattcagtttaaaaagaacatgctattttttaaatgccatcacataaacaaagtgatttcacagggagaagaaagctgtataaagctgcagctttcaacaggttttaaacctggcattaaaatgtaatggcaaaaccaatattttctatattgtgaagggcaaaggttacagaaacggtcccaagaaaatctaacacccaaattttcctttgatagatagatgcctttaaaagggctggtaatgcagttacattctaacagagaagtccaaactacaggtaaaaactacggcttgtactgtgaaaaatgtgcagcttttcagttataaaactagttgaacactggtttacaagataatccgtagaacagagagactgtagaaaaatattccagcacttgagttgtgtgtggcagcagcatttgagtccatgaatgctatggtcattaaaataattgattatactttcctaaagaaaagccattttttaatgcaaagtctactacttccaaatgttattccaaacattaaattttaacagtctatcaatcaataaatgttgaacattttttttctattttgcatgtataaatatcaagacaccaaaattatttatagctgggcattaaaaatatctgacatttttctccccgcaaagatacttttcttaagctcacactttaattatttgtagactgctgttaagctaaatagccccaaaggaaacttttaattcatttagagactgtcaagtttccaattgcattttaactagaaagccactttcaatagcgtgattgtcacgacaggctatgacggggaaaggtcgcacaatcttgtgggatgaggccagtgaaatagaagctttctctacatcaaaaacagggaagctgaaggctaaatgacccactgtctcacaaaaggcactgagtactatggtctcataaagtgtttttaaaacattttgataacttattttaaaaagaaaaagaggaaactgtggattatgtgagtttttgcagcaatctagtgattccttccagcaggcccctgcttcccaggtctatgagcaactactgctgggccaggccctggctctcaagggccgagtctcagtttaaggccagattaagggggaaaattcgtccgagtagacctggacgaggaaaatttggtatctgtagcttttaagggcacacatatccatattaaaatgcaattcttatctgaaaatttaaaatcataacttatagaaaggagttaaagtcatttacatgcttacagttagagaagtaacttgagatctgtagcttatatgccgcagaagttagccatcaacatccatgcttagttttaaagaataatacttggtaggttgtttatttttaactggcgatagaaagatgggaattactatttattcagtcataggacagtgccccacatcttgctgactgagcacagcgcaagcctgggaaattgctaccatctttgggagtcaggcctcactgacacagaccgttctgaatctctgaccgtgacgcctgtctctgggctactcaacagagctgaatagctgggaaggctgatggctcaacccaactgccaagttccttccaggtagggccatgaataggtgcatgaaaaggttaaaaattcccacttagttttggatattaagataaactgtcttccagcttcctggctcttgtccgaacctagagaatatacggaaatgtcaccctgtcagaacctcttctgcctggaattcttccttttgcagagtggagattctgacttcatggcccttcccaggcaggctcacccaaaggaaaatggagtgaagaaaatcaccagcaaatcttccctgccgagggaccttggaacacccatatcagtttacattagcaactttatgaaaaactctctttaaaggaaagtttggatacatgtctgtatacataatatacatctatgtacacatacacacactatatacactgtacatatggagaggatataaacacatgtacattcattcagtcttacagcctagaaacctgtacacgcacaatgctgctgaagggacccagggctggacatacgaagtgcacgctggtgggaggcacacaatgagaaggtccagaccctgtgtacaaaagacccaaaccaaccctgtcttgatgaggggttggctttaaaaatttacatcaaagttaagacattttcaaagagcctcataactgagagaatggaagctggataaaggaagcacgtggggcatctgctctgctggctcaggcattcccagggcccagtgggcaccgccttccctgggagaaaagtggctgtcagatgatgagacttcctatgacctggactaagaaaagagttaaaatgttacctatgaccccattgcacataaagtcatttacactggaaagtgggcaacaagcttctggactccaatgagatcaggtcccagaacatggatgtacacatgtggcatgaactgctgattgcggccaggggctggaagccctgcagagggcgggctgtgagcaagagtgctctgcaggaaatgtcctcaaaggactatgaaagtaaaagcactagaaacagctagagtccttagaattttttgctccttgccgtaactatcccccaaacaagtaagacagctaataagtatgtgtgtagcgtggatattgccttgagattaaggagcctaacgcatccactgttaacaccatggctggtgtcctaactgcctcagaagagtccacattcaatactgacaatgacaagctaaaaatcagtccctcttgagggcaattacacatcttagaagtgactacacctgaaattaaatataaagcccagaacagcaaaagaacctcaaaccacagccttatggcaagggttagacaataaatgtaactcctcaggacacagaaatgtcaaattaggagagtatggtaggtaacacacttccttaaaaacaccttccaggagtaacttgaaaagtattacttgctcaactaatttggtctttcaaaaaatctcttcctgtcctgttttatgctaatgtgtaatgatctccaccattttcaacatctatctgtcttaacccaacattatctgagatacttctggaaaagagctcacttaactgatgacagcatgtgtctgtcccacctctctgagccagctgcctctcctcattgagggaggagcagccag

SEQ ID NO: 373456 - DNA, 4526 bp, Homo sapiens
ctggctctggggagaagccgcgtgagatccgcgcgggtgctagctagtcctttctcgtcgctgctcggctcgcggcccgtggggtcggccccgccaccgttgccgccatgcccatgaagggccgcttccccatccgccgcaccctgcaatatctgagccaggggaacgtggtgttcaaggactccgtgaaggtcatgacagtgaattacaacacgcatggggagctgggcgagggcgccaggaagtttgtgtttttcaacatacctcagattcaatacaaaaacccttgggtgcagatcatgatgtttaagaacatgacgccgtcacccttcctgcgattctacttagattctggggagcaggtcctggtggatgtggagaccaagagcaataaggagatcatggagcacatcagaaaaatcttggggaagaatgagcactacctggcagcaccatctaaacctgtatcatctgctgtggtcccagttactcaggaggctgaggcaggaggatcacttgagcccaggaggttgaggctggagtgagccatgactgtaccactgcattccagcctgggtgacggagtgaggccctatctgcctgccagtgagttctgtcatgcatcagactttggacctcagaattttcacctggaacatgagaggtcagatgacataatgaatatgttctaacttctgaaacttttggagcttgtttttgcccttgatagcacgtatccttagagaataagcttgccaatttaaggcctgtctgtaatggcatctgaatgttccagcagcctaactgtgctctgctccagaaacatgtgtgtggcttccctacctccacaccaaggagctgccttgctgggtggatgtaaagactgtcctgccagggtttcccactaaaggtattaataagtccagtggaccacagagggcccaatccctcttggccgctaaggctaaggtaggagccagagagctgtagagacaggaccaccaggatgcttcatgtccataacacaagagagcgctgcattgtttgggggccaggcattactactatcatgaagaaaaatgaagagcaggatgcatgttagtctttaattcacttttaatagtataaacctcatttaggtagtagtattaagccacaacaataatgccacattgaaacagcatttaataaaatgcataaagctaattcatgcactgcaatactctatatacaaacacaacaatgcaaattcttcttcaagactgaagacattgattagatataaaattcagtttaaaaagaacatgctattttttaaatgccatcacataaacaaagtgatttcacagggagaagaaagctgtataaagctgcagctttcaacaggttttaaacctggcattaaaatgtaatggcaaaaccaatattttctatattgtgaagggcaaaggttacagaaacggtcccaagaaaatctaacacccaaattttcctttgatagatagatgcctttaaaagggctggtaatgcagttacattctaacagagaagtccaaactacaggtaaaaactacggcttgtactgtgaaaaatgtgcagcttttcagttataaaactagttgaacactggtttacaagataatccgtagaacagagagactgtagaaaaatattccagcacttgagttgtgtgtggcagcagcatttgagtccatgaatgctatggtcattaaaataattgattatactttcctaaagaaaagccattttttaatgcaaagtctactacttccaaatgttattccaaacattaaattttaacagtctatcaatcaataaatgttgaacattttttttctattttgcatgtataaatatcaagacaccaaaattatttatagctgggcattaaaaatatctgacatttttctccccgcaaagatacttttcttaagctcacactttaattatttgtagactgctgttaagctaaatagccccaaaggaaacttttaattcatttagagactgtcaagtttccaattgcattttaactagaaagccactttcaatagcgtgattgtcacgacaggctatgacggggaaaggtcgcacaatcttgtgggatgaggccagtgaaatagaagctttctctacatcaaaaacagggaagctgaaggctaaatgacccactgtctcacaaaaggcactgagtactatggtctcataaagtgtttttaaaacattttgataacttattttaaaaagaaaaagaggaaactgtggattatgtgagtttttgcagcaatctagtgattccttccagcaggcccctgcttcccaggtctatgagcaactactgctgggccaggccctggctctcaagggccgagtctcagtttaaggccagattaagggggaaaattcgtccgagtagacctggacgaggaaaatttggtatctgtagcttttaagggcacacatatccatattaaaatgcaattcttatctgaaaatttaaaatcataacttatagaaaggagttaaagtcatttacatgcttacagttagagaagtaacttgagatctgtagcttatatgccgcagaagttagccatcaacatccatgcttagttttaaagaataatacttggtaggttgtttatttttaactggcgatagaaagatgggaattactatttattcagtcataggacagtgccccacatcttgctgactgagcacagcgcaagcctgggaaattgctaccatctttgggagtcaggcctcactgacacagaccgttctgaatctctgaccgtgacgcctgtctctgggctactcaacagagctgaatagctgggaaggctgatggctcaacccaactgccaagttccttccaggtagggccatgaataggtgcatgaaaaggttaaaaattcccacttagttttggatattaagataaactgtcttccagcttcctggctcttgtccgaacctagagaatatacggaaatgtcaccctgtcagaacctcttctgcctggaattcttccttttgcagagtggagattctgacttcatggcccttcccaggcaggctcacccaaaggaaaatggagtgaagaaaatcaccagcaaatcttccctgccgagggaccttggaacacccatatcagtttacattagcaactttatgaaaaactctctttaaaggaaagtttggatacatgtctgtatacataatatacatctatgtacacatacacacactatatacactgtacatatggagaggatataaacacatgtacattcattcagtcttacagcctagaaacctgtacacgcacaatgctgctgaagggacccagggctggacatacgaagtgcacgctggtgggaggcacacaatgagaaggtccagaccctgtgtacaaaagacccaaaccaaccctgtcttgatgaggggttggctttaaaaatttacatcaaagttaagacattttcaaagagcctcataactgagagaatggaagctggataaaggaagcacgtggggcatctgctctgctggctcaggcattcccagggcccagtgggcaccgccttccctgggagaaaagtggctgtcagatgatgagacttcctatgacctggactaagaaaagagttaaaatgttacctatgaccccattgcacataaagtcatttacactggaaagtgggcaacaagcttctggactccaatgagatcaggtcccagaacatggatgtacacatgtggcatgaactgctgattgcggccaggggctggaagccctgcagagggcgggctgtgagcaagagtgctctgcaggaaatgtcctcaaaggactatgaaagtaaaagcactagaaacagctagagtccttagaattttttgctccttgccgtaactatcccccaaacaagtaagacagctaataagtatgtgtgtagcgtggatattgccttgagattaaggagcctaacgcatccactgttaacaccatggctggtgtcctaactgcctcagaagagtccacattcaatactgacaatgacaagctaaaaatcagtccctcttgagggcaattacacatcttagaagtgactacacctgaaattaaatataaagcccagaacagcaaaagaacctcaaaccacagccttatggcaagggttagacaataaatgtaactcctcaggacacagaaatgtcaaattaggagagtatggtaggtaacacacttccttaaaaacaccttccaggagtaacttgaaaagtattacttgctcaactaatttggtctttcaaaaaatctcttcctgtcctgttttatgctaatgtgtaatgatctccaccattttcaacatctatctgtcttaacccaacattatctgagatacttctggaaaagagctcacttaactgatgacagcatgtgtctgtcccacctctctgagccagctgcctctcctcattgagggaggagcagccag

SEQ ID NO: 373457 - DNA, 4886 bp, Homo sapiens
tatgatagacgtgacggaagaggagaggtaaagtagaaggtctatgatcttgtctgtctgctgtcacaatttgtgtgtgggtggaaaaagctctcctccacagagagccctcccatgtctgctggtttcagttccccacccaactgactgaagtcttgaccttgataccacctgcctgggcgttctacttggctgcaagggctcttcagaaagcacctagttccttttggctttcatctgcagtgtaggtctccatagctagtgacacacaaagccttatgagagtattccttccctctagggcccaaagaggctgctaaccagcaggaatgtcctgaaccaaaaggagtggtgaccattctctagacagaataaatgtctggtccctaatgggacagataactagggtttgagttcaggcttgacacaggagcaatgggcagtgaggtggacagcccagaccctgaaaggacgtgtggagacagcagcagtcctgtggtgcagttactgcctgtgtggccagcttcacaggcagcagataatttgtggaaataaacattattttctttttttgttccctgtaggctacttgatcctggatagtttctctttaaacctttgtctttccctattttgtttagtagtgatgaaagatgggtttaaaatatacagaaatgggagaaaattaattagagaaaatgtgaggattttataattgataacatgttcttaattttacttgcacaagcagtgttcacagccttattctgaagtgaccacttttcttctctttgaggcactacctggcagcaccatctaaacctgtatcatctgctgtggtcccagttactcaggaggctgaggcaggaggatcacttgagcccaggaggttgaggctggagtgagccatgactgtaccactgcattccagcctgggtgacggagtgaggccctatctgcctgccagtgagttctgtcatgcatcagactttggacctcagaattttcacctggaacatgagaggtcagatgacataatgaatatgttctaacttctgaaacttttggagcttgtttttgcccttgatagcacgtatccttagagaataagcttgccaatttaaggcctgtctgtaatggcatctgaatgttccagcagcctaactgtgctctgctccagaaacatgtgtgtggcttccctacctccacaccaaggagctgccttgctgggtggatgtaaagactgtcctgccagggtttcccactaaaggtattaataagtccagtggaccacagagggcccaatccctcttggccgctaaggctaaggtaggagccagagagctgtagagacaggaccaccaggatgcttcatgtccataacacaagagagcgctgcattgtttgggggccaggcattactactatcatgaagaaaaatgaagagcaggatgcatgttagtctttaattcacttttaatagtataaacctcatttaggtagtagtattaagccacaacaataatgccacattgaaacagcatttaataaaatgcataaagctaattcatgcactgcaatactctatatacaaacacaacaatgcaaattcttcttcaagactgaagacattgattagatataaaattcagtttaaaaagaacatgctattttttaaatgccatcacataaacaaagtgatttcacagggagaagaaagctgtataaagctgcagctttcaacaggttttaaacctggcattaaaatgtaatggcaaaaccaatattttctatattgtgaagggcaaaggttacagaaacggtcccaagaaaatctaacacccaaattttcctttgatagatagatgcctttaaaagggctggtaatgcagttacattctaacagagaagtccaaactacaggtaaaaactacggcttgtactgtgaaaaatgtgcagcttttcagttataaaactagttgaacactggtttacaagataatccgtagaacagagagactgtagaaaaatattccagcacttgagttgtgtgtggcagcagcatttgagtccatgaatgctatggtcattaaaataattgattatactttcctaaagaaaagccattttttaatgcaaagtctactacttccaaatgttattccaaacattaaattttaacagtctatcaatcaataaatgttgaacattttttttctattttgcatgtataaatatcaagacaccaaaattatttatagctgggcattaaaaatatctgacatttttctccccgcaaagatacttttcttaagctcacactttaattatttgtagactgctgttaagctaaatagccccaaaggaaacttttaattcatttagagactgtcaagtttccaattgcattttaactagaaagccactttcaatagcgtgattgtcacgacaggctatgacggggaaaggtcgcacaatcttgtgggatgaggccagtgaaatagaagctttctctacatcaaaaacagggaagctgaaggctaaatgacccactgtctcacaaaaggcactgagtactatggtctcataaagtgtttttaaaacattttgataacttattttaaaaagaaaaagaggaaactgtggattatgtgagtttttgcagcaatctagtgattccttccagcaggcccctgcttcccaggtctatgagcaactactgctgggccaggccctggctctcaagggccgagtctcagtttaaggccagattaagggggaaaattcgtccgagtagacctggacgaggaaaatttggtatctgtagcttttaagggcacacatatccatattaaaatgcaattcttatctgaaaatttaaaatcataacttatagaaaggagttaaagtcatttacatgcttacagttagagaagtaacttgagatctgtagcttatatgccgcagaagttagccatcaacatccatgcttagttttaaagaataatacttggtaggttgtttatttttaactggcgatagaaagatgggaattactatttattcagtcataggacagtgccccacatcttgctgactgagcacagcgcaagcctgggaaattgctaccatctttgggagtcaggcctcactgacacagaccgttctgaatctctgaccgtgacgcctgtctctgggctactcaacagagctgaatagctgggaaggctgatggctcaacccaactgccaagttccttccaggtagggccatgaataggtgcatgaaaaggttaaaaattcccacttagttttggatattaagataaactgtcttccagcttcctggctcttgtccgaacctagagaatatacggaaatgtcaccctgtcagaacctcttctgcctggaattcttccttttgcagagtggagattctgacttcatggcccttcccaggcaggctcacccaaaggaaaatggagtgaagaaaatcaccagcaaatcttccctgccgagggaccttggaacacccatatcagtttacattagcaactttatgaaaaactctctttaaaggaaagtttggatacatgtctgtatacataatatacatctatgtacacatacacacactatatacactgtacatatggagaggatataaacacatgtacattcattcagtcttacagcctagaaacctgtacacgcacaatgctgctgaagggacccagggctggacatacgaagtgcacgctggtgggaggcacacaatgagaaggtccagaccctgtgtacaaaagacccaaaccaaccctgtcttgatgaggggttggctttaaaaatttacatcaaagttaagacattttcaaagagcctcataactgagagaatggaagctggataaaggaagcacgtggggcatctgctctgctggctcaggcattcccagggcccagtgggcaccgccttccctgggagaaaagtggctgtcagatgatgagacttcctatgacctggactaagaaaagagttaaaatgttacctatgaccccattgcacataaagtcatttacactggaaagtgggcaacaagcttctggactccaatgagatcaggtcccagaacatggatgtacacatgtggcatgaactgctgattgcggccaggggctggaagccctgcagagggcgggctgtgagcaagagtgctctgcaggaaatgtcctcaaaggactatgaaagtaaaagcactagaaacagctagagtccttagaattttttgctccttgccgtaactatcccccaaacaagtaagacagctaataagtatgtgtgtagcgtggatattgccttgagattaaggagcctaacgcatccactgttaacaccatggctggtgtcctaactgcctcagaagagtccacattcaatactgacaatgacaagctaaaaatcagtccctcttgagggcaattacacatcttagaagtgactacacctgaaattaaatataaagcccagaacagcaaaagaacctcaaaccacagccttatggcaagggttagacaataaatgtaactcctcaggacacagaaatgtcaaattaggagagtatggtaggtaacacacttccttaaaaacaccttccaggagtaacttgaaaagtattacttgctcaactaatttggtctttcaaaaaatctcttcctgtcctgttttatgctaatgtgtaatgatctccaccattttcaacatctatctgtcttaacccaacattatctgagatacttctggaaaagagctcacttaactgatgacagcatgtgtctgtcccacctctctgagccagctgcctctcctcattgagggaggagcagccag

SEQ ID NO: 373458 - DNA, 2985 bp, Homo sapiens
ctggctctggggagaagccgcgtgagatccgcgcgggtgctagctagtcctttctcgtcgctgctcggctcgcggcccgtggggtcggccccgccaccgttgccgccatgcccatgaagggccgcttccccatccgccgcaccctgcaatatctgagccaggggaacgtggtgttcaaggactccgtgaaggtcatgacagtgaattacaacacgcatggggagctgggcgagggcgccaggaagtttgtgtttttcaacatacctcagattcaatacaaaaacccttgggtgcagatcatgatgtttaagaacatgacgccgtcacccttcctgcgattctacttagattctggggagcaggtcctggtggatgtggagaccaagagcaataaggagatcatggagcacatcagaaaaatcttggggaagaatgaggaaaccctcagggaagaggaggaggagaaaaagcagctttctcacccagccaacttcggccctcgaaagtactgcctgcgggagtgcatctgtgaagtggaagggcaggtgccctgccccagcctggtgccattacccaaggagatgagggggaagtacaaagccgctctgaaagccgatgcccaggactaaggcccacggtcactgtgggctggggtgatggtgtctgaccagtggggagattggaatgggattactttggcccagggaagcccctggttctgtccctggagactctggaaatccttttgcattaaaaggactttacacacctgtgtaaaaggatgtgggagaggagggtctgaagctgagctgctaaatgaatatccctgctctgctggtcaataaaacgcttcctaatagcagcttggcgtgtatctggtcctagtgaagaggaaggcctgtgtagcagaaaggctttgggcctgagaggttaaggccacagcctgttgacacctgttttggtcctgcgaccctttactggtctccgctggctttgaatcttcctctgggctctactctggagaacataagggctgctgtggttgagtctggctagcactgtctgtggttggcagtgtgtacacccctccgttcagttccttgggggtatttttcagaaatccaaaggcaacccttcgtgcagtgctcacttttttaagtacagttgattacccttgcctgctggggggcctagccatgggccagagatggaggagccccagtggctgacaggccagcctcactcaggcacgtacctgctgaccagtcagccactgccaacccatggcccagccactgtgtgcattagcagggaggtttgtaggccatggaggaaatgaggagacaccacctagtggagacattggggccctgctggggggatggtgtctatagctggctctgctggctccctcaggccctgcttaccaagctctggaggagggagtgctgcattactgagcaccttccttgttctttcctcataggacactgatgttactgtcactttagttatgctaaagtggaggtttcagcctccagaagacagcagagccttctagggtcaccttaagaataggtttagctaggctgggtgtggtggctcatgcctgtaatcccagcactttgggaggctgatgtgggcggatagttgagcccaggagttcgagaccagcctgggcaacatggcaagaccttgtctctacaaaaagtacaaaaattagatgggtgtggtgtttcgcgtctgtagtcccagctatttgggaagctgaggtgggaggatctcgagcctgcgagatcaaggctgcagtgaatcatgatcgtgcgctactgcactccagcctgggccacagagcaagactgtctcaagaaaaaaaattttttaaataagtttaattataaagtgaaggaccagttggaccacggacccctagaaactcagccaaggagacctgactttatctgagacaggaaggcagtggttaaaagaattaaaaaaggacagtggtgcttgacagagcaggactgaagttttcattcctctacctgctggggccttggtcaagtcctaaaagctttccaggtctgtaactggttttgtctgtaaaatggggaaaaggttaccttttctgccacatgaagtagctggctggtgaaatgatgtcatactacgatgtgtttcattaactgttggagattatcacattaaattgagcagatttggatcttttacatttgatgctcaagtttgattctgtaccagatctgggtttggggtgatggcttgtcgggggtgggaggggaaggtgggcagagactgatgtataatggacaggtgttccttgagtgacagacttacaaagggagtgtttaattgaaatctagcatcttgtctctctgctatcagcattttggctgggtggaaaaagctctcctccacagagagccctcccatgtctgctggtttcagttccccacccaactgactgaagtcttgaccttgataccacctgcctgggcgttctacttggctgcaagggctcttcagaaagcacctagttccttttggctttcatctgcagtgtaggtctccatagctagtgacacacaaagccttatgagagtattccttccctctaggggccccacaaaggaggctggctaactcgagacaagggaaattgtccgcttggaaaacccaaacaaagggcagtcggttgaacccaattttacttccttaggacgaggacaagttcacacccttggtccctgggttccccccttcaatagtgggggggaccacaggattaaaaccttaaaggaggcttttatggaaggtttcaaagggcctttttggaacccacccaacgggcaaaggtccaaaacttggggtggcaaaggttggaaggggttggcgaaacacagagcccccaagtaaaacccccgtggcacaaacggggcaaccaggttgggttggggcaagaaa

SEQ ID NO: 373459 - DNA, 736 bp, Homo sapiens
cacacagaggccttttcaggctcctttatcttgtgattgcatgtgagagctgtgggctccacctgtggcagcagataggctgaccgcactgtgtaggcttgctgctgtggtgtgaggggacaacagcaggccttctttcagcgctctcctcaggggccagcagggagacagcgataggctttgacagtgaggatcaggttagaaggcaggagatccaggtgtccctggtggatggtggggttgtctcggctgagaaactgccctgtgcctgccactcaaagttgccaatgcttggttgccgtctgtgctctttggcagggaaaccctcagggaagaggaggaggagaaaaagcagctttctcacccagccaacttcggccctcgaaagtactgcctgcgggagtgcatctgtgaagtggaagggcaggtgccctgccccagcctggtgccattacccaaggagatgagggggaagtacaaagccgctctgaaagccgatgcccaggactaaggcccacggtcactgtgggctggggtgatggtgtctgaccagtggggagattggaatgggattactttggcccagggaagcccctggttctgtccctggagactctggaaatccttttgcattaaaaggactttacacacctgtgtaaaaggatgtgggagaggagggtctgaagctgagctgctaaatgaatatccctgctctgctggtcaataaaacgcttcc

SEQ ID NO: 373460 - DNA, 1013 bp, Homo sapiens
ctggctctggggagaagccgcgtgagatccgcgcgggtgctagctagtcctttctcgtcgctgctcggctcgcggcccgtggggtcggccccgccaccgttgccgccatgcccatgaagggccgcttccccatccgccgcaccctgcaatatctgagccaggggaacgtggtgttcaaggactccgtgaaggtcatgacagtgaattacaacacgcatggggagctgggcgagggcgccaggaagtttgtgtttttcaacatacctcagattcaatacaaaaacccttgggtgcagatcatgatgtttaagaacatgacgccgtcacccttcctgcgattctacttagattctggggagcaggtcctggtggatgtggagaccaagagcaataaggagatcatggagcacatcagaaaaatcttggggaagaatgaggaaaccctcagggaagaggaggaggagaaaaagcagctttctcacccagccaacttcggccctcgaaagtactgcctgcgggagtgcatctgtgaagtggaagggcaggtgccctgccccagcctggtgccattacccaaggagatgagggggaagtacaaagccgctctgaaagccgatgcccaggactaaggcccacggtcactgtgggctggggtgatggtgtctgaccagtggggagattggaatgggattactttggcccagggaagcccctggttctgtccctggagactctggaaatccttttgcattaaaaggactttacacacctgtgtaaaaggatgtgggagaggagggtctgaagctgagctgctaaatgaatatccctgctctgctggtcaataaaacgcttccggttctatagcaaaaaaaaaaatttggggccgcacgttgaggggggggaggcccacgggtggacgaaaacgggagggggagtgggtgggaaggctatagtagaggaaggggcccaggtggaaattggaggcggaagggttgttaagaagaaatgggcgg

SEQ ID NO: 373461 - DNA, 4438 bp, Homo sapiens
ctggctctggggagaagccgcgtgagatccgcgcgggtgctagctagtcctttctcgtcgctgctcggctcgcggcccgtggggtcggccccgccaccgttgccgccatgcccatgaagggccgcttccccatccgccgcaccctgcaatatctgagccaggggaacgtggtgttcaaggactccgtgaaggtcatgacagtgaattacaacacgcatggggagctgggcgagggcgccaggaagtttgtgtttttcaacatacctcagattcaatacaaaaacccttgggtgcagatcatgatgtttaagaacatgacgccgtcacccttcctgcgattctacttaggcactacctggcagcaccatctaaacctgtatcatctgctgtggtcccagttactcaggaggctgaggcaggaggatcacttgagcccaggaggttgaggctggagtgagccatgactgtaccactgcattccagcctgggtgacggagtgaggccctatctgcctgccagtgagttctgtcatgcatcagactttggacctcagaattttcacctggaacatgagaggtcagatgacataatgaatatgttctaacttctgaaacttttggagcttgtttttgcccttgatagcacgtatccttagagaataagcttgccaatttaaggcctgtctgtaatggcatctgaatgttccagcagcctaactgtgctctgctccagaaacatgtgtgtggcttccctacctccacaccaaggagctgccttgctgggtggatgtaaagactgtcctgccagggtttcccactaaaggtattaataagtccagtggaccacagagggcccaatccctcttggccgctaaggctaaggtaggagccagagagctgtagagacaggaccaccaggatgcttcatgtccataacacaagagagcgctgcattgtttgggggccaggcattactactatcatgaagaaaaatgaagagcaggatgcatgttagtctttaattcacttttaatagtataaacctcatttaggtagtagtattaagccacaacaataatgccacattgaaacagcatttaataaaatgcataaagctaattcatgcactgcaatactctatatacaaacacaacaatgcaaattcttcttcaagactgaagacattgattagatataaaattcagtttaaaaagaacatgctattttttaaatgccatcacataaacaaagtgatttcacagggagaagaaagctgtataaagctgcagctttcaacaggttttaaacctggcattaaaatgtaatggcaaaaccaatattttctatattgtgaagggcaaaggttacagaaacggtcccaagaaaatctaacacccaaattttcctttgatagatagatgcctttaaaagggctggtaatgcagttacattctaacagagaagtccaaactacaggtaaaaactacggcttgtactgtgaaaaatgtgcagcttttcagttataaaactagttgaacactggtttacaagataatccgtagaacagagagactgtagaaaaatattccagcacttgagttgtgtgtggcagcagcatttgagtccatgaatgctatggtcattaaaataattgattatactttcctaaagaaaagccattttttaatgcaaagtctactacttccaaatgttattccaaacattaaattttaacagtctatcaatcaataaatgttgaacattttttttctattttgcatgtataaatatcaagacaccaaaattatttatagctgggcattaaaaatatctgacatttttctccccgcaaagatacttttcttaagctcacactttaattatttgtagactgctgttaagctaaatagccccaaaggaaacttttaattcatttagagactgtcaagtttccaattgcattttaactagaaagccactttcaatagcgtgattgtcacgacaggctatgacggggaaaggtcgcacaatcttgtgggatgaggccagtgaaatagaagctttctctacatcaaaaacagggaagctgaaggctaaatgacccactgtctcacaaaaggcactgagtactatggtctcataaagtgtttttaaaacattttgataacttattttaaaaagaaaaagaggaaactgtggattatgtgagtttttgcagcaatctagtgattccttccagcaggcccctgcttcccaggtctatgagcaactactgctgggccaggccctggctctcaagggccgagtctcagtttaaggccagattaagggggaaaattcgtccgagtagacctggacgaggaaaatttggtatctgtagcttttaagggcacacatatccatattaaaatgcaattcttatctgaaaatttaaaatcataacttatagaaaggagttaaagtcatttacatgcttacagttagagaagtaacttgagatctgtagcttatatgccgcagaagttagccatcaacatccatgcttagttttaaagaataatacttggtaggttgtttatttttaactggcgatagaaagatgggaattactatttattcagtcataggacagtgccccacatcttgctgactgagcacagcgcaagcctgggaaattgctaccatctttgggagtcaggcctcactgacacagaccgttctgaatctctgaccgtgacgcctgtctctgggctactcaacagagctgaatagctgggaaggctgatggctcaacccaactgccaagttccttccaggtagggccatgaataggtgcatgaaaaggttaaaaattcccacttagttttggatattaagataaactgtcttccagcttcctggctcttgtccgaacctagagaatatacggaaatgtcaccctgtcagaacctcttctgcctggaattcttccttttgcagagtggagattctgacttcatggcccttcccaggcaggctcacccaaaggaaaatggagtgaagaaaatcaccagcaaatcttccctgccgagggaccttggaacacccatatcagtttacattagcaactttatgaaaaactctctttaaaggaaagtttggatacatgtctgtatacataatatacatctatgtacacatacacacactatatacactgtacatatggagaggatataaacacatgtacattcattcagtcttacagcctagaaacctgtacacgcacaatgctgctgaagggacccagggctggacatacgaagtgcacgctggtgggaggcacacaatgagaaggtccagaccctgtgtacaaaagacccaaaccaaccctgtcttgatgaggggttggctttaaaaatttacatcaaagttaagacattttcaaagagcctcataactgagagaatggaagctggataaaggaagcacgtggggcatctgctctgctggctcaggcattcccagggcccagtgggcaccgccttccctgggagaaaagtggctgtcagatgatgagacttcctatgacctggactaagaaaagagttaaaatgttacctatgaccccattgcacataaagtcatttacactggaaagtgggcaacaagcttctggactccaatgagatcaggtcccagaacatggatgtacacatgtggcatgaactgctgattgcggccaggggctggaagccctgcagagggcgggctgtgagcaagagtgctctgcaggaaatgtcctcaaaggactatgaaagtaaaagcactagaaacagctagagtccttagaattttttgctccttgccgtaactatcccccaaacaagtaagacagctaataagtatgtgtgtagcgtggatattgccttgagattaaggagcctaacgcatccactgttaacaccatggctggtgtcctaactgcctcagaagagtccacattcaatactgacaatgacaagctaaaaatcagtccctcttgagggcaattacacatcttagaagtgactacacctgaaattaaatataaagcccagaacagcaaaagaacctcaaaccacagccttatggcaagggttagacaataaatgtaactcctcaggacacagaaatgtcaaattaggagagtatggtaggtaacacacttccttaaaaacaccttccaggagtaacttgaaaagtattacttgctcaactaatttggtctttcaaaaaatctcttcctgtcctgttttatgctaatgtgtaatgatctccaccattttcaacatctatctgtcttaacccaacattatctgagatacttctggaaaagagctcacttaactgatgacagcatgtgtctgtcccacctctctgagccagctgcctctcctcattgagggaggagcagccag

SEQ ID NO: 373462 - DNA, 4496 bp, Homo sapiens
ctggctctggggagaagccgcgtgagatccgcgcgggtgctagctagtcctttctcgtcgctgctcggctcgcggcccgtggggtcggccccgccaccgttgccgccatgcccatgaagggccgcttccccatccgccgcaccctgcaatatctgagccaggggaacgtggtgttcaaggactccgtgaaggtcatgacagtgaattacaacacgcatggggagctgggcgagggcgccaggaagtttgtgtttttcaacatacctcagattcaatacaaaaacccttgggtgcagatcatgatgtttaagaacatgacgccgtcacccttcctgcgattctacttagattctggggagcaggtcctggtggatgtggagaccaagagcaataaggagatcatggagcacatcagaaaaatcttggggaagaatgaggaaaccctcagggaagaggaggaggagaaaaagcagctttctcacccagccaacttcggccctcgaaagtactgcctgcgggagtgcatctgtgaagtggaagggcaggtgccctgccccagcctggtgccattacccaaggagatgagggggaagtacaaagccgctctgaaagccgatgcccaggactaaggcccacggtcactgtgggctggggtgatggtgtctgaccagtggggagattggaatgggattactttggcccagggaagcccctggttctgtccctggagactctggaaatccttttgcattaaaaggactttacacacctgtgtaaaaggatgtgggagaggagggtctgaagctgagctgctaaatgaatatccctgctctgctggtcaataaaacgcttcctaatagcagcttggcgtgtatctggtcctagtgaagaggaaggcctgtgtagcagaaaggctttgggcctgagaggttaaggccacagcctgttgacacctgttttggtcctgcgaccctttactggtctccgctggctttgaatcttcctctgggctctactctggagaacataagggctgctgtggttgagtctggctagcactgtctgtggttggcagtgtgtacacccctccgttcagttccttgggggtatttttcagaaatccaaaggcaacccttcgtgcagtgctcacttttttaagtacagttgattacccttgcctgctggggggcctagccatgggccagagatggaggagccccagtggctgacaggccagcctcactcaggcacgtacctgctgaccagtcagccactgccaacccatggcccagccactgtgtgcattagcagggaggtttgtaggccatggaggaaatgaggagacaccacctagtggagacattggggccctgctggggggatggtgtctatagctggctctgctggctccctcaggccctgcttaccaagctctggaggagggagtgctgcattactgagcaccttccttgttctttcctcataggacactgatgttactgtcactttagttatgctaaagtggaggtttcagcctccagaagacagcagagccttctagggtcaccttaagaataggtttagctaggctgggtgtggtggctcatgcctgtaatcccagcactttgggaggctgatgtgggcggatagttgagcccaggagttcgagaccagcctgggcaacatggcaagaccttgtctctacaaaaagtacaaaaattagatgggtgtggtgtttcgcgtctgtagtcccagctatttgggaagctgaggtgggaggatctcgagcctgcgagatcaaggctgcagtgaatcatgatcgtgcgctactgcactccagcctgggccacagagcaagactgtctcaagaaaaaaaattttttaaataagtttaattataaagtgaaggaccagttggaccacggacccctagaaactcagccaaggagacctgactttatctgagacaggaaggcagtggttaaaagaattaaaaaaggacagtggtgcttgacagagcaggactgaagttttcattcctctacctgctggggccttggtcaagtcctaaaagctttccaggtctgtaactggttttgtctgtaaaatggggaaaaggttaccttttctgccacatgaagtagctggctggtgaaatgatgtcatactacgatgtgtttcattaactgttggagattatcacattaaattgagcagatttggatcttttacatttgatgctcaagtttgattctgtaccagatctgggtttggggtgatggcttgtcgggggtgggaggggaaggtgggcagagactgatgtataatggacaggtgttccttgagtgacagacttacaaagggagtgtttaattgaaatctagcatcttgtctctctgctatcagcattttggctgggtggaaaaagctctcctccacagagagccctcccatgtctgctggtttcagttccccacccaactgactgaagtcttgaccttgataccacctgcctgggcgttctacttggctgcaagggctcttcagaaagcacctagttccttttggctttcatctgcagtgtaggtctccatagctagtgacacacaaagccttatgagagtattccttccctctagggcccaaagaggctgctaaccagcaggaatgtcctgaaccaaaaggagtggtgaccattctctagacagaataaatgtctggtccctaatgggacagataactagggtttgagttcaggcttgacacaggagcaatgggcagtgaggtggacagcccagaccctgaaaggacgtgtggagacagcagcagtcctgtggtgcagttactgcctgtgtggccagcttcacaggcagcagataatttgtggaaataaacattattttctttttttgttccctgtaggctacttgatcctggatagtttctctttaaacctttgtctttccctattttgtttagtagtgatgaaagatgggtttaaaatatacagaaatgggagaaaattaattagagaaaatgtgaggattttataattgataacatgttcttaattttacttgcacaagcagtgttcacagccttattctgaagtgaccacttttcttctctttgaggcactacctggcagcaccatctaaacctgtatcatctgctgtggtcccagttactcaggaggctgaggcaggaggatcacttgagcccaggaggttgaggctggagtgagccatgactgtaccactgcattccagcctgggtgacggagtgaggccctatctgcctgccagtgagttctgtcatgcatcagactttggacctcagaattttcacctggaacatgagagggaactgcaacatggccctcatggtcactctcaaggatcaaaacgacggaaggcaggcaacaatctgtgttagaggcaccactgagctgcaggatgcctgctactaaaagccttcacaagcagaaatgaaacaaacctgccctaattccattgtctcagctggttttttgtcttaattttgaaactgaaaacacatcagggttagaaaagtaaaaattactttaagctggcaaaattaaatcctttccatcattttataatggccactcccactactctccaaaatttgctgccaaggcaagaattataaaatgatataattaaatccaaacaagaatttagaagttggaaacactgttcccacttaccctactaacactgacttgcgtaaagtgctgctaacccttcaggatcaagcatcctgttctgccttgagcctgcagcagcttccattctgtccaatgtggcaccacaggggcgtctgtagctggccagactgcacccctgtggagcacatgtggcgccagcctgagccagatcagagcacctgtgagtcaggggagtgtccagggatctttttggatatcatctgattaacaaatcaagagaggcaaatttaacccaacagggtgtattttcttaatctggactatttaaaaagcaaaagacaaagcaattgaccgggtcttccacatgccactgttctcaaacaggaaaagcttgctatatattcacatccgtgggaatttacgggtgtttgaagttagacataacttccttttaagcgcatactgttcttgctgtaaactctggttgctacaatttatgaggagaaagactatcaccctggaaattgagggttgtttttaaggagcaagcagcctgcatttaaaatgctccggggtggtcggctggcacacacctgggggaaccaaagtgcacagtgtgctggtaacattaacagacttgccaacagagatgctgagtctatacacatttttaaaatctctggtatttaaggtcaacaggaagaaattgtcctgaaaccttccatccagctttaccaggccctaaccactctcgccaggcggcagcaggctcctgcccagccccaatccagcctcacagttatga

SEQ ID NO: 373463 - DNA, 1166 bp, Homo sapiens
ctggctctggggagaagccgcgtgagatccgcgcgggtgctagctagtcctttctcgtcgctgctcggctcgcggcccgtggggtcggccccgccaccgttgccgccatgcccatgaagggccgcttccccatccgccgcaccctgcaatatctgagccaggggaacgtggtgttcaaggactccgtgaaggtcatgacagtgaattacaacacgcatggggagctgggcgagggcgccaggaagtttgtgtttttcaacatacctcagattcaatacaaaaacccttgggtgcagatcatgatgtttaagaacatgacgccgtcacccttcctgcgattctacttagattctggggagcaggtcctggtggatgtggagaccaagagcaataaggagatcatggagcacatcagaaaaatcttggggaagaatgaggaaaccctcagggaagaggaggaggagaaaaagcagctttctcacccagccaacttcggccctcgaaagtactgcctgcgggagtgcatctgtgaagtggaagggcaggtgccctgccccagcctggtgccattacccaaggagatgagggggaagtacaaagccgctctgaaagccgatgcccaggactaaggcccacggtcactgtgggctggggtgatggtgtctgaccagtggggagattggaatgggattactttggcccagggaagcccctggttctgtccctggagactctggaaatccttttgcattaaaaggactttacacacctgtgtaaaaggatgtgggagaggagggtctgaagctgagctgctaaatgaatatccctgctctgctggtcaataaaacgcttccaaaaaaaaaaaaaaaaaaaaaaaaaaaaaaaaaaaaaaaaaaaaaaaaaaaaaaaaaaaaaataaaaaaacaaaaaaaaaaaaaaaaaaaaaaacctcagggtccaaggcatctaaaagctgaatttgaaacttcacacagggctgcttgaaaaaaccctctcagggaacagacttcccaaattctcccaaaaacccttggtaaaacggcaacaatcttttaaactttggaaagtcacttaaaaataccattccaaaagacttaaagcctgaaacaattactttaataggaatatatttcaccacttttaag

SEQ ID NO: 373464 - DNA, 410 bp, Homo sapiens
gaaaccctgtctctactaaaatacaaaaaattagctgggcgtggcagcgtgcatctatagtcccagctacttgagaggattgcagggagccgagatcgcctgggtgacagagtgagactctgtctcaaaaaaaaaaaaaaaaaaaaaattaccctggtgtggtggctcacacctgtagtcccagctactcgggaggctgaggcaggagaatcgcttgaacctaggaggtggaggttgcagtgaactgaggtcaggccactgcactccagcctgggcaacagagtgagactcagtttcaacaacaacaacaaaaaagaattcttatagcgtgtaatctccagtccctgcttccccttcccagggtctttctggtgaccagctcatcctgaagctatctagggcccccaccc

SEQ ID NO: 373465 - DNA, 723 bp, Homo sapiens
gagcggtttggcggagacacagggccgctcagaggccgccgcaatgctcccctctttgcaggagtcgatggatggagatgaaaaggaactagagagcagcgaagagggaggctcagccgaggagcggagactcgagccgccgtccagcagccactactgtctttacagctatcgcggaagcagattggcacagcaacgaggggacagtgaggacggaagcccaagtggcacaaatgcagaaactccctctggtgatgatttcagcctctccttggcagatactaatctaccatccgaagtggagccagagctgcgcagtttcattgctaagcgtctttcaagaggtgcagtctttgaagggctgggtaatgttgcatctgtggagctaaaaattccaggttaccgagttggttgttattactgccttttccaaaatgaaaaactgcttcctgaaacagtaacgatagactctgaacgtaacccttcagaatatgtggtctgttttttaggagggtctgaaaaaggacttgagctatatcctttctttggtttttgagaacatcaggaaggaaaacatgggaaggcaggtggaagaatattactaccaacctccaaaaagcttttctactcctcgtgtatttagttgaatttcataccttcatgtggccattttgccttggcttgtttgcatttgcagctcacattatttgagagattttatat

SEQ ID NO: 373466 - DNA, 2532 bp, Homo sapiens
gataaaagaaaccacattataggaaacaccggaattttacagaccgttcgagcaatacacatatacttaggaaacaaacatcaaagcccgggtttccgatcttttacttactaaccgcctgccctgggcgagtaactgatggatcatctgtttttaaggcagaggagaaccgtgctttccagccagcacggggagcaacatgaatgatgccaggaaaggctttcacggcacccagggaatctgcattacgtatttgcaaattaaattggacgctgggggaagatcctggtgtggtgagcaacagctcccctaatcctctgggcaagaatggttctcatggaaatcgagagtcctattagctggcaaaagagcctcattagggagcttttcctaattaaaaaacgaatgatgaatggtgtcattaaagcgaaatttctcctttgaaggtttgttttcccttccccagtttctgtgattcctctcccgtttaatgagagccagtgagtctatggctgctgtttggggattccccagctttcagtttctgtatcctgtggataaaaggccaacctacctccaccagcctgaagatttacacaccaccccctgggctggcagccacctcagacaaggaaagaggcacagaggacacggccagccttggccatggggaagtgctgctgagagggtggtgggacctgctgaggagaaagccagatgccacaaagagaacccctctgaccagacagctgcctcctgacctggggagaggcctgggtcaggtgaagtgaccctatgaccccaccctgtggccccgcttggaagtcatggttgggagaggggatggaggtgggtgtgctgacagagaacagctggggctggtggtctaaggtgtagacgagggtccttggcagcagaggacacacttaacatggtgggagacacgattccgcctccactgtccttctcagtaacaagcttccctgggagtccccgagggagctgagtgcttctatgagggatttctagaatcttctagttcaatgctttctcacccctaagagaggaagccccctctccaggtcataccagacagaggtggcactctgctcattccacccacaccacagaatccccaggggccaggacaggaatctggaggggattctccatccctccaggaaaggacctcatcgctcagcttagtgcggctgcagcccaggcagaggcagcaatgtcctgactccttctgcatcctcccctggtcttccctgagcccagctccacagcctcagagcctcctcctctgaggcactgacttccatctacatctttctatcactagggcagagaacggtgggcagggcacacacaagacgccccaggctgacgcaacaccgccaaaggcgtgggcccacagtgccacaggctgcggccctcagcatggcactggtgcaggggagcaggacctagggaactacatatgtggatgaggccagggcaatctatttagcagtgggccaagatgcggtatggctgggcctcgcctgccagtgagtgagtgagcccatttacatgtagtcaccaggatgggaagccactgtggcccaagaccccaaatgcctggcctgactgaccctggaccctgctacactcaagggccaggatgggcaccaggctggaggaagaccgttcccacactcctgcccctgtttctggacacgcccagcccccctgcctcctcccaggcctggcgttctttgttcttctgggctgtcagtggttgagaattccaagagcacgataaagggagtgtcatcttttgtcaaaggtcatcctcatgccctccattcggggcctgcaccagctcctgttaggagggtcattccctccatcttgttttctcacctgtgtaatggggtggggtggatttgataaccaccatgttctctcccgcatccaagcctccgaggctactggctgccctccctctgaggttcatccatgcacccaacaattctcctgaggcaaagttttccaactaaactggaattcctcttcctgtagcctcctgtccccctaacttaaatggacacatggcctcaacattcctaccccagcctctcttgcgcccccaaagctctttctctcctaagggagataggatggaacctttttggatatgaaggccatctcagacggaaacaagagctgaacctggcaaacctcagcatccagggatccttggagggcttgagctctccctccagcagggccattctgccaccggtcagtgatgctcaggggcaggtgtggaagggacaggagatgggaaggaagggggcaggctttgtcaaagcaaggacattcagcaaccacagcacaccacggtctgccacctctcacggatgcccacatgggccccctgcatcctccatgccttctctgcaggcgctgtcgtgcctcagttacctttcccatcacatacacacatatacgcacacacacacacacacgcatgaatgtttcaaa

SEQ ID NO: 373467 - DNA, 773 bp, Homo sapiens
ttctagttcaactcagaccgtgaagttagcatacaggtcctcaggagtttgaggccacttcccaaggataaggccaccttcaggcacatctgccttaaacatcaatttgtgaagctttgggagaggggagaacatacttttttttaatataaacatgggtatgaactagagtgaaatttgtgtgaatttttcacataagacaggagaattcaaagaaatttcatgtatgttagtggctgctttaactaaagccctccagggtatacattcatttttctttgctgctgcaagtacaccaacgagaagtctgggaagctctgagttagtgggcagtttaatggtgttgccagatcaagatgaccagaattcagagcagtccacaaaattatagatgcatgagtaaccaaaataatgcattttacattttctttcttttctagaattccaggttaccgagttggttgttattactgccttttccaaaatgaaaaactgcttcctgaaacagtaacgatagactctgaacgtaacccttcagaatatgtggtctgttttttaggagggtctgaaaaaggacttgagctatatcctttctttggtttttgagaacatcaggaaggaaaacatgggaaggcaggtggaagaatattactaccaacctccaaaaagcttttctactcctcgtgtatttagttgaatttcataccttcatgtggccattttgccttggcttgtttgcatttgcagctcacattatttgagagattttatat

SEQ ID NO: 373468 - DNA, 529 bp, Homo sapiens
gcgacccataactgtgttctaccggcaaagtaaaagggaggagaaaagaagcaggagaaacgaggccaaaaatccctcactttcccaacccaacggctaccaccacgtcccacaggaagcagacacaaaatggccgacggcctcgttccccgctccgcctcccgtcaagcactgcggtaggagcggagccaagaaggggagggtcacatgacgcagacctccgccctgagtgggtgggactaagaggcgcgaagaggtggcagccatcttgtccgtttcagagtttttcgctttcgctggctgtgcttgcggagcactttgggtttcatttgtaaaggagccggagccccaggtacgctaaggggcatgcgaatggaaaacagaaaacaaaaaaacggaaaagattgccagtgcagttagggccgatcacaaataaagatagagacagcgcccaattttaattttgtttcaattgaacagtaaatgttgattatgtgcctattaaatgctaaaccaaaataagttagtc

SEQ ID NO: 373469 - DNA, 1796 bp, Homo sapiens
gagcggtttggcggagacacagggccgctcagaggccgccgcaatgctcccctctttgcaggagtcgatggatggagatgaaaaggaactagagagcagcgaagagggaggctcagccgaggagcggagactcgagccgccgtccagcagccactactgtctttacagctatcgcggaagcagattggcacagcaacgaggggacagtgaggacggaagcccaagtggcacaaatgcagaaactccctctggtgatgatttcagcctctccttggcagatactaatctaccatccgaagtggagccagagctgcgcagtttcattgctaagcgtctttcaagaggtgcagtctttgaagggctgggtaatgttgcatctgtggagctaaaaattccaggttaccgagttggttgttattactgccttttccaaaatgaaaaactgcttcctgaaacagtaacgatagactctgaacgtaacccttcagaatatgtggtctgttttttaggagggtctgaaaaaggacttgagcttttcaggcttgaattggacaagtacattcaagggctgaaaaataacatgaattgtgaggcaaggggcctggagagtcacataaaatcctatctgagcagctggtttgaggatgttgtatgcccaatccaaagggttgttcttctctttcaggaaaagcttacctttctgctacatgctgctttgagttacactcctgttgaagttaaagaatcagatgaaaaaacaaagagagacattaacaggtaaagaacagttttttcaaagagaaaagcttttccacagcaagattgacatctgtgtttgtaaactgctccttccatcccttccccaccagcccagtgcaaaataaatttgttttcatccttccgtcctgcaatattgtttgtggaaatggacttgtgtgtgtggcaggtttctgagtgtggccagtcttcaaggacttattcatgaaggcaccatgacttctttgtgcatggccatgacagaggagcagcataagtctgtggtcatcgattgcagcagctcccagcctcagttctgcaatgcaggaagtaaccggttttgtgaggattggatgcaagcttttttaaatggtgccaaaggaggtaacccttttcttttccgacaagtactggagaactttaaactaaaggccatacaagacacaaacaatttgaagagatttatccgacaggcagaaatgaatcattatgctttgtttaaatgttacatgttcctaaagaactgtggtagtggagatatacttttgaagattgttaaagtggaacatgaagaaatgcctgaagccaaaaatgtgatagctgtccttgaagaattcatgaaagaagctcttgaccaaagtttttgatcatatgttttgagataattgtatgatcaagttgtatatttaagtcttagtgtttgaaattgcagttataattgttcataggattgctatttaagatgatttgaaactcaatccagattttctttttgtattttaccaatttaacttaaataaaaatctgaagaacatcttcactgagtcctagatagataatgtatgtgagagttgtgaaattttagtgtctcactggccccataaattccacgcttcaggaagttgttgcttaaaaaatttcagagatgattttgtttgtggcttttctcaggaaaagcctgagtttgctgcagtatttagcaacttttcttctcagaaaaaccataatacttccttttcagtggactgtagcttcttaaa

SEQ ID NO: 373470 - DNA, 3582 bp, Homo sapiens
gagcggtttggcggagacacagggccgctcagaggccgccgcaatgctcccctctttgcaggagtcgatggatggagatgaaaaggaactagagagcagcgaagagggaggctcagccgaggagcggagactcgagccgccgtccagcagccactactgtctttacagctatcgcggaagcagattggcacagcaacgaggggacagtgaggacggaagcccaagtggcacaaatgcagaaactccctctggtgatgatttcagcctctccttggcagatactaatctaccatccgaagtggagccagagctgcgcagtttcattgctaagcgtctttcaagaggtgcagtctttgaagggctgggtaatgttgcatctgtggagctaaaaattccaggttaccgagttggttgttattactgccttttccaaaatgaaaaactgcttcctgaaacagtaacgatagactctgaacgtaacccttcagaatatgtggtctgttttttaggagggtctgaaaaaggacttgagcttttcaggcttgaattggacaagtacattcaagggctgaaaaataacatgaattgtgaggcaaggggcctggagagtcacataaaatcctatctgagcagctggtttgaggatgttgtatgcccaatccaaagggttgttcttctctttcaggaaaagcttacctttctgctacatgctgctttgagttacactcctgttgaagttaaagaatcagatgaaaaaacaaagagagacattaacaggtttctgagtgtggccagtcttcaaggacttattcatgaaggcaccatgacttctttgtgcatggccatgacagaggagcagcataagtctgtggtcatcgattgcagcagctcccagcctcagttctgcaatgcagaaatcctggatccaccaccgctgctgttcaccctctcccacccatcctgacccagacccagatgaaacaggccctaatgccagcccttcaggtcacttcctgaataaccaatggcttggaaaaagaaaaaaaatatttaatggaatctgtgctcaaataatatgttacaacaaaaatatacagaatgtacacaatacaaaaatacttagaaacaaacattgcagtctgtgttttgttttttccacttactcaagtcctcggaggggcagttcactgttgggcactgtttttaaggcagaggagaaccgtgctttccagccagcacggggagcaacatgaatgatgccaggaaaggctttcacggcacccagggaatctgcattacgtatttgcaaattaaattggacgctgggggaagatcctggtgtggtgagcaacagctcccctaatcctctgggcaagaatggttctcatggaaatcgagagtcctattagctggcaaaagagcctcattagggagcttttcctaattaaaaaacgaatgatgaatggtgtcattaaagcgaaatttctcctttgaaggtttgttttcccttccccagtttctgtgattcctctcccgtttaatgagagccagtgagtctatggctgctgtttggggattccccagctttcagtttctgtatcctgtggataaaaggccaacctacctccaccagcctgaagatttacacaccaccccctgggctggcagccacctcagacaaggaaagaggcacagaggacacggccagccttggccatggggaagtgctgctgagagggtggtgggacctgctgaggagaaagccagatgccacaaagagaacccctctgaccagacagctgcctcctgacctggggagaggcctgggtcaggtgaagtgaccctatgaccccaccctgtggccccgcttggaagtcatggttgggagaggggatggaggtgggtgtgctgacagagaacagctggggctggtggtctaaggtgtagacgagggtccttggcagcagaggacacacttaacatggtgggagacacgattccgcctccactgtccttctcagtaacaagcttccctgggagtccccgagggagctgagtgcttctatgagggatttctagaatcttctagttcaatgctttctcacccctaagagaggaagccccctctccaggtcataccagacagaggtggcactctgctcattccacccacaccacagaatccccaggggccaggacaggaatctggaggggattctccatccctccaggaaaggacctcatcgctcagcttagtgcggctgcagcccaggcagaggcagcaatgtcctgactccttctgcatcctcccctggtcttccctgagcccagctccacagcctcagagcctcctcctctgaggcactgacttccatctacatctttctatcactagggcagagaacggtgggcagggcacacacaagacgccccaggctgacgcaacaccgccaaaggcgtgggcccacagtgccacaggctgcggccctcagcatggcactggtgcaggggagcaggacctagggaactacatatgtggatgaggccagggcaatctatttagcagtgggccaagatgcggtatggctgggcctcgcctgccagtgagtgagtgagcccatttacatgtagtcaccaggatgggaagccactgtggcccaagaccccaaatgcctggcctgactgaccctggaccctgctacactcaagggccaggatgggcaccaggctggaggaagaccgttcccacactcctgcccctgtttctggacacgcccagcccccctgcctcctcccaggcctggcgttctttgttcttctgggctgtcagtggttgagaattccaagagcacgataaagggagtgtcatcttttgtcaaaggtcatcctcatgccctccattcggggcctgcaccagctcctgttaggagggtcattccctccatcttgttttctcacctgtgtaatggggtggggtggatttgataaccaccatgttctctcccgcatccaagcctccgaggctactggctgccctccctctgaggttcatccatgcacccaacaattctcctgaggcaaagttttccaactaaactggaattcctcttcctgtagcctcctgtccccctaacttaaatggacacatggcctcaacattcctaccccagcctctcttgcgcccccaaagctctttctctcctaagggagataggatggaacctttttggatatgaaggccatctcagacggaaacaagagctgaacctggcaaacctcagcatccagggatccttggagggcttgagctctccctccagcagggccattctgccaccggtcagtgatgctcaggggcaggtgtggaagggacaggagatgggaaggaagggggcaggctttgtcaaagcaaggacattcagcaaccacagcacaccacggtctgccacctctcacggatgcccacatgggccccctgcatcctccatgccttctctgcaggcgctgtcgtgcctcagttacctttcccatcacatacacacatatacgcacacacacacacacacgcatgaatgtttcaaa

SEQ ID NO: 373471 - DNA, 1512 bp, Homo sapiens
cccggccgctcctaaaagccatcttctcctctcccagccaagattggcacagcaacgaggggacagtgaggacggaagcccaagtggcacaaatgcagaaactccctctggtgatgatttcagaatgtgtgtctttcatttgtcaagcccctctccttggcagatactaatctaccatccgaagtggagccagagctgcgcagtttcattgctaagcgtctttcaagaggtgcagtctttgaagggctgggtaatgttgcatctgtggagctaaaaattccaggttaccgagttggttgttattactgccttttccaaaatgaaaaactgcttcctgaaacagtaacgatagactctgaacgtaacccttcagaatatgtggtctgttttttaggagggtctgaaaaaggacttgagcttttcaggcttgaattggacaagtacattcaagggctgaaaaataacatgaattgtgaggcaaggggcctggagagtcacataaaatcctatctgagcagctggtttgaggatgttgtatgcccaatccaaagggttgttcttctctttcaggaaaagcttacctttctgctacatgctgctttgagttacactcctgttgaagttaaagaatcagatgaaaaaacaaagagagacattaacaggtttctgagtgtggccagtcttcaaggacttattcatgaaggcaccatgacttctttgtgcatggccatgacagaggagcagcataagtctgtggtcatcgattgcagcagctcccagcctcagttctgcaatgcaggaagtaaccggttttgtgaggattggatgcaagcttttttaaatggtgccaaaggaggtaacccttttcttttccgacaagtactggagaactttaaactaaaggccatacaagacacaaacaatttgaagagatttatccgacaggcagaaatgaatcattatgctttgtttaaatgttacatgttcctaaagaactgtggtagtggagatatacttttgaagattgttaaagtggaacatgaagaaatgcctgaagccaaaaatgtgatagctgtccttgaagaattcatgaaagaagctcttgaccaaagtttttgatcatatgttttgagataattgtatgatcaagttgtatatttaagtcttagtgtttgaaattgcagttataattgttcataggattgctatttaagatgatttgaaactcaatccagattttctttttgtattttaccaatttaacttaaataaaaatctgaagaacatcttcactgagtcctagatagataatgtatgtgagagttgtgaaattttagtgtctcactggccccataaattccacgcttcaggaagttgttgcttaaaaaatttcagagatgattttgtttgtggcttttctcaggaaaagcctgagtttgctgcagtatttagcaacttttcttctcagaaaaaccataatacttccttttcagtggactgtagcttcttaaa

SEQ ID NO: 373472 - DNA, 1677 bp, Homo sapiens
ttctagttcaactcagaccgtgaagttagcatacaggtcctcaggagtttgaggccacttcccaaggataaggccaccttcaggcacatctgccttaaacatcaatttgtgaagctttgggagaggggagaacatacttttttttaatataaacatgggtatgaactagagtgaaatttgtgtgaatttttcacataagacaggagaattcaaagaaatttcatgtatgttagtggctgctttaactaaagccctccagggtatacattcatttttctttgctgctgcaagtacaccaacgagaagtctgggaagctctgagttagtgggcagtttaatggtgttgccagatcaagatgaccagaattcagagcagtccacaaaattatagatgcatgagtaaccaaaataatgcattttacattttctttcttttctagaattccaggttaccgagttggttgttattactgccttttccaaaatgaaaaactgcttcctgaaacagtaacgatagactctgaacgtaacccttcagaatatgtggtctgttttttaggagggtctgaaaaaggacttgagcttttcaggcttgaattggacaagtacattcaagggctgaaaaataacatgaattgtgaggcaaggggcctggagagtcacataaaatcctatctgagcagctggtttgaggatgttgtatgcccaatccaaagggttgttcttctctttcaggaaaagcttacctttctgctacatgctgctttgagttacactcctgttgaagttaaagaatcagatgaaaaaacaaagagagacattaacaggtttctgagtgtggccagtcttcaaggacttattcatgaaggcaccatgacttctttgtgcatggccatgacagaggagcagcataagtctgtggtcatcgattgcagcagctcccagcctcagttctgcaatgcaggaagtaaccggttttgtgaggattggatgcaagcttttttaaatggtgccaaaggaggtaacccttttcttttccgacaagtactggagaactttaaactaaaggccatacaagacacaaacaatttgaagagatttatccgacaggcagaaatgaatcattatgctttgtttaaatgttacatgttcctaaagaactgtggtagtggagatatacttttgaagattgttaaagtggaacatgaagaaatgcctgaagccaaaaatgtgatagctgtccttgaagaattcatgaaagaagctcttgaccaaagtttttgatcatatgttttgagataattgtatgatcaagttgtatatttaagtcttagtgtttgaaattgcagttataattgttcataggattgctatttaagatgatttgaaactcaatccagattttctttttgtattttaccaatttaacttaaataaaaatctgaagaacatcttcactgagtcctagatagataatgtatgtgagagttgtgaaattttagtgtctcactggccccataaattccacgcttcaggaagttgttgcttaaaaaatttcagagatgattttgtttgtggcttttctcaggaaaagcctgagtttgctgcagtatttagcaacttttcttctcagaaaaaccataatacttccttttcagtggactgtagcttcttaaa

SEQ ID NO: 373473 - DNA, 725 bp, Homo sapiens
gagcggtttggcggagacacagggccgctcagaggccgccgcaatgctcccctctttgcaggagtcgatggatggagatgaaaaggaactagagagcagcgaagagggaggctcagccgaggagcggagactcgagccgccgtccagcagccactactgtctttacagctatcgcggaagcagattggcacagcaacgaggggacagtgaggacggaagcccaagtggcacaaatgcagaaactccctctggtgatgatttcagcctctccttggcagatactaatctaccatccgaagtggagccagagctgcgcagtttcattgctaagcgtctttcaagaggtgcagtctttgaagggctgggtaatgttgcatctgtggagctaaaaattccaggttaccgagttggttgttattactgccttttccaaaatgaaaaactgcttcctgaaacagtaacgatagactctgaacgtaacccttcagaatatgtggtctgttttttaggaggggcccgccccccgccccccgcccccccctcccctcccgcccccgccaacatcaggaaggaaaacatgggaaggcaggtggaagaatattactaccaacctccaaaaagcttttctactcctcgtgtatttagttgaatttcataccttcatgtggccattttgccttggcttgtttgcatttgcagctcacattatttgagagattttatat

SEQ ID NO: 373474 - DNA, 1401 bp, Homo sapiens
gagcggtttggcggagacacagggccgctcagaggccgccgcaatgctcccctctttgcaggagtcgatggatggagatgaaaaggaactagagagcagcgaagagggaggctcagccgaggagcggagactcgagccgccgtccagcagccactactgtctttacagctatcgcggaagcagattggcacagcaacgaggggacagtgaggacggaagcccaagtggcacaaatgcagaaactccctctggtgatgatttcagcctctccttggcagatactaatctaccatccgaagtggagccagagctgcgcagtttcattgctaagcgtctttcaagaggtgcagtctttgaagggctgggtaatgttgcatctgtggagctaaaaattccaggttaccgagttggttgttattactgccttttccaaaatgaaaaactgcttcctgaaacagtaacgatagactctgaacgtaacccttcagaatatgtggtctgttttttaggagggtctgaaaaaggacttgagcttttcaggcttgaattggacaagtacattcaagggctgaaaaataacatgaattgtgaggcaaggggcctggagagtcacataaaatcctatctgagcagctggtttgaggatgttgtatgcccaatccaaagggttgttcttctctttcaggaaaagcttacctttctgctacatgctgctttgagttacactcctgttgaagttaaagaatcagatgaaaaaacaaagagagacattaacaggtttctgagtgtggccagtcttcaaggacttattcatgaaggcaccatgacttctttgtgcatggccatgacagaggagcagcataagtctgtggtcatcgattgcagcagctcccagcctcagttctgcaatgcaggaagtaaccggttttgtgaggattggatgcaagcttttttaaatggtgccaaaggaggtaacccttttcttttccgacaagtactggagaactttaaactaaaggccatacaagacacaaacaatttgaagagatttatccgacaggcagaaatgaatcattatgctttgtttaaatgttacatgttcctaaagaactgtggtagtggagatatacttttgaagattgttaaagtggaacatgaagaaatgcctgaagccaaaaatgtgatagctgtccttgaagaattcatgaaagaagctcttgaccaaagtttttgatcatatgttttgagataattgtatgatcaagttgtatatttaagtcttagtgtttgaaattgcagttataattgttcataggattgctatttaagatgatttgaaactcaatccagattttctttttgtattttaccaatttaacttaaataaaaatctgaagaaca

SEQ ID NO: 373475 - DNA, 1692 bp, Homo sapiens
gcgacccataactgtgttctaccggcaaagtaaaagggaggagaaaagaagcaggagaaacgaggccaaaaatccctcactttcccaacccaacggctaccaccacgtcccacaggaagcagacacaaaatggccgacggcctcgttccccgctccgcctcccgtcaagcactgcggtaggagcggagccaagaaggggagggtcacatgacgcagacctccgccctgagtgggtgggactaagaggcgcgaagaggtggcagccatcttgtccgtttcagagtttttcgctttcgctggctgtgcttgcggagcactttgggtttcatttgtaaaggagccggagccccaggagtcgatggatggagatgaaaaggaactagagagcagcgaagagggaggctcagccgaggagcggagactcgagccgccgtccagcagccactactgtctttacagctatcgcggaagcagattggcacagcaacgaggggacagtgaggacggaagcccaagtggcacaaatgcagaaactccctctggtgatgatttcagcctctccttggcagatactaatctaccatccgaagtggagccagagctgcgcagtttcattgctaagcgtctttcaagaggtgcagtctttgaagggctgggtaatgttgcatctgtggagctaaaaattccaggttaccgagttggttgttattactgccttttccaaaatgaaaaactgcttcctgaaacagtaacgatagactctgaacgtaacccttcagaatatgtggtctgttttttaggagggtctgaaaaaggacttgagcttttcaggcttgaattggacaagtacattcaagggctgaaaaataacatgaattgtgaggcaaggggcctggagagtcacataaaatcctatctgagcagctggtttgaggatgttgtatgcccaatccaaagggttgttcttctctttcaggaaaagcttacctttctgctacatgctgctttgagttacactcctgttgaagttaaagaatcagatgaaaaaacaaagagagacattaacaggtttctgagtgtggccagtcttcaaggacttattcatgaaggcaccatgacttctttgtgcatggccatgacagaggagcagcataagtctgtggtcatcgattgcagcagctcccagcctcagttctgcaatgcaggaagtaaccggttttgtgaggattggatgcaagcttttttaaatggtgccaaaggaggtaacccttttcttttccgacaagtactggagaactttaaactaaaggccatacaagacacaaacaatttgaagagatttatccgacaggcagaaatgaatcattatgctttgtttaaatgttacatgttcctaaagaactgtggtagtggagatatacttttgaagattgttaaagtggaacatgaagaaatgcctgaagccaaaaatgtgatagctgtccttgaagaattcatgaaagaagctcttgaccaaagtttttgatcatatgttttgagataattgtatgatcaagttgtatatttaagtcttagtgtttgaaattgcagttataattgttcataggattgctatttaagatgatttgaaactcaatccagattttctttttgtattttaccaatttaacttaaataaaaatctgaagaaca

SEQ ID NO: 373476 - DNA, 1627 bp, Homo sapiens
gagcggtttggcggagacacagggccgctcagaggccgccgcaatgctcccctctttgcaggagtcgatggatggagatgaaaaggaactagagagcagcgaagagggaggctcagccgaggagcggagactcgagccgccgtccagcagccactactgtctttacagctatcgcggaagcagattggcacagcaacgaggggacagtgaggacggaagcccaagtggcacaaatgcagaaactccctctggtgatgatttcagcctctccttggcagatactaatctaccatccgaagtggagccagagctgcgcagtttcattgctaagcgtctttcaagaggtgcagtctttgaagggctgggtaatgttgcatctgtggagctaaaaattccaggttaccgagttggttgttattactgccttttccaaaatgaaaaactgcttcctgaaacagtaacgatagactctgaacgtaacccttcagaatatgtggtctgttttttaggagggtctgaaaaaggacttgagcttttcaggcttgaattggacaagtacattcaagggctgaaaaataacatgaattgtgaggcaaggggcctggagagtcacataaaatcctatctgagcagctggtttgaggatgttgtatgcccaatccaaagggttgttcttctctttcaggaaaagcttacctttctgctacatgctgctttgagttacactcctgttgaagttaaagaatcagatgaaaaaacaaagagagacattaacaggtttctgagtgtggccagtcttcaaggacttattcatgaaggcaccatgacttctttgtgcatggccatgacagaggagcagcataagtctgtggtcatcgattgcagcagctcccagcctcagttctgcaatgcaggaagtaaccggttttgtgaggattggatgcaagcttttttaaatggtgccaaaggaggtaacccttttcttttccgacaagtactggagaactttaaactaaaggccatacaagacacaaacaatttgaagagatttatccgacaggcagaaatgaatcattatgctttgtttaaatgttacatgttcctaaagaactgtggtagtggagatatacttttgaagattgttaaagtggaacatgaagaaatgcctgaagccaaaaatgtgatagctgtccttgaagaattcatgaaagaagctcttgaccaaagtttttgatcatatgttttgagataattgtatgatcaagttgtatatttaagtcttagtgtttgaaattgcagttataattgttcataggattgctatttaagatgatttgaaactcaatccagattttctttttgtattttaccaatttaacttaaataaaaatctgaagaacatcttcactgagtcctagatagataatgtatgtgagagttgtgaaattttagtgtctcactggccccataaattccacgcttcaggaagttgttgcttaaaaaatttcagagatgattttgtttgtggcttttctcaggaaaagcctgagtttgctgcagtatttagcaacttttcttctcagaaaaaccataatacttccttttcagtggactgtagcttcttaaa

SEQ ID NO: 373477 - DNA, 1486 bp, Homo sapiens
cccggccgctcctaaaagccatcttctcctctcccagccaagattggcacagcaacgaggggacagtgaggacggaagcccaagtggcacaaatgcagaaactccctctggtgatgatttcagcctctccttggcagatactaatctaccatccgaagtggagccagagctgcgcagtttcattgctaagcgtctttcaagaggtgcagtctttgaagggctgggtaatgttgcatctgtggagctaaaaattccaggttaccgagttggttgttattactgccttttccaaaatgaaaaactgcttcctgaaacagtaacgatagactctgaacgtaacccttcagaatatgtggtctgttttttaggagggtctgaaaaaggacttgagcttttcaggcttgaattggacaagtacattcaagggctgaaaaataacatgaattgtgaggcaaggggcctggagagtcacataaaatcctatctgagcagctggtttgaggatgttgtatgcccaatccaaagggttgttcttctctttcaggaaaagcttacctttctgctacatgctgctttgagttacactcctgttgaagttaaagaatcagatgaaaaaacaaagagagacattaacaggtttctgagtgtggccagtcttcaaggacttattcatgaaggcaccatgacttctttgtgcatggccatgacagaggagcagcataagtctgtggtcatcgattgcagcagctcccagcctcagttctgcaatgcaggaagtaaccggttttgtgaggattggatgcaagcttttttaaatggtgccaaaggaggtaacccttttcttttccgacaagtactggagaactttaaactaaaggccatacaagacacaaacaatttgaagagatttatccgacaggcagaaatgaatcattatgctttgtttaaatgttacatgttcctaaagaactgtggtagtggagatatacttttgaagattgttaaagtggaacatgaagaaatgcctgaagccaaaaatgtgatagctgtccttgaagaattcatgaaagaagctcttgaccaaagtttttgatcatatgttttgagataattgtatgatcaagttgtatatttaagtcttagtgtttgaaattgcagttataattgttcataggattgctatttaagatgatttgaaactcaatccagattttctttttgtattttaccaatttaacttaaataaaaatctgaagaacatcttcactgagtcctagatagataatgtatgtgagagttgtgaaattttagtgtctcactggccccataaattccacgcttcaggaagttgttgcttaaaaaatttcagagatgattttgtttgtggcttttctcaggaaaagcctgagtttgctgcagtatttagcaacttttcttctcagaaaaaccataatacttccttttcagtggactgtagcttcttaaa

SEQ ID NO: 373478 - DNA, 1219 bp, Homo sapiens
agcggagggctgatctccgtctccgcccccagctgctttctccttcaggaaaaatctgtaatggggggcgggcccggagggctgtcggtgggcccgtctgcgtacgacggcccgtcccctgcgcacggacgccgggaagaagggggtggggccacgtttgcgtccgcgccatcaggcccgagatagcggcgaggtccgctttcagtgtatggttttccctgccaaacggttctgcttggtgccatccatggagggcgtgcgctgggccttttcctgcggcacttggctgccgagccgagccgaatggctgctggcagtgcgatcgattcagcccgaggagaaggagcgcattggccagttcgtctttgcccgggacgctaaggcagccatggctggtcgtctgatgataaggaaattagttgcagagaaattgaatatcccttggaatcatattcgtttgcaaagaactgcaaaaggaaaaccagttcttgcaaaggactcatcgaatccttacccgaatttcaactttaacatctctcatcaaggagactatgcagtgcttgctgctgaacctgagctgcaagttggaattgatataatgaagactagttttccaggtcgtggttcaattccagaattctttcatattatgaaaagaaagtttaccaacaaagaatgggaaacaatcagaagctttaaggatgagtggactcagctggatatgttttataggaattgggcacttaaggaaagcttcataaaagccattggtgttggactaggatttgaattgcagcggcttgaatttgatctatctccattaaacttggatataggccaagtttataaagaaacacgtttattcctggatggagaggaagaaaaagaatgggcatttgaggaaagcaaaatagatgagcaccattttgttgcagttgctcttaggaaacccgatggatctagacatcaggatgttccatctcaggatgattccaaaccaacccagaggcaatttactattctcaactttaatgatttaatgtcatctgccgttcccatgacacctgaagatccttcattttgggactgtttttgcttcacagaagaaattccaatacgaaatggtacaaagtcatgatgattccctgagtaacaaagggaaatgaaaactgtttgtgatcttccgtattcactgaaaaataaatgcttgtttagtatc

SEQ ID NO: 373479 - DNA, 1193 bp, Homo sapiens
cctgaaatcacagatagtactgaaccctatatatactgtgttttttgctatacgtacatacctatgataaagtttaatttataaatttgacatattaagagattaacaaccatgctactaataaaatagaacagttataacaatatccttttatcacataataaaagttaagtgaatgtagtctctttcaaaaatatcttattgtactattctcacctattgttggaccatggttcactgcaggtaactgaaactacggaaagcaagactccaactcaaaaaaaaaaaaaagaccacattgaaaagcataagaaacaaggaataccaagagaaaattgtatcactgaagctaaaagaggattttgagaaggaggaagtcataatttactcacttttttctgtgttagacattttgattatctgcagtttattactacaagcagtggcagagtgaatgtccttgtacattttgagttacatgcttaattatgtccttgagaaagtttctaaaagtggaatgattggtttgactggttcatagggctttaattatacaatttacccctctaattagtactatatgtatgtgacttccctccccctgccagaatactccttggtcaattgtaggtattctttttggtttaatttttgccaatgtaattaaaaaatggtatgtcatttttaaaatttgtatttctttcattacaaataagattgttatgtcagtattgttattggcttttcgtattcctcttaacgtgaaccgtctgttcattgtttttacctgttttcgttttagcaagtagtacttaatttaaagtgtgaacttaatatataagatgccaggaccatcatattgatgacaaaaatctattatgtggttgtagtgcatgtcttggagttaaactcttaagtatcaagaagtaaaataatttcattgtttctgttactaacattaaaagtgtgcaaattgtataaaattaggtacttcgattagtaaaagaaaaaaatttgaatgttttttttttttattttattaagcatgcccagttatgccaagcatagtaaataaaggtcaagtagcatttataatagaggaagtattgttatccctagcatgagtgtaatggtgatatgaaaaactttgtcttgtcattataataataaaaaaatgaacatttattatggaa

SEQ ID NO: 373480 - DNA, 688 bp, Homo sapiens
ctatttcatttttttttgatttgttgtattggcaacactaatataagaaatacaaacaatgttctaggaatcctatgttgtcatttaatactactgaaatgtaagttggtcttacttattttcatgattatgaaattgatcataagattaacatgcaatataacaataaggtaatctgcttttgtcttttaggttccatctcaggatgattccaaaccaacccagaggcaatttactattctcaactttaatgatttaatgtcatctgccgttcccatgacacctgaagatccttcattttgggactgtttttgcttcacagaagaaattccaatacgaaatggtacaaagtcatgatgattcccttcctgccctgcagtggcttggaaatagctgtgttcctcagcatcacagcttctgacatagccttctccatatatacatctcatgggttcaggaacaacttttccctgccttttcattttagaagtagaaagatcttgctcttgcttagcctaagctgctgcaccatctccatagatttttgttattcttgcctacaccctctttgatcattacttttggttgtgccatctgtttcctgctacaaccctgactaatacagtaatttgtaccatgagtagtcctgggaaagtggaattctggaattggattgctcacatatttg

SEQ ID NO: 373481 - DNA, 3222 bp, Homo sapiens
  misc_feature (2928)..(2928): n is a, c, g, or t
  misc_feature (2935)..(2936): n is a, c, g, or t
agcggagggctgatctccgtctccgcccccagctgctttctccttcaggaaaaatctgtaatggggggcgggcccggagggctgtcggtgggcccgtctgcgtacgacggcccgtcccctgcgcacggacgccgggaagaagggggtggggccacgtttgcgtccgcgccatcaggcccgagatagcggcgaggtccgctttcagtgtatggttttccctgccaaacggttctgcttggtgccatccatggagggcgtgcgctgggccttttcctgcggcacttggctgccgagccgagccgaatggctgctggcagtgcgatcgattcagcccgaggagaaggagcgcattggccagttcgtctttgcccgggacgctaaggcagccatggctggtcgtctgatgataaggaaattagttgcagagaaattgaatatcccttggaatcatattcgtttgcaaagaactgcaaaaggaaaaccagttcttgcaaaggactcatcgaatccttacccgaatttcaactttaacatctctcatcaaggagactatgcagtgcttgctgctgaacctgagctgcaagttggaattgatataatgaagactagttttccaggtcgtggttcaattccagaattctttcatattatgaaaagaaagtttaccaacaaagaatgggaaacaatcagaagctttaaggatgagtggactcagctggatatgttttataggaattgggcacttaaggaaagcttcataaaagccattggtgttggactaggatttgaattgcagcggcttgaatttgatctatctccattaaacttggatataggccaagtttataaagaaacacgtttattcctggatggagaggaagaaaaagaatgggcatttgaggaaagcaaaatagatgagcaccattttgttgcagttgctcttaggaaacccgatggatctagacatcaggatgttccatctcaggatgattccaaaccaacccagaggcaatttactattctcaactttaatgatttaatgtcatctgccgttcccatgacacctgaagatccttcattttgggactgtttttgcttcacagaagaaattccaatacgaaatggtacaaagtcatgatgattccctgagtaacaaagggaaatgaaaactgtttgtgatcttccgtattcactgaaaaataaatgcttgtttagtatcaaattttatttcacgaaagtttttttaaagaacagaaacttttccaattaaaaaaaaaaagcagacttctggttcaagatagctcactggaatacatgtttacctctttctttcctaaattgcattgaattgataggaaggatggcggaatcttaaagtgatacatgctaactgtagaaaaaaatagaaaatgcacataagcaaaaggaaacatttaaatgctatctttcaaagataactactcttaaaaccttgagtatcttttcagacctttttcttggcaaatgaatccatattgacatatttgatttttttaaaaacatggaaacgtactgttttgtaaattctttttaactgcacatctactgttcataaatatacctctgtaacataactttttgtggttctaatgtactctgttgtatagctaatacaagttaggatgcttttggccagaggtaacagtgtccaaatataattggcctaagtaacctaggaaattgtttgacataacacagggttcaggggtgtcattaaagacacactttttttgccttgacctcagttggtttgttttgccttaggctattccacctctcgatcacaagagctgctgctataacttccagttttacatctttgtaaaattgtatctcaaaggcagaaaaggccatttcgtctctcatttgttttatccatgaggaagatttttaacaaaagcctccagaagatttcccctcagtttccattgacttagatcaggttacagagaaaggcaatgtctgacatttttggtctctgttagaagtagactctgttgaaaagaaagaagctaagctaggtgtgaagaatggaattggaagcccactgccttcccataagaaaggtttaccataatttactcacttttttctgtgttagacattttgattatctgcagtttattactacaagcagtggcagagtgaatgtccttgtacattttgagttacatgcttaattatgtccttgagaaagtttctaaaagtggaatgattggtttgactggttcatagggctttaattatacaatttacccctctaattagtactatatgtatgtgacttccctccccctgccagaatactccttggtcaattgtaggtattctttttggtttaatttttgccaatgtaattaaaaaatggtatgtcatttttaaaatttgtatttctttcattacaaataagattgttatgtcagtattgttattggcttttcgtattcctcttaacgtgaaccgtctgttcattgtttttacctgttttcgttttagcaagtagtacttaatttaaagtgtgaacttaatatataagatgccaggaccatcatattgatgacaaaaatctattatgtggttgtagtgcatgtcttggagttaaactcttaagtatcaagaagtaaaataatttcattgtttctgttactaacattaaaagtgtgcaaattgtataaaattaggtacttcgattagtaaaagaaaaaaatttgaatgttttttttttttattttattaagcatgcccagttatgccaagcatagtaaataaaggtcaagtagcatttataatagaggaagtattgttatccctagcatgagtgtaatggtgatatgaaaaactttgtcttgtcattataataataaaaaaatgaacatttattatggaaanaaacacnnacaaagacaccgacagaacccaccagacaaaagagacaaaacacaacagcgaaccaccaaagaggcgcaacaaacaaacacagcaaaaaagaaaaagaaaagtagaacagggaggcgaagacaaaacacgcaagaaagaaaacacaagaggcggggccgggcgccccgcacgaaaatagagcatcaaaacaaccgttgacaggggcgcgcgcgaccaaagatagcagcaagactcgtctcaagaacaacgagcgaggaaggaagagaggggaacacacaacaaagg

SEQ ID NO: 373482 - DNA, 764 bp, Homo sapiens
  misc_feature (701)..(702): n is a, c, g, or t
  misc_feature (717)..(717): n is a, c, g, or t
agcggagggctgatctccgtctccgcccccagctgctttctccttcaggaaaaatctgtaatggggggcgggcccggagggctgtcggtgggcccgtctgcgtacgacggcccgtcccctgcgcacggacgccgggaagaagggggtggggccacgtttgcgtccgcgccatcaggcccgagatagcggcgaggtccgctttcagtgtatggttttccctgccaaacggttctgcttggtgccatccatggagggcgtgcgctgggccttttcctgcggcacttggctgccgagccgagccgaatggctgctggcagtgcgatcgattcagcccgaggagaaggagcgcattggccagttcgtctttgcccgggacgctaaggcagccatggctggtcgtctgatgataaggaaattagttgcagagaaattgaatatcccttggaatcatattcgtttgcaaagaactgcaaaaggaaaaccagttcttgcaaaggactcatcgaatccttacccgaatttcaactttaacatctctcatcaaggagactatgcagtgcttgctgctgaacctgagctgcaagttggaattgatataatgaagactagttttccagcgtggttcaattccagaattctttcatattaatgaagaagttacacaagatggacatcagagcttaggatgagtgctcagctgnngttaagatggcctangaagctcataagcatgtgtgactagattgaatgcgcgctgactgtct

SEQ ID NO: 373483 - DNA, 2926 bp, Homo sapiens
agcggagggctgatctccgtctccgcccccagctgctttctccttcaggaaaaatctgtaatggggggcgggcccggagggctgtcggtgggcccgtctgcgtacgacggcccgtcccctgcgcacggacgccgggaagaagggggtggggccacgtttgcgtccgcgccatcaggcccgagatagcggcgaggtccgctttcagtgtatggttttccctgccaaacggttctgcttggtgccatccatggagggcgtgcgctgggccttttcctgcggcacttggctgccgagccgagccgaatggctgctggcagtgcgatcgattcagcccgaggagaaggagcgcattggccagttcgtctttgcccgggacgctaaggcagccatggctggtcgtctgatgataaggaaattagttgcagagaaattgaatatcccttggaatcatattcgtttgcaaagaactgcaaaaggaaaaccagttcttgcaaaggactcatcgaatccttacccgaatttcaactttaacatctctcatcaaggagactatgcagtgcttgctgctgaacctgagctgcaagttggaattgatataatgaagactagttttccaggtcgtggttcaattccagaattctttcatattatgaaaagaaagtttaccaacaaagaatgggaaacaatcagaagctttaaggatgagtggactcagctggatatgttttataggaattgggcacttaaggaaagcttcataaaagccattggtgttggactaggatttgaattgcagcggcttgaatttgatctatctccattaaacttggatataggccaagtttataaagaaacacgtttattcctggatggagaggaagaaaaagaatgggcatttgaggaaagcaaaatagatgagcaccattttgttgcagttgctcttaggaaacccgatggatctagacatcaggatgttccatctcaggatgattccaaaccaacccagaggcaatttactattctcaactttaatgatttaatgtcatctgccgttcccatgacacctgaagatccttcattttgggactgtttttgcttcacagaagaaattccaatacgaaatggtacaaagtcatgatgattccctgagtaacaaagggaaatgaaaactgtttgtgatcttccgtattcactgaaaaataaatgcttgtttagtatcaaattttatttcacgaaagtttttttaaagaacagaaacttttccaattaaaaaaaaaaagcagacttctggttcaagatagctcactggaatacatgtttacctctttctttcctaaattgcattgaattgataggaaggatggcggaatcttaaagtgatacatgctaactgtagaaaaaaatagaaaatgcacataagcaaaaggaaacatttaaatgctatctttcaaagataactactcttaaaaccttgagtatcttttcagacctttttcttggcaaatgaatccatattgacatatttgatttttttaaaaacatggaaacgtactgttttgtaaattctttttaactgcacatctactgttcataaatatacctctgtaacataactttttgtggttctaatgtactctgttgtatagctaatacaagttaggatgcttttggccagaggtaacagtgtccaaatataattggcctaagtaacctaggaaattgtttgacataacacagggttcaggggtgtcattaaagacacactttttttgccttgacctcagttggtttgttttgccttaggctattccacctctcgatcacaagagctgctgctataacttccagttttacatctttgtaaaattgtatctcaaaggcagaaaaggccatttcgtctctcatttgttttatccatgaggaagatttttaacaaaagcctccagaagatttcccctcagtttccattgacttagatcaggttacagagaaaggcaatgtctgacatttttggtctctgttagaagtagactctgttgaaaagaaagaagctaagctaggtgtgaagaatggaattggaagcccactgccttcccataagaaaggtttaccataatttactcacttttttctgtgttagacattttgattatctgcagtttattactacaagcagtggcagagtgaatgtccttgtacattttgagttacatgcttaattatgtccttgagaaagtttctaaaagtggaatgattggtttgactggttcatagggctttaattatacaatttacccctctaattagtactatatgtatgtgacttccctccccctgccagaatactccttggtcaattgtaggtattctttttggtttaatttttgccaatgtaattaaaaaatggtatgtcatttttaaaatttgtatttctttcattacaaataagattgttatgtcagtattgttattggcttttcgtattcctcttaacgtgaaccgtctgttcattgtttttacctgttttcgttttagcaagtagtacttaatttaaagtgtgaacttaatatataagatgccaggaccatcatattgatgacaaaaatctattatgtggttgtagtgcatgtcttggagttaaactcttaagtatcaagaagtaaaataatttcattgtttctgttactaacattaaaagtgtgcaaattgtataaaattaggtacttcgattagtaaaagaaaaaaatttgaatgttttttttttttattttattaagcatgcccagttatgccaagcatagtaaataaaggtcaagtagcatttataatagaggaagtattgttatccctagcatgagtgtaatggtgatatgaaaaactttgtcttgtcattataataataaaaaaatgaacatttattatggaa

SEQ ID NO: 373484 - DNA, 2950 bp, Homo sapiens
agcggagggctgatctccgtctccgcccccagctgctttctccttcaggaaaaatctgtaatggggggcgggcccggagggctgtcggtgggcccgtctgcgtacgacggcccgtcccctgcgcacggacgccgggaagaagggggtggggccacgtttgcgtccgcgccatcaggcccgagatagcggcgaggtccgctttcagtgtatggttttccctgccaaacggttctgcttggtgccatccatggagggcgtgcgctgggccttttcctgcggcacttggctgccgagccgagccgaatggctgctggcagtgcgatcgattcagcccgaggagaaggagcgcattggccagttcgtctttgcccgggacgctaaggcagccatggctggtcgtctgatgataaggaaattagttgcagagaaattgaatatcccttggaatcatattcgtttgcaaagaactgcaaaaggaaaaccagttcttgcaaaggactcatcgaatccttacccgaatttcaactttaacatctctcatcaaggagactatgcagtgcttgctgctgaacctgagctgcaagttggaattgatataatgaagactagttttccaggtcgtggttcaattccagaattctttcatattatgaaaagaaagtttaccaacaaagaatgggaaacaatcagaagctttaaggatgagtggactcagctggatatgttttataggaattgggcacttaaggaaagcttcataaaagccattggtgttggactaggatttgaattgcagcggcttgaatttgatctatctccattaaacttggatataggccaagtttataaagaaacacgtttattcctggatggagaggaagaaaaagaatgggcatttgaggaaagcaaaatagatgagcaccattttgttgcagttgctcttaggaaacccgatggatctagacatcaggatgttccatctcaggatgattccaaaccaacccagaggcaatttactattctcaactttaatgatttaatgtcatctgccgttcccatgacacctgaagatccttcattttgggactgtttttgcttcacagaagaaattccaatacgaaatggtacaaagtcatgatgattccctgagtaacaaagggaaatgaaaactgtttgtgatcttccgtattcactgaaaaataaatgcttgtttagtatcaaattttatttcacgaaagtttttttaaagaacagaaacttttccaattaaaaaaaaaaagcagacttctggttcaagatagctcactggaatacatgtttacctctttctttcctaaattgcattgaattgataggaaggatggcggaatcttaaagtgatacatgctaactgtagaaaaaaatagaaaatgcacataagcaaaaggaaacatttaaatgctatctttcaaagataactactcttaaaaccttgagtatcttttcagacctttttcttggcaaatgaatccatattgacatatttgatttttttaaaaacatggaaacgtactgttttgtaaattctttttaactgcacatctactgttcataaatatacctctgtaacataactttttgtggttctaatgtactctgttgtatagctaatacaagttaggatgcttttggccagaggtaacagtgtccaaatataattggcctaagtaacctaggaaattgtttgacataacacagggttcaggggtgtcattaaagacacactttttttgccttgacctcagttggtttgttttgccttaggctattccacctctcgatcacaagagctgctgctataacttccagttttacatctttgtaaaattgtatctcaaaggcagaaaaggccatttcgtctctcatttgttttatccatgaggaagatttttaacaaaagcctccagaagatttcccctcagtttccattgacttagatcaggttacagagaaaggcaatgtctgacatttttggtctctgttagaagtagactctgttgaaaagaaagaagctaagctaggtgtgaagaatggaattggaagcccactgccttcccataagaaaggtttaccataatttactcacttttttctgtgttagacattttgattatctgcagtttattactacaagcagtggcagagtgaatgtccttgtacattttgagttacatgcttaattatgtccttgagaaagtttctaaaagtggaatgattggtttgactggttcatagggctttaattatacaatttacccctctaattagtactatatgtatgtgacttccctccccctgccagaatactccttggtcaattgtaggtattctttttggtttaatttttgccaatgtaattaaaaaatggtatgtcatttttaaaatttgtatttctttcattacaaataagattgttatgtcagtattgttattggcttttcgtattcctcttaacgtgaaccgtctgttcattgtttttacctgttttcgttttagcaagtagtacttaatttaaagtgtgaacttaatatataagatgccaggaccatcatattgatgacaaaaatctattatgtggttgtagtgcatgtcttggagttaaactcttaagtatcaagaagtaaaataatttcattgtttctgttactaacattaaaagtgtgcaaattgtataaaattaggtacttcgattagtaaaagaaaaaaatttgaatgttttttttttttattttattaagcatgcccagttatgccaagcatagtaaataaaggtcaagtagcatttataatagaggaagtattgttatccctagcatgagtgtaatggtgatatgaaaaactttgtcttgtcattataataataaaaaaatgaacatttattatggaatttctatgagcctgaaaaaaagtt

SEQ ID NO: 373485 - DNA, 2872 bp, Homo sapiens
agcggagggctgatctccgtctccgcccccagctgctttctccttcaggaaaaatctgtaatggggggcgggcccggagggctgtcggtgggcccgtctgcgtacgacggcccgtcccctgcgcacggacgccgggaagaagggggtggggccacgtttgcgtccgcgccatcaggcccgagatagcggcgaggtccgctttcagtgtatggttttccctgccaaacggttctgcttggtgccatccatggagggcgtgcgctgggccttttcctgcggcacttggctgccgagccgagccgaatggctgctggcagtgcgatcgattcagcccgaggagaaggagcgcattggccagttcgtctttgcccgggacgctaaggcagccatggctggtcgtctgatgataaggaaattagttgcagagaaattgaatatcccttggaatcatattcgtttgcaaagaactgcaaaaggaatctctcatcaaggagactatgcagtgcttgctgctgaacctgagctgcaagttggaattgatataatgaagactagttttccaggtcgtggttcaattccagaattctttcatattatgaaaagaaagtttaccaacaaagaatgggaaacaatcagaagctttaaggatgagtggactcagctggatatgttttataggaattgggcacttaaggaaagcttcataaaagccattggtgttggactaggatttgaattgcagcggcttgaatttgatctatctccattaaacttggatataggccaagtttataaagaaacacgtttattcctggatggagaggaagaaaaagaatgggcatttgaggaaagcaaaatagatgagcaccattttgttgcagttgctcttaggaaacccgatggatctagacatcaggatgttccatctcaggatgattccaaaccaacccagaggcaatttactattctcaactttaatgatttaatgtcatctgccgttcccatgacacctgaagatccttcattttgggactgtttttgcttcacagaagaaattccaatacgaaatggtacaaagtcatgatgattccctgagtaacaaagggaaatgaaaactgtttgtgatcttccgtattcactgaaaaataaatgcttgtttagtatcaaattttatttcacgaaagtttttttaaagaacagaaacttttccaattaaaaaaaaaaagcagacttctggttcaagatagctcactggaatacatgtttacctctttctttcctaaattgcattgaattgataggaaggatggcggaatcttaaagtgatacatgctaactgtagaaaaaaatagaaaatgcacataagcaaaaggaaacatttaaatgctatctttcaaagataactactcttaaaaccttgagtatcttttcagacctttttcttggcaaatgaatccatattgacatatttgatttttttaaaaacatggaaacgtactgttttgtaaattctttttaactgcacatctactgttcataaatatacctctgtaacataactttttgtggttctaatgtactctgttgtatagctaatacaagttaggatgcttttggccagaggtaacagtgtccaaatataattggcctaagtaacctaggaaattgtttgacataacacagggttcaggggtgtcattaaagacacactttttttgccttgacctcagttggtttgttttgccttaggctattccacctctcgatcacaagagctgctgctataacttccagttttacatctttgtaaaattgtatctcaaaggcagaaaaggccatttcgtctctcatttgttttatccatgaggaagatttttaacaaaagcctccagaagatttcccctcagtttccattgacttagatcaggttacagagaaaggcaatgtctgacatttttggtctctgttagaagtagactctgttgaaaagaaagaagctaagctaggtgtgaagaatggaattggaagcccactgccttcccataagaaaggtttaccataatttactcacttttttctgtgttagacattttgattatctgcagtttattactacaagcagtggcagagtgaatgtccttgtacattttgagttacatgcttaattatgtccttgagaaagtttctaaaagtggaatgattggtttgactggttcatagggctttaattatacaatttacccctctaattagtactatatgtatgtgacttccctccccctgccagaatactccttggtcaattgtaggtattctttttggtttaatttttgccaatgtaattaaaaaatggtatgtcatttttaaaatttgtatttctttcattacaaataagattgttatgtcagtattgttattggcttttcgtattcctcttaacgtgaaccgtctgttcattgtttttacctgttttcgttttagcaagtagtacttaatttaaagtgtgaacttaatatataagatgccaggaccatcatattgatgacaaaaatctattatgtggttgtagtgcatgtcttggagttaaactcttaagtatcaagaagtaaaataatttcattgtttctgttactaacattaaaagtgtgcaaattgtataaaattaggtacttcgattagtaaaagaaaaaaatttgaatgttttttttttttattttattaagcatgcccagttatgccaagcatagtaaataaaggtcaagtagcatttataatagaggaagtattgttatccctagcatgagtgtaatggtgatatgaaaaactttgtcttgtcattataataataaaaaaatgaacatttattatggaa

SEQ ID NO: 373486 - DNA, 2804 bp, Homo sapiens
agcggagggctgatctccgtctccgcccccagctgctttctccttcaggaaaaatctgtaatggggggcgggcccggagggctgtcggtgggcccgtctgcgtacgacggcccgtcccctgcgcacggacgccgggaagaagggggtggggccacgtttgcgtccgcgccatcaggcccgagatagcggcgaggtccgctttcagtgtatggttttccctgccaaacggttctgcttggtgccatccatggagggcgtgcgctgggccttttcctgcggcacttggctgccgagccgagccgaatggctgctggcagtgcgatcgattcagcccgaggagaaggagcgcattggccagttcgtctttgcccgggacgctaaggcagccatggctggtcgtctgatgataaggaaattagttgcagagaaattgaatatcccttggaatcatattcgtttgcaaagaactgcaaaaggaaaaccagttcttgcaaaggactcatcgaatccttacccgaatttcaactttaacatctctcatcaaggagactatgcagtgcttgctgctgaacctgagctgcaagttggaattgatataatgaagactagttttccaggcacttaaggaaagcttcataaaagccattggtgttggactaggatttgaattgcagcggcttgaatttgatctatctccattaaacttggatataggccaagtttataaagaaacacgtttattcctggatggagaggaagaaaaagaatgggcatttgaggaaagcaaaatagatgagcaccattttgttgcagttgctcttaggaaacccgatggatctagacatcaggatgttccatctcaggatgattccaaaccaacccagaggcaatttactattctcaactttaatgatttaatgtcatctgccgttcccatgacacctgaagatccttcattttgggactgtttttgcttcacagaagaaattccaatacgaaatggtacaaagtcatgatgattccctgagtaacaaagggaaatgaaaactgtttgtgatcttccgtattcactgaaaaataaatgcttgtttagtatcaaattttatttcacgaaagtttttttaaagaacagaaacttttccaattaaaaaaaaaaagcagacttctggttcaagatagctcactggaatacatgtttacctctttctttcctaaattgcattgaattgataggaaggatggcggaatcttaaagtgatacatgctaactgtagaaaaaaatagaaaatgcacataagcaaaaggaaacatttaaatgctatctttcaaagataactactcttaaaaccttgagtatcttttcagacctttttcttggcaaatgaatccatattgacatatttgatttttttaaaaacatggaaacgtactgttttgtaaattctttttaactgcacatctactgttcataaatatacctctgtaacataactttttgtggttctaatgtactctgttgtatagctaatacaagttaggatgcttttggccagaggtaacagtgtccaaatataattggcctaagtaacctaggaaattgtttgacataacacagggttcaggggtgtcattaaagacacactttttttgccttgacctcagttggtttgttttgccttaggctattccacctctcgatcacaagagctgctgctataacttccagttttacatctttgtaaaattgtatctcaaaggcagaaaaggccatttcgtctctcatttgttttatccatgaggaagatttttaacaaaagcctccagaagatttcccctcagtttccattgacttagatcaggttacagagaaaggcaatgtctgacatttttggtctctgttagaagtagactctgttgaaaagaaagaagctaagctaggtgtgaagaatggaattggaagcccactgccttcccataagaaaggtttaccataatttactcacttttttctgtgttagacattttgattatctgcagtttattactacaagcagtggcagagtgaatgtccttgtacattttgagttacatgcttaattatgtccttgagaaagtttctaaaagtggaatgattggtttgactggttcatagggctttaattatacaatttacccctctaattagtactatatgtatgtgacttccctccccctgccagaatactccttggtcaattgtaggtattctttttggtttaatttttgccaatgtaattaaaaaatggtatgtcatttttaaaatttgtatttctttcattacaaataagattgttatgtcagtattgttattggcttttcgtattcctcttaacgtgaaccgtctgttcattgtttttacctgttttcgttttagcaagtagtacttaatttaaagtgtgaacttaatatataagatgccaggaccatcatattgatgacaaaaatctattatgtggttgtagtgcatgtcttggagttaaactcttaagtatcaagaagtaaaataatttcattgtttctgttactaacattaaaagtgtgcaaattgtataaaattaggtacttcgattagtaaaagaaaaaaatttgaatgttttttttttttattttattaagcatgcccagttatgccaagcatagtaaataaaggtcaagtagcatttataatagaggaagtattgttatccctagcatgagtgtaatggtgatatgaaaaactttgtcttgtcattataataataaaaaaatgaacatttattatggaa

SEQ ID NO: 373487 - DNA, 413 bp, Homo sapiens
tcccagcactttgggaggccgaggcgggcagatcacgaggtcaggagatcgagaccatcctggctaacacggtgaaaccctgtctctactaaaaatacaaaaaattagccaggtgtggtggcaggcacctgtagtcccagctactcgggaggctgaggcaggagaattgcttgaacccaggaggcggaggttgcagtgagccgagatcacgccactacactctagcctgggcgacagagcgagactccatctcaaaaaaaaaaaaaagagaaaacgttgaatgatagttcccttaaaataggtgtatccatctcctcaatgcatctccttcttcaacagtaataatctttcttttcctcttttttatttttcaatcttttttagagacagggtctcactttgttgcccaggct

SEQ ID NO: 373488 - DNA, 914 bp, Homo sapiens
  misc_feature (2)..(2): n is a, c, g, or t
  misc_feature (4)..(4): n is a, c, g, or t
gngnttttttttttttgtcttttggtttctgtcagtagaaataaccatatgtgctaaccaaatttctgtgaagaatgttttcatggttatcattatatctaactataacctcccccatagttatgaagagtaacctgaaatgccactattgtggaaataggataattgtaattgtgaaaaaataattttaaggaaatcttacaagtattacattaaaaagatactatgactgccacctgccatttaccttctaataaccctgccatgtggtttgcagaaagagatggatatagtagcctcagaagaaatattttatgtgggttttttgtttttcgttactagatttcatggatgaggggatatggttgaccttttactttttaatggagcagccagtttttgttaattactcacttgtaaattgtgagattctgaattccttacctgctattcttgtacttgtctcaggccaaatctatgctgtggttcttatgagacttgtatgaagatgccctgatttgtacagattgaccacgggaatactactgccatgtaatctgtatagttccagataatttgtcatgaacattgacagaatgacaattttttgtatttgctttttctccctttaagagcacattcttctgtaaggagaaaggcagcattctggctaaaatgtgtagaaggtaatttactacacttataaaatagtgtgacttttgtgaaaattttgaattagctttcatatgaagtgccttaagtagactcttcatttacttttctggtaatggtttaaatatcatttgttatgcatttttaagatacagttcagaatgacacattgtagtggcaaagataaccaaatgtctggctgtttgctttttgaccatatcaataaacttttacaatctaaa

SEQ ID NO: 373489 - DNA, 1038 bp, Homo sapiens
  misc_feature (2)..(2): n is a, c, g, or t
  misc_feature (4)..(4): n is a, c, g, or t
  misc_feature (925)..(926): n is a, c, g, or t
  misc_feature (929)..(929): n is a, c, g, or t
  misc_feature (936)..(937): n is a, c, g, or t
  misc_feature (942)..(942): n is a, c, g, or t
  misc_feature (945)..(945): n is a, c, g, or t
  misc_feature (957)..(959): n is a, c, g, or t
  misc_feature (977)..(977): n is a, c, g, or t
  misc_feature (980)..(980): n is a, c, g, or t
  misc_feature (982)..(982): n is a, c, g, or t
  misc_feature (985)..(985): n is a, c, g, or t
  misc_feature (988)..(988): n is a, c, g, or t
gngnttttttttttttgtcttttggtttctgtcagtagaaataaccatatgtgctaaccaaatttctgtgaagaatgttttcatggttatcattatatctaactataacctcccccatagttatgaagagtaacctgaaatgccactattgtggaaataggataattgtaattgtgaaaaaataattttaaggaaatcttacaagtattacattaaaaagatactatgactgccacctgccatttaccttctaataaccctgccatgtggtttgcagaaagagatggatatagtagcctcagaagaaatattttatgtgggttttttgtttttcgttactagatttcatggatgaggggatatggttgaccttttactttttaatggagcagccagtttttgttaattactcacttgtaaattgtgagattctgaattccttacctgctattcttgtacttgtctcaggccaaatctatgctgtggttcttatgagacttgtatgaagatgccctgatttgtacagattgaccacgggaatactactgccatgtaatctgtatagttccagataatttgtcatgaacattgacagaatgacaattttttgtatttgctttttctccctttaagagcacattcttctgtaaggagaaaggcagcattctggctaaaatgtgtagaaggtaatttactacacttataaaatagtgtgacttttgtgaaaattttgaattagctttcatatgaagtgccttaagtagactcttcatttacttttctggtaatggtttaaatatcatttgttatgcatttttaagatacagttcagaatgacacattgtagtggcaaagataaccaaatgtctggctgtttgctttttgaccatatcaataaacttttacaatctaaaaaaaaaaaaannaanaaaaaanntttgnggngcggccggcccnnnaaaaagttttaaaccctnctntnggngcncgggccccgtgggttttgcacacggggcaagggggccccaggaacaccgg

SEQ ID NO: 373490 - DNA, 1291 bp, Homo sapiens
  misc_feature (2)..(2): n is a, c, g, or t
  misc_feature (4)..(4): n is a, c, g, or t
gngnttttttttttttgtcttttggtttctgtcagtagaaataaccatatgtgctaaccaaatttctgtgaagaatgttttcatggttatcattatatctaactataacctcccccatagttatgaagagtaacctgaaatgccactattgtggaaataggataattgtaattgtgaaaaaataattttaaggaaatcttacaagtattacattaaaaagatactatgactgccacctgccatttaccttctaataaccctgccatgtggtttgcagaaagagatggatatagtagcctcagaagaaatattttatgtgggttttttgtttttcgttactagatttcatggatgaggggatatggttgaccttttactttttaatggagcagccagtttttgttaattactcacttgtaaattgtgagattctgaattccttacctgctattcttgtacttgtctcaggccaaatctatgctgtggttcttatgagacttgtatgaagatgccctgatttgtacagattgaccacgggaatactactgccatgtaatctgtatagttccagataatttgtcatgaacattgacagaatgacaattttttgtatttgctttttctccctttaagagcacattcttctgtaaggagaaaggcagcattctggctaaaatgtgtagaaggtaatttactacacttataaaatagtgtgacttttgtgaaaattttgaattagctttcatatgaagtgccttaagtagactcttcatttacttttctggtaatggtttaaatatcatttgttatgcatttttaagatacagttcagaatgacacattgtagtggcaaagataaccaaatgtctggctgtttgctttttgaccatatcaataaacttttacaatctaaaaaaaaaaaaaagagtacaaaacaaaaacaacaaaaaatacaagaaaagacaaagaaaaggcacacaaaaagaacacacacggcacagcagcaaacaagaaagaaacacacgaaaaaacttggggggggggcgcgcctccacgtagagatggtctacaaaacaaactgtggggggggcccagcacacagaatatgaaagaacgacgaggtggcgcacaggtgttcttacaaagaaaccactcggctcaaaagaggggagcggtgtcgcccacaaaaaaaaaagcgcgcggcacacaggcgtgtgtgacagcaccagaggggtgcgggaatcaggaagtaacaggaggcaccagggcataaaaatacacggggggggcg

SEQ ID NO: 373491 - DNA, 275 bp, Homo sapiens
taatgcaatccatggaaatggacacacatatcaaattccactgcctcaaaccccaaatgactaagtgctggaatgccacgacatcccaaactgcttgaaataaatgggccatcagctgaggttagagaaaccttttttttaattatacagcaaaacgtctcaaaaaatatgtttgatccagagtggtggatcatagcaaaagcacattgaatgaatatgttcatgtccctgtcactatttaacttagcggggcctgcctgcagggtctaaggagt

SEQ ID NO: 373492 - DNA, 276 bp, Homo sapiens
actcttgtggtgacatctgtattttgtcatgttctgtactactaacgtagactttgataatagaagataacagtgaacagacctaagatgtgtaattaactgcttgctcctggagattattttaccttggtagaatagagaccttcatgagactcactccatccaatgctgtgctcttcagatgcagaaaagagtccaagtctctcctttgggccacaagagggcaccctgcagctagctaaccctccccttcttcagaacagcgttttccaaaga

SEQ ID NO: 373493 - DNA, 303 bp, Homo sapiens
tggcgagaatgtggaaaaaccagaaccctcatgagttgctggagagaatgtaaaattgtacagtcactataggaaaccatagagtggttcctcaaaaagttaaacactgaattaccatatgatgcagcaatcccactactgggtatacactgaaaaaaaattagaagcagggactcaaatatttggcttttttggttgtttttcttgtttttttgagatggagttttgctctgttgcccagggtagagtgcagtggctccatctctgctcactgtagcatcagcctcctgagttcaagcaatt

SEQ ID NO: 373494 - DNA, 216 bp, Homo sapiens
tgtgccaccacacatggctaattttttgtattttaaatagagacagggtttttaccatgttggccaggctggtctcaaactcctggcctcaagtgatccacccacctcagcctcccaaagtgctgggattacaggtgtgagccaccacacctggcctcatcctatttttaaaataaaataatttatttagaattcaaagaaagagtcttaacaact

SEQ ID NO: 373495 - DNA, 369 bp, Homo sapiens
caccgcagcagtggcccaagtgtttgaacggggcaacatgaactcagagcctgaggaagaggacggaggtttggaagatgaggacggggatgatgaagttgcagaggtggctgagaaagaaacccaggctgcttcaaaatattttcatgtgcagaaagtagctcgccaagatcccagagtggcacccatgtccaatctacttccagcaccagggctcccaccacatggacaacaagctaaagaagaccataccaaagatgcttccaaggcctcatcttctgtctccacagcaggacagctgaactggaatctggatgagcagctcaagcagaatggtggtttggcctggagtgatgatgcagatggagg

SEQ ID NO: 373496 - DNA, 817 bp, Homo sapiens
aaacacacacacattgggttggcttttattggaatgcctaggtgcaatctatagtcatcaagttatggaaaattcaggtcacatataaagttaagaaggcaaatgaaaagaacaatacaaatcagacaaaatttacatctcaaaatatcatgaaagcattttgactggctttgcctaaaatactttgaatatcaatttcttttttgtaagctaattcttttcattatacagtcccccaccccctcccaactcttagaaaaaggtcttttgtttacatattccccaaggtcactatttcttgtaaaagcatgtccagatcacaagtctttttagaaagaaataggctcattatacctactaacaggacactaattgggttgatttgacttcatcatctaaaataagcaccaggagatactccaaatctgttatttatcggtgcccgagtgaagaccagtccacgtcaagaagaggttaagactatgatctcacttctgtcatgtggcacaagcttttcatggtaatacatcagaaacatgtctgagaatttagactcagagcctatttcacccaaaagtacttacagcatgctaaatacaggcctgcagaagttccacggaacaggaactgcaaatacctaacagttaaaaaataaaatggaaaacagaatcatgtttatgtggtttgaaatctcatagttttctaaatttgggcttcataatacttgccaaggatttccgaattaaaaattttttgccatctgggttctcctataaaaatatcggtctttaaaattatatggttgctcaccataaag

SEQ ID NO: 373497 - DNA, 1084 bp, Homo sapiens
agacagccagatgaagcagcaatttgagggtagtaactggtgatgacaaagcccttctcaattttactttattaacttagccaaggcttagttcctgttttgcagcctgatggaaatttaatagatcatttgaagtatgtaatcacctgacatgctaagtgtctgtgtgtgccggagacacagaatggcaacctaaccccaccctgtccttgtctaggaaacacgctggagaagaaaggtggcaaggagtttgtggaagctgtcctggaactccggaaaaagaacgggcccttggaagtagctggagggtgaggtgggaaagccaccgtgcttatctggttgtgacacatgcagtattaggaaagccattttgtgagagggcttagaattcagaggtgtgtggcagcacagccgcatcttcaagatggaggccaaggacagcctgtagctttacatcttagagtttcaccacatgcaggttgtctgggaaaatcacctttgcatttttttttattacttaaaatagctcctatatgtttgatgtctagatcacaaattttaagaaattataggagctgagtttggtacatctaagagctgagagtgagtgatactgagccatctgcaaaactgctggtgagagatacaaattaaaaatcttcagccatctgtgtgtgtaagaggaaacatataaatacacatttctcatttgccaattacaccttccctggtataaggggaagaaaacgacttggcatctgatgtggggagaattattgctaagacctggaggcagggtacttcttactgcttcaggcctgaatttaggtggtcatttggggtgtgcaggacagagcacctcctaaggacctgagagtccagtcagtggggaggcccagctcccccaccaactgtgtgaggacagatcacccacttcctcacttggggctctggttttctcttcttactacccgattccaatgcctattgtgtcttttaaatcctctgttttaaaaatgaatcttaagctctctcggagggtccaccaggccgtgcacctctattcccagtgacaaatgacacc

SEQ ID NO: 373498 - DNA, 1476 bp, Homo sapiens
aatactgttctctgggttttcaagagaaatcccttgaaggtagacaaaatggtaaatgtcacaagaataaaaatcaaagcctgcaagttgactgctgcagacagaatggagaaacttgttgttttggttggcctgatggtccactttttttttttttaaacagatgccatgttttagtagccttctcagtgggatgccagctttataggcttttgcgaagtgaaacggggcattcattttatttcttttaacctttggaaatgatctcatgtgtgtgtttctctttttttggacttctcattcaaatgtttaatttaaacatgtcacatttgatattcctcctcctcctgtcctcacccccatccacatgtgcgcacactgcgtggactgattgccccttgggctcatatgttggaatcgaccaggtaggccagccctgccattggggcattagtaaatgtgcctgtgcgtgggtctcggtccaacacagttgatatacatttgtttacctgttatagttgcaagttgtacaggctgacattgcctcgatcgacagtgatgctgtcgttcacccgacaaacactgacttctacatcggtggtgaagtaggaaacacgctggagaagaaaggtggcaaggagtttgtggaagctgtcctggaactccggaaaaagaacgggcccttggaagtagctggagggtgaggtgggaaagccaccgtgcttatctggttgtgacacatgcagtattaggaaagccattttgtgagagggcttagaattcagaggtgtgtggcagcacagccgcatcttcaagatggaggccaaggacagcctgtagctttacatcttagagtttcaccacatgcaggttgtctgggaaaatcacctttgcatttttttttattacttaaaatagctcctatatgtttgatgtctagatcacaaattttaagaaattataggagctgagtttggtacatctaagagctgagagtgagtgatactgagccatctgcaaaactgctggtgagagatacaaattaaaaatcttcagccatctgtgtgtgtaagaggaaacatataaatacacatttctcatttgccaattacaccttccctggtataaggggaagaaaacgacttggcatctgatgtggggagaattattgctaagacctggaggcagggtacttcttactgcttcaggcctgaatttaggtggtcatttggggtgtgcaggacagagcacctcctaaggacctgagagtccagtcagtggggaggcccagctcccccaccaactgtgtgaggacagatcacccacttcctcacttggggctctggttttctcttcttactacccgattccaatgcctattgtgtcttttaaatcctctgttttaaaaatgaatcttaagctctctcggagggtccaccaggccgtgcacctctattcccagtgacaaatgacacc

SEQ ID NO: 373499 - DNA, 709 bp, Homo sapiens
ggagggaggggagtagagggcaggcccccatttaagtacccgggatggggcaccaatgccttcaggcggtaaaccaatttaggaagacgtggcgggctttgtggcggctcctcctctttcggcctgtccgcagtttttaaaaaacgtgtgtgatgataaggaatgactgtctacattagtaattcccaacttgggtccgaaagtgaacttttgctgaagcgaagtagctaaccgcttccatgtgcaaggcaggttccagacttcggggtgaggaggattaactgaaggaccccaggggaaccgggtgcgcagtaattgatcttggggcagaccagggcttggcggtggcctgtatctaaagacagcggggtctctgaggcggggcaggggggagttggcattgactggggagggaagagcgatcgctggtaacagccattgtgccttcccactgggttagtgggaaggttcctaaagatgccgtggcagcgacagtcccgtgctcagagccaggcacacagtaggcgttcactcgagacgcagagtctgggacgcgccctgaagaagctcctctccaggggcctggcccttcccaaggactgggctctgggcgtccccggggtcatgggtcagacctcgcgtccggggtgcgggctggtgcctgggcgcagagcggccggcgtcaacgggtagggcgcgggcccggggt

SEQ ID NO: 373500 - DNA, 1934 bp, Homo sapiens
gccggccgcgaggactggttccagttcactcggcagcggcgccgggcggagggggagagcgcgggccgcgcgggcgggaagcgaagaggcgggcgggccagcgaggagcgcggagagaaaaggcgcgagcggccaggagggctcaggccgagacaccttgcagctgccgccgccgccaccgagccgccgctgtgctcactgatccgcctccagggccaccgccatgtcgagccgcggtgggaagaagaagtccaccaagacgtccaggtctgccaaagcaggagtcatctttcccgtggggcggatgctgcggtacatcaagaaaggccaccccaagtacaggattggagtgggggcacccgtgtacatggccgccgtcctggaatacctgacagcggagattctggagctggctggcaatgcagcgagagacaacaagaagggacgggtcacaccccggcacatcctgctggctgtggccaatgatgaagagctgaatcagctgctaaaaggagtcaccatagccagtgggggtgtgttacccaacatccaccccgagttgctagcgaagaagcggggatccaaaggaaagttggaagccatcatcacaccacccccagccaaaaaggccaagtctccatcccagaagaagcctgtatctaaaaaagcaggaggcaagaaaggggcccggaaatccaagaagcagggtgaagtcagtaaggcagccagcgccgacagcacaaccgagggcacacctgccgacggcttcacagtcctctccaccaagagcctcttccttggccagaagctgaaccttattcacagtgaaatcagtaatttagccggctttgaggtggaggccataatcaatcctaccaatgctgacattgaccttaaagatgacctaggaaacacgctggagaagaaaggtggcaaggagtttgtggaagctgtcctggaactccggaaaaagaacgggcccttggaagtagctggagctgctgtcagcgcaggccatggcctgcctgccaagtttgtgatccactgtaatagtccagtttggggtgcagacaagtgtgaagaacttctggaaaagacagtgaaaaactgcttggccctggctgatgataagaagctgaaatccattgcatttccatccatcggcagcggcaggaacggttttccaaagcagacagcagctcagctgattctgaaggccatctccagttacttcgtgtctacaatgtcctcttccatcaaaacggtgtacttcgtgctttttgacagcgagagtataggcatctatgtgcaggaaatggccaagctggacgccaactaggctgagcaatgacagaaccagctgcaccatgtaccccaccttcagtttaaaagaaaaaaaaaatccccttcactcctactgggaggtgggacccctttcattttcagttttgctcatctagggaaaataaggctttggtttccagtttaattgtttttgaccttctaaaatgtttttatgttagcactgatagttggcattactgttgttaagcactgtgttccagaccgtgtctgacttagtgtaacctaggagattttatagttttattttaatgaaaccctgattgacgcacagcagtggggagaacagcgtcttttacctgtcaccgaagccaggaagccccgtttgtaagcgtgtgttgtggtgctttattgtacatcctccagtggcgttctttttactctaatgttcttttggtttcccccctcagaagaatcatgaatttgcaacagacctaatttttggttactttttgtcttattgatggatttgaaaatgaaagatttaataaggcaaagcagaatctgttgtccttaattatatttgcaatttggaatttgtgtgagttgatttagtaaaatgttaaaccgtt

SEQ ID NO: 373501 - DNA, 2355 bp, Homo sapiens
  misc_feature (2355)..(2355): n is a, c, g, or t
ggagggaggggagtagagggcaggcccccatttaagtacccgggatggggcaccaatgccttcaggcggtaaaccaatttaggaagacgtggcgggctttgtggcggctcctcctctttcggcctgtccgcagtttttaaaaaacgtgtgtgatgataaggaatgactgtctacattagtaattcccaacttgggtccgaaagtgaacttttgctgaagcgaagtagctaaccgcttccatgtgcaaggcaggttccagacttcgggtgtgctcactgatccgcctccagggccaccgccatgtcgagccgcggtgggaagaagaagtccaccaagacgtccaggtctgccaaagcaggagtcatctttcccgtggggcggatgctgcggtacatcaagaaaggccaccccaagtacaggattggagtgggggcacccgtgtacatggccgccgtcctggaatacctgacagcggagattctggagctggctggcaatgcagcgagagacaacaagaagggacgggtcacaccccggcacatcctgctggctgtggccaatgatgaagagctgaatcagctgctaaaaggagtcaccatagccagtgggggtgtgttacccaacatccaccccgagttgctagcgaagaagcggggatccaaaggaaagttggaagccatcatcacaccacccccagccaaaaaggccaagtctccatcccagaagaagcctgtatctaaaaaagcaggaggcaagaaaggggcccggaaatccaagaagcagggtgaagtcagtaaggcagccagcgccgacagcacaaccgagggcacacctgccgacggcttcacagtcctctccaccaagagcctcttccttggccagaagctgaaccttattcacagtgaaatcagtaatttagccggctttgaggtggaggccataatcaatcctaccaatgctgacattgaccttaaagatgacctaggaaacacgctggagaagaaaggtggcaaggagtttgtggaagctgtcctggaactccggaaaaagaacgggcccttggaagtagctggagctgctgtcagcgcaggccatggcctgcctgccaagtttgtgatccactgtaatagtccagtttggggtgcagacaagtgtgaagaacttctggaaaagacagtgaaaaactgcttggccctggctgatgataagaagctgaaatccattgcatttccatccatcggcagcggcaggaacggttttccaaagcagacagcagctcagctgattctgaaggccatctccagttacttcgtgtctacaatgtcctcttccatcaaaacggtgtacttcgtgctttttgacagcgagagtataggcatctatgtgcaggaaatggccaagctggacgccaactaggctgagcaatgacagaaccagctgcaccatgtaccccaccttcagtttaaaagaaaaaaaaaatccccttcactcctactgggaggtgggacccctttcattttcagttttgctcatctagggaaaataaggctttggtttccagtttaattgtttttgaccttctaaaatgtttttatgttagcactgatagttggcattactgttgttaagcactgtgttccagaccgtgtctgacttagtgtaacctaggagattttatagttttattttaatgaaaccctgattgacgcacagcagtggggagaacagcgtcttttacctgtcaccgaagccaggaagccccgtttgtaagcgtgtgttgtggtgctttattgtacatcctccagtggcgttctttttactctaatgttcttttggtttcccccctcagaagaatcatgaatttgcaacagacctaatttttggttactttttgtcttattgatggatttgaaaatgaaagatttaataaggcaaagcagaatctgttgtccttaattatatttgcaatttggaatttgtgtgagttgatttagtaaaatgttaaaccgttaaaaaaaaaaaaaaaaaaaaaaaaaaaaaaaaaaaaagggggggggggaaaaaattcccgcggagggggccccaagttcaagcagagtatccccaagggttcttttggtggaacaagggggggcgccccataaaggaggagcggggaatataaaagcgcagggggacgctggcgccagggcggtaaaaacaaacggcgccgagcaccgggggcaacacccgcgcgacgaccgggggacagtcgcgggggaagagaccccatatattgtcgggggggggggcagcccatagtgcggccgaacttccctaacgaaggaagatataaagcagcgaaggggcaacatn

SEQ ID NO: 373502 - DNA, 2336 bp, Homo sapiens
  misc_feature (2336)..(2336): n is a, c, g, or t
ggagggaggggagtagagggcaggcccccatttaagtacccgggatggggcaccaatgccttcaggcggtaaaccaatttaggaagacgtggcgggctttgtggcggctcctcctctttcggcctgtccgcagtttttaaaaaacgtgtgtgatgataaggaatgactgtctacattagtaattcccaacttgggtccgaaagtgaacttttgctgaagcgaagtagctaaccgcttccatgtgcaagtgtgctcactgatccgcctccagggccaccgccatgtcgagccgcggtgggaagaagaagtccaccaagacgtccaggtctgccaaagcaggagtcatctttcccgtggggcggatgctgcggtacatcaagaaaggccaccccaagtacaggattggagtgggggcacccgtgtacatggccgccgtcctggaatacctgacagcggagattctggagctggctggcaatgcagcgagagacaacaagaagggacgggtcacaccccggcacatcctgctggctgtggccaatgatgaagagctgaatcagctgctaaaaggagtcaccatagccagtgggggtgtgttacccaacatccaccccgagttgctagcgaagaagcggggatccaaaggaaagttggaagccatcatcacaccacccccagccaaaaaggccaagtctccatcccagaagaagcctgtatctaaaaaagcaggaggcaagaaaggggcccggaaatccaagaagcagggtgaagtcagtaaggcagccagcgccgacagcacaaccgagggcacacctgccgacggcttcacagtcctctccaccaagagcctcttccttggccagaagctgaaccttattcacagtgaaatcagtaatttagccggctttgaggtggaggccataatcaatcctaccaatgctgacattgaccttaaagatgacctaggaaacacgctggagaagaaaggtggcaaggagtttgtggaagctgtcctggaactccggaaaaagaacgggcccttggaagtagctggagctgctgtcagcgcaggccatggcctgcctgccaagtttgtgatccactgtaatagtccagtttggggtgcagacaagtgtgaagaacttctggaaaagacagtgaaaaactgcttggccctggctgatgataagaagctgaaatccattgcatttccatccatcggcagcggcaggaacggttttccaaagcagacagcagctcagctgattctgaaggccatctccagttacttcgtgtctacaatgtcctcttccatcaaaacggtgtacttcgtgctttttgacagcgagagtataggcatctatgtgcaggaaatggccaagctggacgccaactaggctgagcaatgacagaaccagctgcaccatgtaccccaccttcagtttaaaagaaaaaaaaaatccccttcactcctactgggaggtgggacccctttcattttcagttttgctcatctagggaaaataaggctttggtttccagtttaattgtttttgaccttctaaaatgtttttatgttagcactgatagttggcattactgttgttaagcactgtgttccagaccgtgtctgacttagtgtaacctaggagattttatagttttattttaatgaaaccctgattgacgcacagcagtggggagaacagcgtcttttacctgtcaccgaagccaggaagccccgtttgtaagcgtgtgttgtggtgctttattgtacatcctccagtggcgttctttttactctaatgttcttttggtttcccccctcagaagaatcatgaatttgcaacagacctaatttttggttactttttgtcttattgatggatttgaaaatgaaagatttaataaggcaaagcagaatctgttgtccttaattatatttgcaatttggaatttgtgtgagttgatttagtaaaatgttaaaccgttaaaaaaaaaaaaaaaaaaaaaaaaaaaaaaaaaaaaagggggggggggaaaaaattcccgcggagggggccccaagttcaagcagagtatccccaagggttcttttggtggaacaagggggggcgccccataaaggaggagcggggaatataaaagcgcagggggacgctggcgccagggcggtaaaaacaaacggcgccgagcaccgggggcaacacccgcgcgacgaccgggggacagtcgcgggggaagagaccccatatattgtcgggggggggggcagcccatagtgcggccgaacttccctaacgaaggaagatataaagcagcgaaggggcaacatn

SEQ ID NO: 373503 - DNA, 2259 bp, Homo sapiens
  misc_feature (6)..(6): n is a, c, g, or t
  misc_feature (2259)..(2259): n is a, c, g, or t
gaaagnaccaaggaccttacggctaggtacgaggctgtgtcggcgccgggcggagggggagagcgcgggccgcgcgggcgggaagcgaagaggcgggcgggccagcgaggagcgcggagagaaaaggcgcgagcggccaggagggctcaggccgagacaccttgcagctgccgccgccgccaccgagccgccgcggccaccgccatgtcgagccgcggtgggaagaagaagtccaccaagacgtccaggtctgccaaagcaggagtcatctttcccgtggggcggatgctgcggtacatcaagaaaggccaccccaagtacaggattggagtgggggcacccgtgtacatggccgccgtcctggaatacctgacagcggagattctggagctggctggcaatgcagcgagagacaacaagaagggacgggtcacaccccggcacatcctgctggctgtggccaatgatgaagagctgaatcagctgctaaaaggagtcaccatagccagtgggggtgtgttacccaacatccaccccgagttgctagcgaagaagcggggatccaaaggaaagttggaagccatcatcacaccacccccagccaaaaaggccaagtctccatcccagaagaagcctgtatctaaaaaagcaggaggcaagaaaggggcccggaaatccaagaagcagggtgaagtcagtaaggcagccagcgccgacagcacaaccgagggcacacctgccgacggcttcacagtcctctccaccaagagcctcttccttggccagaagctgaaccttattcacagtgaaatcagtaatttagccggctttgaggtggaggccataatcaatcctaccaatgctgacattgaccttaaagatgacctaggaaacacgctggagaagaaaggtggcaaggagtttgtggaagctgtcctggaactccggaaaaagaacgggcccttggaagtagctggagctgctgtcagcgcaggccatggcctgcctgccaagtttgtgatccactgtaatagtccagtttggggtgcagacaagtgtgaagaacttctggaaaagacagtgaaaaactgcttggccctggctgatgataagaagctgaaatccattgcatttccatccatcggcagcggcaggaacggttttccaaagcagacagcagctcagctgattctgaaggccatctccagttacttcgtgtctacaatgtcctcttccatcaaaacggtgtacttcgtgctttttgacagcgagagtataggcatctatgtgcaggaaatggccaagctggacgccaactaggctgagcaatgacagaaccagctgcaccatgtaccccaccttcagtttaaaagaaaaaaaaaatccccttcactcctactgggaggtgggacccctttcattttcagttttgctcatctagggaaaataaggctttggtttccagtttaattgtttttgaccttctaaaatgtttttatgttagcactgatagttggcattactgttgttaagcactgtgttccagaccgtgtctgacttagtgtaacctaggagattttatagttttattttaatgaaaccctgattgacgcacagcagtggggagaacagcgtcttttacctgtcaccgaagccaggaagccccgtttgtaagcgtgtgttgtggtgctttattgtacatcctccagtggcgttctttttactctaatgttcttttggtttcccccctcagaagaatcatgaatttgcaacagacctaatttttggttactttttgtcttattgatggatttgaaaatgaaagatttaataaggcaaagcagaatctgttgtccttaattatatttgcaatttggaatttgtgtgagttgatttagtaaaatgttaaaccgttaaaaaaaaaaaaaaaaaaaaaaaaaaaaaaaaaaaaagggggggggggaaaaaattcccgcggagggggccccaagttcaagcagagtatccccaagggttcttttggtggaacaagggggggcgccccataaaggaggagcggggaatataaaagcgcagggggacgctggcgccagggcggtaaaaacaaacggcgccgagcaccgggggcaacacccgcgcgacgaccgggggacagtcgcgggggaagagaccccatatattgtcgggggggggggcagcccatagtgcggccgaacttccctaacgaaggaagatataaagcagcgaaggggcaacatn

SEQ ID NO: 373504 - DNA, 2077 bp, Homo sapiens
  misc_feature (6)..(6): n is a, c, g, or t
  misc_feature (2077)..(2077): n is a, c, g, or t
gaaagnaccaaggaccttacggctaggtacgaggctgtgtcggcgccgggcggagggggagagcgcgggccgcgcgggcgggaagcgaagaggcgggcgggccagcgaggagcgcggagagaaaaggcgcgagcggccaggagggctcaggccgagacaccttgcagctgccgccgccgccaccgagccgccgccggagattctggagctggctggcaatgcagcgagagacaacaagaagggacgggtcacaccccggcacatcctgctggctgtggccaatgatgaagagctgaatcagctgctaaaaggagtcaccatagccagtgggggtgtgttacccaacatccaccccgagttgctagcgaagaagcggggatccaaaggaaagttggaagccatcatcacaccacccccagccaaaaaggccaagtctccatcccagaagaagcctgtatctaaaaaagcaggaggcaagaaaggggcccggaaatccaagaagcagggtgaagtcagtaaggcagccagcgccgacagcacaaccgagggcacacctgccgacggcttcacagtcctctccaccaagagcctcttccttggccagaagctgaaccttattcacagtgaaatcagtaatttagccggctttgaggtggaggccataatcaatcctaccaatgctgacattgaccttaaagatgacctaggaaacacgctggagaagaaaggtggcaaggagtttgtggaagctgtcctggaactccggaaaaagaacgggcccttggaagtagctggagctgctgtcagcgcaggccatggcctgcctgccaagtttgtgatccactgtaatagtccagtttggggtgcagacaagtgtgaagaacttctggaaaagacagtgaaaaactgcttggccctggctgatgataagaagctgaaatccattgcatttccatccatcggcagcggcaggaacggttttccaaagcagacagcagctcagctgattctgaaggccatctccagttacttcgtgtctacaatgtcctcttccatcaaaacggtgtacttcgtgctttttgacagcgagagtataggcatctatgtgcaggaaatggccaagctggacgccaactaggctgagcaatgacagaaccagctgcaccatgtaccccaccttcagtttaaaagaaaaaaaaaatccccttcactcctactgggaggtgggacccctttcattttcagttttgctcatctagggaaaataaggctttggtttccagtttaattgtttttgaccttctaaaatgtttttatgttagcactgatagttggcattactgttgttaagcactgtgttccagaccgtgtctgacttagtgtaacctaggagattttatagttttattttaatgaaaccctgattgacgcacagcagtggggagaacagcgtcttttacctgtcaccgaagccaggaagccccgtttgtaagcgtgtgttgtggtgctttattgtacatcctccagtggcgttctttttactctaatgttcttttggtttcccccctcagaagaatcatgaatttgcaacagacctaatttttggttactttttgtcttattgatggatttgaaaatgaaagatttaataaggcaaagcagaatctgttgtccttaattatatttgcaatttggaatttgtgtgagttgatttagtaaaatgttaaaccgttaaaaaaaaaaaaaaaaaaaaaaaaaaaaaaaaaaaaagggggggggggaaaaaattcccgcggagggggccccaagttcaagcagagtatccccaagggttcttttggtggaacaagggggggcgccccataaaggaggagcggggaatataaaagcgcagggggacgctggcgccagggcggtaaaaacaaacggcgccgagcaccgggggcaacacccgcgcgacgaccgggggacagtcgcgggggaagagaccccatatattgtcgggggggggggcagcccatagtgcggccgaacttccctaacgaaggaagatataaagcagcgaaggggcaacatn

SEQ ID NO: 373505 - DNA, 1755 bp, Homo sapiens
gccggccgcgaggactggttccagttcactcggcagcggcgccgggcggagggggagagcgcgggccgcgcgggcgggaagcgaagaggcgggcgggccagcgaggagcgcggagagaaaaggcgcgagcggccaggagggctcaggccgagacaccttgcagctgccgccgccgccaccgagccgccgctgtgctcactgatccgcctccagggccaccgccatgtcgagccgcggtgggaagaagaagtccaccaagacgtccaggtctgccaaagcaggagtcatctttcccgtggggcggatgctgcggtacatcaagaaaggccaccccaagtacaggattggagtgggggcacccgtgtacatggccgccgtcctggaatacctgacagcggagattctggagctggctggcaatgcagcgagagacaacaagaagggacgggtcacaccccggcacatcctgctggctgtggccaatgatgaagagctgaatcagctgctaaaaggagtcaccatagccagtgggggtgtgttacccaacatccaccccgagttgctagcgaagaagcggggatccaaaggaaagttggaagccatcatcacaccacccccagccaaaaaggccaagtctccatcccagaagaagcctgtatctaaaaaagcaggaggcaagaaaggggcccggaaatccaagaagcagggtgaagtcagtaaggcagccagcgccgacagcacaaccgagggcacacctgccgacggcttcacagtcctctccaccaagagcctcttccttggccagaagctgaaccttattcacagtgaaatcagtaatttagccggctttgaggtggaggccataatcaatcctaccaatgctgacattgaccttaaagatgacctaggaaacacgctggagaagaaaggtggcaaggagtttgtggaagctgtcctggaactccggaaaaagaacgggcccttggaagtagctggagctgctgtcagcgcaggccatggcctgcctgccaagtttgtgatccactgtaatagtccagtttggggtgcagacaagtgtgaagaacttctggaaaagacagtgaaaaactgcttggccctggctgatgataagaagctgaaatccattgcatttccatccatcggcagcggcaggaacggttttccaaagcagacagcagctcagctgattctgaaggccatctccagttacttcgtgtctacaatgtcctcttccatcaaaacggtgtacttcgtgctttttgacagcgagagtataggcatctatgtgcaggaaatggccaagctggacgccaactaggctgagcaatgacagaaccagctgcaccatgtaccccaccttcagtttaaaagaaaaaaaaaatccccttcactcctactgggaggtgggacccctttcattttcagttttgctcatctagggaaaataaggctttggtttccagtttaattgtttttgaccttctaaaatgtttttatgttagcactgatagttggcattactgttgttaagcactgtgttccagaccgtgtctgacttagtgtaacctaggagattttatagttttattttaatgaaaccctgattgacgcacagcagtggggagaacagcgtcttttacctgtcaccgaagccaggaagccccgtttgtaagcgtgtgttgcagtgtgcttccgcactgcaggtgctgccgggagtgtcgcagtgtgcttccg

SEQ ID NO: 373506 - DNA, 2224 bp, Homo sapiens
  misc_feature (2224)..(2224): n is a, c, g, or t
gccggccgcgaggactggttccagttcactcggcagcggcgccgggcggagggggagagcgcgggccgcgcgggcgggaagcgaagaggcgggcgggccagcgaggagcgcggagagaaaaggcgcgagcggccaggagggctcaggccgagacaccttgcagctgccgccgccgccaccgagccgccgctgtgctcactgatccgcctccagggccaccgccatgtcgagccgcggtgggaagaagaagtccaccaagacgtccaggtctgccaaagcaggagtcatctttcccgtggggcggatgctgcggtacatcaagaaaggccaccccaagtacaggattggagtgggggcacccgtgtacatggccgccgtcctggaatacctgacagcggagattctggagctggctggcaatgcagcgagagacaacaagaagggacgggtcacaccccggcacatcctgctggctgtggccaatgatgaagagctgaatcagctgctaaaaggagtcaccatagccagtgggggtgtgttacccaacatccaccccgagttgctagcgaagaagcggggatccaaaggaaagttggaagccatcatcacaccacccccagccaaaaaggccaagtctccatcccagaagaagcctgtatctaaaaaagcaggaggcaagaaaggggcccggaaatccaagaagcagggtgaagtcagtaaggcagccagcgccgacagcacaaccgagggcacacctgccgacggcttcacagtcctctccaccaagagcctcttccttggccagaagctgaaccttattcacagtgaaatcagtaatttagccggctttgaggtggaggccataatcaatcctaccaatgctgacattgaccttaaagatgacctaggaaacacgctggagaagaaaggtggcaaggagtttgtggaagctgtcctggaactccggaaaaagaacgggcccttggaagtagctggagctgctgtcagcgcaggccatggcctgcctgccaagtttgtgatccactgtaatagtccagtttggggtgcagacaagtgtgaagaacttctggaaaagacagtgaaaaactgcttggccctggctgatgataagaagctgaaatccattgcatttccatccatcggcagcggcaggaacggttttccaaagcagacagcagctcagctgattctgaaggccatctccagttacttcgtgtctacaatgtcctcttccatcaaaacggtgtacttcgtgctttttgacagcgagagtataggcatctatgtgcaggaaatggccaagctggacgccaactaggctgagcaatgacagaaccagctgcaccatgtaccccaccttcagtttaaaagaaaaaaaaaatccccttcactcctactgggaggtgggacccctttcattttcagttttgctcatctagggaaaataaggctttggtttccagtttaattgtttttgaccttctttccagaccgtgtctgacttagtgtaacctaggagattttatagttttattttaatgaaaccctgattgacgcacagcagtggggagaacagcgtcttttacctgtcaccgaagccaggaagccccgtttgtaagcgtgtgttgtggtgctttattgtacatcctccagtggcgttctttttactctaatgttcttttggtttcccccctcagaagaatcatgaatttgcaacagacctaatttttggttactttttgtcttattgatggatttgaaaatgaaagatttaataaggcaaagcagaatctgttgtccttaattatatttgcaatttggaatttgtgtgagttgatttagtaaaatgttaaaccgttaaaaaaaaaaaaaaaaaaaaaaaaaaaaaaaaaaaaagggggggggggaaaaaattcccgcggagggggccccaagttcaagcagagtatccccaagggttcttttggtggaacaagggggggcgccccataaaggaggagcggggaatataaaagcgcagggggacgctggcgccagggcggtaaaaacaaacggcgccgagcaccgggggcaacacccgcgcgacgaccgggggacagtcgcgggggaagagaccccatatattgtcgggggggggggcagcccatagtgcggccgaacttccctaacgaaggaagatataaagcagcgaaggggcaacatn

SEQ ID NO: 373507 - DNA, 1615 bp, Homo sapiens
  misc_feature (1595)..(1595): n is a, c, g, or t
gccggccgcgaggactggttccagttcactcggcagcggcgccgggcggagggggagagcgcgggccgcgcgggcgggaagcgaagaggcgggcgggccagcgaggagcgcggagagaaaaggcgcgagcggccaggagggctcaggccgagacaccttgcagctgccgccgccgccaccgagccgccgctgtgctcactgatccgcctccagggccaccgccatgtcgagccgcggtgggaagaagaagtccaccaagacgtccaggtctgccaaagcaggagtcatctttcccgtggggcggatgctgcggtacatcaagaaaggccaccccaagtacaggattggagtgggggcacccgtgtacatggccgccgtcctggaatacctgacagcggagattctggagctggctggcaatgcagcgagagacaacaagaagggacgggtcacaccccggcacatcctgctggctgtggccaatgatgaagagctgaatcagctgctaaaaggagtcaccatagccagtgggggtgtgttacccaacatccaccccgagttgctagcgaagaagcggggatccaaaggaaagttggaagccatcatcacaccacccccagccaaaaaggccaagtctccatcccagaagaagcctgtatctaaaaaagcaggaggcaagaaaggggcccggaaatccaagaagcagggtgaagtcagtaaggcagccagcgccgacagcacaaccgagggcacacctgccgacggcttcacagtcctctccaccaagagcctcttccttggccagaagctgaaccttattcacagtgaaatcagtaatttagccggctttgaggtggaggccataatcaatcctaccaatgctgacattgaccttaaagatgacctaggaaacacgctggagaagaaaggtggcaaggagtttgtggaagctgtcctggaactccggaaaaagaacgggcccttggaagtagctggagctgctgtcagcgcaggccatggcctgcctgccaagtttgtgatccactgtaatagtccagtttggggtgcagacaagtgtgaagaacttctggaaaagacagtgaaaaactgcttggccctggctgatgataagaagctgaaatccattgcatttccatccatcggcagcggcaggaacggttttccaaagcagacagcagctcagctgattctgaaggccatctccagttacttcgtgtctacaatgtcctcttccatcaaaacggtgtacttcgtgctttttgacagcgagagtataggcatctatgtgcaggaaatggccaagctggacgccaactaggctgagcaatgacagaaccagctgcaccatgtaccccaccttcagtttaaaagaaaaaaaaaatccccttcactcctactgggaggtgggacccctttcattttcagttttgctcatctagggaaaataaggctttggtttccagtttaattgtttttgaccttctaaaatgtttttatgttagcactgatagttggcattactgttgttaagcactgtgttccagaccgtgtctgacttagtgtaacctaggagntattgcggatcctcgatcac

SEQ ID NO: 373508 - DNA, 1606 bp, Homo sapiens
  misc_feature (1606)..(1606): n is a, c, g, or t
cacattctgacccttccgtctgtgcaagaagcagggtgaagtcagtaaggcagccagcgccgacagcacaaccgagggcacacctgccgacggcttcacagtcctctccaccaagagcctcttccttggccagaagctgaaccttattcacagtgaaatcagtaatttagccggctttgaggtggaggccataatcaatcctaccaatgctgacattgaccttaaagatgacctaggaaacacgctggagaagaaaggtggcaaggagtttgtggaagctgtcctggaactccggaaaaagaacgggcccttggaagtagctggagctgctgtcagcgcaggccatggcctgcctgccaagtttgtgatccactgtaatagtccagtttggggtgcagacaagtgtgaagaacttctggaaaagacagtgaaaaactgcttggccctggctgatgataagaagctgaaatccattgcatttccatccatcggcagcggcaggaacggttttccaaagcagacagcagctcagctgattctgaaggccatctccagttacttcgtgtctacaatgtcctcttccatcaaaacggtgtacttcgtgctttttgacagcgagagtataggcatctatgtgcaggaaatggccaagctggacgccaactaggctgagcaatgacagaaccagctgcaccatgtaccccaccttcagtttaaaagaaaaaaaaaatccccttcactcctactgggaggtgggacccctttcattttcagttttgctcatctagggaaaataaggctttggtttccagtttaattgtttttgaccttctaaaatgtttttatgttagcactgatagttggcattactgttgttaagcactgtgttccagaccgtgtctgacttagtgtaacctaggagattttatagttttattttaatgaaaccctgattgacgcacagcagtggggagaacagcgtcttttacctgtcaccgaagccaggaagccccgtttgtaagcgtgtgttgtggtgctttattgtacatcctccagtggcgttctttttactctaatgttcttttggtttcccccctcagaagaatcatgaatttgcaacagacctaatttttggttactttttgtcttattgatggatttgaaaatgaaagatttaataaggcaaagcagaatctgttgtccttaattatatttgcaatttggaatttgtgtgagttgatttagtaaaatgttaaaccgttaaaaaaaaaaaaaaaaaaaaaaaaaaaaaaaaaaaaagggggggggggaaaaaattcccgcggagggggccccaagttcaagcagagtatccccaagggttcttttggtggaacaagggggggcgccccataaaggaggagcggggaatataaaagcgcagggggacgctggcgccagggcggtaaaaacaaacggcgccgagcaccgggggcaacacccgcgcgacgaccgggggacagtcgcgggggaagagaccccatatattgtcgggggggggggcagcccatagtgcggccgaacttccctaacgaaggaagatataaagcagcgaaggggcaacatn

SEQ ID NO: 373509 - DNA, 1573 bp, Homo sapiens
  misc_feature (33)..(33): n is a, c, g, or t
  misc_feature (1573)..(1573): n is a, c, g, or t
tcagaatatacaattttgagaaaaactgaaggntctttccaatggtacagtcttcgacggcttcacagtcctctccaccaagagcctcttccttggccagaagctgaaccttattcacagtgaaatcagtaatttagccggctttgaggtggaggccataatcaatcctaccaatgctgacattgaccttaaagatgacctaggaaacacgctggagaagaaaggtggcaaggagtttgtggaagctgtcctggaactccggaaaaagaacgggcccttggaagtagctggagctgctgtcagcgcaggccatggcctgcctgccaagtttgtgatccactgtaatagtccagtttggggtgcagacaagtgtgaagaacttctggaaaagacagtgaaaaactgcttggccctggctgatgataagaagctgaaatccattgcatttccatccatcggcagcggcaggaacggttttccaaagcagacagcagctcagctgattctgaaggccatctccagttacttcgtgtctacaatgtcctcttccatcaaaacggtgtacttcgtgctttttgacagcgagagtataggcatctatgtgcaggaaatggccaagctggacgccaactaggctgagcaatgacagaaccagctgcaccatgtaccccaccttcagtttaaaagaaaaaaaaaatccccttcactcctactgggaggtgggacccctttcattttcagttttgctcatctagggaaaataaggctttggtttccagtttaattgtttttgaccttctaaaatgtttttatgttagcactgatagttggcattactgttgttaagcactgtgttccagaccgtgtctgacttagtgtaacctaggagattttatagttttattttaatgaaaccctgattgacgcacagcagtggggagaacagcgtcttttacctgtcaccgaagccaggaagccccgtttgtaagcgtgtgttgtggtgctttattgtacatcctccagtggcgttctttttactctaatgttcttttggtttcccccctcagaagaatcatgaatttgcaacagacctaatttttggttactttttgtcttattgatggatttgaaaatgaaagatttaataaggcaaagcagaatctgttgtccttaattatatttgcaatttggaatttgtgtgagttgatttagtaaaatgttaaaccgttaaaaaaaaaaaaaaaaaaaaaaaaaaaaaaaaaaaaagggggggggggaaaaaattcccgcggagggggccccaagttcaagcagagtatccccaagggttcttttggtggaacaagggggggcgccccataaaggaggagcggggaatataaaagcgcagggggacgctggcgccagggcggtaaaaacaaacggcgccgagcaccgggggcaacacccgcgcgacgaccgggggacagtcgcgggggaagagaccccatatattgtcgggggggggggcagcccatagtgcggccgaacttccctaacgaaggaagatataaagcagcgaaggggcaacatn

SEQ ID NO: 373510 - DNA, 1980 bp, Homo sapiens
  misc_feature (1980)..(1980): n is a, c, g, or t
aagccagccagcagtcacagtgatggggacagccttaaaggcccatagtcacttggaagacaatggcagagcccttaggggtttgcccaagccaggtaggatgttagcaccagcctagtgctcaaggatgaggacagtcacatccaccagcccccaaccctcagcaatgagtactcattctaggtcctgatagctgccttactttggcccccagatcacaagtccctttaaaggaaagctgatctcctcgtccactgtggcttgtgcttccttttgtcccaggtgccacccacgggctctgaacattcatcctagtttgcttgctcccgcatcccgagcagcatttgagtcttatgtttgaaatgggttcatttgagccagcaactccctgcttcccttttgtgcctcgtgcacttggagtgtccactgtcctttacctgtatcccaaggctccttctctgagacttcccagctctcctgttatttcccacctcatgcttttctttgcagctgaaccttattcacagtgaaatcagtaatttagccggctttgaggtggaggccataatcaatcctaccaatgctgacattgaccttaaagatgacctaggaaacacgctggagaagaaaggtggcaaggagtttgtggaagctgtcctggaactccggaaaaagaacgggcccttggaagtagctggagctgctgtcagcgcaggccatggcctgcctgccaagtttgtgatccactgtaatagtccagtttggggtgcagacaagtgtgaagaacttctggaaaagacagtgaaaaactgcttggccctggctgatgataagaagctgaaatccattgcatttccatccatcggcagcggcaggaacggttttccaaagcagacagcagctcagctgattctgaaggccatctccagttacttcgtgtctacaatgtcctcttccatcaaaacggtgtacttcgtgctttttgacagcgagagtataggcatctatgtgcaggaaatggccaagctggacgccaactaggctgagcaatgacagaaccagctgcaccatgtaccccaccttcagtttaaaagaaaaaaaaaatccccttcactcctactgggaggtgggacccctttcattttcagttttgctcatctagggaaaataaggctttggtttccagtttaattgtttttgaccttctaaaatgtttttatgttagcactgatagttggcattactgttgttaagcactgtgttccagaccgtgtctgacttagtgtaacctaggagattttatagttttattttaatgaaaccctgattgacgcacagcagtggggagaacagcgtcttttacctgtcaccgaagccaggaagccccgtttgtaagcgtgtgttgtggtgctttattgtacatcctccagtggcgttctttttactctaatgttcttttggtttcccccctcagaagaatcatgaatttgcaacagacctaatttttggttactttttgtcttattgatggatttgaaaatgaaagatttaataaggcaaagcagaatctgttgtccttaattatatttgcaatttggaatttgtgtgagttgatttagtaaaatgttaaaccgttaaaaaaaaaaaaaaaaaaaaaaaaaaaaaaaaaaaaagggggggggggaaaaaattcccgcggagggggccccaagttcaagcagagtatccccaagggttcttttggtggaacaagggggggcgccccataaaggaggagcggggaatataaaagcgcagggggacgctggcgccagggcggtaaaaacaaacggcgccgagcaccgggggcaacacccgcgcgacgaccgggggacagtcgcgggggaagagaccccatatattgtcgggggggggggcagcccatagtgcggccgaacttccctaacgaaggaagatataaagcagcgaaggggcaacatn

SEQ ID NO: 373511 - DNA, 1979 bp, Homo sapiens
  misc_feature (1979)..(1979): n is a, c, g, or t
aatactgttctctgggttttcaagagaaatcccttgaaggtagacaaaatggtaaatgtcacaagaataaaaatcaaagcctgcaagttgactgctgcagacagaatggagaaacttgttgttttggttggcctgatggtccactttttttttttttaaacagatgccatgttttagtagccttctcagtgggatgccagctttataggcttttgcgaagtgaaacggggcattcattttatttcttttaacctttggaaatgatctcatgtgtgtgtttctctttttttggacttctcattcaaatgtttaatttaaacatgtcacatttgatattcctcctcctcctgtcctcacccccatccacatgtgcgcacactgcgtggactgattgccccttgggctcatatgttggaatcgaccaggtaggccagccctgccattggggcattagtaaatgtgcctgtgcgtgggtctcggtccaacacagttgatatacatttgtttacctgttatagttgcaagttgtacaggctgacattgcctcgatcgacagtgatgctgtcgttcacccgacaaacactgacttctacatcggtggtgaagtaggaaacacgctggagaagaaaggtggcaaggagtttgtggaagctgtcctggaactccggaaaaagaacgggcccttggaagtagctggagctgctgtcagcgcaggccatggcctgcctgccaagtttgtgatccactgtaatagtccagtttggggtgcagacaagtgtgaagaacttctggaaaagacagtgaaaaactgcttggccctggctgatgataagaagctgaaatccattgcatttccatccatcggcagcggcaggaacggttttccaaagcagacagcagctcagctgattctgaaggccatctccagttacttcgtgtctacaatgtcctcttccatcaaaacggtgtacttcgtgctttttgacagcgagagtataggcatctatgtgcaggaaatggccaagctggacgccaactaggctgagcaatgacagaaccagctgcaccatgtaccccaccttcagtttaaaagaaaaaaaaaatccccttcactcctactgggaggtgggacccctttcattttcagttttgctcatctagggaaaataaggctttggtttccagtttaattgtttttgaccttctaaaatgtttttatgttagcactgatagttggcattactgttgttaagcactgtgttccagaccgtgtctgacttagtgtaacctaggagattttatagttttattttaatgaaaccctgattgacgcacagcagtggggagaacagcgtcttttacctgtcaccgaagccaggaagccccgtttgtaagcgtgtgttgtggtgctttattgtacatcctccagtggcgttctttttactctaatgttcttttggtttcccccctcagaagaatcatgaatttgcaacagacctaatttttggttactttttgtcttattgatggatttgaaaatgaaagatttaataaggcaaagcagaatctgttgtccttaattatatttgcaatttggaatttgtgtgagttgatttagtaaaatgttaaaccgttaaaaaaaaaaaaaaaaaaaaaaaaaaaaaaaaaaaaagggggggggggaaaaaattcccgcggagggggccccaagttcaagcagagtatccccaagggttcttttggtggaacaagggggggcgccccataaaggaggagcggggaatataaaagcgcagggggacgctggcgccagggcggtaaaaacaaacggcgccgagcaccgggggcaacacccgcgcgacgaccgggggacagtcgcgggggaagagaccccatatattgtcgggggggggggcagcccatagtgcggccgaacttccctaacgaaggaagatataaagcagcgaaggggcaacatn

SEQ ID NO: 373512 - DNA, 1765 bp, Homo sapiens
  misc_feature (1765)..(1765): n is a, c, g, or t
gccggccgcgaggactggttccagttcactcggcagcggcgccgggcggagggggagagcgcgggccgcgcgggcgggaagcgaagaggcgggcgggccagcgaggagcgcggagagaaaaggcgcgagcggccaggagggctcaggccgagacaccttgcagctgccgccgccgccaccgagccgccgctgtgctcactgatccgcctccagggccaccgccatgtcgagccgcggtgggaagaagaagtccaccaagacgtccaggtctgccaaagcaggagtcatctttcccgtggggcggatgctgcggtacatcaagaaaggccaccccaagtacaggattggagtgggggcacccgtgtacatggccgccgtcctggaatacctgacaggaaacacgctggagaagaaaggtggcaaggagtttgtggaagctgtcctggaactccggaaaaagaacgggcccttggaagtagctggagctgctgtcagcgcaggccatggcctgcctgccaagtttgtgatccactgtaatagtccagtttggggtgcagacaagtgtgaagaacttctggaaaagacagtgaaaaactgcttggccctggctgatgataagaagctgaaatccattgcatttccatccatcggcagcggcaggaacggttttccaaagcagacagcagctcagctgattctgaaggccatctccagttacttcgtgtctacaatgtcctcttccatcaaaacggtgtacttcgtgctttttgacagcgagagtataggcatctatgtgcaggaaatggccaagctggacgccaactaggctgagcaatgacagaaccagctgcaccatgtaccccaccttcagtttaaaagaaaaaaaaaatccccttcactcctactgggaggtgggacccctttcattttcagttttgctcatctagggaaaataaggctttggtttccagtttaattgtttttgaccttctaaaatgtttttatgttagcactgatagttggcattactgttgttaagcactgtgttccagaccgtgtctgacttagtgtaacctaggagattttatagttttattttaatgaaaccctgattgacgcacagcagtggggagaacagcgtcttttacctgtcaccgaagccaggaagccccgtttgtaagcgtgtgttgtggtgctttattgtacatcctccagtggcgttctttttactctaatgttcttttggtttcccccctcagaagaatcatgaatttgcaacagacctaatttttggttactttttgtcttattgatggatttgaaaatgaaagatttaataaggcaaagcagaatctgttgtccttaattatatttgcaatttggaatttgtgtgagttgatttagtaaaatgttaaaccgttaaaaaaaaaaaaaaaaaaaaaaaaaaaaaaaaaaaaagggggggggggaaaaaattcccgcggagggggccccaagttcaagcagagtatccccaagggttcttttggtggaacaagggggggcgccccataaaggaggagcggggaatataaaagcgcagggggacgctggcgccagggcggtaaaaacaaacggcgccgagcaccgggggcaacacccgcgcgacgaccgggggacagtcgcgggggaagagaccccatatattgtcgggggggggggcagcccatagtgcggccgaacttccctaacgaaggaagatataaagcagcgaaggggcaacatn

SEQ ID NO: 373513 - DNA, 1440 bp, Homo sapiens
  misc_feature (1440)..(1440): n is a, c, g, or t
ttgcatatttctttcttggaaaaggtaaaagactggaaagacttgttcacaaaggaaaaattgaccagtgctttaagaagacaccagatattaattccttgtggcagagtggagatgtgtggaaggaggaaaaagaacgggcccttggaagtagctggagctgctgtcagcgcaggccatggcctgcctgccaagtttgtgatccactgtaatagtccagtttggggtgcagacaagtgtgaagaacttctggaaaagacagtgaaaaactgcttggccctggctgatgataagaagctgaaatccattgcatttccatccatcggcagcggcaggaacggttttccaaagcagacagcagctcagctgattctgaaggccatctccagttacttcgtgtctacaatgtcctcttccatcaaaacggtgtacttcgtgctttttgacagcgagagtataggcatctatgtgcaggaaatggccaagctggacgccaactaggctgagcaatgacagaaccagctgcaccatgtaccccaccttcagtttaaaagaaaaaaaaaatccccttcactcctactgggaggtgggacccctttcattttcagttttgctcatctagggaaaataaggctttggtttccagtttaattgtttttgaccttctaaaatgtttttatgttagcactgatagttggcattactgttgttaagcactgtgttccagaccgtgtctgacttagtgtaacctaggagattttatagttttattttaatgaaaccctgattgacgcacagcagtggggagaacagcgtcttttacctgtcaccgaagccaggaagccccgtttgtaagcgtgtgttgtggtgctttattgtacatcctccagtggcgttctttttactctaatgttcttttggtttcccccctcagaagaatcatgaatttgcaacagacctaatttttggttactttttgtcttattgatggatttgaaaatgaaagatttaataaggcaaagcagaatctgttgtccttaattatatttgcaatttggaatttgtgtgagttgatttagtaaaatgttaaaccgttaaaaaaaaaaaaaaaaaaaaaaaaaaaaaaaaaaaaagggggggggggaaaaaattcccgcggagggggccccaagttcaagcagagtatccccaagggttcttttggtggaacaagggggggcgccccataaaggaggagcggggaatataaaagcgcagggggacgctggcgccagggcggtaaaaacaaacggcgccgagcaccgggggcaacacccgcgcgacgaccgggggacagtcgcgggggaagagaccccatatattgtcgggggggggggcagcccatagtgcggccgaacttccctaacgaaggaagatataaagcagcgaaggggcaacatn

SEQ ID NO: 373514 - DNA, 1107 bp, Homo sapiens
  misc_feature (1107)..(1107): n is a, c, g, or t
tttaaactgaaggtggggtacatggcagctcagctgattctgaaggccatctccagttacttcgtgtctacaatgtcctcttccatcaaaacggtgtacttcgtgctttttgacagcgagagtataggcatctatgtgcaggaaatggccaagctggacgccaactaggctgagcaatgacagaaccagctgcaccatgtaccccaccttcagtttaaaagaaaaaaaaaatccccttcactcctactgggaggtgggacccctttcattttcagttttgctcatctagggaaaataaggctttggtttccagtttaattgtttttgaccttctaaaatgtttttatgttagcactgatagttggcattactgttgttaagcactgtgttccagaccgtgtctgacttagtgtaacctaggagattttatagttttattttaatgaaaccctgattgacgcacagcagtggggagaacagcgtcttttacctgtcaccgaagccaggaagccccgtttgtaagcgtgtgttgtggtgctttattgtacatcctccagtggcgttctttttactctaatgttcttttggtttcccccctcagaagaatcatgaatttgcaacagacctaatttttggttactttttgtcttattgatggatttgaaaatgaaagatttaataaggcaaagcagaatctgttgtccttaattatatttgcaatttggaatttgtgtgagttgatttagtaaaatgttaaaccgttaaaaaaaaaaaaaaaaaaaaaaaaaaaaaaaaaaaaagggggggggggaaaaaattcccgcggagggggccccaagttcaagcagagtatccccaagggttcttttggtggaacaagggggggcgccccataaaggaggagcggggaatataaaagcgcagggggacgctggcgccagggcggtaaaaacaaacggcgccgagcaccgggggcaacacccgcgcgacgaccgggggacagtcgcgggggaagagaccccatatattgtcgggggggggggcagcccatagtgcggccgaacttccctaacgaaggaagatataaagcagcgaaggggcaacatn

SEQ ID NO: 373515 - DNA, 2136 bp, Homo sapiens
gccggccgcgaggactggttccagttcactcggcagcggcgccgggcggagggggagagcgcgggccgcgcgggcgggaagcgaagaggcgggcgggccagcgaggagcgcggagagaaaaggcgcgagcggccaggagggctcaggccgagacaccttgcagctgccgccgccgccaccgagccgccgctgtgctcactgatccgcctccagggccaccgccatgtcgagccgcggtgggaagaagaagtccaccaagacgtccaggtctgccaaagcaggagtcatctttcccgtggggcggatgctgcggtacatcaagaaaggccaccccaagtacaggattggagtgggggcacccgtgtacatggccgccgtcctggaatacctgacagcggagattctggagctggctggcaatgcagcgagagacaacaagaagggacgggtcacaccccggcacatcctgctggctgtggccaatgatgaagagctgaatcagctgctaaaaggagtcaccatagccagtgggggtgtgttacccaacatccaccccgagttgctagcgaagaagcggggatccaaaggaaagttggaagccatcatcacaccacccccagccaaaaaggccaagtctccatcccagaagaagcctgtatctaaaaaagcaggaggcaagaaaggggcccggaaatccaagaagcagggtgaagtcagtaaggcagccagcgccgacagcacaaccgagggcacacctgccgacggcttcacagtcctctccaccaagagcctcttccttggccagaagctgaaccttattcacagtgaaatcagtaatttagccggctttgaggtggaggccataatcaatcctaccaatgctgacattgaccttaaagatgacctaggtaattggggacggggttcggcaccaccagctgtcagatgaaaagttatggaacccagaatttaggcatttcatcttcccagactttacagtggtcaagccaaatttccaaatccaagattgatatttgagtgtagacgctgaatatcaacttactccaggccattccaagtgtaaacggtctgtttcattaagtgtgattggctactctctcctcaattgcaaatacattgccatctgaattctcttccataatgatcaaactgactgctggttacttggggagggatttttaaacgtgttggtttttgtttgtttttttgtttttactttagaactgaaaaatctcaggtaactacaaaatgatagtttctccatttaaaccttaattagaaatgacaaagcttgaaagagaagacaggccacatcagtatgctattaagctgtctttagtccacaatttactaccatcacttcaacttttctttagaactgaaaacagtatatgactgaatgccaccttcttgaattatttggctagaggatggtattaaacagaagggcaatatctccaagtgagttcttatggaggaaaactgccccagagccatggtgtctccctgttcaagatggcagatggttcagggcagactgagaggtgcccctcaagtgtcctgcctctatggctttatctttgcatatgtggcactgtcagctcaatggcacgacagggctgctctgctgctcttcgatgtagaggcttgccaggggaaataggcacacagatgcagcctccttcctaaccctcaactgcaatctattttgtatcccttgagctctcagcttctgctgtttttgtcagatagcagacttccttactgggagatacactcattccatgggcccaggcctgacccacacgaactgggtgcaacagtgggctgaaaacatgaggactggactcaagagtgtccagcttgaacttgttttccaactgccttatacagatacttaaaaaaaaaaaggccacaagctagaaaaagcaaggattctatccaaagcacattttatactaaaatacaaaggccaggtgcagtggctcacacctgtaactccagcgttttgggaggctgaggcaggaggattgagtgaggccaggattcgaagctgcagtgagctatgattgtgccactgcactccagcctaggcaacagcaagatcctatctgt

SEQ ID NO: 373516 - DNA, 2218 bp, Homo sapiens
gccggccgcgaggactggttccagttcactcggcagcggcgccgggcggagggggagagcgcgggccgcgcgggcgggaagcgaagaggcgggcgggccagcgaggagcgcggagagaaaaggcgcgagcggccaggagggctcaggccgagacaccttgcagctgccgccgccgccaccgagccgccgctgtgctcactgatccgcctccagggccaccgccatgtcgagccgcggtgggaagaagaagtccaccaagacgtccaggtctgccaaagcaggagtcatctttcccgtggggcggatgctgcggtacatcaagaaaggccaccccaagtacaggattggagtgggggcacccgtgtacatggccgccgtcctggaatacctgacagcggagattctggagctggctggcaatgcagcgagagacaacaagaagggacgggtcacaccccggcacatcctgctggctgtggccaatgatgaagagctgaatcagctgctaaaaggagtcaccatagccagtgggggtgtgttacccaacatccaccccgagttgctagcgaagaagcggggatccaaaggaaagttggaagccatcatcacaccacccccagccaaaaaggccaagtctccatcccagaagaagcctgtatctaaaaaagcaggaggcaagaaaggggcccggaaatccaagaagcagggtgaagtcagtaaggcagccagcgccgacagcacaaccgagggcacacctgccgacggcttcacagtcctctccaccaagagcctcttccttggccagaagctgaaccttattcacagtgaaatcagtaatttagccggctttgaggtggaggccataatcaatcctaccaatgctgacattgaccttaaagatgacctaggtaattggggacggggttcggcaccaccagctgtcagatgaaaagttatggaacccagaatttaggcatttcatcttcccagactttacagtggtcaagccaaatttccaaatccaagattgatatttgagtgtagacgctgaatatcaacttactccaggccattccaagtgtaaacggtctgtttcattaagtgtgattggctactctctcctcaattgcaaatacattgccatctgaattctcttccataatgatcaaactgactgctggttacttggggagggatttttaaacgtgttggtttttgtttgtttttttgtttttactttagaactgaaaaatctcaggtaactacaaaatgatagtttctccatttaaaccttaattagaaatgacaaagcttgaaagagaagacaggccacatcagtatgctattaagctgtctttagtccacaatttactaccatcacttcaacttttctttagaactgaaaacagtatatgactgaatgccaccttcttgaattatttggctagaggatggtattaaacagaagggcaatatctccaagtgagttcttatggaggaaaactgccccagagccatggtgtctccctgttcctatggctttatctttgcatatgtggcactgtcagctcaatggcacgacagggctgctctgctgctcttcgatgtagaggcttgccaggggaaataggcacacagatgcagcctccttcctaaccctcaactgcaatctattttgtatcccttgagctctcagcttctgctgtttttgtcagatagcagacttccttactgggagatacactcattccatgggcccaggcctgacccacacgaactgggtgcaacagtgggctgaaaacatgaggactggactcaagagtgtccagcttgaacttgttttccaactgccttatacagatacttaaaaaaaaaaaggccacaagctagaaaaagcaaggattctatccaaagcacattttatactaaaatacaaaggccaggtgcagtggctcacacctgtaactccagcgttttgggaggctgaggcaggaggattgagtgaggccaggagttggagaccaacctgggcaagatagtgagacctcatctctacaaaaaataaaaaacttagctgggcttggtgacacgtgcctgtagtctcagctactcaggaggctgaggcaggaggattgcttgagcccaggagttcgaagctgcagtgagctatgattgtgccactgcactccagcctaggcaacagcaagatcctatctgt

SEQ ID NO: 373517 - DNA, 1232 bp, Homo sapiens
gccggccgcgaggactggttccagttcactcggcagcggcgccgggcggagggggagagcgcgggccgcgcgggcgggaagcgaagaggcgggcgggccagcgaggagcgcggagagaaaaggcgcgagcggccaggagggctcaggccgagacaccttgcagctgccgccgccgccaccgagccgccgctgtgctcactgatccgcctccagggccaccgccatgtcgagccgcggtgggaagaagaagtccaccaagacgtccaggtctgccaaagcaggagtcatctttcccgtggggcggatgctgcggtacatcaagaaaggccaccccaagtacaggattggagtgggggcacccgtgtacatggccgccgtcctggaatacctgacagcggagattctggagctggctggcaatgcagcgagagacaacaagaagggacgggtcacaccccggcacatcctgctggctgtggccaatgatgaagagctgaatcagctgctaaaaggagtcaccatagccagtgggggtgtgttacccaacatccaccccgagttgctagcgaagaagcggggatccaaaggaaagttggaagccatcatcacaccacccccagccaaaaaggccaagtctccatcccagaagaagcctgtatctaaaaaagcaggaggcaagaaaggggcccggaaatccaagaagcagggtgaagtcagtaaggcagccagcgccgacagcacaaccgagggcacacctgccgacggcttcacagtcctctccaccaagagcctcttccttggccagaagctgaaccttattcacagtgaaatcagtaatttagccggctttgaggtggaggccataatcaatcctaccaatgctgacattgaccttaaagatgacctagttgcaagttgtacaggctgacattgcctcgatcgacagtgatgctgtcgttcacccgacaaacactgacttctacatcggtggtgaagtaggaaacacgctggagaagaaaggtggcaaggagtttgtggaagctgtcctggaactccggaaaaagaacgggcccttggaagtagctggagctgctgtcagcgcaggccatggcctgcctgccaagtttgtgatccactgtaatagtccagtttggggtgcactaccttcgcgagactcgacctgtcatgcgagtcagcacgcacacatagcgaattcggtaccgagctcgatc

SEQ ID NO: 373518 - DNA, 1409 bp, Homo sapiens
  misc_feature (1409)..(1409): n is a, c, g, or t
gccggccgcgaggactggttccagttcactcggcagcggcgccgggcggagggggagagcgcgggccgcgcgggcgggaagcgaagaggcgggcgggccagcgaggagcgcggagagaaaaggcgcgagcggccaggagggctcaggccgagacaccttgcagctgccgccgccgccaccgagccgccgctgtgctcactgatccgcctccagggccaccgccatgtcgagccgcggtgggaagaagaagtccaccaagacgtccaggtctgccaaagcaggagtcatctttcccgtggggcggatgctgcggtacatcaagaaaggccaccccaagtacaggattggagtgggggcacccgtgtacatggccgccgtcctggaatacctgacagcggagattctggagctggctggcaatgcagcgagagacaacaagaagggacgggtcacaccccggcacatcctgctggctgtggccaatgatgaagagctgaatcagaccccaccttcagtttaaaagaaaaaaaaaatccccttcactcctactgggaggtgggacccctttcattttcagttttgctcatctagggaaaataaggctttggtttccagtttaattgtttttgaccttctaaaatgtttttatgttagcactgatagttggcattactgttgttaagcactgtgttccagaccgtgtctgacttagtgtaacctaggagattttatagttttattttaatgaaaccctgattgacgcacagcagtggggagaacagcgtcttttacctgtcaccgaagccaggaagccccgtttgtaagcgtgtgttgtggtgctttattgtacatcctccagtggcgttctttttactctaatgttcttttggtttcccccctcagaagaatcatgaatttgcaacagacctaatttttggttactttttgtcttattgatggatttgaaaatgaaagatttaataaggcaaagcagaatctgttgtccttaattatatttgcaatttggaatttgtgtgagttgatttagtaaaatgttaaaccgttaaaaaaaaaaaaaaaaaaaaaaaaaaaaaaaaaaaaagggggggggggaaaaaattcccgcggagggggccccaagttcaagcagagtatccccaagggttcttttggtggaacaagggggggcgccccataaaggaggagcggggaatataaaagcgcagggggacgctggcgccagggcggtaaaaacaaacggcgccgagcaccgggggcaacacccgcgcgacgaccgggggacagtcgcgggggaagagaccccatatattgtcgggggggggggcagcccatagtgcggccgaacttccctaacgaaggaagatataaagcagcgaaggggcaacatn

SEQ ID NO: 373519 - DNA, 932 bp, Homo sapiens
  misc_feature (932)..(932): n is a, c, g, or t
tttaaactgaaggtggggtacatggaccccaccttcagtttaaaagaaaaaaaaaatccccttcactcctactgggaggtgggacccctttcattttcagttttgctcatctagggaaaataaggctttggtttccagtttaattgtttttgaccttctaaaatgtttttatgttagcactgatagttggcattactgttgttaagcactgtgttccagaccgtgtctgacttagtgtaacctaggagattttatagttttattttaatgaaaccctgattgacgcacagcagtggggagaacagcgtcttttacctgtcaccgaagccaggaagccccgtttgtaagcgtgtgttgtggtgctttattgtacatcctccagtggcgttctttttactctaatgttcttttggtttcccccctcagaagaatcatgaatttgcaacagacctaatttttggttactttttgtcttattgatggatttgaaaatgaaagatttaataaggcaaagcagaatctgttgtccttaattatatttgcaatttggaatttgtgtgagttgatttagtaaaatgttaaaccgttaaaaaaaaaaaaaaaaaaaaaaaaaaaaaaaaaaaaagggggggggggaaaaaattcccgcggagggggccccaagttcaagcagagtatccccaagggttcttttggtggaacaagggggggcgccccataaaggaggagcggggaatataaaagcgcagggggacgctggcgccagggcggtaaaaacaaacggcgccgagcaccgggggcaacacccgcgcgacgaccgggggacagtcgcgggggaagagaccccatatattgtcgggggggggggcagcccatagtgcggccgaacttccctaacgaaggaagatataaagcagcgaaggggcaacatn

SEQ ID NO: 373520 - DNA, 905 bp, Homo sapiens
gccggccgcgaggactggttccagttcactcggcagcggcgccgggcggagggggagagcgcgggccgcgcgggcgggaagcgaagaggcgggcgggccagcgaggagcgcggagagaaaaggcgcgagcggccaggagggctcaggccgagacaccttgcagctgccgccgccgccaccgagccgccgctgtgctcactgatccgcctccagggccaccgccatgtcgagccgcggtgggaagaagaagtccaccaagacgtccaggtctgccaaagcaggagtcatctttcccgtggggcggatgctgcggtacatcaagaaaggccaccccaagtacaggattggagtgggggcacccgtgtacatggccgccgtcctggaatacctgacagcggagattctggagctggctggcaatgcagcgagagacaacaagaagggacgggtcacaccccggcacatcctgctggctgtggccaatgatgaagagctgaatcagctgctaaaaggagtcaccatagccagtgggggtgtgttacccaacatccaccccgagttgctagcgaagaagcggggatccaaaggaaagttggaagccatcatcacaccacccccagccaaaaaggccaagtctccatcccagaagaagcctgtatctaaaaaagcaggaggcaagaaaggggcccggaaatccaagaagcagggtgaagtcagtaaggcagccagcgccgacagcacaaccgagggcacacctgccgacggcttcacagtcctctccaccaagagcctcttccttggccagaaggtaggcagatgcgcggcctcagtctactcgagggccccaagggacaggtgggcacaggctacttccactggaaggctgtgggggatcccgggggcca

SEQ ID NO: 373521 - DNA, 1274 bp, Homo sapiens
gccggccgcgaggactggttccagttcactcggcagcggcgccgggcggagggggagagcgcgggccgcgcgggcgggaagcgaagaggcgggcgggccagcgaggagcgcggagagaaaaggcgcgagcggccaggagggctcaggccgagacaccttgcagctgccgccgccgccaccgagccgccgctgtgctcactgatccgcctccagggccaccgccatgtcgagccgcggtgggaagaagaagtccaccaagacgtccaggtctgccaaagcaggagtcatctttcccgtggggcggatgctgcggtacatcaagaaaggccaccccaagtacaggattggagtgggggcacccgtgtacatggccgccgtcctggaatacctgacagcggagattctggagctggctggcaatgcagcgagagacaacaagaagggacgggtcacaccccggcacatcctgctggctgtggccaatgatgaagagctgaatcagctgctaaaaggagtcaccatagccagtgggggtgtgttacccaacatccaccccgagttgctagcgaagaagcggggatccaaaggaaagttggaagccatcatcacaccacccccagccaaaaaggccaagtctccatcccagaagaagcctgtatctaaaaaagcaggaggcaagaaaggggcccggaaatccaagaagcagggtgaagtcagtaaggcagccagcgccgacagcacaaccgagggcacacctgccgacggcttcacagtcctctccaccaagagcctcttccttggccagaagccgccccagtgatgcaactttgccaggacgccatggttttgtaaaagacaattcacttttattgaaaataaaaatgatgcaaaggcttttaagacctgagaatgagagttaactaatatttctttattgacatcaaaaaggggtgggaagaaagaattaaactcttcttaattttttaatcctatacttaaagaattaaaggaatgaatttgacgttccaagttaatctgtgtttagtttgagtgtggtaacaaacttggatctgaagctgcatcatttttaaaccctcactgtcaatttcttttgcatcacagtgacacggttccctcgctcacgtcattgcaagttctcctcctacccctttccctctttctgtcactaattgcactctctctcatgatgcaattcctgtggtggactctgtgttccagaaaataaccattactgtttacatttttaaccattc

SEQ ID NO: 373522 - DNA, 960 bp, Homo sapiens
gccggccgcgaggactggttccagttcactcggcagcggcgccgggcggagggggagagcgcgggccgcgcgggcgggaagcgaagaggcgggcgggccagcgaggagcgcggagagaaaaggcgcgagcggccaggagggctcaggccgagacaccttgcagctgccgccgccgccaccgagccgccgctgtgctcactgatccgcctccagggccaccgccatgtcgagccgcggtgggaagaagaagtccaccaagacgtccaggtctgccaaagcaggagtcatctttcccgtggggcggatgctgcggtacatcaagaaaggccaccccaagtacaggattggagtgggggcacccgtgtacatggccgccgtcctggaatacctgacagcggagattctggagctggctggcaatgcagcgagagacaacaagaagggacgggtcacaccccggcacatcctgctggctgtggccaatgatgaagagctgaatcagctgctaaaaggagtcaccatagccagtgggggtgtgttacccaacatccaccccgagttgctagcgaagaagcggggatccaaaggaaagttggaagccatcatcacaccacccccagccaaaaaggccaagtctccatcccagaagaagcctgtatctaaaaaagcaggaggcaagaaaggggcccggaaatccaagaagcagggtgaagtcagtaaggcagccagcgccgacagcacaaccgagggcacacctgccgacggcttcacagtcctctccaccaagagcctcttccttggccagaagtgacacggttccctcgctcacgtcattgcaagttctcctcctacccctttccctctttctgtcactaattgcactctctctcatgatgcaattcctgtggtggactctgtgttccagaaaataaccattactgtttacatttttaaccattc

SEQ ID NO: 373523 - DNA, 726 bp, Homo sapiens
gccggccgcgaggactggttccagttcactcggcagcggcgccgggcggagggggagagcgcgggccgcgcgggcgggaagcgaagaggcgggcgggccagcgaggagcgcggagagaaaaggcgcgagcggccaggagggctcaggccgagacaccttgcagctgccgccgccgccaccgagccgccgctgtgctcactgatccgcctccagggccaccgccatgtcgagccgcggtgggaagaagaagtccaccaagacgtccaggtctgccaaagcaggagtcatctttcccgtggggcggatgctgcggtacatcaagaaaggccaccccaagtacaggattggagtgggggcacccgtgtacatggccgccgtcctggaatacctgacagcggagattctggagctggctggcaatgcagcgagagacaacaagaagggacgggtcacaccccggcacatcctgctggctgtggccaatgatgaagagctgaatcagctgctaaaaggagtcaccatagccagtgggggtgtgttacccaacatccaccccgagttgctagcgaagaagcggggatccaaaggaaagttggaagccatcatcacaccacccccagccaaaaaggccaagtctccatcccagaagaagcctgtatctaaaaaagcaggaggcaagaaaggggcccggaaatccaaggtatgtgatttggccagaatgtatga

SEQ ID NO: 373524 - DNA, 1974 bp, Homo sapiens
aagccagccagcagtcacagtgatggggacagccttaaaggcccatagtcacttggaagacaatggcagagcccttaggggtttgcccaagccaggtaggatgttagcaccagcctagtgctcaaggatgaggacagtcacatccaccagcccccaaccctcagcaatgagtactcattctaggtcctgatagctgccttactttggcccccagatcacaagtccctttaaaggaaagctgatctcctcgtccactgtggcttgtgcttccttttgtcccaggtgccacccacgggctctgaacattcatcctagtttgcttgctcccgcatcccgagcagcatttgagtcttatgtttgaaatgggttcatttgagccagcaactccctgcttcccttttgtgcctcgtgcacttggagtgtccactgtcctttacctgtatcccaaggctccttctctgagacttcccagctctcctgttatttcccacctcatgcttttctttgcagctgaaccttattcacagtgaaatcagtaatttagccggctttgaggtggaggccataatcaatcctaccaatgctgacattgaccttaaagatgacctaggtaattggggacggggttcggcaccaccagctgtcagatgaaaagttatggaacccagaatttaggcatttcatcttcccagactttacagtggtcaagccaaatttccaaatccaagattgatatttgagtgtagacgctgaatatcaacttactccaggccattccaagtgtaaacggtctgtttcattaagtgtgattggctactctctcctcaattgcaaatacattgccatctgaattctcttccataatgatcaaactgactgctggttacttggggagggatttttaaacgtgttggtttttgtttgtttttttgtttttactttagaactgaaaaatctcaggtaactacaaaatgatagtttctccatttaaaccttaattagaaatgacaaagcttgaaagagaagacaggccacatcagtatgctattaagctgtctttagtccacaatttactaccatcacttcaacttttctttagaactgaaaacagtatatgactgaatgccaccttcttgaattatttggctagaggatggtattaaacagaagggcaatatctccaagtgagttcttatggaggaaaactgccccagagccatggtgtctccctgttcaagatggcagatggttcagggcagactgagaggtgcccctcaagtgtcctgcctctatggctttatctttgcatatgtggcactgtcagctcaatggcacgacagggctgctctgctgctcttcgatgtagaggcttgccaggggaaataggcacacagatgcagcctccttcctaaccctcaactgcaatctattttgtatcccttgagctctcagcttctgctgtttttgtcagatagcagacttccttactgggagatacactcattccatgggcccaggcctgacccacacgaactgggtgcaacagtgggctgaaaacatgaggactggactcaagagtgtccagcttgaacttgttttccaactgccttatacagatacttaaaaaaaaaaaggccacaagctagaaaaagcaaggattctatccaaagcacattttatactaaaatacaaaggccaggtgcagtggctcacacctgtaactccagcgttttgggaggctgaggcaggaggattgagtgaggccaggagttggagaccaacctgggcaagatagtgagacctcatctctacaaaaaataaaaaacttagctgggcttggtgacacgtgcctgtagtctcagctactcaggaggctgaggcaggaggattgcttgagcccaggagttcgaagctgcagtgagctatgattgtgccactgcactccagcctaggcaacagcaagatcctatctgt

SEQ ID NO: 373525 - DNA, 1332 bp, Homo sapiens
ggagggaggggagtagagggcaggcccccatttaagtacccgggatggggcaccaatgccttcaggcggtaaaccaatttaggaagacgtggcgggctttgtggcggctcctcctctttcggcctgtccgcagtttttaaaaaacgtgtgtgatgataaggaatgactgtctacattagtaattcccaacttgggtccgaaagtgaacttttgctgaagcgaagtagctaaccgcttccatgtgcaagtgtgctcactgatccgcctccagggccaccgccatgtcgagccgcggtgggaagaagaagtccaccaagacgtccaggtctgccaaagcaggagtcatctttcccgtggggcggatgctgcggtacatcaagaaaggccaccccaagtacaggattggagtgggggcacccgtgtacatggccgccgtcctggaatacctgacagcggagattctggagctggctggcaatgcagcgagagacaacaagaagggacgggtcacaccccggcacatcctgctggctgtggccaatgatgaagagctgaatcagctgctaaaaggagtcaccatagccagtgggggtgtgttacccaacatccaccccgagttgctagcgaagaagcggggatccaaaggaaagttggaagccatcatcacaccacccccagccaaaaaggccaagtctccatcccagaagaagcctgtatctaaaaaagcaggaggcaagaaaggggcccggaaatccaagaagcagggtgaagtcagtaaggcagccagcgccgacagcacaaccgagggcacacctgccgacggcttcacagtcctctccaccaagagcctcttccttggccagaagccgccccagtgatgcaactttgccaggacgccatggttttgtaaaagacaattcacttttattgaaaataaaaatgatgcaaaggcttttaagacctgagaatgagagttaactaatatttctttattgacatcaaaaaggggtgggaagaaagaattaaactcttcttaattttttaatcctatacttaaagaattaaaggaatgaatttgacgttccaagttaatctgtgtttagtttgagtgtggtaacaaacttggatctgaagctgcatcatttttaaaccctcactgtcaatttcttttgcatcacagtgacacggttccctcgctcacgtcattgcaagttctcctcctacccctttccctctttctgtcactaattgcactctctctcatgatgcaattcctgtggtggactctgtgttccagaaaataaccattactgtttacatttttaaccattc

SEQ ID NO: 373526 - DNA, 787 bp, Homo sapiens
ggcaggcagctcctgtgggagatggggacccttggttagtctggaggaggagctgcttctgtgggataaactggtcatcagatagcaccagccagggaatcaggcagaagtcaagccttggtggtggaaggtgaacaacctagccggcagcctgcttgtcctggggggcactaacggtagagcctcaggtctgattcagggctctacaggggattgttttcagactgtactgatgggtgcactgggtttcttcactgaaccaccagatgactcttccagctaattgtttgtttgttttaaccatgggcaatatattttcagccgccccagtgatgcaactttgccaggacgccatggttttgtaaaagacaattcacttttattgaaaataaaaatgatgcaaaggcttttaagacctgagaatgagagttaactaatatttctttattgacatcaaaaaggggtgggaagaaagaattaaactcttcttaattttttaatcctatacttaaagaattaaaggaatgaatttgacgttccaagttaatctgtgtttagtttgagtgtggtaacaaacttggatctgaagctgcatcatttttaaaccctcactgtcaatttcttttgcatcacagtgacacggttccctcgctcacgtcattgcaagttctcctcctacccctttccctctttctgtcactaattgcactctctctcatgatgcaattcctgtggtggactctgtgttccagaaaataaccattactgtttacatttttaaccattc

SEQ ID NO: 373527 - DNA, 2048 bp, Homo sapiens
ggagggaggggagtagagggcaggcccccatttaagtacccgggatggggcaccaatgccttcaggcggtaaaccaatttaggaagacgtggcgggctttgtggcggctcctcctctttcggcctgtccgcagtttttaaaaaacgtgtgtgatgataaggaatgactgtctacattagtaattcccaacttgggtccgaaagtgaacttttgctgaagcgaagtagctaaccgcttccatgtgcaaggcaggttccagacttcggggtgaggaggattaactgaaggaccccaggggaaccggtgtgctcactgatccgcctccagggccaccgccatgtcgagccgcggtgggaagaagaagtccaccaagacgtccaggtctgccaaagcaggagtcatctttcccgtggggcggatgctgcggtacatcaagaaaggccaccccaagtacaggattggagtgggggcacccgtgtacatggccgccgtcctggaatacctgacagcggagattctggagctggctggcaatgcagcgagagacaacaagaagggacgggtcacaccccggcacatcctgctggctgtggccaatgatgaagagctgaatcagctgctaaaaggagtcaccatagccagtgggggtgtgttacccaacatccaccccgagttgctagcgaagaagcggggatccaaaggaaagttggaagccatcatcacaccacccccagccaaaaaggccaagtctccatcccagaagaagcctgtatctaaaaaagcaggaggcaagaaaggggcccggaaatccaagaagcagggtgaagtcagtaaggcagccagcgccgacagcacaaccgagggcacacctgccgacggcttcacagtcctctccaccaagagcctcttccttggccagaagctgaaccttattcacagtgaaatcagtaatttagccggctttgaggtggaggccataatcaatcctaccaatgctgacattgaccttaaagatgacctaggaaacacgctggagaagaaaggtggcaaggagtttgtggaagctgtcctggaactccggaaaaagaacgggcccttggaagtagctggagctgctgtcagcgcaggccatggcctgcctgccaagtttgtgatccactgtaatagtccagtttggggtgcagacaagtgtgaagaacttctggaaaagacagtgaaaaactgcttggccctggctgatgataagaagctgaaatccattgcatttccatccatcggcagcggcaggaacggttttccaaagcagacagcagctcagctgattctgaaggccatctccagttacttcgtgtctacaatgtcctcttccatcaaaacggtgtacttcgtgctttttgacagcgagagtataggcatctatgtgcaggaaatggccaagctggacgccaactaggctgagcaatgacagaaccagctgcaccatgtaccccaccttcagtttaaaagaaaaaaaaaatccccttcactcctactgggaggtgggacccctttcattttcagttttgctcatctagggaaaataaggctttggtttccagtttaattgtttttgaccttctaaaatgtttttatgttagcactgatagttggcattactgttgttaagcactgtgttccagaccgtgtctgacttagtgtaacctaggagattttatagttttattttaatgaaaccctgattgacgcacagcagtggggagaacagcgtcttttacctgtcaccgaagccaggaagccccgtttgtaagcgtgtgttgtggtgctttattgtacatcctccagtggcgttctttttactctaatgttcttttggtttcccccctcagaagaatcatgaatttgcaacagacctaatttttggttactttttgtcttattgatggatttgaaaatgaaagatttaataaggcaaagcagaatctgttgtccttaattatatttgcaatttggaatttgtgtgagttgatttagtaaaatgttaaaccgtt

SEQ ID NO: 373528 - DNA, 988 bp, Homo sapiens
ggagggaggggagtagagggcaggcccccatttaagtacccgggatggggcaccaatgccttcaggcggtaaaccaatttaggaagacgtggcgggctttgtggcggctcctcctctttcggcctgtccgcagtttttaaaaaacgtgtgtgatgataaggaatgactgtctacattagtaattcccaacttgggtccgaaagtgaacttttgctgaagcgaagtagctaaccgcttccatgtgcaaggcaggttccagacttcgggtgtgctcactgatccgcctccagggccaccgccatgtcgagccgcggtgggaagaagaagtccaccaagacgtccaggtctgccaaagcaggagtcatctttcccgtggggcggatgctgcggtacatcaagaaaggccaccccaagtacaggattggagtgggggcacccgtgtacatggccgccgtcctggaatacctgacagcggagattctggagctggctggcaatgcagcgagagacaacaagaagggacgggtcacaccccggcacatcctgctggctgtggccaatgatgaagagctgaatcagctgctaaaaggagtcaccatagccagtgggggtgtgttacccaacatccaccccgagttgctagcgaagaagcggggatccaaaggaaagttggaagccatcatcacaccacccccagccaaaaaggccaagtctccatcccagaagaagcctgtatctaaagccgagcagaagggccggaatcagagaagtgagcagaggagcaggcgaagaacggggcctgcgaggtggaattccgcacgagtacgtcggcgaaatcgagacagcatgaagcgggcaacacacgccggtaacaagaacggaagtatagttttcctgatgctttccgccccccagcgcctgccctcccccttctccaccccaaaacgaaagcaacaaacaagaacaaacaacacagccccaaagaaca

SEQ ID NO: 373529 - DNA, 2278 bp, Homo sapiens
  misc_feature (2278)..(2278): n is a, c, g, or t
gccggccgcgaggactggttccagttcactcggcagcggcgccgggcggagggggagagcgcgggccgcgcgggcgggaagcgaagaggcgggcgggccagcgaggagcgcggagagaaaaggcgcgagcggccaggagggctcaggccgagacaccttgcagctgccgccgccgccaccgagccgccgctgtgctcactgatccgcctccagggccaccgccatgtcgagccgcggtgggaagaagaagtccaccaagacgtccaggtctgccaaagcaggagtcatctttcccgtggggcggatgctgcggtacatcaagaaaggccaccccaagtacaggattggagtgggggcacccgtgtacatggccgccgtcctggaatacctgacagcggagattctggagctggctggcaatgcagcgagagacaacaagaagggacgggtcacaccccggcacatcctgctggctgtggccaatgatgaagagctgaatcagctgctaaaaggagtcaccatagccagtgggggtgtgttacccaacatccaccccgagttgctagcgaagaagcggggatccaaaggaaagttggaagccatcatcacaccacccccagccaaaaaggccaagtctccatcccagaagaagcctgtatctaaaaaagcaggaggcaagaaaggggcccggaaatccaagaagcagggtgaagtcagtaaggcagccagcgccgacagcacaaccgagggcacacctgccgacggcttcacagtcctctccaccaagagcctcttccttggccagaagctgaaccttattcacagtgaaatcagtaatttagccggctttgaggtggaggccataatcaatcctaccaatgctgacattgaccttaaagatgacctaggaaacacgctggagaagaaaggtggcaaggagtttgtggaagctgtcctggaactccggaaaaagaacgggcccttggaagtagctggagctgctgtcagcgcaggccatggcctgcctgccaagtttgtgatccactgtaatagtccagtttggggtgcagacaagtgtgaagaacttctggaaaagacagtgaaaaactgcttggccctggctgatgataagaagctgaaatccattgcatttccatccatcggcagcggcaggaacggttttccaaagcagacagcagctcagctgattctgaaggccatctccagttacttcgtgtctacaatgtcctcttccatcaaaacggtgtacttcgtgctttttgacagcgagagtataggcatctatgtgcaggaaatggccaagctggacgccaactaggctgagcaatgacagaaccagctgcaccatgtaccccaccttcagtttaaaagaaaaaaaaaatccccttcactcctactgggaggtgggacccctttcattttcagttttgctcatctagggaaaataaggctttggtttccagtttaattgtttttgaccttctaaaatgtttttatgttagcactgatagttggcattactgttgttaagcactgtgttccagaccgtgtctgacttagtgtaacctaggagattttatagttttattttaatgaaaccctgattgacgcacagcagtggggagaacagcgtcttttacctgtcaccgaagccaggaagccccgtttgtaagcgtgtgttgtggtgctttattgtacatcctccagtggcgttctttttactctaatgttcttttggtttcccccctcagaagaatcatgaatttgcaacagacctaatttttggttactttttgtcttattgatggatttgaaaatgaaagatttaataaggcaaagcagaatctgttgtccttaattatatttgcaatttggaatttgtgtgagttgatttagtaaaatgttaaaccgttaaaaaaaaaaaaaaaaaaaaaaaaaaaaaaaaaaaaagggggggggggaaaaaattcccgcggagggggccccaagttcaagcagagtatccccaagggttcttttggtggaacaagggggggcgccccataaaggaggagcggggaatataaaagcgcagggggacgctggcgccagggcggtaaaaacaaacggcgccgagcaccgggggcaacacccgcgcgacgaccgggggacagtcgcgggggaagagaccccatatattgtcgggggggggggcagcccatagtgcggccgaacttccctaacgaaggaagatataaagcagcgaaggggcaacatn

SEQ ID NO: 373530 - DNA, 1938 bp, Homo sapiens
  misc_feature (6)..(6): n is a, c, g, or t
gaaagnaccaaggaccttacggctaggtacgaggctgtgtcggcgccgggcggagggggagagcgcgggccgcgcgggcgggaagcgaagaggcgggcgggccagcgaggagcgcggagagaaaaggcgcgagcggccaggagggctcaggccgagacaccttgcagctgccgccgccgccaccgagccgccgctgtgctcactgatccgcctccagggccaccgccatgtcgagccgcggtgggaagaagaagtccaccaagacgtccaggtctgccaaagcaggagtcatctttcccgtggggcggatgctgcggtacatcaagaaaggccaccccaagtacaggattggagtgggggcacccgtgtacatggccgccgtcctggaatacctgacagcggagattctggagctggctggcaatgcagcgagagacaacaagaagggacgggtcacaccccggcacatcctgctggctgtggccaatgatgaagagctgaatcagctgctaaaaggagtcaccatagccagtgggggtgtgttacccaacatccaccccgagttgctagcgaagaagcggggatccaaaggaaagttggaagccatcatcacaccacccccagccaaaaaggccaagtctccatcccagaagaagcctgtatctaaaaaagcaggaggcaagaaaggggcccggaaatccaagaagcagggtgaagtcagtaaggcagccagcgccgacagcacaaccgagggcacacctgccgacggcttcacagtcctctccaccaagagcctcttccttggccagaagctgaaccttattcacagtgaaatcagtaatttagccggctttgaggtggaggccataatcaatcctaccaatgctgacattgaccttaaagatgacctaggaaacacgctggagaagaaaggtggcaaggagtttgtggaagctgtcctggaactccggaaaaagaacgggcccttggaagtagctggagctgctgtcagcgcaggccatggcctgcctgccaagtttgtgatccactgtaatagtccagtttggggtgcagacaagtgtgaagaacttctggaaaagacagtgaaaaactgcttggccctggctgatgataagaagctgaaatccattgcatttccatccatcggcagcggcaggaacggttttccaaagcagacagcagctcagctgattctgaaggccatctccagttacttcgtgtctacaatgtcctcttccatcaaaacggtgtacttcgtgctttttgacagcgagagtataggcatctatgtgcaggaaatggccaagctggacgccaactaggctgagcaatgacagaaccagctgcaccatgtaccccaccttcagtttaaaagaaaaaaaaaatccccttcactcctactgggaggtgggacccctttcattttcagttttgctcatctagggaaaataaggctttggtttccagtttaattgtttttgaccttctaaaatgtttttatgttagcactgatagttggcattactgttgttaagcactgtgttccagaccgtgtctgacttagtgtaacctaggagattttatagttttattttaatgaaaccctgattgacgcacagcagtggggagaacagcgtcttttacctgtcaccgaagccaggaagccccgtttgtaagcgtgtgttgtggtgctttattgtacatcctccagtggcgttctttttactctaatgttcttttggtttcccccctcagaagaatcatgaatttgcaacagacctaatttttggttactttttgtcttattgatggatttgaaaatgaaagatttaataaggcaaagcagaatctgttgtccttaattatatttgcaatttggaatttgtgtgagttgatttagtaaaatgttaaaccgtt

SEQ ID NO: 373531 - DNA, 2153 bp, Homo sapiens
gccggccgcgaggactggttccagttcactcggcagcggcgccgggcggagggggagagcgcgggccgcgcgggcgggaagcgaagaggcgggcgggccagcgaggagcgcggagagaaaaggcgcgagcggccaggagggctcaggccgagacaccttgcagctgccgccgccgccaccgagccgccgctgtgctcactgatccgcctccagggccaccgccatgtcgagccgcggtgggaagaagaagtccaccaagacgtccaggtctgccaaagcaggagtcatctttcccgtggggcggatgctgcggtacatcaagaaaggccaccccaagtacaggattggagtgggggcacccgtgtacatggccgccgtcctggaatacctgacagcggagattctggagctggctggcaatgcagcgagagacaacaagaagggacgggtcacaccccggcacatcctgctggctgtggccaatgatgaagagctgaatcagctgctaaaaggagtcaccatagccagtgggggtgtgttacccaacatccaccccgagttgctagcgaagaagcggggatccaaaggaaagttggaagccatcatcacaccacccccagccaaaaaggccaagtctccatcccagaagaagcctgtatctaaaaaagcaggaggcaagaaaggggcccggaaatccaagaagcagggtgaagtcagtaaggcagccagcgccgacagcacaaccgagggcacacctgccgacggcttcacagtcctctccaccaagagcctcttccttggccagaagctgaaccttattcacagtgaaatcagtaatttagccggctttgaggtggaggccataatcaatcctaccaatgctgacattgaccttaaagatgacctaggaaacacgctggagaagaaaggtggcaaggagtttgtggaagctgtcctggaactccggaaaaagaacgggcccttggaagtagctggagctgctgtcagcgcaggccatggcctgcctgccaagtttgtgatccactgtaatagtccagtttggggtgcagacaagtgtgaagaacttctggaaaagacagtgaaaaactgcttggccctggctgatgataagaagctgaaatccattgcatttccatccatcggcagcggcaggaacggttttccaaagcagacagcagctcagctgattctgaaggccatctccagttacttcgtgtctacaatgtcctcttccatcaaaacggtgtacttcgtgctttttgacagcgagagtataggcatctatgtgcaggaaatggccaagctggacgccaactaggctgagcaatgacagaaccagctgcaccatgtaccccaccttcagtttaaaagaaaaaaaaaatccccttcactcctactgggaggtgggacccctttcattttcagttttgctcatctagggaaaataaggctttggtttccagtttaattgtttttgaccttctaaaatgtttttatgttagcactgatagttggcattactgttgttaagcactgtgttccagaccgtgtctgacttagtgtaacctaggagattttatagttttattttaatgaaaccctgattgacgcacagcagtggggagaacagcgtcttttacctgtcaccgaagccaggaagccccgtttgtaagcgtgtgttgtggtgctttattgtacatcctccagtggcgttctttttactctaatgttcttttggtttcccccctcagaagaatcatgaatttgcaacagacctaatttttggttactttttgtcttattgatggatttgaaaatgaaagatttaataaggcaaagcagaatctgttgtccttaattatatttgcaatttggaatttgtgtgagttgatttagtaaaatgttaaaccgtttaaaaaaaaagaggtggttaaaattcatgggccgtgtttcaccgtctgactggcctggggttcccaattattcgctggaggaatcccctttggcgctgggtatacgggcggacgatggctccaccagttgagcgataggagggatgtacgccattgttatcacgtaacatacgacataatcattatagaggaggggctactcttaccaacgaggggggt

SEQ ID NO: 373532 - DNA, 2369 bp, Homo sapiens
  misc_feature (2369)..(2369): n is a, c, g, or t
gccggccgcgaggactggttccagttcactcggcagcggcgccgggcggagggggagagcgcgggccgcgcgggcgggaagcgaagaggcgggcgggccagcgaggagcgcggagagaaaaggcgcgagcggccaggagggctcaggccgagacaccttgcagctgccgccgccgccaccgagccgccgctgtgctcactgatccgcctccagggccaccgccatgtcgagccgcggtgggaagaagaagtccaccaagacgtccaggtctgccaaagcaggagtcatctttcccgtggggcggatgctgcggtacatcaagaaaggccaccccaagtacaggattggagtgggggcacccgtgtacatggccgccgtcctggaatacctgacagcggagattctggagctggctggcaatgcagcgagagacaacaagaagggacgggtcacaccccggcacatcctgctggctgtggccaatgatgaagagctgaatcagctgctaaaaggagtcaccatagccagtgggggtgtgttacccaacatccaccccgagttgctagcgaagaagcggggatccaaaggaaagttggaagccatcatcacaccacccccagccaaaaaggccaagtctccatcccagaagaagcctgtatctaaaaaagcaggaggcaagaaaggggcccggaaatccaagaagcagggtgaagtcagtaaggcagccagcgccgacagcacaaccgagggcacacctgccgacggcttcacagtcctctccaccaagagcctcttccttggccagaagctgaaccttattcacagtgaaatcagtaatttagccggctttgaggtggaggccataatcaatcctaccaatgctgacattgaccttaaagatgacctagttgcaagttgtacaggctgacattgcctcgatcgacagtgatgctgtcgttcacccgacaaacactgacttctacatcggtggtgaagtaggaaacacgctggagaagaaaggtggcaaggagtttgtggaagctgtcctggaactccggaaaaagaacgggcccttggaagtagctggagctgctgtcagcgcaggccatggcctgcctgccaagtttgtgatccactgtaatagtccagtttggggtgcagacaagtgtgaagaacttctggaaaagacagtgaaaaactgcttggccctggctgatgataagaagctgaaatccattgcatttccatccatcggcagcggcaggaacggttttccaaagcagacagcagctcagctgattctgaaggccatctccagttacttcgtgtctacaatgtcctcttccatcaaaacggtgtacttcgtgctttttgacagcgagagtataggcatctatgtgcaggaaatggccaagctggacgccaactaggctgagcaatgacagaaccagctgcaccatgtaccccaccttcagtttaaaagaaaaaaaaaatccccttcactcctactgggaggtgggacccctttcattttcagttttgctcatctagggaaaataaggctttggtttccagtttaattgtttttgaccttctaaaatgtttttatgttagcactgatagttggcattactgttgttaagcactgtgttccagaccgtgtctgacttagtgtaacctaggagattttatagttttattttaatgaaaccctgattgacgcacagcagtggggagaacagcgtcttttacctgtcaccgaagccaggaagccccgtttgtaagcgtgtgttgtggtgctttattgtacatcctccagtggcgttctttttactctaatgttcttttggtttcccccctcagaagaatcatgaatttgcaacagacctaatttttggttactttttgtcttattgatggatttgaaaatgaaagatttaataaggcaaagcagaatctgttgtccttaattatatttgcaatttggaatttgtgtgagttgatttagtaaaatgttaaaccgttaaaaaaaaaaaaaaaaaaaaaaaaaaaaaaaaaaaaagggggggggggaaaaaattcccgcggagggggccccaagttcaagcagagtatccccaagggttcttttggtggaacaagggggggcgccccataaaggaggagcggggaatataaaagcgcagggggacgctggcgccagggcggtaaaaacaaacggcgccgagcaccgggggcaacacccgcgcgacgaccgggggacagtcgcgggggaagagaccccatatattgtcgggggggggggcagcccatagtgcggccgaacttccctaacgaaggaagatataaagcagcgaaggggcaacatn

SEQ ID NO: 373533 - DNA, 2269 bp, Homo sapiens
  misc_feature (2269)..(2269): n is a, c, g, or t
gccggccgcgaggactggttccagttcactcggcagcggcgccgggcggagggggagagcgcgggccgcgcgggcgggaagcgaagaggcgggcgggccagcgaggagcgcggagagaaaaggcgcgagcggccaggagggctcaggccgagacaccttgcagctgccgccgccgccaccgagccgccgctgtgctcactgatccgcctccagggccaccgccatgtcgagccgcggtgggaagaagaagtccaccaagacgtccaggtctgccaaagcaggagtcatctttcccgtggggcggatgctgcggtacatcaagaaaggccaccccaagtacaggattggagtgggggcacccgtgtacatggccgccgtcctggaatacctgacagcggagattctggagctggctggcaatgcagcgagagacaacaagaagggacgggtcacaccccggcacatcctgctggctgtggccaatgatgaagagctgaatcagctgctaaaaggagtcaccatagccagtgggggtgtgttacccaacatccaccccgagttgctagcgaagaagcggggatccaaaggaaagttggaagccatcatcacaccacccccagccaaaaaggccaagtctccatcccagaagaagcctgtatctaaaaaagcaggaggcaagaaaggggcccggaaatccaagaagcagggtgaagtcagtaaggcagccagcgccgacagcacaaccgagggcacacctgccgacggcttcacagtcctctccaccaagagcctcttccttggccagaagttgcaagttgtacaggctgacattgcctcgatcgacagtgatgctgtcgttcacccgacaaacactgacttctacatcggtggtgaagtaggaaacacgctggagaagaaaggtggcaaggagtttgtggaagctgtcctggaactccggaaaaagaacgggcccttggaagtagctggagctgctgtcagcgcaggccatggcctgcctgccaagtttgtgatccactgtaatagtccagtttggggtgcagacaagtgtgaagaacttctggaaaagacagtgaaaaactgcttggccctggctgatgataagaagctgaaatccattgcatttccatccatcggcagcggcaggaacggttttccaaagcagacagcagctcagctgattctgaaggccatctccagttacttcgtgtctacaatgtcctcttccatcaaaacggtgtacttcgtgctttttgacagcgagagtataggcatctatgtgcaggaaatggccaagctggacgccaactaggctgagcaatgacagaaccagctgcaccatgtaccccaccttcagtttaaaagaaaaaaaaaatccccttcactcctactgggaggtgggacccctttcattttcagttttgctcatctagggaaaataaggctttggtttccagtttaattgtttttgaccttctaaaatgtttttatgttagcactgatagttggcattactgttgttaagcactgtgttccagaccgtgtctgacttagtgtaacctaggagattttatagttttattttaatgaaaccctgattgacgcacagcagtggggagaacagcgtcttttacctgtcaccgaagccaggaagccccgtttgtaagcgtgtgttgtggtgctttattgtacatcctccagtggcgttctttttactctaatgttcttttggtttcccccctcagaagaatcatgaatttgcaacagacctaatttttggttactttttgtcttattgatggatttgaaaatgaaagatttaataaggcaaagcagaatctgttgtccttaattatatttgcaatttggaatttgtgtgagttgatttagtaaaatgttaaaccgttaaaaaaaaaaaaaaaaaaaaaaaaaaaaaaaaaaaaagggggggggggaaaaaattcccgcggagggggccccaagttcaagcagagtatccccaagggttcttttggtggaacaagggggggcgccccataaaggaggagcggggaatataaaagcgcagggggacgctggcgccagggcggtaaaaacaaacggcgccgagcaccgggggcaacacccgcgcgacgaccgggggacagtcgcgggggaagagaccccatatattgtcgggggggggggcagcccatagtgcggccgaacttccctaacgaaggaagatataaagcagcgaaggggcaacatn

SEQ ID NO: 373534 - DNA, 2178 bp, Homo sapiens
  misc_feature (2178)..(2178): n is a, c, g, or t
gccggccgcgaggactggttccagttcactcggcagcggcgccgggcggagggggagagcgcgggccgcgcgggcgggaagcgaagaggcgggcgggccagcgaggagcgcggagagaaaaggcgcgagcggccaggagggctcaggccgagacaccttgcagctgccgccgccgccaccgagccgccgctgtgctcactgatccgcctccagggccaccgccatgtcgagccgcggtgggaagaagaagtccaccaagacgtccaggtctgccaaagcaggagtcatctttcccgtggggcggatgctgcggtacatcaagaaaggccaccccaagtacaggattggagtgggggcacccgtgtacatggccgccgtcctggaatacctgacagcggagattctggagctggctggcaatgcagcgagagacaacaagaagggacgggtcacaccccggcacatcctgctggctgtggccaatgatgaagagctgaatcagctgctaaaaggagtcaccatagccagtgggggtgtgttacccaacatccaccccgagttgctagcgaagaagcggggatccaaaggaaagttggaagccatcatcacaccacccccagccaaaaaggccaagtctccatcccagaagaagcctgtatctaaaaaagcaggaggcaagaaaggggcccggaaatccaagaagcagggtgaagtcagtaaggcagccagcgccgacagcacaaccgagggcacacctgccgacggcttcacagtcctctccaccaagagcctcttccttggccagaaggaaacacgctggagaagaaaggtggcaaggagtttgtggaagctgtcctggaactccggaaaaagaacgggcccttggaagtagctggagctgctgtcagcgcaggccatggcctgcctgccaagtttgtgatccactgtaatagtccagtttggggtgcagacaagtgtgaagaacttctggaaaagacagtgaaaaactgcttggccctggctgatgataagaagctgaaatccattgcatttccatccatcggcagcggcaggaacggttttccaaagcagacagcagctcagctgattctgaaggccatctccagttacttcgtgtctacaatgtcctcttccatcaaaacggtgtacttcgtgctttttgacagcgagagtataggcatctatgtgcaggaaatggccaagctggacgccaactaggctgagcaatgacagaaccagctgcaccatgtaccccaccttcagtttaaaagaaaaaaaaaatccccttcactcctactgggaggtgggacccctttcattttcagttttgctcatctagggaaaataaggctttggtttccagtttaattgtttttgaccttctaaaatgtttttatgttagcactgatagttggcattactgttgttaagcactgtgttccagaccgtgtctgacttagtgtaacctaggagattttatagttttattttaatgaaaccctgattgacgcacagcagtggggagaacagcgtcttttacctgtcaccgaagccaggaagccccgtttgtaagcgtgtgttgtggtgctttattgtacatcctccagtggcgttctttttactctaatgttcttttggtttcccccctcagaagaatcatgaatttgcaacagacctaatttttggttactttttgtcttattgatggatttgaaaatgaaagatttaataaggcaaagcagaatctgttgtccttaattatatttgcaatttggaatttgtgtgagttgatttagtaaaatgttaaaccgttaaaaaaaaaaaaaaaaaaaaaaaaaaaaaaaaaaaaagggggggggggaaaaaattcccgcggagggggccccaagttcaagcagagtatccccaagggttcttttggtggaacaagggggggcgccccataaaggaggagcggggaatataaaagcgcagggggacgctggcgccagggcggtaaaaacaaacggcgccgagcaccgggggcaacacccgcgcgacgaccgggggacagtcgcgggggaagagaccccatatattgtcgggggggggggcagcccatagtgcggccgaacttccctaacgaaggaagatataaagcagcgaaggggcaacatn

SEQ ID NO: 373535 - DNA, 2103 bp, Homo sapiens
  misc_feature (2103)..(2103): n is a, c, g, or t
gccggccgcgaggactggttccagttcactcggcagcggcgccgggcggagggggagagcgcgggccgcgcgggcgggaagcgaagaggcgggcgggccagcgaggagcgcggagagaaaaggcgcgagcggccaggagggctcaggccgagacaccttgcagctgccgccgccgccaccgagccgccgctgtgctcactgatccgcctccagggccaccgccatgtcgagccgcggtgggaagaagaagtccaccaagacgtccaggtctgccaaagcaggagtcatctttcccgtggggcggatgctgcggtacatcaagaaaggccaccccaagtacaggattggagtgggggcacccgtgtacatggccgccgtcctggaatacctgacagcggagattctggagctggctggcaatgcagcgagagacaacaagaagggacgggtcacaccccggcacatcctgctggctgtggccaatgatgaagagctgaatcagctgctaaaaggagtcaccatagccagtgggggtgtgttacccaacatccaccccgagttgctagcgaagaagcggggatccaaaggaaagttggaagccatcatcacaccacccccagccaaaaaggccaagtctccatcccagaagaagcctgtatctaaaaaagcaggaggcaagaaaggggcccggaaatccaagaagcagggtgaagtcagtaaggcagccagcgccgacagcacaaccgagggcacacctgccgacggcttcacagtcctctccaccaagagcctcttccttggccagaagctgaaccttattcacagtgaaatcagtaatttagccggctttgaggtggaggccataatcaatcctaccaatgctgacattgaccttaaagatgacctaggaaacacgctggagaagaaaggtggcaaggagtttgtggaagctgtcctggaactccggaaaaagaacgggcccttggaagtagctggaggaacggttttccaaagcagacagcagctcagctgattctgaaggccatctccagttacttcgtgtctacaatgtcctcttccatcaaaacggtgtacttcgtgctttttgacagcgagagtataggcatctatgtgcaggaaatggccaagctggacgccaactaggctgagcaatgacagaaccagctgcaccatgtaccccaccttcagtttaaaagaaaaaaaaaatccccttcactcctactgggaggtgggacccctttcattttcagttttgctcatctagggaaaataaggctttggtttccagtttaattgtttttgaccttctaaaatgtttttatgttagcactgatagttggcattactgttgttaagcactgtgttccagaccgtgtctgacttagtgtaacctaggagattttatagttttattttaatgaaaccctgattgacgcacagcagtggggagaacagcgtcttttacctgtcaccgaagccaggaagccccgtttgtaagcgtgtgttgtggtgctttattgtacatcctccagtggcgttctttttactctaatgttcttttggtttcccccctcagaagaatcatgaatttgcaacagacctaatttttggttactttttgtcttattgatggatttgaaaatgaaagatttaataaggcaaagcagaatctgttgtccttaattatatttgcaatttggaatttgtgtgagttgatttagtaaaatgttaaaccgttaaaaaaaaaaaaaaaaaaaaaaaaaaaaaaaaaaaaagggggggggggaaaaaattcccgcggagggggccccaagttcaagcagagtatccccaagggttcttttggtggaacaagggggggcgccccataaaggaggagcggggaatataaaagcgcagggggacgctggcgccagggcggtaaaaacaaacggcgccgagcaccgggggcaacacccgcgcgacgaccgggggacagtcgcgggggaagagaccccatatattgtcgggggggggggcagcccatagtgcggccgaacttccctaacgaaggaagatataaagcagcgaaggggcaacatn

SEQ ID NO: 373536 - DNA, 1402 bp, Homo sapiens
  misc_feature (1402)..(1402): n is a, c, g, or t
gacacagggcattggagggcccaggaagatataccgtggcaggggagtgggtctgtgtttggcatcttgtgctttgcagtgaaccagagctcactgtttctgtttcatccccgcaccactagctgctgtcagcgcaggccatggcctgcctgccaagtttgtgatccactgtaatagtccagtttggggtgcagacaagtgtgaagaacttctggaaaagacagtgaaaaactgcttggccctggctgatgataagaagctgaaatccattgcatttccatccatcggcagcggcaggaacggttttccaaagcagacagcagctcagctgattctgaaggccatctccagttacttcgtgtctacaatgtcctcttccatcaaaacggtgtacttcgtgctttttgacagcgagagtataggcatctatgtgcaggaaatggccaagctggacgccaactaggctgagcaatgacagaaccagctgcaccatgtaccccaccttcagtttaaaagaaaaaaaaaatccccttcactcctactgggaggtgggacccctttcattttcagttttgctcatctagggaaaataaggctttggtttccagtttaattgtttttgaccttctaaaatgtttttatgttagcactgatagttggcattactgttgttaagcactgtgttccagaccgtgtctgacttagtgtaacctaggagattttatagttttattttaatgaaaccctgattgacgcacagcagtggggagaacagcgtcttttacctgtcaccgaagccaggaagccccgtttgtaagcgtgtgttgtggtgctttattgtacatcctccagtggcgttctttttactctaatgttcttttggtttcccccctcagaagaatcatgaatttgcaacagacctaatttttggttactttttgtcttattgatggatttgaaaatgaaagatttaataaggcaaagcagaatctgttgtccttaattatatttgcaatttggaatttgtgtgagttgatttagtaaaatgttaaaccgttaaaaaaaaaaaaaaaaaaaaaaaaaaaaaaaaaaaaagggggggggggaaaaaattcccgcggagggggccccaagttcaagcagagtatccccaagggttcttttggtggaacaagggggggcgccccataaaggaggagcggggaatataaaagcgcagggggacgctggcgccagggcggtaaaaacaaacggcgccgagcaccgggggcaacacccgcgcgacgaccgggggacagtcgcgggggaagagaccccatatattgtcgggggggggggcagcccatagtgcggccgaacttccctaacgaaggaagatataaagcagcgaaggggcaacatn

SEQ ID NO: 373537 - DNA, 2026 bp, Homo sapiens
  misc_feature (2026)..(2026): n is a, c, g, or t
gccggccgcgaggactggttccagttcactcggcagcggcgccgggcggagggggagagcgcgggccgcgcgggcgggaagcgaagaggcgggcgggccagcgaggagcgcggagagaaaaggcgcgagcggccaggagggctcaggccgagacaccttgcagctgccgccgccgccaccgagccgccgctgtgctcactgatccgcctccagggccaccgccatgtcgagccgcggtgggaagaagaagtccaccaagacgtccaggtctgccaaagcaggagtcatctttcccgtggggcggatgctgcggtacatcaagaaaggccaccccaagtacaggattggagtgggggcacccgtgtacatggccgccgtcctggaatacctgacagcggagattctggagctggctggcaatgcagcgagagacaacaagaagggacgggtcacaccccggcacatcctgctggctgtggccaatgatgaagagctgaatcagctgctaaaaggagtcaccatagccagtgggggtgtgttacccaacatccaccccgagttgctagcgaagaagcggggatccaaaggaaagttggaagccatcatcacaccacccccagccaaaaaggccaagtctccatcccagaagaagcctgtatctaaaaaagcaggaggcaagaaaggggcccggaaatccaagaagcagggtgaagtcagtaaggcagccagcgccgacagcacaaccgagggcacacctgccgacggcttcacagtcctctccaccaagagcctcttccttggccagaagctgaaccttattcacagtgaaatcagtaatttagccggctttgaggtggaggccataatcaatcctaccaatgctgacattgaccttaaagatgacctaggaaacacgctggagaagaaaggtggcaaggagtttgtggaagctgtcctggaactccggaaaaagaacgggcccttggaagtagctggagcagctcagctgattctgaaggccatctccagttacttcgtgtctacaatgtcctcttccatcaaaacggtgtacttcgtgctttttgacagcgagagtataggcatctatgtgcaggaaatggccaagctggacgccaactaggctgagcaatgacagaaccagctgcaccatgtaccccaccttcagtttaaaagaaaaaaaaaatccccttcactcctactgggaggtgggacccctttcattttcagttttgctcatctagggaaaataaggctttggtttccagtttaattgtttttgaccttctttccagaccgtgtctgacttagtgtaacctaggagattttatagttttattttaatgaaaccctgattgacgcacagcagtggggagaacagcgtcttttacctgtcaccgaagccaggaagccccgtttgtaagcgtgtgttgtggtgctttattgtacatcctccagtggcgttctttttactctaatgttcttttggtttcccccctcagaagaatcatgaatttgcaacagacctaatttttggttactttttgtcttattgatggatttgaaaatgaaagatttaataaggcaaagcagaatctgttgtccttaattatatttgcaatttggaatttgtgtgagttgatttagtaaaatgttaaaccgttaaaaaaaaaaaaaaaaaaaaaaaaaaaaaaaaaaaaagggggggggggaaaaaattcccgcggagggggccccaagttcaagcagagtatccccaagggttcttttggtggaacaagggggggcgccccataaaggaggagcggggaatataaaagcgcagggggacgctggcgccagggcggtaaaaacaaacggcgccgagcaccgggggcaacacccgcgcgacgaccgggggacagtcgcgggggaagagaccccatatattgtcgggggggggggcagcccatagtgcggccgaacttccctaacgaaggaagatataaagcagcgaaggggcaacatn

SEQ ID NO: 373538 - DNA, 1775 bp, Homo sapiens
gccggccgcgaggactggttccagttcactcggcagcggcgccgggcggagggggagagcgcgggccgcgcgggcgggaagcgaagaggcgggcgggccagcgaggagcgcggagagaaaaggcgcgagcggccaggagggctcaggccgagacaccttgcagctgccgccgccgccaccgagccgccgctgtgctcactgatccgcctccagggccaccgccatgtcgagccgcggtgggaagaagaagtccaccaagacgtccaggtctgccaaagcaggagtcatctttcccgtggggcggatgctgcggtacatcaagaaaggccaccccaagtacaggattggagtgggggcacccgtgtacatggccgccgtcctggaatacctgacagcggagattctggagctggctggcaatgcagcgagagacaacaagaagggacgggtcacaccccggcacatcctgctggctgtggccaatgatgaagagctgaatcagctgctaaaaggagtcaccatagccagtgggggtgtgttacccaacatccaccccgagttgctagcgaagaagcggggatccaaaggaaagttggaagccatcatcacaccacccccagccaaaaaggccaagtctccatcccagaagaagcctgtatctaaaaaagcaggaggcaagaaaggggcccggaaatccaagaagcagggtgaagtcagtaaggcagccagcgccgacagcacaaccgagggcacacctgccgacggcttcacagtcctctccaccaagagcctcttccttggccagaagctgaaccttattcacagtgaaatcagtaatttagccggctttgaggtggaggccataatcaatcctaccaatgctgacattgaccttaaagatgacctaggaaacacgctggagaagaaaggtggcaaggagtttgtggaagctgtcctggaactccggaaaaagaacgggcccttggaagtagctggagggtgaggtgggaaagccaccgtgcttatctggttgtgacacatgcagtattaggaaagccattttgtgagagggcttagaattcagaggtgtgtggcagcacagccgcatcttcaagatggaggccaaggacagcctgtagctttacatcttagagtttcaccacatgcaggttgtctgggaaaatcacctttgcatttttttttattacttaaaatagctcctatatgtttgatgtctagatcacaaattttaagaaattataggagctgagtttggtacatctaagagctgagagtgagtgatactgagccatctgcaaaactgctggtgagagatacaaattaaaaatcttcagccatctgtgtgtgtaagaggaaacatataaatacacatttctcatttgccaattacaccttccctggtataaggggaagaaaacgacttggcatctgatgtggggagaattattgctaagacctggaggcagggtacttcttactgcttcaggcctgaatttaggtggtcatttggggtgtgcaggacagagcacctcctaaggacctgagagtccagtcagtggggaggcccagctcccccaccaactgtgtgaggacagatcacccacttcctcacttggggctctggttttctcttcttactacccgattccaatgcctattgtgtcttttaaatcctctgttttaaaaatgaatcttaagctctctcggagggtccaccaggccgtgcacctctattcccagtgacaaatgacacc

SEQ ID NO: 373539 - DNA, 2272 bp, Homo sapiens
gccggccgcgaggactggttccagttcactcggcagcggcgccgggcggagggggagagcgcgggccgcgcgggcgggaagcgaagaggcgggcgggccagcgaggagcgcggagagaaaaggcgcgagcggccaggagggctcaggccgagacaccttgcagctgccgccgccgccaccgagccgccgctgtgctcactgatccgcctccagggccaccgccatgtcgagccgcggtgggaagaagaagtccaccaagacgtccaggtctgccaaagcaggagtcatctttcccgtggggcggatgctgcggtacatcaagaaaggccaccccaagtacaggattggagtgggggcacccgtgtacatggccgccgtcctggaatacctgacagcggagattctggagctggctggcaatgcagcgagagacaacaagaagggacgggtcacaccccggcacatcctgctggctgtggccaatgatgaagagctgaatcagctgctaaaaggagtcaccatagccagtgggggtgtgttacccaacatccaccccgagttgctagcgaagaagcggggatccaaaggaaagttggaagccatcatcacaccacccccagccaaaaaggccaagtctccatcccagaagaagcctgtatctaaaaaagcaggaggcaagaaaggggcccggaaatccaagaagcagggtgaagtcagtaaggcagccagcgccgacagcacaaccgagggcacacctgccgacggcttcacagtcctctccaccaagagcctcttccttggccagaagctgaaccttattcacagtgaaatcagtaatttagccggctttgaggtggaggccataatcaatcctaccaatgctgacattgaccttaaagatgacctaggtaattggggacggggttcggcaccaccagctgtcagatgaaaagttatggaacccagaatttaggcatttcatcttcccagactttacagtggtcaagccaaatttccaaatccaagattgatatttgagtgtagacgctgaatatcaacttactccaggccattccaagtgtaaacggtctgtttcattaagtgtgattggctactctctcctcaattgcaaatacattgccatctgaattctcttccataatgatcaaactgactgctggttacttggggagggatttttaaacgtgttggtttttgtttgtttttttgtttttactttagaactgaaaaatctcaggtaactacaaaatgatagtttctccatttaaaccttaattagaaatgacaaagcttgaaagagaagacaggccacatcagtatgctattaagctgtctttagtccacaatttactaccatcacttcaacttttctttagaactgaaaacagtatatgactgaatgccaccttcttgaattatttggctagaggatggtattaaacagaagggcaatatctccaagtgagttcttatggaggaaaactgccccagagccatggtgtctccctgttcaagatggcagatggttcagggcagactgagaggtgcccctcaagtgtcctgcctctatggctttatctttgcatatgtggcactgtcagctcaatggcacgacagggctgctctgctgctcttcgatgtagaggcttgccaggggaaataggcacacagatgcagcctccttcctaaccctcaactgcaatctattttgtatcccttgagctctcagcttctgctgtttttgtcagatagcagacttccttactgggagatacactcattccatgggcccaggcctgacccacacgaactgggtgcaacagtgggctgaaaacatgaggactggactcaagagtgtccagcttgaacttgttttccaactgccttatacagatacttaaaaaaaaaaaggccacaagctagaaaaagcaaggattctatccaaagcacattttatactaaaatacaaaggccaggtgcagtggctcacacctgtaactccagcgttttgggaggctgaggcaggaggattgagtgaggccaggagttggagaccaacctgggcaagatagtgagacctcatctctacaaaaaataaaaaacttagctgggcttggtgacacgtgcctgtagtctcagctactcaggaggctgaggcaggaggattgcttgagcccaggagttcgaagctgcagtgagctatgattgtgccactgcactccagcctaggcaacagcaagatcctatctgt

SEQ ID NO: 373540 - DNA, 451 bp, Homo sapiens
gctactgccttctctaaaagcacatagcacatccttctgcaggtgccagctctctgcccagttgtctgtcccccatcccatcttctgggcactgggctttcccacactggcgtacaagcagacacggggctcaacagacaccgacccaacacaaggcaagctgcagcacagagggaggtggcctgtaaggtggggcaggtcctgcagcccccgtggcatcccagttgctgagtgcttatcttctcttctccaggaacggttttccaaagcagacagcagctcagctgattctgaaggccatctccagttacttcgtgtctacaatgtcctcttccatcaaaacggtgtacttcgtgctttttgacagcgagagtataggcatctatgtgcaggaaatggccaagctggacgccaactaggctgagcaatgacagaaccagctgcaccatgt

SEQ ID NO: 373541 - DNA, 1606 bp, Homo sapiens
  misc_feature (19)..(19): n is a, c, g, or t
  misc_feature (25)..(25): n is a, c, g, or t
aaccttaccgcgctaaggntagccngaggccctcgggggtgtgtgtacatcggccgggaaagtttctttggaggtcggcccggagcggccatgtcccacggccccaagcagcccggcgcggccgccgcgccggcgggcggcaaggctccgggccagcatgggggcttcgtggtgactgtcaagcaagagcgcggcgagggtccacgcgcgggcgagaaggggtcccacgaggaggagccggtgaagaaacgcggctggcccaagggcaagaagcggaagaagattctgccgaatgggcccaaggcaccggtcacgggctacgtgcgcttcctgaacgagcggcgcgagcagatccgcacgcgccacccggatctgccctttcccgagatcaccaagatgctgggcgccgagtggagcaagctgcagccaacggaaaagcagcggtacctggatgaggccgagagagagaagcagcagtacatgaaggagctgcgggcgtaccagcagtctgaagcctataagatgtgcacggagaagatccaggagaagaagatcaagaaagaagactcgagctctgggctcatgaacactctcctgaatggacacaagggtggggactgcgatggcttctccaccttcgatgttcccatcttcactgaagagttcttggaccaaaacaaagcgcgtgaggcggagcttcggcgcttgcggaagatgaatgtggccttcgaggagcagaacgcggtactgcagaggcacacgcagagcatgagcagcgcgcgcgagcgtctggagcaggagctggcgctggaggagcggaggacgctggcgctgcagcagcagctccaggccgtgcgccaggcgctcaccgccagcttcgcctcactgccggtgccgggcacgggcgaaacgcccacgctgggcactctggacttctacatggcccggcttcacggagccatcgagcgcgaccccgcccagcacgagaagctcatcgtccgcatcaaggaaatcctggcccaggtcgccagcgagcacctgtgaggagtgggcgggcccacgatgcagaggagaagctgtgggcgcggccctgccacaccccaccccgtggacgagaggctgggggtccaccctttggggcctggtcccatcctgcaccttgggggctccagcccccctaaaattaaatttctgcagcatccctttagctttcaatctccccagccccctgaacccggaaaaagcactcgctgcgcgatacacccagaagaacctcacagccgagggtgcccctcctcggaggacagccacgcgctacactggctctccgggccacccccaggacacagggcagacgaaacccacccccagcacacggcaggaccccccaaattactcactacggggggctgtgccataggccacacaggaagctgccttgtggggacttacctggggtgtcccccgcatgcctgtaccccagatgggtgggggccggctttgcccatcctgctctcctccagccgagggaccctggtgggggtggctccttctcactgctggatccggactttttaaataaaaacaagtaaaatttgtgttttaa

SEQ ID NO: 373542 - DNA, 1485 bp, Homo sapiens
atcggtatctgcatgggctcgcccggggggaaggtctcacccaatgggaccgttcgccgaggccttcattagcatgccgggggcggggaggggcggggcggccgacgggggcgggctgcgggcggttggttggagcgtcgcgcagtcgggaggtccgggaaagtttctttggaggtcggcccggagcggccatgtcccacggccccaagcagcccggcgcggccgccgcgccggcgggcggcaaggctccgggccagcatgggggcttcgtggtgactgtcaagcaagagcgcggcgagggtccacgcgcgggcgagaaggggtcccacgaggaggagccggtgaagaaacgcggctggcccaagggcaagaagcggaagaagattctgccgaatgggcccaaggcaccggtcacgggctacgtgcgcttcctgaacgagcggcgcgagcagatccgcacgcgccacccggatctgccctttcccgagatcaccaagatgctgggcgccgagtggagcaagctgcagccaacggaaaagcagcggtacctggatgaggccgagagagagaagcagcagtacatgaaggagctgcgggcgtaccagcagtctgaagcctataagatgtgcacggagaagatccaggagaagaagatcaagaaagaagactcgagctctgggctcatgaacactctcctgaatggacacaagggtggggactgcgatggcttctccaccttcgatgttcccatcttcactgaagagttcttggaccaaaacaaagcgcgtgaggcggagcttcggcgcttgcggaagatgaatgtggccttcgaggagcagaacgcggtactgcagaggcacacgcagagcatgagcagcgcgcgcgagcgtctggagcaggagctggcgctggaggagcggaggacgctggcgctgcagcagcagctccaggccgtgcgccaggcgctcaccgccagcttcgcctcactgccggtgccgggcacgggcgaaacgcccacgctgggcactctggacttctacatggcccggcttcacggagccatcgagcgcgaccccgcccagcacgagaagctcatcgtccgcatcaaggaaatcctggcccaggtcgccagcgagcacctgtgaggagtgggcgggcccacgatgcagaggagaagctgtgggcgcggccctgccacaccccaccccgtggacgagaggctgggggtccaccctttggggcctggtcccatcctgcaccttgggggctccagcccccctaaaattaaatttctgcagcatccctttagctttcaatctccccagccccctgaacccggaaaaagcactcgctgcgcgatacacccagaagaacctcacagccgagggtgcccctcctcggaggacagccacgcgctacactggcttccttctcactgctggatccggactttttaaataaaaacaagtaaaatttgtgttttaa

SEQ ID NO: 373543 - DNA, 2007 bp, Homo sapiens
atcggtatctgcatgggctcgcccggggggaaggtctcacccaatgggaccgttcgccgaggccttcattagcatgccgggggcggggaggggcggggcggccgacgggggcgggctgcgggcggttggttggagcgtcgcgcagtcgggaggtccgggaaagtttctttggaggtgaaaacagccgcggaactccgggccctgagagggggcgggggtgcaggggtcccagggccgggccggggtctttcctggcccgggggaaaccggcccaggcctcccggggggggcaatcgcccaacaaaggattcttggggcgcccgccctcgaggacttccctgcccctggatccggcccccccagcgctccgggcccggcatcccggggctctccatcgcggggtaccccagttcgcggtctgccatcgggcagcccgggcgctactcacctccgcccgcgtccgtgttccaggtcgtcggcccggagcggccatgtcccacggccccaagcagcccggcgcggccgccgcgccggcgggcggcaaggctccgggccagcatgggggcttcgtggtgactgtcaagcaagagcgcggcgagggtccacgcgcgggcgagaaggggtcccacgaggaggagccggtgaagaaacgcggctggcccaagggcaagaagcggaagaagattctgccgaatgggcccaaggcaccggtcacgggctacgtgcgcttcctgaacgagcggcgcgagcagatccgcacgcgccacccggatctgccctttcccgagatcaccaagatgctgggcgccgagtggagcaagctgcagccaacggaaaagcagcggtacctggatgaggccgagagagagaagcagcagtacatgaaggagctgcgggcgtaccagcagtctgaagcctataagatgtgcacggagaagatccaggagaagaagatcaagaaagaagactcgagctctgggctcatgaacactctcctgaatggacacaagggtggggactgcgatggcttctccaccttcgatgttcccatcttcactgaagagttcttggaccaaaacaaagcgcgtgaggcggagcttcggcgcttgcggaagatgaatgtggccttcgaggagcagaacgcggtactgcagaggcacacgcagagcatgagcagcgcgcgcgagcgtctggagcaggagctggcgctggaggagcggaggacgctggcgctgcagcagcagctccaggccgtgcgccaggcgctcaccgccagcttcgcctcactgccggtgccgggcacgggcgaaacgcccacgctgggcactctggacttctacatggcccggcttcacggagccatcgagcgcgaccccgcccagcacgagaagctcatcgtccgcatcaaggaaatcctggcccaggtcgccagcgagcacctgtgaggagtgggcgggcccacgatgcagaggagaagctgtgggcgcggccctgccacaccccaccccgtggacgagaggctgggggtccaccctttggggcctggtcccatcctgcaccttgggggctccagcccccctaaaattaaatttctgcagcatccctttagctttcaatctccccagccccctgaacccggaaaaagcactcgctgcgcgatacacccagaagaacctcacagccgagggtgcccctcctcggaggacagccacgcgctacactggctctccgggccacccccaggacacagggcagacgaaacccacccccagcacacggcaggaccccccaaattactcactacggggggctgtgccataggccacacaggaagctgccttgtggggacttacctggggtgtcccccgcatgcctgtaccccagatgggtgggggccggctttgcccatcctgctctcctccagccgagggaccctggtgggggtggctccttctcactgctggatccggactttttaaataaaaacaagtaaaatttgtgttttaa

SEQ ID NO: 373544 - DNA, 1707 bp, Homo sapiens
atcggtatctgcatgggctcgcccggggggaaggtctcacccaatgggaccgttcgccgaggccttcattagcatgccgggggcggggaggggcggggcggccgacgggggcgggctgcgggcggttggttggagcgtcgcgcagtcgggaggtccgggaaagtttctttggaggtcggcccggagcggccatgtcccacggccccaagcagcccggcgcggccgccgcgccggcgggcggcaaggctccgggccagcatgggggcttcgtggtgactgtcaagcaagagcgcggcgagggtccacgcgcgggcgagaaggggtcccacgaggaggagccggtgaagaaacgcggctggcccaagggcaagaagcggaagaagattctgccgaatgggcccaaggcaccggtcacgggctacgtgcgcttcctgaacgagcggcgcgagcagatccgcacgcgccacccggatctgccctttcccgagatcaccaagatgctgggcgccgagtggagcaagctgcagccaacggaaaagcagcggtacctggatgaggccgagagagagaagcagcagtacatgaaggagctgcgggcgtaccagcagtctgaagcctataagatgtgcacggagaagatccaggagaagaagatcaagaaagaagactcgagctctgggctcatgaacactctcctgaatggacacaagggtggggactgcgatggcttctccaccttcgatgttcccatcttcactgaagagttcttggaccaaaacaaagcgcgtgaggcggagcttcggcgcttgcggaagatgaatgtggccttcgaggagcagaacgcggtactgcagaggcacacgcagagcatgagcagcgcgcgcgagcgtctggagcaggagctggcgctggaggagcggaggacgctggcgctgcagcagcagctccaggccgtgcgccaggcgctcaccgccagcttcgcctcactgccggtgccgggcacgggcgaaacgcccacgctgggcactctggacttctacatggcccggcttcacggagccatcgagcgcgaccccgcccagcacgagaagctcatcgtccgcatcaaggaaatcctggcccaggtcgccagcgagcacctgtgaggagtgggcgggcccacgatgcagaggagaagctgtgggcgcggccctgccacaccccaccccgtggacgagaggctgggggtccaccctttggggcctggtcccatcctgcaccttgggggctccagcccccctaaaattaaatttctgcagcatccctttagctttcaatctccccagccccctgaacccggaaaaagcactcgctgcgcgatacacccagaagaacctcacagccgagggtgcccctcctcggaggacagccacgcgctacactggctctccgggccacccccaggacacagggcagacgaaacccacccccagcacacggcaggaccccccaaattactcactacggggggctgtgccataggccacacaggaagctgccttgtggggacttacctggggtgtcccccgcatgcctgtaccccagatgggtgggggccggctttgcccatcctgctctcctccagccgagggaccctggtgggggtggctccttctcactgctggatccggactttttaaataaaaacaagtaaaatttgtgttttaa

SEQ ID NO: 373545 - DNA, 2027 bp, Homo sapiens
atcggtatctgcatgggctcgcccggggggaaggtctcacccaatgggaccgttcgccgaggccttcattagcatgccgggggcggggaggggcggggcggccgacgggggcgggctgcgggcggttggttggagcgtcgcgcagtcgggaggtccgggaaagtttctttggaggtgaaaacagccgcggaactccgggccctgagagggggcgggggtgcaggggtcccagggccgggccggggtctttcctggcccgggggaaaccggcccaggcctcccggggggggcaatcgcccaacaaaggattcttggggcgcccgccctcgaggacttccctgcccctggatccggcccccccagcgctccgggcccggcatcccggggctctccatcgcggggtaccccagttcgcggtctgccatcgggcagcccgggcgctactcacctccgcccgcgtccgtgttccaggtcgtcggcccggagcggccatgtcccacggccccaagcagcccggcgcggccgccgcgccggcgggcggcaaggctccgggccagcatgggggcttcgtggtgactgtcaagcaagagcgcggcgagggtccacgcgcgggcgagaaggggtcccacgaggaggagccggtgaagaaacgcggctggcccaagggcaagaagcggaagaagattctgccgaatgggcccaaggcaccggtcacgggctacgtgcgcttcctgaacgagcggcgcgagcagatccgcacgcgccacccggatctgccctttcccgagatcaccaagatgctgggcgccgagtggagcaagctgcagccaacggaaaagcagcggtacctggatgaggccgagagagagaagcagcagtacatgaaggagctgcgggcgtaccagcagtctgaagcctataagatgtgcacggagaagatccaggagaagaagatcaagaaagaagactcgagctctgggctcatgaacactctcctgaatggacacaagggtggggactgcgatggcttctccaccttcgatgttcccatcttcactgaagagttcttggaccaaaacaaagcgcgtgaggcggagcttcggcgcttgcggaagatgaatgtggccttcgaggagcagaacgcggtactgcagaggcacacgcagagcatgagcagcgcgcgcgagcgtctggagcaggagctggcgctggaggagcggaggacgctggcgctgcagcagcagctccaggccgtgcgccaggcgctcaccgccagcttcgcctcactgccggtgccgggcacgggcgaaacgcccacgctgggcactctggacttctacatggcccggcttcacggagccatcgagcgcgaccccgcccagcacgagaagctcatcgtccgcatcaaggaaatcctggcccaggtcgccagcgagcacctgtgaggagtgggcgggcccacgatgcagaggagaagctgtgggcgcggccctgccacaccccaccccgtggacgagaggctgggggtccaccctttggggcctggtcccatcctgcaccttgggggctccagcccccctaaaattaaatttctgcagcatccctttagctttcaatctccccagccccctgaacccggaaaaagcactcgctgcgcgatacacccagaagaacctcacagccgagggtgcccctcctcggaggacagccacgcgctacactggctctccgggccacccccaggacacagggcagacgaaacccacccccagcacacggcaggaccccccaaattactcactacggggggctgtgccataggccacacaggaagctgccttgtggggacttacctggggtgtcccccgcatgcctgtaccccagatgggtgggggccggctttgcccatcctgctctcctccagccgagggaccctggtgggggtggctccttctcactgctggatccggactttttaaataaaaacaagtaaaatttgtgttttaaaaaaagggggggcccggtac

SEQ ID NO: 373546 - DNA, 2286 bp, Homo sapiens
  misc_feature (2020)..(2020): n is a, c, g, or t
atcggtatctgcatgggctcgcccggggggaaggtctcacccaatgggaccgttcgccgaggccttcattagcatgccgggggcggggaggggcggggcggccgacgggggcgggctgcgggcggttggttggagcgtcgcgcagtcgggaggtccgggaaagtttctttggaggtgaaaacagccgcggaactccgggccctgagagggggcgggggtgcaggggtcccagggccgggccggggtctttcctggcccgggggaaaccggcccaggcctcccggggggggcaatcgcccaacaaaggattcttggggcgcccgccctcgaggacttccctgcccctggatccggcccccccagcgctccgggcccggcatcccggggctctccatcgcggggtaccccagttcgcggtctgccatcgggcagcccgggcgctactcacctccgcccgcgtccgtgttccaggtcgtcggcccggagcggccatgtcccacggccccaagcagcccggcgcggccgccgcgccggcgggcggcaaggctccgggccagcatgggggcttcgtggtgactgtcaagcaagagcgcggcgagggtccacgcgcgggcgagaaggggtcccacgaggaggagccggtgaagaaacgcggctggcccaagggcaagaagcggaagaagattctgccgaatgggcccaaggcaccggtcacgggctacgtgcgcttcctgaacgagcggcgcgagcagatccgcacgcgccacccggatctgccctttcccgagatcaccaagatgctgggcgccgagtggagcaagctgcagccaacggaaaagcagcggtacctggatgaggccgagagagagaagcagcagtacatgaaggagctgcgggcgtaccagcagtctgaagcctataagatgtgcacggagaagatccaggagaagaagatcaagaaagaagactcgagctctgggctcatgaacactctcctgaatggacacaagggtggggactgcgatggcttctccaccttcgatgttcccatcttcactgaagagttcttggaccaaaacaaagcgcgtgaggcggagcttcggcgcttgcggaagatgaatgtggccttcgaggagcagaacgcggtactgcagaggcacacgcagagcatgagcagcgcgcgcgagcgtctggagcaggagctggcgctggaggagcggaggacgctggcgctgcagcagcagctccaggccgtgcgccaggcgctcaccgccagcttcgcctcactgccggtgccgggcacgggcgaaacgcccacgctgggcactctggacttctacatggcccggcttcacggagccatcgagcgcgaccccgcccagcacgagaagctcatcgtccgcatcaaggaaatcctggcccaggtcgccagcgagcacctgtgaggagtgggcgggcccacgatgcagaggagaagctgtgggcgcggccctgccacaccccaccccgtggacgagaggctgggggtccaccctttggggcctggtcccatcctgcaccttgggggctccagcccccctaaaattaaatttctgcagcatccctttagctttcaatctccccagccccctgaacccggaaaaagcactcgctgcgcgatacacccagaagaacctcacagccgagggtgcccctcctcggaggacagccacgcgctacactggctctccgggccacccccaggacacagggcagacgaaacccacccccagcacacggcaggaccccccaaattactcactacggggggctgtgccataggccacacaggaagctgccttgtggggacttacctggggtgtcccccgcatgcctgtaccccagatgggtgggggccggctttgcccatcctgctctcctccagccgagggaccctggtgggggtggctccttctcactgctggatccggactttttaaataaaaacaagtaaaatttgtgttttaaaaaaaaaaaaaanaaacaaacacaacacgcaacacaacacaacacacacgagacacaaacacacaacacgagaaacacacaagcgccggggagacaacaaaaaggcgggggggaggagaaaagagcgaggaaaagaaacgcgggcacacgagcaccacgaaggatgaccgacgagcgcccggattagtatacgacaagaaggaggaggaacacacgacgaggacccaccaaaagagagggaaaacaaagaagcgaaagagagcgggagaaacacgaata

SEQ ID NO: 373547 - DNA, 2146 bp, Homo sapiens
atcggtatctgcatgggctcgcccggggggaaggtctcacccaatgggaccgttcgccgaggccttcattagcatgccgggggcggggaggggcggggcggccgacgggggcgggctgcgggcggttggttggagcgtcgcgcagtcgggaggtccgggaaagtttctttggaggtgaaaacagccgcggaactccgggccctgagagggggcgggggtgcaggggtcccagggccgggccggggtctttcctggcccgggggaaaccggcccaggcctcccggggggggcaatcgcccaacaaaggattcttggggcgcccgccctcgaggacttccctgcccctggatccggcccccccagcgctccgggcccggcatcccggggctctccatcgcggggtaccccagttcgcggtctgccatcgggcagcccgggcgctactcacctccgcccgcgtccgtgttccaggtcgtcggcccggagcggccatgtcccacggccccaagcagcccggcgcggccgccgcgccggcgggcggcaaggctccgggccagcatgggggcttcgtggtgactgtcaagcaagagcgcggcgagggtccacgcgcgggcgagaaggggtcccacgaggaggagccggtgaagaaacgcggctggcccaagggcaagaagcggaagaagattctgccgaatgggcccaaggcaccggtcacgggctacgtgcgcttcctgaacgagcggcgcgagcagatccgcacgcgccacccggatctgccctttcccgagatcaccaagatgctgggcgccgagtggagcaagctgcagccaacggaaaagcagcggtacctggatgaggccgagagagagaagcagcagtacatgaaggagctgcgggcgtaccagcagtctgaagcctataagatgtgcacggagaagatccaggagaagaagatcaagaaagaagactcgagctctgggctcatgaacactctcctgaatggacacaagggtggggactgcgatggcttctccaccttcgatgttcccatcttcactgaagagttcttggaccaaaacaaagcgcgtgaggcggagcttcggcgcttgcggaagatgaatgtggccttcgaggagcagaacgcggtactgcagaggcacacgcagagcatgagcagcgcgcgcgagcgtctggagcaggagctggcgctggaggagcggaggacgctggcgctgcagcagcagctccaggccgtgcgccaggcgctcaccgccagcttcgcctcactgccggtgccgggcacgggcgaaacgcccacgctgggcactctggacttctacatggcccggcttcacggagccatcgagcgcgaccccgcccagcacgagaagctcatcgtccgcatcaaggaaatcctggcccaggtcgccagcgagcacctgtgaggagtgggcgggcccacgatgcagaggagaagctgtgggcgcggccctgccacaccccaccccgtggacgagaggctgggggtccaccctttggggcctggtcccatcctgcaccttgggggctccagcccccctaaaattaaatttctgcagcatccctttagctttcaatctccccagccccctgaacccggaaaaagcactcgctgcgcgatacacccagaagaacctcacagccgagggtgcccctcctcggaggacagccacgcgctacactggctctccgggccacccccaggacacagggcagacgaaacccacccccagcacacggcaggaccccccaaattactcactacggggggctgtgccataggccacacaggaagctgccttgtggggacttacctggggtgtcccccgcatgcctgtaccccagatgggtgggggccggctttgcccatcctgctctcctccagccgagggaccctggtgggggtggctccttctcactgctggatccggactttttaaataaaaacaagtaaaatttgtgttttaaaaaccaaaaaaagagccagtgcattctaggccatcttgagtcctggtgtaacgactaatttgcgaacgtgtcttgtttaaaatttcctagggggggcccgggccccaattccccttataaggggccggattaacacttc

SEQ ID NO: 373548 - DNA, 2008 bp, Homo sapiens
atcggtatctgcatgggctcgcccggggggaaggtctcacccaatgggaccgttcgccgaggccttcattagcatgccgggggcggggaggggcggggcggccgacgggggcgggctgcgggcggttggttggagcgtcgcgcagtcgggaggtccgggaaagtttctttggaggtgaaaacagccgcggaactccgggccctgagagggggcgggggtgcaggggtcccagggccgggccggggtctttcctggcccgggggaaaccggcccaggcctcccggggggggcaatcgcccaacaaaggattcttggggcgcccgccctcgaggacttccctgcccctggatccggcccccccagcgctccgggcccggcatcccggggctctccatcgcggggtaccccagttcgcggtctgccatcgggcagcccgggcgctactcacctccgcccgcgtccgtgttccaggtcgtcggcccggagcggccatgtcccacggccccaagcagcccggcgcggccgccgcgccggcgggcggcaaggctccgggccagcatgggggcttcgtggtgactgtcaagcaagagcgcggcgagggtccacgcgcgggcgagaaggggtcccacgaggaggagccggtgaagaaacgcggctggcccaagggcaagaagcggaagaagattctgccgaatgggcccaaggcaccggtcacgggctacgtgcgcttcctgaacgagcggcgcgagcagatccgcacgcgccacccggatctgccctttcccgagatcaccaagatgctgggcgccgagtggagcaagctgcagccaacggaaaagcagcggtacctggatgaggccgagagagagaagcagcagtacatgaaggagctgcgggcgtaccagcagtctgaagcctataagatgtgcacggagaagatccaggagaagaagatcaagaaagaagactcgagctctgggctcatgaacactctcctgaatggacacaagggtggggactgcgatggcttctccaccttcgatgttcccatcttcactgaagagttcttggaccaaaacaaagcgcgtgaggcggagcttcggcgcttgcggaagatgaatgtggccttcgaggagcagaacgcggtactgcagaggcacacgcagagcatgagcagcgcgcgcgagcgtctggagcaggagctggcgctggaggagcggaggacgctggcgctgcagcagcagctccaggccgtgcgccaggcgctcaccgccagcttcgcctcactgccggtgccgggcacgggcgaaacgcccacgctgggcactctggacttctacatggcccggcttcacggagccatcgagcgcgaccccgcccagcacgagaagctcatcgtccgcatcaaggaaatcctggcccaggtcgccagcgagcacctgtgaggagtgggcgggcccacgatgcagaggagaagctgtgggcgcggccctgccacaccccaccccgtggacgagaggctgggggtccaccctttggggcctggtcccatcctgcaccttgggggctccagcccccctaaaattaaatttctgcagcatccctttagctttcaatctccccagccccctgaacccggaaaaagcactcgctgcgcgatacacccagaagaacctcacagccgagggtgcccctcctcggaggacagccacgcgctacactggctctccgggccacccccaggacacagggcagacgaaacccacccccagcacacggcaggaccccccaaattactcactacggggggctgtgccataggccacacaggaagctgccttgtggggacttacctggggtgtcccccaccgcccaccgcacaatgccagctctgcccactctaaggtcccgcccacttcccctcctcggaggacagccacgcgcacactggctctccgggaccaccaccagacacagggcagacagaaacccaccgtcagggtggagc

SEQ ID NO: 373549 - DNA, 1871 bp, Homo sapiens
atcggtatctgcatgggctcgcccggggggaaggtctcacccaatgggaccgttcgccgaggccttcattagcatgccgggggcggggaggggcggggcggccgacgggggcgggctgcgggcggttggttggagcgtcgcgcagtcgggaggtccgggaaagtttctttggaggtgaaaacagccgcggaactccgggccctgagagggggcgggggtgcaggggtcccagggccgggccggggtctttcctggcccgggggaaaccggcccaggcctcccggggggggcaatcgcccaacaaaggattcttggggcgcccgccctcgaggacttccctgcccctggatccggcccccccagcgctccgggcccggcatcccggggctctccatcgcggggtaccccagttcgcggtctgccatcgggcagcccgggcgctactcacctccgcccgcgtccgtgttccaggtcgtcggcccggagcggccatgtcccacggccccaagcagcccggcgcggccgccgcgccggcgggcggcaaggctccgggccagcatgggggcttcgtggtgactgtcaagcaagagcgcggcgagggtccacgcgcgggcgagaaggggtcccacgaggaggagccggtgaagaaacgcggctggcccaagggcaagaagcggaagaagattctgccgaatgggcccaaggcaccggtcacgggctacgtgcgcttcctgaacgagcggcgcgagcagatccgcacgcgccacccggatctgccctttcccgagatcaccaagatgctgggcgccgagtggagcaagctgcagccaacggaaaagcagcggtacctggatgaggccgagagagagaagcagcagtacatgaaggagctgcgggcgtaccagcagtctgaagcctataagatgtgcacggagaagatccaggagaagaagatcaagaaagaagactcgagctctgggctcatgaacactctcctgaatggacacaagggtggggactgcgatggcttctccaccttcgatgttcccatcttcactgaagagttcttggaccaaaacaaagcgcgtgaggcggagcttcggcgcttgcggaagatgaatgtggccttcgaggagcagaacgcggtactgcagaggcacacgcagagcatgagcagcgcgcgcgagcgtctggagcaggagctggcgctggaggagcggaggacgctggcgctgcagcagcagctccaggccgtgcgccaggcgctcaccgccagcttcgcctcactgccggtgccgggcacgggcgaaacgcccacgctgggcactctggacttctacatggcccggcttcacggagccatcgagcgcgaccccgcccagcacgagaagctcatcgtccgcatcaaggaaatcctggcccaggtcgccagcgagcacctgtgaggagtgggcgggcccacgatgcagaggagaagctgtgggcgcggccctgccacaccccaccccgtggacgagaggctgggggtccaccctttggggcctggtcccatcctgcaccttgggggctccagcccccctaaaattaaatttctgcagcatccctttagctttcaatctccccagccccctgaacccggaaaaagcactcgctgcgcgatacacccagaagaacctcacagccgagggtgcccctcctcggaggacagccacgcgctacactggctctccgggccacccccaggacacagggcagacggccggctttgcccatcctgctctcctccagccgagggaccctggtgggggtggctccttctcactgctggatccggactttttaaataaaaacaagtaaaatttgtgttttaa

SEQ ID NO: 373550 - DNA, 1898 bp, Homo sapiens
atcggtatctgcatgggctcgcccggggggaaggtctcacccaatgggaccgttcgccgaggccttcattagcatgccgggggcggggaggggcggggcggccgacgggggcgggctgcgggcggttggttggagcgtcgcgcagtcgggaggtccgggaaagtttctttggaggtgaaaacagccgcggaactccgggccctgagagggggcgggggtgcaggggtcccagggccgggccggggtctttcctggcccgggggaaaccggcccaggcctcccggggggggcaatcgcccaacaaaggattcttggggcgcccgccctcgaggacttccctgcccctggatccggcccccccagcgctccgggcccggcatcccggggctctccatcgcggggtaccccagttcgcggtctgccatcgggcagcccgggcgctactcacctccgcccgcgtccgtgttccaggtcgtcggcccggagcggccatgtcccacggccccaagcagcccggcgcggccgccgcgccggcgggcggcaaggctccgggccagcatgggggcttcgtggtgactgtcaagcaagagcgcggcgagggtccacgcgcgggcgagaaggggtcccacgaggaggagccggtgaagaaacgcggctggcccaagggcaagaagcggaagaagattctgccgaatgggcccaaggcaccggtcacgggctacgtgcgcttcctgaacgagcggcgcgagcagatccgcacgcgccacccggatctgccctttcccgagatcaccaagatgctgggcgccgagtggagcaagctgcagccaacggaaaagcagcggtacctggatgaggccgagagagagaagcagcagtacatgaaggagctgcgggcgtaccagcagtctgaagcctataagatgtgcacggagaagatccaggagaagaagatcaagaaagaagactcgagctctgggctcatgaacactctcctgaatggacacaagggtggggactgcgatggcttctccaccttcgatgttcccatcttcactgaagagttcttggaccaaaacaaagcgcgtgaggcggagcttcggcgcttgcggaagatgaatgtggccttcgaggagcagaacgcggtactgcagaggcacacgcagagcatgagcagcgcgcgcgagcgtctggagcaggagctggcgctggaggagcggaggacgctggcgctgcagcagcagctccaggccgtgcgccaggcgctcaccgccagcttcgcctcactgccggtgccgggcacgggcgaaacgcccacgctgggcactctggacttctacatggcccggcttcacggagccatcgagcgcgaccccgcccagcacgagaagctcatcgtccgcatcaaggaaatcctggcccaggtcgccagcgagcacctgtgaggagtgggcgggcccacgatgcagaggagaagctgtgggcgcggccctgccacaccccaccccgtggacgagaggctgggggtccaccctttggggcctggtcccatcctgcaccttgggggctccagcccccctaaaattaaatttctgcagcatccctttagctttcaatctccccagccccctgaacccggaaaaagcactcgctgcgcgatacacccagaagaacctcacagccgagggtgcccctcctcggaggacagccacgcgctacactggctctccgggccacccccaggacacagggcagacggcatgcctgtaccccagatgggtgggggccggctttgcccatcctgctctcctccagccgagggaccctggtgggggtggctccttctcactgctggatccggactttttaaataaaaacaagtaaaatttgtgttttaa

SEQ ID NO: 373551 - DNA, 1785 bp, Homo sapiens
atcggtatctgcatgggctcgcccggggggaaggtctcacccaatgggaccgttcgccgaggccttcattagcatgccgggggcggggaggggcggggcggccgacgggggcgggctgcgggcggttggttggagcgtcgcgcagtcgggaggtccgggaaagtttctttggaggtgaaaacagccgcggaactccgggccctgagagggggcgggggtgcaggggtcccagggccgggccggggtctttcctggcccgggggaaaccggcccaggcctcccggggggggcaatcgcccaacaaaggattcttggggcgcccgccctcgaggacttccctgcccctggatccggcccccccagcgctccgggcccggcatcccggggctctccatcgcggggtaccccagttcgcggtctgccatcgggcagcccgggcgctactcacctccgcccgcgtccgtgttccaggtcgtcggcccggagcggccatgtcccacggccccaagcagcccggcgcggccgccgcgccggcgggcggcaaggctccgggccagcatgggggcttcgtggtgactgtcaagcaagagcgcggcgagggtccacgcgcgggcgagaaggggtcccacgaggaggagccggtgaagaaacgcggctggcccaagggcaagaagcggaagaagattctgccgaatgggcccaaggcaccggtcacgggctacgtgcgcttcctgaacgagcggcgcgagcagatccgcacgcgccacccggatctgccctttcccgagatcaccaagatgctgggcgccgagtggagcaagctgcagccaacggaaaagcagcggtacctggatgaggccgagagagagaagcagcagtacatgaaggagctgcgggcgtaccagcagtctgaagcctataagatgtgcacggagaagatccaggagaagaagatcaagaaagaagactcgagctctgggctcatgaacactctcctgaatggacacaagggtggggactgcgatggcttctccaccttcgatgttcccatcttcactgaagagttcttggaccaaaacaaagcgcgtgaggcggagcttcggcgcttgcggaagatgaatgtggccttcgaggagcagaacgcggtactgcagaggcacacgcagagcatgagcagcgcgcgcgagcgtctggagcaggagctggcgctggaggagcggaggacgctggcgctgcagcagcagctccaggccgtgcgccaggcgctcaccgccagcttcgcctcactgccggtgccgggcacgggcgaaacgcccacgctgggcactctggacttctacatggcccggcttcacggagccatcgagcgcgaccccgcccagcacgagaagctcatcgtccgcatcaaggaaatcctggcccaggtcgccagcgagcacctgtgaggagtgggcgggcccacgatgcagaggagaagctgtgggcgcggccctgccacaccccaccccgtggacgagaggctgggggtccaccctttggggcctggtcccatcctgcaccttgggggctccagcccccctaaaattaaatttctgcagcatccctttagctttcaatctccccagccccctgaacccggaaaaagcactcgctgcgcgatacacccagaagaacctcacagccgagggtgcccctcctcggaggacagccacgcgctacactggcttccttctcactgctggatccggactttttaaataaaaacaagtaaaatttgtgttttaa

SEQ ID NO: 373552 - DNA, 2287 bp, Homo sapiens
atcggtatctgcatgggctcgcccggggggaaggtctcacccaatgggaccgttcgccgaggccttcattagcatgccgggggcggggaggggcggggcggccgacgggggcgggctgcgggcggttggttggagcgtcgcgcagtcgggaggtccgggaaagtttctttggaggtcggcccggagcggccatgtcccacggccccaagcagcccggcgcggccgccgcgccggcgggcggcaaggctccgggccagcatgggggcttcgtggtgactgtcaagcaagagcgcggcgagggtccacgcgcgggcgagaaggggtcccacgaggaggaggtgagagtccctgcgctgagctgggggaggccccgggctcccgccccagcctcgaagccccgccccaggctggatttgaattgcttgtggctccgcccacagcccattttcctctggaagctgagaccccgccccgtgccagctgccacgcccctgacaggtcctctgccactctaagtccaggccccgcccaccgcacaatgccagctctgcccactctaaggtcccgcccacttccactccttgggggcggcaccctccccttggtcctgtgggcccgttctccagcagaaaaccacgcccaccaagcagaggccacgcccacaaccgaagtcaacgccaaccctgtactcaaacctcggcccatagttcctcagatcccctcacccctggccaggatccctctaacccaccgtgtcccgactgctgaccgggccctacctccatcttttccgggttcttcctcccagctaggccccgcccccatccccgcccatacgcgttaggccccgcccatgcccctctgagccctgccccagtacgccaggcccccctcccaacgacgcagcccggttctgcaccggtgaagaaacgcggctggcccaagggcaagaagcggaagaagattctgccgaatgggcccaaggcaccggtcacgggctacgtgcgcttcctgaacgagcggcgcgagcagatccgcacgcgccacccggatctgccctttcccgagatcaccaagatgctgggcgccgagtggagcaagctgcagccaacggaaaagcagcggtacctggatgaggccgagagagagaagcagcagtacatgaaggagctgcgggcgtaccagcagtctgaagcctataagatgtgcacggagaagatccaggagaagaagatcaagaaagaagactcgagctctgggctcatgaacactctcctgaatggacacaagggtggggactgcgatggcttctccaccttcgatgttcccatcttcactgaagagttcttggaccaaaacaaagcgcgtgaggcggagcttcggcgcttgcggaagatgaatgtggccttcgaggagcagaacgcggtactgcagaggcacacgcagagcatgagcagcgcgcgcgagcgtctggagcaggagctggcgctggaggagcggaggacgctggcgctgcagcagcagctccaggccgtgcgccaggcgctcaccgccagcttcgcctcactgccggtgccgggcacgggcgaaacgcccacgctgggcactctggacttctacatggcccggcttcacggagccatcgagcgcgaccccgcccagcacgagaagctcatcgtccgcatcaaggaaatcctggcccaggtcgccagcgagcacctgtgaggagtgggcgggcccacgatgcagaggagaagctgtgggcgcggccctgccacaccccaccccgtggacgagaggctgggggtccaccctttggggcctggtcccatcctgcaccttgggggctccagcccccctaaaattaaatttctgcagcatccctttagctttcaatctccccagccccctgaacccggaaaaagcactcgctgcgcgatacacccagaagaacctcacagccgagggtgcccctcctcggaggacagccacgcgctacactggctctccgggccacccccaggacacagggcagacgaaacccacccccagcacacggcaggaccccccaaattactcactacggggggctgtgccataggccacacaggaagctgccttgtggggacttacctggggtgtcccccgcatgcctgtaccccagatgggtgggggccggctttgcccatcctgctctcctccagccgagggaccctggtgggggtggctccttctcactgctggatccggactttttaaataaaaacaagtaaaatttgtgttttaa

SEQ ID NO: 373553 - DNA, 2485 bp, Homo sapiens
atcggtatctgcatgggctcgcccggggggaaggtctcacccaatgggaccgttcgccgaggccttcattagcatgccgggggcggggaggggcggggcggccgacgggggcgggctgcgggcggttggttggagcgtcgcgcagtcgggaggtccgggaaagtttctttggaggtgaaaacagccgcggaactccgggccctgagagggggcgggggtgcaggggtcccagggccgggccggggtctttcctggcccgggggaaaccggcccaggcctcccggggggggcaatcgcccaacaaaggattcttggggcgcccgccctcgaggacttccctgcccctggatccggcccccccagcgctccgggcccggcatcccggggctctccatcgcggggtaccccagttcgcggtctgccatcgggcagcccgggcgctactcacctccgcccgcgtccgtgttccaggtcgtcggcccggagcggccatgtcccacggccccaagcagcccggcgcggccgccgcgccggcgggcggcaaggctccgggccagcatgggggcttcgtggtgactgtcaagcaagagcgcggcgagggtccacgcgcgggcgagaaggggtcccacgaggaggagcccattttcctctggaagctgagaccccgccccgtgccagctgccacgcccctgacaggtcctctgccactctaagtccaggccccgcccaccgcacaatgccagctctgcccactctaaggtcccgcccacttccactccttgggggcggcaccctccccttggtcctgtgggcccgttctccagcagaaaaccacgcccaccaagcagaggccacgcccacaaccgaagtcaacgccaaccctgtactcaaacctcggcccatagttcctcagatcccctcacccctggccaggatccctctaacccaccgtgtcccgactgctgaccgggccctacctccatcttttccgggttcttcctcccagctaggccccgcccccatccccgcccatacgcgttaggccccgcccatgcccctctgagccctgccccagtacgccaggcccccctcccaacgacgcagcccggttctgcaccggtgaagaaacgcggctggcccaagggcaagaagcggaagaagattctgccgaatgggcccaaggcaccggtcacgggctacgtgcgcttcctgaacgagcggcgcgagcagatccgcacgcgccacccggatctgccctttcccgagatcaccaagatgctgggcgccgagtggagcaagctgcagccaacggaaaagcagcggtacctggatgaggccgagagagagaagcagcagtacatgaaggagctgcgggcgtaccagcagtctgaagcctataagatgtgcacggagaagatccaggagaagaagatcaagaaagaagactcgagctctgggctcatgaacactctcctgaatggacacaagggtggggactgcgatggcttctccaccttcgatgttcccatcttcactgaagagttcttggaccaaaacaaagcgcgtgaggcggagcttcggcgcttgcggaagatgaatgtggccttcgaggagcagaacgcggtactgcagaggcacacgcagagcatgagcagcgcgcgcgagcgtctggagcaggagctggcgctggaggagcggaggacgctggcgctgcagcagcagctccaggccgtgcgccaggcgctcaccgccagcttcgcctcactgccggtgccgggcacgggcgaaacgcccacgctgggcactctggacttctacatggcccggcttcacggagccatcgagcgcgaccccgcccagcacgagaagctcatcgtccgcatcaaggaaatcctggcccaggtcgccagcgagcacctgtgaggagtgggcgggcccacgatgcagaggagaagctgtgggcgcggccctgccacaccccaccccgtggacgagaggctgggggtccaccctttggggcctggtcccatcctgcaccttgggggctccagcccccctaaaattaaatttctgcagcatccctttagctttcaatctccccagccccctgaacccggaaaaagcactcgctgcgcgatacacccagaagaacctcacagccgagggtgcccctcctcggaggacagccacgcgctacactggctctccgggccacccccaggacacagggcagacgaaacccacccccagcacacggcaggaccccccaaattactcactacggggggctgtgccataggccacacaggaagctgccttgtggggacttacctggggtgtcccccgcatgcctgtaccccagatgggtgggggccggctttgcccatcctgctctcctccagccgagggaccctggtgggggtggctccttctcactgctggatccggactttttaaataaaaacaagtaaaatttgtgttttaa

SEQ ID NO: 373554 - DNA, 1872 bp, Homo sapiens
atcggtatctgcatgggctcgcccggggggaaggtctcacccaatgggaccgttcgccgaggccttcattagcatgccgggggcggggaggggcggggcggccgacgggggcgggctgcgggcggttggttggagcgtcgcgcagtcgggaggtccgggaaagtttctttggaggtgaaaacagccgcggaactccgggccctgagagggggcgggggtgcaggggtcccagggccgggccggggtctttcctggcccgggggaaaccggcccaggcctcccggggggggcaatcgcccaacaaaggattcttggggcgcccgccctcgaggacttccctgcccctggatccggcccccccagcgctccgggcccggcatcccggggctctccatcgcggggtaccccagttcgcggtctgccatcgggcagcccgggcgctactcacctccgcccgcgtccgtgttccaggtcgtcggcccggagcggccatgtcccacggccccaagcagcccggcgcggccgccgcgccggcgggcggcaaggctccgggccagcatgggggcttcgtggtgactgtcaagcaagagcgcggcgagggtccacgcgcgggcgagaaggggtcccacgaggaggagccggtgaagaaacgcggctggcccaagggcaagaagcggaagaagattctgccgaatgggcccaaggcaccggtcacgggctacgtgcgcttcctgaacgagcggcgcgagcagatccgcacgcgccacccggatctgccctttcccgagatcaccaagatgctgggcgccgagtggagcaagctgcagccaacggaaaagcagcggtacctggatgaggccgagagagagaagcagcagtacatgaaggagctgcgggcgtaccagcagtctgaagcctataagatgtgcacggagaagatccaggagaagaagatcaagaaagaagactcgagctctgggctcatgaacactctcctgaatggacacaagggtggggactgcgatggcttctccaccttcgatgttcccatcttcactgaagagttcttggaccaaaacaaagcgcgtgaggcggagcttcggcgcttgcggaagatgaatgtggccttcgaggagcagaacgcggtactgcagaggcacacgcagagcatgagcagcgcgcgcgagcgtctggagcaggagctggcgctggaggagcggaggacgctggcgctgcagcagcagctccaggccgtgcgccaggcgctcaccgccagcttcgcctcactgccggtgccgggcacgggcgaaacgcccacgctgggcactctggacttctacatggcccggcttcacggagccatcgagcgcgaccccgcccagcacgagaagctcatcgtccgcatcaaggaaatcctggcccaggtcgccagcgagcacctgtgaggagtgggcgggcccacgatgcagaggagaagctgtgggcgcggccctgccacacccggaaaaagcactcgctgcgcgatacacccagaagaacctcacagccgagggtgcccctcctcggaggacagccacgcgctacactggctctccgggccacccccaggacacagggcagacgaaacccacccccagcacacggcaggaccccccaaattactcactacggggggctgtgccataggccacacaggaagctgccttgtggggacttacctggggtgtcccccgcatgcctgtaccccagatgggtgggggccggctttgcccatcctgctctcctccagccgagggaccctggtgggggtggctccttctcactgctggatccggactttttaaataaaaacaagtaaaatttgtgttttaa

SEQ ID NO: 373555 - DNA, 1843 bp, Homo sapiens
atcggtatctgcatgggctcgcccggggggaaggtctcacccaatgggaccgttcgccgaggccttcattagcatgccgggggcggggaggggcggggcggccgacgggggcgggctgcgggcggttggttggagcgtcgcgcagtcgggaggtccgggaaagtttctttggaggtgaaaacagccgcggaactccgggccctgagagggggcgggggtgcaggggtcccagggccgggccggggtctttcctggcccgggggaaaccggcccaggcctcccggggggggcaatcgcccaacaaaggattcttggggcgcccgccctcgaggacttccctgcccctggatccggcccccccagcgctccgggcccggcatcccggggctctccatcgcggggtaccccagttcgcggtctgccatcgggcagcccgggcgctactcacctccgcccgcgtccgtgttccaggtcccggtgaagaaacgcggctggcccaagggcaagaagcggaagaagattctgccgaatgggcccaaggcaccggtcacgggctacgtgcgcttcctgaacgagcggcgcgagcagatccgcacgcgccacccggatctgccctttcccgagatcaccaagatgctgggcgccgagtggagcaagctgcagccaacggaaaagcagcggtacctggatgaggccgagagagagaagcagcagtacatgaaggagctgcgggcgtaccagcagtctgaagcctataagatgtgcacggagaagatccaggagaagaagatcaagaaagaagactcgagctctgggctcatgaacactctcctgaatggacacaagggtggggactgcgatggcttctccaccttcgatgttcccatcttcactgaagagttcttggaccaaaacaaagcgcgtgaggcggagcttcggcgcttgcggaagatgaatgtggccttcgaggagcagaacgcggtactgcagaggcacacgcagagcatgagcagcgcgcgcgagcgtctggagcaggagctggcgctggaggagcggaggacgctggcgctgcagcagcagctccaggccgtgcgccaggcgctcaccgccagcttcgcctcactgccggtgccgggcacgggcgaaacgcccacgctgggcactctggacttctacatggcccggcttcacggagccatcgagcgcgaccccgcccagcacgagaagctcatcgtccgcatcaaggaaatcctggcccaggtcgccagcgagcacctgtgaggagtgggcgggcccacgatgcagaggagaagctgtgggcgcggccctgccacaccccaccccgtggacgagaggctgggggtccaccctttggggcctggtcccatcctgcaccttgggggctccagcccccctaaaattaaatttctgcagcatccctttagctttcaatctccccagccccctgaacccggaaaaagcactcgctgcgcgatacacccagaagaacctcacagccgagggtgcccctcctcggaggacagccacgcgctacactggctctccgggccacccccaggacacagggcagacgaaacccacccccagcacacggcaggaccccccaaattactcactacggggggctgtgccataggccacacaggaagctgccttgtggggacttacctggggtgtcccccgcatgcctgtaccccagatgggtgggggccggctttgcccatcctgctctcctccagccgagggaccctggtgggggtggctccttctcactgctggatccggactttttaaataaaaacaagtaaaatttgtgttttaa

SEQ ID NO: 373556 - DNA, 2851 bp, Homo sapiens
atcggtatctgcatgggctcgcccggggggaaggtctcacccaatgggaccgttcgccgaggccttcattagcatgccgggggcggggaggggcggggcggccgacgggggcgggctgcgggcggttggttggagcgtcgcgcagtcgggaggtccgggaaagtttctttggaggtgaaaacagccgcggaactccgggccctgagagggggcgggggtgcaggggtcccagggccgggccggggtctttcctggcccgggggaaaccggcccaggcctcccggggggggcaatcgcccaacaaaggattcttggggcgcccgccctcgaggacttccctgcccctggatccggcccccccagcgctccgggcccggcatcccggggctctccatcgcggggtaccccagttcgcggtctgccatcgggcagcccgggcgctactcacctccgcccgcgtccgtgttccaggtcgtcggcccggagcggccatgtcccacggccccaagcagcccggcgcggccgccgcgccggcgggcggcaaggctccgggccagcatgggggcttcgtggtgactgtcaagcaagagcgcggcgagggtccacgcgcgggcgagaaggggtcccacgaggaggagccggtgaagaaacgcggctggcccaagggcaagaagcggaagaagattctgccgaatgggcccaaggcaccggtcacgggctacgtgcgcttcctgaacgagcggcgcgagcagatccgcacgcgccacccggatctgccctttcccgagatcaccaagatgctgggcgccgagtggagcaagctgcagccaacggaaaagcagcggtacctggatgaggccgagagagagaagcagcagtacatgaaggagctgcgggcgtaccagcagtctgaagcctataagatgtgcacggagaagatccaggagaagaagatcaagaaaggtgggaggggtcgggcgcggtggctcacgcctgtcatcccagcactttgggaggccgaggcgggtgtatcacctgaggtcagaccagcctggccaacatagtgaaaccctccccctctactaaaaatacaaaaattacctgggcgtggtggcgggtgcctgtaatcccagctactcgggaggctgaggcaggagaattgcttgaacccgggaggtggaggttgcagtgagccaagattgcgccattgcactctagccagggcgacagggcgagactccgtctcaaaaaaaaaaaaaaagaaaaagaaaaatgaaaggtgggaggggccggtgcgagcagttggggtcctgctctgtggggtgcgacctcagcccaggcagggcctccctccgtggggcacagtcccgtgggttgggcgggggaaagatacatagccagacaggagtgaagggggctcactcggtacagcgatgggggatgcccagacgcggggcactcaagtggggagctggagccggctgagcagcgctgacctagggtgcagggcgtggtccctggaggcctgggaggctgaccctgcccttcccctcccccgccagaagactcgagctctgggctcatgaacactctcctgaatggacacaaggtaagcgaccttcttcctctcaaagcacctgggggagaaaggtctggaggcttctagaaccctgagtcagagccagtgctcgcccagatgtgtgcaagcaggggcggtgccactgcaccgtgggatcgctgttgattgtactcccaccggggtgtcccaggagaccctcctaggcttggggcacacccagagagcgtggctgcctcctaccaccagtaaattgccaccttgtcccttcgtcttagggtggggactgcgatggcttctccaccttcgatgttcccatcttcactgaagagttcttggaccaaaacaaagcgcgtgaggcggagcttcggcgcttgcggaagatgaatgtggccttcgaggagcagaacgcggtactgcagaggcacacgcagagcatgagcagcgcgcgcgagcgtctggagcaggagctggcgctggaggagcggaggacgctggcgctgcagcagcagctccaggccgtgcgccaggcgctcaccgccagcttcgcctcactgccggtgccgggcacgggcgaaacgcccacgctgggcactctggacttctacatggcccggcttcacggagccatcgagcgcgaccccgcccagcacgagaagctcatcgtccgcatcaaggaaatcctggcccaggtcgccagcgagcacctgtgaggagtgggcgggcccacgatgcagaggagaagctgtgggcgcggccctgccacaccccaccccgtggacgagaggctgggggtccaccctttggggcctggtcccatcctgcaccttgggggctccagcccccctaaaattaaatttctgcagcatccctttagctttcaatctccccagccccctgaacccggaaaaagcactcgctgcgcgatacacccagaagaacctcacagccgagggtgcccctcctcggaggacagccacgcgctacactggctctccgggccacccccaggacacagggcagacgaaacccacccccagcacacggcaggaccccccaaattactcactacggggggctgtgccataggccacacaggaagctgccttgtggggacttacctggggtgtcccccgcatgcctgtaccccagatgggtgggggccggctttgcccatcctgctctcctccagccgagggaccctggtgggggtggctccttctcactgctggatccggactttttaaataaaaacaagtaaaatttgtgttttaa

SEQ ID NO: 373557 - DNA, 1299 bp, Homo sapiens
atcggtatctgcatgggctcgcccggggggaaggtctcacccaatgggaccgttcgccgaggccttcattagcatgccgggggcggggaggggcggggcggccgacgggggcgggctgcgggcggttggttggagcgtcgcgcagtcgggaggtccgggaaagtttctttggaggtgaaaacagccgcggaactccgggccctgagagggggcgggggtgcaggggtcccagggccgggccggggtctttcctggcccgggggaaaccggcccaggcctcccggggggggcaatcgcccaacaaaggattcttggggcgcccgccctcgaggacttccctgcccctggatccggcccccccagcgctccgggcccggcatcccggggctctccatcgcggggtaccccagttcgcggtctgccatcgggcagcccgggcgctactcacctccgcccgcgtccgtgttccaggtcgtcggcccggagcggccatgtcccacggccccaagcagcccggcgcggccgccgcgccggcgggcggcaaggctccgggccagcatgggggcttcgtggtgactgtcaagcaagagcgcggcgagggtccacgcgcgctgggcactctggacttctacatggcccggcttcacggagccatcgagcgcgaccccgcccagcacgagaagctcatcgtccgcatcaaggaaatcctggcccaggtcgccagcgagcacctgtgaggagtgggcgggcccacgatgcagaggagaagctgtgggcgcggccctgccacaccccaccccgtggacgagaggctgggggtccaccctttggggcctggtcccatcctgcaccttgggggctccagcccccctaaaattaaatttctgcagcatccctttagctttcaatctccccagccccctgaacccggaaaaagcactcgctgcgcgatacacccagaagaacctcacagccgagggtgcccctcctcggaggacagccacgcgctacactggctctccgggccacccccaggacacagggcagacgaaacccacccccagcacacggcaggaccccccaaattactcactacggggggctgtgccataggccacacaggaagctgccttgtggggacttacctggggtgtcccccgcatgcctgtaccccagatgggtgggggccggctttgcccatcctgctctcctccagccgagggaccctggtgggggtggctccttctcactgctggatccggactttttaaataaaaacaagtaaaatttgtgttttaa

SEQ ID NO: 373558 - DNA, 1055 bp, Homo sapiens
atcggtatctgcatgggctcgcccggggggaaggtctcacccaatgggaccgttcgccgaggccttcattagcatgccgggggcggggaggggcggggcggccgacgggggcgggctgcgggcggttggttggagcgtcgcgcagtcgggaggtccgggaaagtttctttggaggtgaaaacagccgcggaactccgggccctgagagggggcgggggtgcaggggtcccagggccgggccggggtctttcctggcccgggggaaaccggcccaggcctcccggggggggcaatcgcccaacaaaggattcttggggcgcccgccctcgaggacttccctgcccctggatccggcccccccagcgctccgggcccggcatcccggggctctccatcgcggggtaccccagttcgcggtctgccatcgggcagcccgggcgctactcacctccgcccgcgtccgtgttccaggtcgtcggcccggagcggccatgtcccacggccccaagcagcccggcgcggccgccgcgccggcgggcggcaaggctccgggccagcatgggggcttcgtggtgactgtcaagcaagagcgcggcgagggtccacgcgcgctgggcactctggacttctacatggcccggcttcacggagccatcgagcgcgaccccgcccagcacgagaagctcatcgtccgcatcaaggaaatcctggcccaggtcgccagcgagcacctgtgaggagtgggcgggcccacgatgcagaggagaagctgtgggcgcggccctgccacaccccaccccgtggacgagaggctgggggtccaccctttggggcctggtcccatcctgcaccttgggggtgtgccataggccacacaggaagctgccttgtggggacttacctggggtgtcccccgcatgcctgtaccccagatgggtgggggccggctttgcccatcctgctctcctccagccgagggaccctggtgggggtggctccttctcactgctggatccggactttttaaataaaaacaagtaaaatttgtgttttaa

SEQ ID NO: 373559 - DNA, 415 bp, Homo sapiens
cacagggcagacgaaacccacccccagcacacggcaggaccccccaaattactcactacggggggctgtgccataggccacacaggaagctgccttgtggggacttacctggggtgtcccccgcatgcctgtaccccagatgggtgggggccggctttgcccatcctgctctcctccagccgagggaccctggtgggggtggctccttctcactgctggatccggactttttaaataaaaacaagtaaaatttgtgttttaagcttgtgagtgtgtaagcttgtttggggtggtgtggagggttcagaaggtgcagcctgggccccccatgacattccctgctgggggcgccaggcctgctctctttacctctagcagagcctcagagtttctcagatagggagacgggagccca

SEQ ID NO: 373560 - DNA, 1605 bp, Homo sapiens
ccagggggaagaaacatatgggctaggtacgaggctgggtggtgatcggccgaggggaaagtttctttggaggtcggcccggagcggccatgtcccacggccccaagcagcccggcgcggccgccgcgccggcgggcggcaaggctccgggccagcatgggggcttcgtggtgactgtcaagcaagagcgcggcgagggtccacgcgcgggcgagaaggggtcccacgaggaggagccggtgaagaaacgcggctggcccaagggcaagaagcggaagaagattctgccgaatgggcccaaggcaccggtcacgggctacgtgcgcttcctgaacgagcggcgcgagcagatccgcacgcgccacccggatctgccctttcccgagatcaccaagatgctgggcgccgagtggagcaagctgcagccaacggaaaagcagcggtacctggatgaggccgagagagagaagcagcagtacatgaaggagctgcgggcgtaccagcagtctgaagcctataagatgtgcacggagaagatccaggagaagaagatcaagaaagaagactcgagctctgggctcatgaacactctcctgaatggacacaagggtggggactgcgatggcttctccaccttcgatgttcccatcttcactgaagagttcttggaccaaaacaaagcgcgtgaggcggagcttcggcgcttgcggaagatgaatgtggccttcgaggagcagaacgcggtactgcagaggcacacgcagagcatgagcagcgcgcgcgagcgtctggagcaggagctggcgctggaggagcggaggacgctggcgctgcagcagcagctccaggccgtgcgccaggcgctcaccgccagcttcgcctcactgccggtgccgggcacgggcgaaacgcccacgctgggcactctggacttctacatggcccggcttcacggagccatcgagcgcgaccccgcccagcacgagaagctcatcgtccgcatcaaggaaatcctggcccaggtcgccagcgagcacctgtgaggagtgggcgggcccacgatgcagaggagaagctgtgggcgcggccctgccacaccccaccccgtggacgagaggctgggggtccaccctttggggcctggtcccatcctgcaccttgggggctccagcccccctaaaattaaatttctgcagcatccctttagctttcaatctccccagccccctgaacccggaaaaagcactcgctgcgcgatacacccagaagaacctcacagccgagggtgcccctcctcggaggacagccacgcgctacactggctctccgggccacccccaggacacagggcagacgaaacccacccccagcacacggcaggaccccccaaattactcactacggggggctgtgccataggccacacaggaagctgccttgtggggacttacctggggtgtcccccgcatgcctgtaccccagatgggtgggggccggctttgcccatcctgctctcctccagccgagggaccctggtgggggtggctccttctcactgctggatccggactttttaaataaaaacaagtaaaatttgtgttttaa

SEQ ID NO: 373561 - DNA, 2271 bp, Homo sapiens
atcggtatctgcatgggctcgcccggggggaaggtctcacccaatgggaccgttcgccgaggccttcattagcatgccgggggcggggaggggcggggcggccgacgggggcgggctgcgggcggttggttggagcgtcgcgcagtcgggaggtccgggaaagtttctttggaggtgaaaacagccgcggaactccgggccctgagagggggcgggggtgcaggggtcccagggccgggccggggtctttcctggcccgggggaaaccggcccaggcctcccggggggggcaatcgcccaacaaaggattcttggggcgcccgccctcgaggacttccctgcccctggatccggcccccccagcgctccgggcccggcatcccggggctctccatcgcggggtaccccagttcgcggtctgccatcgggcagcccgggcgctactcacctccgcccgcgtccgtgttccaggtcgtcggcccggagcggccatgtcccacggccccaagcagcccggcgcggccgccgcgccggcgggcggcaaggctccgggccagcatgggggcttcgtggtgactgtcaagcaagagcgcggcgagggtccacgcgcgggcgagaaggggtcccacgaggaggagccggtgaagaaacgcggctggcccaagggcaagaagcggaagaagattctgccgaatgggcccaaggcaccggtcacgggctacgtgcgcttcctgaacgagcggcgcgagcagatccgcacgcgccacccggatctgccctttcccgagatcaccaagatgctgggcgccgagtggagcaagctgcagccaacggaaaagcagcggtacctggatgaggccgagagagagaagcagcagtacatgaaggagctgcgggcgtaccagcagtctgaagcctataagatgtgcacggagaagatccaggagaagaagatcaagaaagaagactcgagctctgggctcatgaacactctcctgaatggacacaagggtggggactgcgatggcttctccaccttcgatgttcccatcttcactgaagagttcttggaccaaaacaaagcgcgtgaggcggagcttcggcgcttgcggaagatgaatgtggccttcgaggagcagaacgcggtactgcagaggcacacgcagagcatgagcagcgcgcgcgagcgtctggagcaggagctggcgctggaggagcggaggacgctggcgctgcagcagcagctccaggccgtgcgccaggcgctcaccgccagcttcgcctcactgccggtgccgggcacgggcgaaacgcccacgctgggcactctggacttctacatggcccggcttcacggagccatcgagcgcgaccccgcccagcacgagaagctcatcgtccgcatcaaggaaatcctggcccaggtcgccagcgagcacctgtgaggagtgggcgggcccacgatgcagaggagaagctgtgggcgcggccctgccacaccccaccccgtggacgagaggctgggggtccaccctttggggcctggtcccatcctgcaccttgggggctccagcccccctaaaattaaatttctgcagcatccctttagctttcaatctccccagccccctgaacccggaaaaagcactcgctgcgcgatacacccagaagaacctcacagccgagggtgcccctcctcggaggacagccacgcgctacactggctctccgggccacccccaggacacagggcagacgaaacccacccccagcacacggcaggaccccccaaattactcactacggggggctgtgccataggccacacaggaagctgccttgtggggacttacctggggtgtcccccgcatgcctgtaccccagatgggtgggggccggctttgcccatcctgctctcctccagccgagggaccctggtgggggtggctccttctcactgctggatccggactttttaaataaaaacaagtaaaatttgtgttttaaaaaaagaagaacaaaagaaatagaaaagaaacaaggaagaaaaaaaaaaagaaaaggggggggggggcctaaaaggttcccccggggggggccaagttgcgacacccactttgcttgcacaagggggggccccacagagagcagcgacattaagagagagacagcggcccccgatacaacacgtggagacgggggacacgcgaaacgggacaccactgagagaaagacacacacaccgggggggacactcagcggcaaccacga

SEQ ID NO: 373562 - DNA, 2045 bp, Homo sapiens
atcggtatctgcatgggctcgcccggggggaaggtctcacccaatgggaccgttcgccgaggccttcattagcatgccgggggcggggaggggcggggcggccgacgggggcgggctgcgggcggttggttggagcgtcgcgcagtcgggaggtccgggaaagtttctttggaggtgaaaacagccgcggaactccgggccctgagagggggcgggggtgcaggggtcccagggccgggccggggtctttcctggcccgggggaaaccggcccaggcctcccggggggggcaatcgcccaacaaaggattcttggggcgcccgccctcgaggacttccctgcccctggatccggcccccccagcgctccgggcccggcatcccggggctctccatcgcggggtaccccagttcgcggtctgccatcgggcagcccgggcgctactcacctccgcccgcgtccgtgttccaggtcgtcggcccggagcggccatgtcccacggccccaagcagcccggcgcggccgccgcgccggcgggcggcaaggctccgggccagcatgggggcttcgtggtgactgtcaagcaagagcgcggcgagggtccacgcgcgggcgagaaggggtcccacgaggaggagccggtgaagaaacgcggctggcccaagggcaagaagcggaagaagattctgccgaatgggcccaaggcaccggtcacgggctacgtgcgcttcctgaacgagcggcgcgagcagatccgcacgcgccacccggatctgccctttcccgagatcaccaagatgctgggcgccgagtggagcaagctgcagccaacggaaaagcaggcttcccctgcttcaagccttctggtgctgccccccagcggtacctggatgaggccgagagagagaagcagcagtacatgaaggagctgcgggcgtaccagcagtctgaagcctataagatgtgcacggagaagatccaggagaagaagatcaagaaagaagactcgagctctgggctcatgaacactctcctgaatggacacaagggtggggactgcgatggcttctccaccttcgatgttcccatcttcactgaagagttcttggaccaaaacaaagcgcgtgaggcggagcttcggcgcttgcggaagatgaatgtggccttcgaggagcagaacgcggtactgcagaggcacacgcagagcatgagcagcgcgcgcgagcgtctggagcaggagctggcgctggaggagcggaggacgctggcgctgcagcagcagctccaggccgtgcgccaggcgctcaccgccagcttcgcctcactgccggtgccgggcacgggcgaaacgcccacgctgggcactctggacttctacatggcccggcttcacggagccatcgagcgcgaccccgcccagcacgagaagctcatcgtccgcatcaaggaaatcctggcccaggtcgccagcgagcacctgtgaggagtgggcgggcccacgatgcagaggagaagctgtgggcgcggccctgccacaccccaccccgtggacgagaggctgggggtccaccctttggggcctggtcccatcctgcaccttgggggctccagcccccctaaaattaaatttctgcagcatccctttagctttcaatctccccagccccctgaacccggaaaaagcactcgctgcgcgatacacccagaagaacctcacagccgagggtgcccctcctcggaggacagccacgcgctacactggctctccgggccacccccaggacacagggcagacgaaacccacccccagcacacggcaggaccccccaaattactcactacggggggctgtgccataggccacacaggaagctgccttgtggggacttacctggggtgtcccccgcatgcctgtaccccagatgggtgggggccggctttgcccatcctgctctcctccagccgagggaccctggtgggggtggctccttctcactgctggatccggactttttaaataaaaacaagtaaaatttgtgttttaa

SEQ ID NO: 373563 - DNA, 3131 bp, Homo sapiens
atcggtatctgcatgggctcgcccggggggaaggtctcacccaatgggaccgttcgccgaggccttcattagcatgccgggggcggggaggggcggggcggccgacgggggcgggctgcgggcggttggttggagcgtcgcgcagtcgggaggtccgggaaagtttctttggaggtcggcccggagcggccatgtcccacggccccaagcagcccggcgcggccgccgcgccggcgggcggcaaggctccgggccagcatgggggcttcgtggtgactgtcaagcaagagcgcggcgagggtccacgcgcgggcgagaaggggtcccacgaggaggaggtgagagtccctgcgctgagctgggggaggccccgggctcccgccccagcctcgaagccccgccccaggctggatttgaattgcttgtggctccgcccacagcccattttcctctggaagctgagaccccgccccgtgccagctgccacgcccctgacaggtcctctgccactctaagtccaggccccgcccaccgcacaatgccagctctgcccactctaaggtcccgcccacttccactccttgggggcggcaccctccccttggtcctgtgggcccgttctccagcagaaaaccacgcccaccaagcagaggccacgcccacaaccgaagtcaacgccaaccctgtactcaaacctcggcccatagttcctcagatcccctcacccctggccaggatccctctaacccaccgtgtcccgactgctgaccgggccctacctccatcttttccgggttcttcctcccagctaggccccgcccccatccccgcccatacgcgttaggccccgcccatgcccctctgagccctgccccagtacgccaggcccccctcccaacgacgcagcccggttctgcaccggtgaagaaacgcggctggcccaagggcaagaagcggaagaagattctgccgaatgggcccaaggcaccggtcacgggctacgtgcgcttcctgaacgagcggcgcgagcagatccgcacgcgccacccggatctgccctttcccgagatcaccaagatgctgggcgccgagtggagcaagctgcagccaacggaaaagcagcggtacctggatgaggccgagagagagaagcagcagtacatgaaggagctgcgggcgtaccagcagtctgaagcctataagatgtgcacggagaagatccaggagaagaagatcaagaaaggtgggaggggtcgggcgcggtggctcacgcctgtcatcccagcactttgggaggccgaggcgggtgtatcacctgaggtcagaccagcctggccaacatagtgaaaccctccccctctactaaaaatacaaaaattacctgggcgtggtggcgggtgcctgtaatcccagctactcgggaggctgaggcaggagaattgcttgaacccgggaggtggaggttgcagtgagccaagattgcgccattgcactctagccagggcgacagggcgagactccgtctcaaaaaaaaaaaaaaagaaaaagaaaaatgaaaggtgggaggggccggtgcgagcagttggggtcctgctctgtggggtgcgacctcagcccaggcagggcctccctccgtggggcacagtcccgtgggttgggcgggggaaagatacatagccagacaggagtgaagggggctcactcggtacagcgatgggggatgcccagacgcggggcactcaagtggggagctggagccggctgagcagcgctgacctagggtgcagggcgtggtccctggaggcctgggaggctgaccctgcccttcccctcccccgccagaagactcgagctctgggctcatgaacactctcctgaatggacacaaggtaagcgaccttcttcctctcaaagcacctgggggagaaaggtctggaggcttctagaaccctgagtcagagccagtgctcgcccagatgtgtgcaagcaggggcggtgccactgcaccgtgggatcgctgttgattgtactcccaccggggtgtcccaggagaccctcctaggcttggggcacacccagagagcgtggctgcctcctaccaccagtaaattgccaccttgtcccttcgtcttagggtggggactgcgatggcttctccaccttcgatgttcccatcttcactgaagagttcttggaccaaaacaaagcgcgtgaggcggagcttcggcgcttgcggaagatgaatgtggccttcgaggagcagaacgcggtactgcagaggcacacgcagagcatgagcagcgcgcgcgagcgtctggagcaggagctggcgctggaggagcggaggacgctggcgctgcagcagcagctccaggccgtgcgccaggcgctcaccgccagcttcgcctcactgccggtgccgggcacgggcgaaacgcccacgctgggcactctggacttctacatggcccggcttcacggagccatcgagcgcgaccccgcccagcacgagaagctcatcgtccgcatcaaggaaatcctggcccaggtcgccagcgagcacctgtgaggagtgggcgggcccacgatgcagaggagaagctgtgggcgcggccctgccacaccccaccccgtggacgagaggctgggggtccaccctttggggcctggtcccatcctgcaccttgggggctccagcccccctaaaattaaatttctgcagcatccctttagctttcaatctccccagccccctgaacccggaaaaagcactcgctgcgcgatacacccagaagaacctcacagccgagggtgcccctcctcggaggacagccacgcgctacactggctctccgggccacccccaggacacagggcagacgaaacccacccccagcacacggcaggaccccccaaattactcactacggggggctgtgccataggccacacaggaagctgccttgtggggacttacctggggtgtcccccgcatgcctgtaccccagatgggtgggggccggctttgcccatcctgctctcctccagccgagggaccctggtgggggtggctccttctcactgctggatccggactttttaaataaaaacaagtaaaatttgtgttttaa

SEQ ID NO: 373564 - DNA, 1626 bp, Homo sapiens
atcggtatctgcatgggctcgcccggggggaaggtctcacccaatgggaccgttcgccgaggccttcattagcatgccgggggcggggaggggcggggcggccgacgggggcgggctgcgggcggttggttggagcgtcgcgcagtcgggaggtccgggaaagtttctttggaggtgaaaacagccgcggaactccgggccctgagagggggcgggggtgcaggggtcccagggccgggccggggtctttcctggcccgggggaaaccggcccaggcctcccggggggggcaatcgcccaacaaaggattcttggggcgcccgccctcgaggacttccctgcccctggatccggcccccccagcgctccgggcccggcatcccggggctctccatcgcggggtaccccagttcgcggtctgccatcgggcagcccgggcgctactcacctccgcccgcgtccgtgttccaggtcgtcggcccggagcggccatgtcccacggccccaagcagcccggcgcggccgccgcgccggcgggcggcaaggctccgggccagcatgggggcttcgtggtgactgtcaagcaagagcgcggcgagggtccacgcgcgggcgagaaggggtcccacgaggaggagccggtgaagaaacgcggctggcccaagggcaagaagcggaagaagattctgccgaatgggcccaaggcaccggtcacgggctacgtgcgcttcctgaacgagcggcgcgagcagatccgcacgcgccacccggatctgccctttcccgagatcaccaagatgctgggcgccgagtggagcaagctgcagccaacggaaaagcagcggtacctggatgaggccgagagagagaagcagcagtacatgaaggagctgcgggcgtaccagcagtctgaagcctataagatgtgcacggagaagatccaggagaagaagatcaagaaagaagactcgagctctgggctcatgaacactctcctgaatggacacaaggtaagcgaccttcttcctctcaaagcacctgggggagaaaggtctggaggcttctagaaccctgagtcagagccagtgctcgcccagatgtgtgcaagcaggggcggtgccactgcaccgtgggatcgctgttgattgtactcccaccggggtgtcccaggagaccctcctaggcttggggcacacccagagagcgtggctgcctcctaccaccagtaaattgccaccttgtcccttcgtcttagggtggggactgcgatggcttctccaccttcgatgttcccatcttcactgaagagttcttggaccaaaacaaaggtgagcggtaactgcgctcctgatgcgaactccgtgaaactgggtggtagaggggggcgtgggccaggagggccccaagactgcaggaggcggatcgggaggttccctatgagcgtccaggcgcacgctgtcgctccagaggctgatgtggagcaggaggcagagggcgcagtgagggaaacctgggcaggggcacgtcccgggcaaaagcccggaggtaggggaaaggggaggcgcaggctttgaccccgctccccccggcgcagtcctctagatcgaccagcagcaacactgcatg

SEQ ID NO: 373565 - DNA, 368 bp, Homo sapiens
actattattttgtctcagctctgtgactcccacatcacagacagccctcctagtaactgcccccttatccttttttgattttttaaatgtttatatttttttgagacatggtctcactctgttgcccaggctggagtgcagtagcacgaacatggctcactgcaaccttgacctcttaagctcgtgatcctcccacctcagcctcctaagtagctgggaccacaggtgcataccactacatctggccttatattttttaaattttcacagagacagggtctcactatattgcccaggctgatctcgaactcctaggctcaagtgatccttctgccttggcctcctaaagtgcccaggctgatcttgaa

SEQ ID NO: 373566 - DNA, 1091 bp, Homo sapiens
  misc_feature (4)..(4): n is a, c, g, or t
  misc_feature (7)..(7): n is a, c, g, or t
gganagnggttggttctgagaaggcttcaaggaataggcagacatttcagcaaggctgctgaggaaggataggctgtggaaattaggatgcagcactcctgcccgggtcccgcctcggggtcgccaggccctgaaccccaacgccggcattagtcgcgcctgcgcacggccctgtggagccgcggaggcaagggacggagaacggggcggaggcggagtcagggcgcccgcgcgtgggccccgcccccttatgtagggtataaagcccctcccgctcacagtttccctagtcctcgaaggctcggaagcccgtcaccatgtcgtgcgagtcgtctatggttctcgggtactgggatattcgtgggctggcgcacgccatccgcctgctcctggagttcacggatacctcttatgaggagaaacggtacacgtgcggggaagctcctgactatgatcgaagccaatggctggatgtgaaattcaagctagacctggactttcctaatctgccctacctcctggatgggaagaacaagatcacccagagcaatgccatcttgcgctacatcgctcgcaagcacaacatgtgtggtgagactgaagaagaaaagattcgagtggacatcatagagaaccaagtaatggatttccgcacacaactgataaggctctgttacagctctgaccacgaaaaactgaagcctcagtacttggaagagctacctggacaactgaaacaattctccatgtttctggggaaattctcatggtttgccggggaaaagctcacctttgtggattttctcacctatgatatcttggatcagaaccgtatatttgaccccaagtgcctggatgagttcccaaacctgaaggctttcatgtgccgttttgaggctttggagaaaatcgctgcctacttacagtctgatcagttctgcaagatgcccatcaacaacaagatggcccagtggggcaacaagcctgtatgctgagcaggaggcagacttgcagagcttgttttgtttcatcctgtccgtaaggggtcagcgctcttgctttgctcttttcaatgaatagcacttatgtta

SEQ ID NO: 373567 - DNA, 2335 bp, Homo sapiens
  misc_feature (4)..(4): n is a, c, g, or t
  misc_feature (7)..(7): n is a, c, g, or t
gganagnggttggttctgagaaggcttcaaggaataggcagacatttcagcaaggctgctgaggaaggataggctgtggaaattaggatgcagcactcctgcccgggtcccgcctcggggtcgccaggccctgaaccccaacgccggcattagtcgcgcctgcgcacggccctgtggagccgcggaggcaagggacggagaacggggcggaggcggagtcagggcgcccgcgcgtgggccccgcccccttatgtagggtataaagcccctcccgctcacagtttccctagtcctcgaaggctcggaagcccgtcaccatgtcgtgcgagtcgtctatggttctcgggtactgggatattcgtgggctggcgcacgccatccgcctgctcctggagttcacggatacctcttatgaggagaaacggtacacgtgcggggaagctcctgactatgatcgaagccaatggctggatgtgaaattcaagctagacctggactttcctaatctgccctacctcctggatgggaagaacaagatcacccagagcaatgccatcttgcgctacatcgctcgcaagcacaacatgtgtggtgagactgaagaagaaaagattcgagtggacatcatagagaaccaagtaatggatttccgcacacaactgataaggctctgttacagctctgaccacgaaaaactgaagcctcagtacttggaagagctacctggacaactgaaacaattctccatgtttctggggaaattctcatggtttgccggggaaaagctcacctttgtggattttctcacctatgatatcttggatcagaaccgtatatttgaccccaagtgcctggatgagttcccaaacctgaaggctttcatgtgccgttttgaggctttggagaaaatcgctgcctacttacagtctgatcagttctgcaagatgcccatcaacaacaagatggcccagtggggcaacaagcctgtatgctgagcaggaggcagacttgcagagcttgttttgtttcatcctgtccgtaaggggtcagcgctcttgctttgctcttttcaatgaatagcacttatgttactggtgtccagctgagtttctcttgggtataaaggctaaaagggaaaaaggatatgtggagaatcatcaagatatgaattgaatcgctgcgatactggcatttccctactccccaactgagttcaagggctgtaggttcatgcccaagccctgagagtgggtactagaaaaaacgagattgcacagttggagagagcaggtgtgttaaatgggactggagtccctgtgaagactgggtgaggataacacaagtaaaactgtggtactgatggacttaaccggagttcggaaaccgtcctgtgtacacatgggagtttagtgtgataaaggcagtatttcagactggtgggctagccaatagagttgggacaattgcttactcattaaaaataatagagccccacttgacactattcactaaaattaatctggaatttaaggcccaacattaaacacaaagctgttgaaatattgatgaaaatgtaagaatttttgtgaccacggggtaggagaagtttctttaaagacgtaaaaagaaaaaaaccataggctgctctgcctgtggagtagccattctttattcttttactttttaaaataataacaatcacaaaggaaagatttgccaattgaataggatcaaattctacaacttttcctaaggcacccacaaataaatgacaagtgagacaaaaagcactagtataaagattatataaagacctataaatcattaagacaactgagtttttaaaaatggacaaaatccatgaacaatttataaaatagaaatatagccaaaaatgtctaaaagatgtttatgatgtaaggaattatcaattacaacagtgagaaaccatatttccttctatccgatgagtaaaaagtttctaaagtgttggcaaggcttaggaaagtgatatgcatttcctgctggtcaagttgtaaattagtatagctactttggaggacaattgtaaaatttaaatcatatcctatgacccagcaattccatgctataaaaactcatccatggccgggcttggtggctcacgcctgtaatcccagcactttgggaggctgaggtgggcagatcacgaggtcaagagatcgagaccatcctggccaacatgatgaaaccccgtttctactaaaaatacaaaaattagctgggcatggtggcatgtgcctatagtcccagctactcaggaggctgaggcaggagaattgcttgaacctgggag

SEQ ID NO: 373568 - DNA, 1494 bp, Homo sapiens
  misc_feature (4)..(4): n is a, c, g, or t
  misc_feature (7)..(7): n is a, c, g, or t
gganagnggttggttctgagaaggcttcaaggaataggcagacatttcagcaaggctgctgaggaaggataggctgtggaaattaggatgcagcactcctgcccgggtcccgcctcggggtcgccaggccctgaaccccaacgccggcattagtcgcgcctgcgcacggccctgtggagccgcggaggcaagggacggagaacggggcggaggcggagtcagggcgcccgcgcgtgggccccgcccccttatgtagggtataaagcccctcccgctcacagtttccctagtcctcgaaggctcggaagcccgtcaccatgtcgtgcgagtcgtctatggttctcgggtactgggatattcgtgggctggcgcacgccatccgcctgctcctggagttcacggatacctcttatgaggagaaacggtacacgtgcggggaagctcctgactatgatcgaagccaatggctggatgtgaaattcaagctagacctggactttcctaatctgccctacctcctggatgggaagaacaagatcacccagagcaatgccatcttgcgctacatcgctcgcaagcacaacatgtgtggtgagactgaagaagaaaagattcgagtggacatcatagagaaccaagtaatggatttccgcacacaactgataaggctctgttacagctctgaccacgaaaaactgaagcctcagtacttggaagagctacctggacaactgaaacaattctccatgtttctggggaaattctcatggtttgccggggaaaagctcacctttgtggattttctcacctatgatatcttggatcagaaccgtatatttgaccccaagtgcctggatgagttcccaaacctgaaggctttcatgtgccgttttgaggctttggagaaaatcgctgcctacttacagtctgatcagttctgcaagatgcccatcaacaacaagatggcccagtggggcaacaagcctgtatgctgagcaggaggcagacttgcagagcttgttttgtttcatcctgtccgtaaggggtcagcgctcttgctttgctcttttcaatgaatagcacttatgttactggtgtccagctgagtttctcttgggtataaaggctaaaagggaaaaaggatatgtggagaatcatcaagatatgaattgaatcgctgcgatactggcatttccctactccccaactgagttcaagggctgtaggttcatgcccaagccctgagagtgggtactagaaaaaacgagattgcacagttggagagagcaggtgtgttaaatgggactggagtccctgtgaagactgggtgaggataacacaagtaaaactgtggtactgatggacttaaccggagttcggaaaccgtcctgtgtacacatgggagtttagtgtgataaaggcagtatttcagactggtgggctagccaatagagttgggacaattgcttactcattaaaaataatagagcccca

SEQ ID NO: 373569 - DNA, 1015 bp, Homo sapiens
  misc_feature (4)..(4): n is a, c, g, or t
  misc_feature (7)..(7): n is a, c, g, or t
gganagnggttggttctgagaaggcttcaaggaataggcagacatttcagcaaggctgctgaggaaggataggctgtggaaattaggatgcagcactcctgcccgggtcccgcctcggggtcgccaggccctgaaccccaacgccggcattagtcgcgcctgcgcacggccctgtggagccgcggaggcaagggacggagaacggggcggaggcggagtcagggcgcccgcgcgtgggccccgcccccttatgtagggtataaagcccctcccgctcacagtttccctagtcctcgaaggctcggaagcccgtcaccatgtcgtgcgagtcgtctatggttctcgggtactgggatattcgtgggctcctgactatgatcgaagccaatggctggatgtgaaattcaagctagacctggactttcctaatctgccctacctcctggatgggaagaacaagatcacccagagcaatgccatcttgcgctacatcgctcgcaagcacaacatgtgtggtgagactgaagaagaaaagattcgagtggacatcatagagaaccaagtaatggatttccgcacacaactgataaggctctgttacagctctgaccacgaaaaactgaagcctcagtacttggaagagctacctggacaactgaaacaattctccatgtttctggggaaattctcatggtttgccggggaaaagctcacctttgtggattttctcacctatgatatcttggatcagaaccgtatatttgaccccaagtgcctggatgagttcccaaacctgaaggctttcatgtgccgttttgaggctttggagaaaatcgctgcctacttacagtctgatcagttctgcaagatgcccatcaacaacaagatggcccagtggggcaacaagcctgtatgctgagcaggaggcagacttgcagagcttgttttgtttcatcctgtccgtaaggggtcagcgctcttgctttgctcttttcaatgaatagcacttatgtta

SEQ ID NO: 373570 - DNA, 1130 bp, Homo sapiens
  misc_feature (4)..(4): n is a, c, g, or t
  misc_feature (7)..(7): n is a, c, g, or t
  misc_feature (1026)..(1026): n is a, c, g, or t
gganagnggttggttctgagaaggcttcaaggaataggcagacatttcagcaaggctgctgaggaaggataggctgtggaaattaggatgcagcactcctgcccgggtcccgcctcggggtcgccaggccctgaaccccaacgccggcattagtcgcgcctgcgcacggccctgtggagccgcggaggcaagggacggagaacggggcggaggcggagtcagggcgcccgcgcgtgggccccgcccccttatgtagggtataaagcccctcccgctcacagtttccctagtcctcgaaggctcggaagcccgtcaccatgtcgtgcgagtcgtctatggttctcgggtactgggatattcgtgggctggcgcacgccatccgcctgctcctggagttcacggatacctcttatgaggagaaacggtacacgtgcggggaagctcctgactatgatcgaagccaatggctggatgtgaaattcaagctagacctggactttcctaatctgccctacctcctggatgggaagaacaagatcacccagagcaatgccatcttgcgctacatcgctcgcaagcacaacatgtgtggtgagactgaagaagaaaagattcgagtggacatcatagagaaccaagtaatggatttccgcacacaactgataaggctctgttacagctctgaccacgaaaaactgaagcctcagtacttggaagagctacctggacaactgaaacaattctccatgtttctggggaaattctcatggtttgccggggaaaagctcacctttgtggattttctcacctatgatatcttggatcagaaccgtatatttgaccccaagtgcctggatgagttcccaaacctgaaggctttcatgtgccgttttgaggctttggagaaaatcgctgcctacttacagtctgatcagttctgcaagatgcccatcaacaacaagatggcccagtggggcaacaagcctgtatgctgagccagagctcgctgctgctgagccatctttncctgaggggcccacactcttagctcactgtcagtcttgttccatcctgtcctgagggcccccactctgtctcctctgctctttctaataaacagcagttgcatt

SEQ ID NO: 373571 - DNA, 715 bp, Homo sapiens
  misc_feature (4)..(4): n is a, c, g, or t
  misc_feature (7)..(7): n is a, c, g, or t
gganagnggttggttctgagaaggcttcaaggaataggcagacatttcagcaaggctgctgaggaaggataggctgtggaaattaggatgcagcactcctgcccgggtcccgcctcggggtcgccaggccctgaaccccaacgccggcattagtcgcgcctgcgcacggccctgtggagccgcggaggcaagggacggagaacggggcggaggcggagtcagggcgcccgcgcgtgggccccgcccccttatgtagggtataaagcccctcccgctcacagtttccctagtcctcgaaggctcggaagcccgtcaccatgtcgtgcgagtcgtctatggttctcgggtactgggatattcgtgggctggcgcacgccatccgcctgctcctggagttcacggatacctcttatgaggagaaacggtacacgtgcggggaagctcctgactatgatcgaagccaatggctggatgtgaaattcaagctagacctggactttcctaatctgccctacctcctggatgggaagaacaagatcacccagagcaatgccatcttgcgctacatcgctcgcaagcacaacatgtgtggtgagactgaagaagaaaagattcgagtggacatcatagagaaccaagtaatggatttccgcacacaactgataaggctctgttacagctctgaccacgtgagtttccttagcacacatctgct

SEQ ID NO: 373572 - DNA, 355 bp, Homo sapiens
ctttaagtcttgggaagagcctaacttctataccttggaggcactgtctacaaaaaaatggaggaggtagacgcaggcaacacgtgaatgttgctgttctggtatgcatctgttggactgggttggggtcgttataagatttggtgtattttcctttcaggctttggagaaaatcgctgcctacttacagtctgatcagttctgcaagatgcccatcaacaacaagatggcccagtggggcaacaagcctgtatgctgagcaggaggcagacttgcagagcttgttttgtttcatcctgtccgtaaggggtcagcgctcttgctttgctcttttcaatgaatagcacttatgtta

SEQ ID NO: 373573 - DNA, 1561 bp, Homo sapiens
  misc_feature (4)..(4): n is a, c, g, or t
  misc_feature (7)..(7): n is a, c, g, or t
gganagnggttggttctgagaaggcttcaaggaataggcagacatttcagcaaggctgctgaggaaggataggctgtggaaattaggatgcagcactcctgcccgggtcccgcctcggggtcgccaggccctgaaccccaacgccggcattagtcgcgcctgcgcacggccctgtggagccgcggaggcaagggacggagaacggggcggaggcggagtcagggcgcccgcgcgtgggccccgcccccttatgtagggtataaagcccctcccgctcacagtttccctagtcctcgaaggctcggaagcccgtcaccatgtcgtgcgagtcgtctatggttctcgggtactgggatattcgtgggctggcgcacgccatccgcctgctcctggagttcacggatacctcttatgaggagaaacggtacacgtgcggggaagctcctgactatgatcgaagccaatggctggatgtgaaattcaagctagacctggactttcctaatctgccctacctcctggatgggaagaacaagatcacccagagcaatgccatcttgcgctacatcgctcgcaagcacaacatgtgtggtgagactgaagaagaaaagattcgagtggacatcatagagaaccaagtaatggatttccgcacacaactgataaggctctgttacagctctgaccacgaaaaactgaagcctcagtacttggaagagctacctggacaactgaaacaattctccatgtttctggggaaattctcatggtttgccggggaaaagctcacctttgtggattttctcacctatgatatcttggatcagaaccgtatatttgaccccaagtgcctggatgagttcccaaacctgaaggctttcatgtgccgttttgaggctttggagaaaatcgctgcctacttacagtctgatcagttctgcaagatgcccatcaacaacaagatggcccagtggggcaacaagcctgtatgctgagcaggaggcagacttgcagagcttgttttgtttcatcctgtccgtaaggggtcagcgctcttgctttgctcttttcaatgaatagcacttatgttactggtgtccagctgagtttctcttgggtataaaggctaaaagggaaaaaggatatgtggagaatcatcaagatatgaattgaatcgctgcgatactggcatttccctactccccaactgagttcaagggctgtaggttcatgcccaagccctgagagtgggtactagaaaaaacgagattgcacagttggagagagcaggtgtgttaaatgggactggagtccctgtgaagactgggtgaggataacacaagtaaaactgtggtactgatggacttaaccggagttcggaaaccgtcctgtgtacacatgggagtttagtgtgataaaggcagtatttcagactggtgggctagccaatagagttgggacaattgcttactcattaaaaataatagagccccacttgacactattcactaaaattaatctggaatttaaggcccaacattaaacacaaagctgttgaaat

SEQ ID NO: 373574 - DNA, 1422 bp, Homo sapiens
  misc_feature (4)..(4): n is a, c, g, or t
  misc_feature (7)..(7): n is a, c, g, or t
gganagnggttggttctgagaaggcttcaaggaataggcagacatttcagcaaggctgctgaggaaggataggctgtggaaattaggatgcagcactcctgcccgggtcccgcctcggggtcgccaggccctgaaccccaacgccggcattagtcgcgcctgcgcacggccctgtggagccgcggaggcaagggacggagaacggggcggaggcggagtcagggcgcccgcgcgtgggccccgcccccttatgtagggtataaagcccctcccgctcacagtttccctagtcctcgaaggctcggaagcccgtcaccatgtcgtgcgagtcgtctatggttctcgggtactgggatattcgtggggtgagtgccgtctcaacggtagagccgctcggtcaaagagactgacgcggagagggcgggtctctgggtccgcgatctccagcaggagcagctctacgcgggagccttttcgagctgccgagccacggatgtcgacccctgcccagcctctgggatcgcgggccctgtggggaggggcggaggagaccacgccggagccgggcctaggggccgcttaaccaccgccccggcaggacgcagggactcggcagccccgggccggggaacgttagcgggcgggggttgggaatgggtgggagctgcgcagtcgctgaaccgctgtcttccccagctggcgcacgccatccgcctgctcctggagttcacggatacctcttatgaggagaaacggtacacgtgcggggaagctcctgactatgatcgaagccaatggctggatgtgaaattcaagctagacctggactttcctaatctgccctacctcctggatgggaagaacaagatcacccagagcaatgccatcttgcgctacatcgctcgcaagcacaacatgtgtggtgagactgaagaagaaaagattcgagtggacatcatagagaaccaagtaatggatttccgcacacaactgataaggctctgttacagctctgaccacgaaaaactgaagcctcagtacttggaagagctacctggacaactgaaacaattctccatgtttctggggaaattctcatggtttgccggggaaaagctcacctttgtggattttctcacctatgatatcttggatcagaaccgtatatttgaccccaagtgcctggatgagttcccaaacctgaaggctttcatgtgccgttttgaggctttggagaaaatcgctgcctacttacagtctgatcagttctgcaagatgcccatcaacaacaagatggcccagtggggcaacaagcctgtatgctgagcaggaggcagacttgcagagcttgttttgtttcatcctgtccgtaaggggtcagcgctcttgctttgctcttttcaatgaatagcacttatgtta

SEQ ID NO: 373575 - DNA, 1761 bp, Homo sapiens
  misc_feature (4)..(4): n is a, c, g, or t
  misc_feature (7)..(7): n is a, c, g, or t
gganagnggttggttctgagaaggcttcaaggaataggcagacatttcagcaaggctgctgaggaaggataggctgtggaaattaggatgcagcactcctgcccgggtcccgcctcggggtcgccaggccctgaaccccaacgccggcattagtcgcgcctgcgcacggccctgtggagccgcggaggcaagggacggagaacggggcggaggcggagtcagggcgcccgcgcgtgggccccgcccccttatgtagggtataaagcccctcccgctcacagtttccctagtcctcgaaggctcggaagcccgtcaccatgtcgtgcgagtcgtctatggttctcgggtactgggatattcgtggggtgagtgccgtctcaacggtagagccgctcggtcaaagagactgacgcggagagggcgggtctctgggtccgcgatctccagcaggagcagctctacgcgggagccttttcgagctgccgagccacggatgtcgacccctgcccagcctctgggatcgcgggccctgtggggaggggcggaggagaccacgccggagccgggcctaggggccgcttaaccaccgccccggcaggacgcagggactcggcagccccgggccggggaacgttagcgggcgggggttgggaatgggtgggagctgcgcagtcgctgaaccgctgtcttccccagctggcgcacgccatccgcctgctcctggagttcacggatacctcttatgaggagaaacggtacacgtgcggggaaggtaatgccgctccgcgtgcccgtgcagccaagctggccctccacctgccctggtcttcttacgcccagagggtggtggcgtcgcgccaaggccgggtgggacgtttgccccaatctgggtgaatagagacacatcctttatctggaactgggggttctctttttaacatagcccaaacccgtcttaatgcttaaccaaatagggctcagaggctcaatggttatgcttttggggcctgggaatttgaggtattgggaccaagtcatttctttagatcttttgctcttgtcaggtggggtattaaggaggttgggtcccacttaattccgtctcttacagctcctgactatgatcgaagccaatggctggatgtgaaattcaagctagacctggactttcctaatctgccctacctcctggatgggaagaacaagatcacccagagcaatgccatcttgcgctacatcgctcgcaagcacaacatgtgtggtgagactgaagaagaaaagattcgagtggacatcatagagaaccaagtaatggatttccgcacacaactgataaggctctgttacagctctgaccacgaaaaactgaagcctcagtacttggaagagctacctggacaactgaaacaattctccatgtttctggggaaattctcatggtttgccggggaaaagctcacctttgtggattttctcacctatgatatcttggatcagaaccgtatatttgaccccaagtgcctggatgagttcccaaacctgaaggctttcatgtgccgttttgaggctttggagaaaatcgctgcctacttacagtctgatcagttctgcaagatgcccatcaacaacaagatggcccagtggggcaacaagcctgtatgctgagcaggaggcagacttgcagagcttgttttgtttcatcctgtccgtaaggggtcagcgctcttgctttgctcttttcaatgaatagcacttatgtta

SEQ ID NO: 373576 - DNA, 2259 bp, Homo sapiens
  misc_feature (4)..(4): n is a, c, g, or t
  misc_feature (7)..(7): n is a, c, g, or t
gganagnggttggttctgagaaggcttcaaggaataggcagacatttcagcaaggctgctgaggaaggataggctgtggaaattaggatgcagcactcctgcccgggtcccgcctcggggtcgccaggccctgaaccccaacgccggcattagtcgcgcctgcgcacggccctgtggagccgcggaggcaagggacggagaacggggcggaggcggagtcagggcgcccgcgcgtgggccccgcccccttatgtagggtataaagcccctcccgctcacagtttccctagtcctcgaaggctcggaagcccgtcaccatgtcgtgcgagtcgtctatggttctcgggtactgggatattcgtgggctcctgactatgatcgaagccaatggctggatgtgaaattcaagctagacctggactttcctaatctgccctacctcctggatgggaagaacaagatcacccagagcaatgccatcttgcgctacatcgctcgcaagcacaacatgtgtggtgagactgaagaagaaaagattcgagtggacatcatagagaaccaagtaatggatttccgcacacaactgataaggctctgttacagctctgaccacgaaaaactgaagcctcagtacttggaagagctacctggacaactgaaacaattctccatgtttctggggaaattctcatggtttgccggggaaaagctcacctttgtggattttctcacctatgatatcttggatcagaaccgtatatttgaccccaagtgcctggatgagttcccaaacctgaaggctttcatgtgccgttttgaggctttggagaaaatcgctgcctacttacagtctgatcagttctgcaagatgcccatcaacaacaagatggcccagtggggcaacaagcctgtatgctgagcaggaggcagacttgcagagcttgttttgtttcatcctgtccgtaaggggtcagcgctcttgctttgctcttttcaatgaatagcacttatgttactggtgtccagctgagtttctcttgggtataaaggctaaaagggaaaaaggatatgtggagaatcatcaagatatgaattgaatcgctgcgatactggcatttccctactccccaactgagttcaagggctgtaggttcatgcccaagccctgagagtgggtactagaaaaaacgagattgcacagttggagagagcaggtgtgttaaatgggactggagtccctgtgaagactgggtgaggataacacaagtaaaactgtggtactgatggacttaaccggagttcggaaaccgtcctgtgtacacatgggagtttagtgtgataaaggcagtatttcagactggtgggctagccaatagagttgggacaattgcttactcattaaaaataatagagccccacttgacactattcactaaaattaatctggaatttaaggcccaacattaaacacaaagctgttgaaatattgatgaaaatgtaagaatttttgtgaccacggggtaggagaagtttctttaaagacgtaaaaagaaaaaaaccataggctgctctgcctgtggagtagccattctttattcttttactttttaaaataataacaatcacaaaggaaagatttgccaattgaataggatcaaattctacaacttttcctaaggcacccacaaataaatgacaagtgagacaaaaagcactagtataaagattatataaagacctataaatcattaagacaactgagtttttaaaaatggacaaaatccatgaacaatttataaaatagaaatatagccaaaaatgtctaaaagatgtttatgatgtaaggaattatcaattacaacagtgagaaaccatatttccttctatccgatgagtaaaaagtttctaaagtgttggcaaggcttaggaaagtgatatgcatttcctgctggtcaagttgtaaattagtatagctactttggaggacaattgtaaaatttaaatcatatcctatgacccagcaattccatgctataaaaactcatccatggccgggcttggtggctcacgcctgtaatcccagcactttgggaggctgaggtgggcagatcacgaggtcaagagatcgagaccatcctggccaacatgatgaaaccccgtttctactaaaaatacaaaaattagctgggcatggtggcatgtgcctatagtcccagctactcaggaggctgaggcaggagaattgcttgaacctgggag

SEQ ID NO: 373577 - DNA, 485 bp, Homo sapiens
acaaaattttttttttaagtagctgagcatgatggtatgtgcttgcagtttcatctactcaggaagctgaggtaggaggatggcttgaacccagcagtttaagactgtagtgagctatgatttatgccactgcactctccagcctgggcgatacagtgaaatcccatctcttaaaattaaaaaaaaaaaaaagccaagcatggtggctcacgcctgtaatcccagcactttgggaggccgaggtgggaggatcacaagatcaggagattgagaccatcccggctaacatggtgaaaccctgtctctactgaaaatacaaaaaaattagccaagcgtggtggcaggtgcctgtaatcccagctactcgggaagctgaggcaggagaatctcttgaacccgggaggtggaggttgcagtgagctgagatcacgccattgcactccagcctgggtgacagagtgagactccatctcaaaaaaataaat

SEQ ID NO: 373578 - DNA, 408 bp, Homo sapiens
ctgcctgtaaatgcatttccaggggagggcaggcctcccacatccccaggcagcactgtgagttccagagcaggagctcaggcggtggggccagcgtgtgcactgcagcggctgctgtggggcagtgatggcatgggggtctcaacttcctcgggtggcagcacgccctttcctttcctgcacgtctgtcatcagcagcggccttctcatgtggcttctctgggcgtttttgttttctttggggtgtttttgcctcgggttttataccacccttgtggtcggggcttctgggtggaaaatgaggtgttcgctggcttcctgcaatgtggggcttgtccgggcctgggacgctgcttgcatgtggcgctgtgtgcggcagtctgcccggccctgccacctccagggtgg

SEQ ID NO: 373579 - DNA, 341 bp, Homo sapiens
agcccagcttcttgaggaaattgttgagccgctacaccaagtcaggaacatctgtctgcagactgatggctacaggtgtattatgatgcttaagctactgtttagttgtctgttcatttcatcctggttgatgcattcagtgagtgaggcaaggagtgagcaacctgacatcaaagcttgctgaggacaggtgacatggacagacaactagaatcatgtcagctatccaaaaaaggatatcacatttaacaaaaaacagattcgaatatggtggctgtttctaatatgacttaaatccacaatggtttaaataatgcaaaaataaaagaaattttgtgcag

SEQ ID NO: 373580 - DNA, 290 bp, Homo sapiens
cattacatctggtaataggggcaaggctacgagactgtaaactataaaacaataaggagttctgtgaggtttctgtcacatttaggtcccttgagttttgcagagtttatgcagttttgtttcagcagcacagagcggaactgcaaagtgatgaaggactatattttgagttagtaaatattaatagctcctgatatatccagggtgttgtaccaagtgttctttaggatacaaagttatacaagatgtgagtcttgttgaatgtaaacccttaaggaacttaattccta

SEQ ID NO: 373581 - DNA, 1339 bp, Homo sapiens
gcggcccggaagtgcccggctgaagcggccgggcgccgattggtgtctttgagtctagtctttgttcggggctgtccaaaggacgctagctgttgcacctgttcctccctgcgcgtaagatagaggataaatctcctggcaaagcccagaatgaccacagccctggaacctgaggaccaaaaaggacttctgataattaaggcagaggaccattactggggacaggattccagctcacaaaagtgcagtcctcacaggagggaactctatagacaacacttcaggaagctctgctatcaggatgcacctggaccccgtgaagctcttacccagctgtgggagctctgccgtcagtggctgaggccagaatgccacaccaaggagcagattttagacctgctggtgctagaacagttcctgagcattcttcctaaagacctgcaagcatgggtgcgtgcacaccatccagagactggagaggaggcagtgacggtactggaggatctggagagagagcttgatgaacctggaaagcaggtcccaggcaattcagaaagacgggacatactcatggacaagttggcccccttgggaaggccatatgaatcactgactgtccagctccatcccaaaaagacccagctggagcaggaagctgggaaaccacaaaggaatggtgataaaactaggactaagaatgaagagttgttccagaaggaagatatgcccaaagacaaggaattccttggggagataaatgacagactgaacaaagatactcctcagcatcctaagtccaaagatattattgaaaatgagggcagatcagaatggcaacagagggaaagaagacgatataaatgtgatgaatgtgggaaaagtttcagtcatagctcagaccttagtaaacacaggagaactcacacgggagagaagccctataaatgtgatgagtgtggaaaagccttcattcagcgctcacatctcattggacatcatagagtacacacgggagtaaaaccctataaatgtaaagaatgtgggaaagacttcagtgggcgcacaggtcttattcagcatcagagaatccacacaggtgaaaaaccctatgaatgtgatgagtgtggaaggcctttccgagtaagttcagctcttattagacatcaaagaattcataccgcaaataaactctactaatatagcagtaatatcaaaagttctttggacactcaggcctaactagttatcaaagaatctattttagaaaccttgagtttcctcaatgtggtcaaagcttcagtcatcattaaacttctctggaccaaagaaaaaaaaaaaa

SEQ ID NO: 373582 - DNA, 943 bp, Homo sapiens
cgtcagtggacctgcagcccaggcaacggggctgcggacggcgcgcgtgccctgcctcgcctcacgccggtagctgatgctcccgcggcagctgccaccccagcgccccagccacggcttcagaggctctcgcacgctggcttttttttttccccccccctttggtgaactcgcagtacttgggctgagcccgaaatctcgcgagatgctgcaggcgtcagtgcggcttcccactaggcgcgtggtacccgaggccgggccggagccgcaggccagccgcgattccttcgggcgatgctgggggctttccggtcggggccgcagccgcttccggagccgcgggcgagagagtcggggtttcaccgtgttagccaggatggtctcgatctcctgacctcgtgatccgcccacctccgcctctccaagtgctgggattacaggcatgagccaccgcgcccggcccttgtatttttaaactttgactttatggagacgaacaccatcgtttgctgaacacttgaaacatgatgaaagagccacagagttggcagaactgtttgaaaatgctgtgcaagcggtcttctctgtcttctttatggccagtaaaattctccagaagagatttatggcagcctcactcccagtagtttctgcatttagtgagataagccacagcaattgtctgctattttaaaagcactgtgatgcttaaatattccagctgctacatcggacaggtgtctgatgatcctgagaacagtcatcaaaaagtagaacttgagcctggaatacattctctggcatagccatagtcaatcaccagtataattaatgtaaatggacactggatagcttttttgtgaattctgatgcagcacaaagagactttaattgtttccaaaaagaaaatgtctgagattaaaatctagagttttatgactta

SEQ ID NO: 373583 - DNA, 490 bp, Homo sapiens
tcaagcctgtaatcccagcactttgggaggctgaggatggtctcgatctcctgacctcgtgatccgcccacctccgcctctccaagtgctgggattacaggcatgagccaccgcgcccggcccttgtatttttaaactttgactttatggagacgaacaccatcgtttgctgaacacttgaaacatgatgaaagagccacagagttggcagaactgtttgaaaatgctatttttagggcagtttttagtgtcattatgttgctgctacatatttggaagatggaacaagcccagacaaaggaggattcttttttactcatcttaaatccattttattttccttcatctgagccccttaaaactaatgtgttactggtgcaagcggtcttctctgtcttctttatggccagtaaaattctccagaagagatttatggcagcctcactcccagtagtttctgcatttagtgagataaggtaagttctgagaa

SEQ ID NO: 373584 - DNA, 3086 bp, Homo sapiens
cgtcagtggacctgcagcccaggcaacggggctgcggacggcgcgcgtgccctgcctcgcctcacgccggtagctgatgctcccgcggcagctgccaccccagcgccccagccacggcttcagaggctctcgcacgctggcttttttttttccccccccctttggtgaactcgcagtacttgggctgagcccgaaatctcgcgagatgctgcaggcgtcagtgcggcttcccactaggcgcgtggtacccgaggccgggccggagccgcaggccagccgcgattccttcgggcgatgctgggggctttccggtcggggccgcagccgcttccggagccgcgggcgaggtgcgttccccagcctggtttgctctgggctctgacccgccgccgcgaatctccgctcgtaactccgggcctgaacctggaggagggaggatttcctctgtgcagctttcgagcggtagactcaccctgccaggcagacctagattggcataaccagagatcagttccagttgtgatgcagtgggtgtctacacacttctgatgacacctttattttaaaagctgatgttccaaggtgcaagcggtcttctctgtcttctttatggccagtaaaattctccagaagagatttatggcagcctcactcccagtagtttctgcatttagtgagataaggaatggattttcttctgtgtattgctgacacgaacaggagacggaaatactgagtagaagagggcggttccctggctaaggccccaccctcaagcctggatacccgcggccctaaatgagaagaggcgtttctgtttggggcccaaaaagttgccttttgacccaccacgccccctatcctgcccccatataaaccccaaaccccaacctccagagcataccagcaggtgaggagatacgaggcaagccgactgacggcaaaacgacgtagcagagaaagagagaagaggagggacgtctggacaccgagagatgtttggctcggggcagtcagagcggagtccagcccctgggcggcccaactccaggggaagatcaccttcccacttcatccatccccacccttccagctccccatccatcctgctgaaagccatttccaccactcaataaaacctcgcattcatccttcaagtacgtgtgtgacccgatttttcctggattctggaaaagagctcggaatacagaaagctgtcccctggtcctttgcccttgtgaaaaagcagaaggtccattgagctggttaacactccagctgtctgtggtggccaagctgaaagagctttgtaacactggggttgcaggcacccacctctagacgctaccgcagagccagagcccaaagccctcaccccggcctctgcacttgcccatctgcgtgctccccctctcgcaaggggtttctgcagagggggctactgaacagatggaatcttgctctcttgctcagactggagtgcagtggcatgaccttggctcactgcaacctcacctctcgggttcaagcgattctgcctcagcctctcgagtagctgggactacaggtgggagacctccacagaacccttccagcaagctgtcttctaaagcaaacaagaaaaggaaagtctgagcagttttgattagatttcccagaagtcaaagcaaggaaaaatgaaaaagcttcatttctcacgttcttaaaagagagcacagatgttgcatcatctggttagataccctgagaataaaatctggatccagtgagaggaaagattctgggtgctcatgaaaaaagaaacaaaacaaaacttgggagcctcttgagagtgtacagcatcagcccttgccaactcttgtttatatgcatttaactttcagttaaccatgggaataattcatgaaaatccaatctacaaacaaaggccatcctaacgttcatgttattcttttccctaagaatctttcacaagagctataatcaagtagaattatgctttgatttgaattctaattcaattgaaaataaaaaatgagggccggacgcggtggctcatgcctgtaatcccagcgctttgggaggctgaggtggacggatcacgaggtcaggagatcgagaccatcctggctaacacggtgaaacccgatccctactaaaaatacaaaaaattagccgggcgtggtggcaggcgcctgtagtcccagctactcgggaggctgaggcaggagaatggcgtgaacccaggaggcagaggttgcagtgagccgagatcatgctactgcactccagcctgggcgacagagcgagactctgtgtataaataaataaataaataaataaataacgaaaaggttgccattgccctttctggggaaagtgataatgaggaaagactagtttcttaacccaagtcagctttagagtcggcaaggatgcaatttgaggtgatccaggaaaactctattagcatggtatttcccatacagattcatttcttttaggcctgaagtctttttggcacttcttaataaaatcacagatacctcttggaaaaaagcttatcctttatcaatttctatcagttaaccactcagatgaggataaaggcctgagtcagaaaggacagagagaggttccacaaagagataaaagatgagtggccataaggagtccttgaaaacacacctctctagcccatcaaaaaatgcagcaccttaaactcaagtccatcttactagcctttagcagtaccccaccactctcaaaatttccagcattaaatgtctcggagctatataaaaggcagacttaggtataagtaggaagagatatcaagggcttgggtatcatttcagcactaatggagcttatggcatgtatgaatgaacctgatgcgtggtctccacggtagattgttacaattgaggtcccacatttatgagattcccagtgaaaacaaatctcacagcttcacctgagagaaacattactgtcagtctcagatacaaaagcctgctgctattaggtacctatacacctgctgaaaatggaccagctttgctgtagtagtgcgcgcaggcaaa

SEQ ID NO: 373585 - DNA, 2979 bp, Homo sapiens
  misc_feature (46)..(46): n is a, c, g, or t
  misc_feature (51)..(51): n is a, c, g, or t
  misc_feature (53)..(53): n is a, c, g, or t
  misc_feature (205)..(205): n is a, c, g, or t
  misc_feature (209)..(209): n is a, c, g, or t
tgcccagcacagggcccagagcacagcaggtgcccaccacagcttngtccntnggacagaagaaatgaacaagagggctggcctcatttctgcccccttcctggccctggtgcatgctacaaaaggccaggggtcactgcggctctgaaatctactcattttcttgaaacacacagaaaagatgtttctgggatggatgtgtcangganaaaaaaaaaggctgaagttgagaattccagctcagcacatgtcctccagccctcacagacatgacgagggattaaaacgccttttctcctcatttgcccaacatctcaggagaaagccaagtggcgtccccatcagggctgtcctgggcacccgctggctacgaagacaacctcctcattagcctggctttcctctgaaaatgagctcacacagactgcattgtgcgtgcctgtgtgaacgtgtgtggtgtcaggtaccccttaccgtgcaagcggtcttctctgtcttctttatggccagtaaaattctccagaagagatttatggcagcctcactcccagtagtttctgcatttagtgagataaggaatggattttcttctgtgtattgctgacacgaacaggagacggaaatactgagtagaagagggcggttccctggctaaggccccaccctcaagcctggatacccgcggccctaaatgagaagaggcgtttctgtttggggcccaaaaagttgccttttgacccaccacgccccctatcctgcccccatataaaccccaaaccccaacctccagagcataccagcaggtgaggagatacgaggcaagccgactgacggcaaaacgacgtagcagagaaagagagaagaggagggacgtctggacaccgagagatgtttggctcggggcagtcagagcggagtccagcccctgggcggcccaactccaggggaagatcaccttcccacttcatccatccccacccttccagctccccatccatcctgctgaaagccatttccaccactcaataaaacctcgcattcatccttcaagtacgtgtgtgacccgatttttcctggattctggaaaagagctcggaatacagaaagctgtcccctggtcctttgcccttgtgaaaaagcagaaggtccattgagctggttaacactccagctgtctgtggtggccaagctgaaagagctttgtaacactggggttgcaggcacccacctctagacgctaccgcagagccagagcccaaagccctcaccccggcctctgcacttgcccatctgcgtgctccccctctcgcaaggggtttctgcagagggggctactgaacagatggaatcttgctctcttgctcagactggagtgcagtggcatgaccttggctcactgcaacctcacctctcgggttcaagcgattctgcctcagcctctcgagtagctgggactacaggtgggagacctccacagaacccttccagcaagctgtcttctaaagcaaacaagaaaaggaaagtctgagcagttttgattagatttcccagaagtcaaagcaaggaaaaatgaaaaagcttcatttctcacgttcttaaaagagagcacagatgttgcatcatctggttagataccctgagaataaaatctggatccagtgagaggaaagattctgggtgctcatgaaaaaagaaacaaaacaaaacttgggagcctcttgagagtgtacagcatcagcccttgccaactcttgtttatatgcatttaactttcagttaaccatgggaataattcatgaaaatccaatctacaaacaaaggccatcctaacgttcatgttattcttttccctaagaatctttcacaagagctataatcaagtagaattatgctttgatttgaattctaattcaattgaaaataaaaaatgagggccggacgcggtggctcatgcctgtaatcccagcgctttgggaggctgaggtggacggatcacgaggtcaggagatcgagaccatcctggctaacacggtgaaacccgatccctactaaaaatacaaaaaattagccgggcgtggtggcaggcgcctgtagtcccagctactcgggaggctgaggcaggagaatggcgtgaacccaggaggcagaggttgcagtgagccgagatcatgctactgcactccagcctgggcgacagagcgagactctgtgtataaataaataaataaataaataaataacgaaaaggttgccattgccctttctggggaaagtgataatgaggaaagactagtttcttaacccaagtcagctttagagtcggcaaggatgcaatttgaggtgatccaggaaaactctattagcatggtatttcccatacagattcatttcttttaggcctgaagtctttttggcacttcttaataaaatcacagatacctcttggaaaaaagcttatcctttatcaatttctatcagttaaccactcagatgaggataaaggcctgagtcagaaaggacagagagaggttccacaaagagataaaagatgagtggccataaggagtccttgaaaacacacctctctagcccatcaaaaaatgcagcaccttaaactcaagtccatcttactagcctttagcagtaccccaccactctcaaaatttccagcattaaatgtctcggagctatataaaaggcagacttaggtataagtaggaagagatatcaagggcttgggtatcatttcagcactaatggagcttatggcatgtatgaatgaacctgatgcgtggtctccacggtagattgttacaattgaggtcccacatttatgagattcccagtgaaaacaaatctcacagcttcacctgagagaaacattactgtcagtctcagatacaaaagcctgctgctattaggtacctatacacctgctgaaaatggaccagctttgctgtagtagtgcgcgcaggcaaa

SEQ ID NO: 373586 - DNA, 3213 bp, Homo sapiens
cgtcagtggacctgcagcccaggcaacggggctgcggacggcgcgcgtgccctgcctcgcctcacgccggtagctgatgctcccgcggcagctgccaccccagcgccccagccacggcttcagaggctctcgcacgctggcttttttttttccccccccctttggtgaactcgcagtacttgggctgagcccgaaatctcgcgagatgctgcaggcgtcagtgcggcttcccactaggcgcgtggtacccgaggccgggccggagccgcaggccagccgcgattccttcgggcgatgctgggggctttccggtcggggccgcagccgcttccggagccgcgggcgaggtgcgttccccagcctggtttgctctgggctctgacccgccgccgcgaatctccgctcgtaactccgggcctgaacctggaggagggaggatttcctctgtgcagctttcgagcggtagactcaccctgccaggcagacctagattggcataaccagagatcagttccagttgtgatgcagtgggtgtctacacacttctgatgacacctttattttaaaagctgatgttccaagtcgattcaccatgatcttggctggctgtcttcttccttcatggctgctagtaatgacaattcagtggctgtttcttcagctgtgcaaagttggaacatgtttgggagttcaacggcattggtttctggtgcaagcggtcttctctgtcttctttatggccagtaaaattctccagaagagatttatggcagcctcactcccagtagtttctgcatttagtgagataaggaatggattttcttctgtgtattgctgacacgaacaggagacggaaatactgagtagaagagggcggttccctggctaaggccccaccctcaagcctggatacccgcggccctaaatgagaagaggcgtttctgtttggggcccaaaaagttgccttttgacccaccacgccccctatcctgcccccatataaaccccaaaccccaacctccagagcataccagcaggtgaggagatacgaggcaagccgactgacggcaaaacgacgtagcagagaaagagagaagaggagggacgtctggacaccgagagatgtttggctcggggcagtcagagcggagtccagcccctgggcggcccaactccaggggaagatcaccttcccacttcatccatccccacccttccagctccccatccatcctgctgaaagccatttccaccactcaataaaacctcgcattcatccttcaagtacgtgtgtgacccgatttttcctggattctggaaaagagctcggaatacagaaagctgtcccctggtcctttgcccttgtgaaaaagcagaaggtccattgagctggttaacactccagctgtctgtggtggccaagctgaaagagctttgtaacactggggttgcaggcacccacctctagacgctaccgcagagccagagcccaaagccctcaccccggcctctgcacttgcccatctgcgtgctccccctctcgcaaggggtttctgcagagggggctactgaacagatggaatcttgctctcttgctcagactggagtgcagtggcatgaccttggctcactgcaacctcacctctcgggttcaagcgattctgcctcagcctctcgagtagctgggactacaggtgggagacctccacagaacccttccagcaagctgtcttctaaagcaaacaagaaaaggaaagtctgagcagttttgattagatttcccagaagtcaaagcaaggaaaaatgaaaaagcttcatttctcacgttcttaaaagagagcacagatgttgcatcatctggttagataccctgagaataaaatctggatccagtgagaggaaagattctgggtgctcatgaaaaaagaaacaaaacaaaacttgggagcctcttgagagtgtacagcatcagcccttgccaactcttgtttatatgcatttaactttcagttaaccatgggaataattcatgaaaatccaatctacaaacaaaggccatcctaacgttcatgttattcttttccctaagaatctttcacaagagctataatcaagtagaattatgctttgatttgaattctaattcaattgaaaataaaaaatgagggccggacgcggtggctcatgcctgtaatcccagcgctttgggaggctgaggtggacggatcacgaggtcaggagatcgagaccatcctggctaacacggtgaaacccgatccctactaaaaatacaaaaaattagccgggcgtggtggcaggcgcctgtagtcccagctactcgggaggctgaggcaggagaatggcgtgaacccaggaggcagaggttgcagtgagccgagatcatgctactgcactccagcctgggcgacagagcgagactctgtgtataaataaataaataaataaataaataacgaaaaggttgccattgccctttctggggaaagtgataatgaggaaagactagtttcttaacccaagtcagctttagagtcggcaaggatgcaatttgaggtgatccaggaaaactctattagcatggtatttcccatacagattcatttcttttaggcctgaagtctttttggcacttcttaataaaatcacagatacctcttggaaaaaagcttatcctttatcaatttctatcagttaaccactcagatgaggataaaggcctgagtcagaaaggacagagagaggttccacaaagagataaaagatgagtggccataaggagtccttgaaaacacacctctctagcccatcaaaaaatgcagcaccttaaactcaagtccatcttactagcctttagcagtaccccaccactctcaaaatttccagcattaaatgtctcggagctatataaaaggcagacttaggtataagtaggaagagatatcaagggcttgggtatcatttcagcactaatggagcttatggcatgtatgaatgaacctgatgcgtggtctccacggtagattgttacaattgaggtcccacatttatgagattcccagtgaaaacaaatctcacagcttcacctgagagaaacattactgtcagtctcagatacaaaagcctgctgctattaggtacctatacacctgctgaaaatggaccagctttgctgtagtagtgcgcgcaggcaaa

SEQ ID NO: 373587 - DNA, 1965 bp, Homo sapiens
  misc_feature (152)..(152): n is a, c, g, or t
  misc_feature (217)..(217): n is a, c, g, or t
  misc_feature (226)..(226): n is a, c, g, or t
  misc_feature (229)..(229): n is a, c, g, or t
  misc_feature (232)..(232): n is a, c, g, or t
  misc_feature (239)..(239): n is a, c, g, or t
  misc_feature (251)..(251): n is a, c, g, or t
  misc_feature (256)..(256): n is a, c, g, or t
  misc_feature (258)..(258): n is a, c, g, or t
  misc_feature (261)..(261): n is a, c, g, or t
  misc_feature (265)..(265): n is a, c, g, or t
  misc_feature (270)..(270): n is a, c, g, or t
ccctctccccctcccctccctagcctcacccccccctacgaccctcgctccccttaacctcatccccctatcaccccctccctcccgccttggccacgcctccccctcgacttctccgcctccccccccccccccctgcgccatttctttgnccctttgtttttataggaatacgccccgcccaaacccccaaatttttctgaacccctggaaatcncgggggatnccngantttttgncctaggcccacncattnantgntacncagcngtgttttgccccccattttgaacttaaccgcagggctttttaattacccccgctccagatggaatcttgctctcttgctcagactggagtgcagtggcatgaccttggctcactgcaacctcacctctcgggttcaagcgattctgcctcagcctctcgagtagctgggactacaggtgggagacctccacagaacccttccagcaagctgtcttctaaagcaaacaagaaaaggaaagtctgagcagttttgattagatttcccagaagtcaaagcaaggaaaaatgaaaaagcttcatttctcacgttcttaaaagagagcacagatgttgcatcatctggttagataccctgagaataaaatctggatccagtgagaggaaagattctgggtgctcatgaaaaaagaaacaaaacaaaacttgggagcctcttgagagtgtacagcatcagcccttgccaactcttgtttatatgcatttaactttcagttaaccatgggaataattcatgaaaatccaatctacaaacaaaggccatcctaacgttcatgttattcttttccctaagaatctttcacaagagctataatcaagtagaattatgctttgatttgaattctaattcaattgaaaataaaaaatgagggccggacgcggtggctcatgcctgtaatcccagcgctttgggaggctgaggtggacggatcacgaggtcaggagatcgagaccatcctggctaacacggtgaaacccgatccctactaaaaatacaaaaaattagccgggcgtggtggcaggcgcctgtagtcccagctactcgggaggctgaggcaggagaatggcgtgaacccaggaggcagaggttgcagtgagccgagatcatgctactgcactccagcctgggcgacagagcgagactctgtgtataaataaataaataaataaataaataacgaaaaggttgccattgccctttctggggaaagtgataatgaggaaagactagtttcttaacccaagtcagctttagagtcggcaaggatgcaatttgaggtgatccaggaaaactctattagcatggtatttcccatacagattcatttcttttaggcctgaagtctttttggcacttcttaataaaatcacagatacctcttggaaaaaagcttatcctttatcaatttctatcagttaaccactcagatgaggataaaggcctgagtcagaaaggacagagagaggttccacaaagagataaaagatgagtggccataaggagtccttgaaaacacacctctctagcccatcaaaaaatgcagcaccttaaactcaagtccatcttactagcctttagcagtaccccaccactctcaaaatttccagcattaaatgtctcggagctatataaaaggcagacttaggtataagtaggaagagatatcaagggcttgggtatcatttcagcactaatggagcttatggcatgtatgaatgaacctgatgcgtggtctccacggtagattgttacaattgaggtcccacatttatgagattcccagtgaaaacaaatctcacagcttcacctgagagaaacattactgtcagtctcagatacaaaagcctgctgctattaggtacctatacacctgctgaaaatggaccagctttgctgtagtagtgcgcgcaggcaaa

SEQ ID NO: 373588 - DNA, 2085 bp, Homo sapiens
cgtcagtggacctgcagcccaggcaacggggctgcggacggcgcgcgtgccctgcctcgcctcacgccggtagctgatgctcccgcggcagctgccaccccagcgccccagccacggcttcagaggctctcgcacgctggcttttttttttccccccccctttggtgaactcgcagtacttgggctgagcccgaaatctcgcgagatgctgcaggcgtcagtgcggcttcccactaggcgcgtggtacccgaggccgggccggagccgcaggccagccgcgattccttcgggcgatgctgggggctttccggtcggggccgcagccgcttccggagccgcgggcgaggtgcaagcggtcttctctgtcttctttatggccagtaaaattctccagaagagatttatggcagcctcactcccagtagtttctgcatttagtgagataagatggaatcttgctctcttgctcagactggagtgcagtggcatgaccttggctcactgcaacctcacctctcgggttcaagcgattctgcctcagcctctcgagtagctgggactacaggtgggagacctccacagaacccttccagcaagctgtcttctaaagcaaacaagaaaaggaaagtctgagcagttttgattagatttcccagaagtcaaagcaaggaaaaatgaaaaagcttcatttctcacgttcttaaaagagagcacagatgttgcatcatctggttagataccctgagaataaaatctggatccagtgagaggaaagattctgggtgctcatgaaaaaagaaacaaaacaaaacttgggagcctcttgagagtgtacagcatcagcccttgccaactcttgtttatatgcatttaactttcagttaaccatgggaataattcatgaaaatccaatctacaaacaaaggccatcctaacgttcatgttattcttttccctaagaatctttcacaagagctataatcaagtagaattatgctttgatttgaattctaattcaattgaaaataaaaaatgagggccggacgcggtggctcatgcctgtaatcccagcgctttgggaggctgaggtggacggatcacgaggtcaggagatcgagaccatcctggctaacacggtgaaacccgatccctactaaaaatacaaaaaattagccgggcgtggtggcaggcgcctgtagtcccagctactcgggaggctgaggcaggagaatggcgtgaacccaggaggcagaggttgcagtgagccgagatcatgctactgcactccagcctgggcgacagagcgagactctgtgtataaataaataaataaataaataaataacgaaaaggttgccattgccctttctggggaaagtgataatgaggaaagactagtttcttaacccaagtcagctttagagtcggcaaggatgcaatttgaggtgatccaggaaaactctattagcatggtatttcccatacagattcatttcttttaggcctgaagtctttttggcacttcttaataaaatcacagatacctcttggaaaaaagcttatcctttatcaatttctatcagttaaccactcagatgaggataaaggcctgagtcagaaaggacagagagaggttccacaaagagataaaagatgagtggccataaggagtccttgaaaacacacctctctagcccatcaaaaaatgcagcaccttaaactcaagtccatcttactagcctttagcagtaccccaccactctcaaaatttccagcattaaatgtctcggagctatataaaaggcagacttaggtataagtaggaagagatatcaagggcttgggtatcatttcagcactaatggagcttatggcatgtatgaatgaacctgatgcgtggtctccacggtagattgttacaattgaggtcccacatttatgagattcccagtgaaaacaaatctcacagcttcacctgagagaaacattactgtcagtctcagatacaaaagcctgctgctattaggtacctatacacctgctgaaaatggaccagctttgctgtagtagtgcgcgcaggcaaa

SEQ ID NO: 373589 - DNA, 2103 bp, Homo sapiens
cgtcagtggacctgcagcccaggcaacggggctgcggacggcgcgcgtgccctgcctcgcctcacgccggtagctgatgctcccgcggcagctgccaccccagcgccccagccacggcttcagaggctctcgcacgctggcttttttttttccccccccctttggtgaactcgcagtacttgggctgagcccgaaatctcgcgagatgctgcaggcgtcagtgcggcttcccactaggcgcgtggtacccgaggccgggccggagccgcaggccagccgcgattccttcgggcgatgctgggggctttccggtcggggccgcagccgcttccggagccgcgggcgaggtgcgttccccagcctggtttgctctgggctctgacccgccgccgcgaatctccgctcgtaactccgggcctgaacctggaggagggaggatttcctctgtgcagctttcgagcggtagactcaccctgccaggcagacctagattggcataaccagagatcagttccagttgtgatgcagtgggtgtctacacacttctgatgacacctttattttaaaagctgatgttccaaggtgcaagcggtcttctctgtcttctttatggccagtaaaattctccagaagagatttatggcagcctcactcccagtagtttctgcatttagtgagataaggaatggattttcttctgtgtattgctgacacgaacaggagacggaaatactgagtagaagagggcggttccctggctaaggccccaccctcaagcctggatacccgcggccctaaatgagaagaggcgtttctgtttggggcccaaaaagttgccttttgacccaccacgccccctatcctgcccccatataaaccccaaaccccaacctccagagcataccagcaggtgaggagatacgaggcaagccgactgacggcaaaacgacgtagcagagaaagagagaagaggagggacgtctggacaccgagagatgtttggctcggggcagtcagagcggagtccagcccctgggcggcccaactccaggggaagatcaccttcccacttcatccatccccacccttccagctccccatccatcctgctgaaagccatttccaccactcaataaaacctcgcattcatccttcaagtacgtgtgtgacccgatttttcctggattctggaaaagagctcggaatacagaaagctgtcccctggtcctttgcccttgtgaaaaagcagaaggtccattgagctggttaacactccagctgtctgtggtggccaagctgaaagagctttgtaacactggggttgcaggcacccacctctagacgctaccgcagagccagagcccaaagccctcaccccggcctctgcacttgcccatctgcgtgctccccctctcgcaaggggtttctgcagagggggctactgaacagatggaatcttgctctcttgctcagactggagtgcagtggcatgaccttggctcactgcaacctcacctctcgggttcaagcgattctgcctcagcctctcgagtagctgggactacaggtgggagacctccacagaacccttccagcaagctgtcttctaaagcaaacaagaaaaggaaagtctgagcagttttgattagatttcccagaagtcaaagcaaggaaaaatgaaaaagcttcatttctcacgttcttaaaagagagcacagatgttgcatcatctggttagataccctgagaataaaatctggatccagtgagaggaaagattctgggtgctcatgaaaaaagaaacaaaacaaaacttgggagcctcttgagagtgtacagcatcagcccttgccaactcttgtttatatgcatttaactttcagttaaccatgggaataattcatgaaaatccaatctacaaacaaaggccatcctaacgttcatgttattcttttccctaagaatctttcacaagagctataatcaagtagaattatgctttgatttgaattctaattcaattgaaaataaaggtagatgcgcgcgcttcctttagggagggttaattatcgatccccggtaatgattccgtggcttaggccg

SEQ ID NO: 373590 - DNA, 1735 bp, Homo sapiens
cgtcagtggacctgcagcccaggcaacggggctgcggacggcgcgcgtgccctgcctcgcctcacgccggtagctgatgctcccgcggcagctgccaccccagcgccccagccacggcttcagaggctctcgcacgctggcttttttttttccccccccctttggtgaactcgcagtacttgggctgagcccgaaatctcgcgagatgctgcaggcgtcagtgcggcttcccactaggcgcgtggtacccgaggccgggccggagccgcaggccagccgcgattccttcgggcgatgctgggggctttccggtcggggccgcagccgcttccggagccgcgggcgaggtgcgttccccagcctggtttgctctgggctctgacccgccgccgcgaatctccgctcgtaactccgggcctgaacctggaggagggaggatttcctctgtgcagctttcgagcggtagactcaccctgccaggcagacctagattggcataaccagagatcagttccagttgtgatgcagtgggtgtctacacacttctgatgacacctttattttaaaagctgatgttccaaggtgcaagcggtcttctctgtcttctttatggccagtaaaattctccagaagagatttatggcagcctcactcccagtagtttctgcatttagtgagataaggaatggattttcttctgtgtattgctgacacgaacaggagacggaaatactgagtagaagagggcggttccctggctaaggccccaccctcaagcctggatacccgcggccctaaatgagaagaggcgtttctgtttggggcccaaaaagttgccttttgacccaccacgccccctatcctgcccccatataaaccccaaaccccaacctccagagcataccagcaggtgaggagatacgaggcaagccgactgacggcaaaacgacgtagcagagaaagagagaagaggagggacgtctggacaccgagagatgtttggctcggggcagtcagagcggagtccagcccctgggcggcccaactccaggggaagatcaccttcccacttcatccatccccacccttccagctccccatccatcctgctgaaagccatttccaccactcaataaaacctcgcattcatccttcaagtacgtgtgtgacccgatttttcctggattctggaaaagagctcggaatacagaaagctgtcccctggtcctttgcccttgtgaaaaagcagaaggtccattgagctggttaacactccagctgtctgtggtggccaagctgaaagagctttgtaacactggggttgcaggcacccacctctagacgctaccgcagagccagagcccaaagccctcaccccggcctctgcacttgcccatctgcgtgctccccctctcgcaaggggtttctgcagagggggctactgaacaggtgagccacacccctgtcgcacgccctgcaaggggaatcagggaactcttccgtttcattgctttgaccacatcctataaatcttgttctccttgtctttcagctccaatttgtttatacattcagtttttacttttgactttactcatgatttattatagaaagatgtttaacaattttcaagcaaatggaataatttttgctcctctttcgttgttaatttattattcattggagttagaaaattgttgctaaaataaattctgcattttgaaatttaaaaaga

SEQ ID NO: 373591 - DNA, 1580 bp, Homo sapiens
cggcacgaggccgatccctactaaaaatacaaaaaattagctgggactacagagaccacaggtgggagacctccacagaacccttccagcaagctgtcttctaaagcaaacaagaaaaggaaagtctgagcagttttgattagatttcccagaagtcaaagcaaggaaaaatgaaaaagcttcatttctcacgttcttaaaagagagcacagatgttgcatcatctggttagataccctgagaataaaatctggatccagtgagaggaaagattctgggtgctcatgaaaaaagaaacaaaacaaaacttgggagcctcttgagagtgtacagcatcagcccttgccaactcttgtttatatgcatttaactttcagttaaccatgggaataattcatgaaaatccaatctacaaacaaaggccatcctaacgttcatgttattcttttccctaagaatctttcacaagagctataatcaagtagaattatgctttgatttgaattctaattcaattgaaaataaaaaatgagggccggacgcggtggctcatgcctgtaatcccagcgctttgggaggctgaggtggacggatcacgaggtcaggagatcgagaccatcctggctaacacggtgaaacccgatccctactaaaaatacaaaaaattagccgggcgtggtggcaggcgcctgtagtcccagctactcgggaggctgaggcaggagaatggcgtgaacccaggaggcagaggttgcagtgagccgagatcatgctactgcactccagcctgggcgacagagcgagactctgtgtataaataaataaataaataaataaataacgaaaaggttgccattgccctttctggggaaagtgataatgaggaaagactagtttcttaacccaagtcagctttagagtcggcaaggatgcaatttgaggtgatccaggaaaactctattagcatggtatttcccatacagattcatttcttttaggcctgaagtctttttggcacttcttaataaaatcacagatacctcttggaaaaaagcttatcctttatcaatttctatcagttaaccactcagatgaggataaaggcctgagtcagaaaggacagagagaggttccacaaagagataaaagatgagtggccataaggagtccttgaaaacacacctctctagcccatcaaaaaatgcagcaccttaaactcaagtccatcttactagcctttagcagtaccccaccactctcaaaatttccagcattaaatgtctcggagctatataaaaggcagacttaggtataagtaggaagagatatcaagggcttgggtatcatttcagcactaatggagcttatggcatgtatgaatgaacctgatgcgtggtctccacggtagattgttacaattgaggtcccacatttatgagattcccagtgaaaacaaatctcacagcttcacctgagagaaacattactgtcagtctcagatacaaaagcctgctgctattaggtacctatacacctgctgaaaatggaccagctttgctgtagtagtgcgcgcaggcaaa

SEQ ID NO: 373592 - DNA, 1810 bp, Homo sapiens
cgtcagtggacctgcagcccaggcaacggggctgcggacggcgcgcgtgccctgcctcgcctcacgccggtagctgatgctcccgcggcagctgccaccccagcgccccagccacggcttcagaggctctcgcacgctggcttttttttttccccccccctttggtgaactcgcagtacttgggctgagcccgaaatctcgcgagatgctgcaggcgtcagtgcggcttcccactaggcgcgtggtacccgaggccgggccggagccgcaggccagccgcgattccttcgggcgatgctgggggctttccggtcggggccgcagccgcttccggagccgcgggcgaggtgcgttccccagcctggtttgctctgggctctgacccgccgccgcgaatctccgctcgtaactccgggcctgaacctggaggagggaggatttcctctgtgcagctttcgagcggtagactcaccctgccaggcagacctagattggcataaccagagatcagttccagttgtgatgcagtgggtgtctacacacttctgatgacacctttattttaaaagctgatgttccaaggtgcaagcggtcttctctgtcttctttatggccagtaaaattctccagaagagatttatggcagcctcactcccagtagtttctgcatttagtgagataaggaatggattttcttctgtgtattgctgacacgaacaggagacggaaatactgagtagaagagggcggttccctggctaaggccccaccctcaagcctggatacccgcggccctaaatgagaagaggcgtttctgtttggggcccaaaaagttgccttttgacccaccacgccccctatcctgcccccatataaaccccaaaccccaacctccagagcataccagcaggtgaggagatacgaggcaagccgactgacggcaaaacgacgtagcagagaaagagagaagaggagggacgtctggacaccgagagatgtttggctcggggcagtcagagcggagtccagcccctgggcggcccaactccaggggaagatcaccttcccacttcatccatccccacccttccagctccccatccatcctgctgaaagccatttccaccactcaataaaacctcgcattcatccttcaagtacgtgtgtgacccgatttttcctggattctggaaaagagctcggaatacagaaagctgtcccctggtcctttgcccttgtgaaaaagcagaaggtccattgagctggttaacactccagctgtctgtggtggccaagctgaaagagctttgtaacactggggttgcaggcacccacctctagacgctaccgcagagccagagcccaaagccctcaccccggcctctgcacttgcccatctgcgtgctccccctctcgcaaggggtttctgcagagggggctactgaacagatggaatcttgctctcttgctcagactggagtgcagtggcatgaccttggctcactgcaacctcacctctcgggttcaagcgattctgcctcagcctctcgagtagctgggactacaggtgggagacctccacagaacccttccagcaagctgtcttctaaagcaaacaagaaaaggaaagtctgagcagttttgattagatttcccagaagtcaaagcaaggaaaaatgaaaaagcttcatttctcacgttcttaaaagagagcacagatgttgcatcatctggttagataccctgagaataaaaggtggatgcggccgaactccaatatactaccacccgtcgttgtatgacgacaccc

SEQ ID NO: 373593 - DNA, 1817 bp, Homo sapiens
cgtcagtggacctgcagcccaggcaacggggctgcggacggcgcgcgtgccctgcctcgcctcacgccggtagctgatgctcccgcggcagctgccaccccagcgccccagccacggcttcagaggctctcgcacgctggcttttttttttccccccccctttggtgaactcgcagtacttgggctgagcccgaaatctcgcgagatgctgcaggcgtcagtgcggcttcccactaggcgcgtggtacccgaggccgggccggagccgcaggccagccgcgattccttcgggcgatgctgggggctttccggtcggggccgcagccgcttccggagccgcgggcgaggtgcgttccccagcctggtttgctctgggctctgacccgccgccgcgaatctccgctcgtaactccgggcctgaacctggaggagggaggatttcctctgtgcagctttcgagcggtagactcaccctgccaggcagacctagattggcataaccagagatcagttccagttgtgatgcagtgggtgtctacacacttctgatgacacctttattttaaaagctgatgttccaaggtgcaagcggtcttctctgtcttctttatggccagtaaaattctccagaagagatttatggcagcctcactcccagtagtttctgcatttagtgagataaggaatggattttcttctgtgtattgctgacacgaacaggagacggaaatactgagtagaagagggcggttccctggctaaggccccaccctcaagcctggatacccgcggccctaaatgagaagaggcgtttctgtttggggcccaaaaagttgccttttgacccaccacgccccctatcctgcccccatataaaccccaaaccccaacctccagagcataccagcaggtgaggagatacgaggcaagccgactgacggcaaaacgacgtagcagagaaagagagaagaggagggacgtctggacaccgagagatgtttggctcggggcagtcagagcggagtccagcccctgggcggcccaactccaggggaagatcaccttcccacttcatccatccccacccttccagctccccatccatcctgctgaaagccatttccaccactcaataaaacctcgcattcatccttcaagtacgtgtgtgacccgatttttcctggattctggaaaagagctcggaatacagaaagctgtcccctggtcctttgcccttgtgaaaaagcagaaggtccattgagctggttaacactccagctgtctgtggtggccaagctgaaagagctttgtaacactggggttgcaggcacccacctctagacgctaccgcagagccagagcccaaagccctcaccccggcctctgcacttgcccatctgcgtgctccccctctcgcaaggggtttctgcagagggggctactgaacagatggaatcttgctctcttgctcagactggagtgcagtggcatgaccttggctcactgcaacctcacctctcgggttcaagcgattctgcctcagcctctcgagtagctgggactacaggtgggagacctccacagaacccttccagcaagctgtcttctaaagcaaacaagaaaaggaaagtctgagcagttttgattagatttcccagaagtcaaagcaaggaaaaatgaaaaagcttcatttctcacgttcttaaaagagagcacagatgttgcatcatctggttagataccctgagaatatgcccgatggcgtggtgctgggtgaacaatagcgatgaatggcgcgtttgtatataccatacccg

SEQ ID NO: 373594 - DNA, 957 bp, Homo sapiens
cgtcagtggacctgcagcccaggcaacggggctgcggacggcgcgcgtgccctgcctcgcctcacgccggtagctgatgctcccgcggcagctgccaccccagcgccccagccacggcttcagaggctctcgcacgctggcttttttttttccccccccctttggtgaactcgcagtacttgggctgagcccgaaatctcgcgagatgctgcaggcgtcagtgcggcttcccactaggcgcgtggtacccgaggccgggccggagccgcaggccagccgcgattccttcgggcgatgctgggggctttccggtcggggccgcagccgcttccggagccgcgggcgaggtgcgttccccagcctggtttgctctgggctctgacccgccgccgcgaatctccgctcgtaactccgggcctgaacctggaggagggaggatttcctctgtgcagctttcgagcggtagactcaccctgccaggcagacctagattggcataaccagagatcagttccagttgtgatgcagtgggtgtctacacacttctgatgacacctttattttaaaagctgatgttccaaggtgcaagcggtcttctctgtcttctttatggccagtaaaattctccagaagagatttatggcagcctcactcccagtagtttctgcatttagtgagataagccacagcaattgtctgctattttaaaagcactgtgatgcttaaatattccagctgctacatcggacaggtgtctgatgatcctgagaacagtcatcaaaaagtagaacttgagcctggaatacattctctggcatagccatagtcaatcaccagtataattaatgtaaatggacactggatagcttttttgtgaattctgatgcagcacaaagagactttaattgtttccaaaaagaaaatgtctgagattaaaatctagagttttatgactta

SEQ ID NO: 373595 - DNA, 2851 bp, Homo sapiens
cgtcagtggacctgcagcccaggcaacggggctgcggacggcgcgcgtgccctgcctcgcctcacgccggtagctgatgctcccgcggcagctgccaccccagcgccccagccacggcttcagaggctctcgcacgctggcttttttttttccccccccctttggtgaactcgcagtacttgggctgagcccgaaatctcgcgagatgctgcaggcgtcagtgcggcttcccactaggcgcgtggtacccgaggccgggccggagccgcaggccagccgcgattccttcgggcgatgctgggggctttccggtcggggccgcagccgcttccggagccgcgggcgaggtgcaagcggtcttctctgtcttctttatggccagtaaaattctccagaagagatttatggcagcctcactcccagtagtttctgcatttagtgagataaggaatggattttcttctgtgtattgctgacacgaacaggagacggaaatactgagtagaagagggcggttccctggctaaggccccaccctcaagcctggatacccgcggccctaaatgagaagaggcgtttctgtttggggcccaaaaagttgccttttgacccaccacgccccctatcctgcccccatataaaccccaaaccccaacctccagagcataccagcaggtgaggagatacgaggcaagccgactgacggcaaaacgacgtagcagagaaagagagaagaggagggacgtctggacaccgagagatgtttggctcggggcagtcagagcggagtccagcccctgggcggcccaactccaggggaagatcaccttcccacttcatccatccccacccttccagctccccatccatcctgctgaaagccatttccaccactcaataaaacctcgcattcatccttcaagtacgtgtgtgacccgatttttcctggattctggaaaagagctcggaatacagaaagctgtcccctggtcctttgcccttgtgaaaaagcagaaggtccattgagctggttaacactccagctgtctgtggtggccaagctgaaagagctttgtaacactggggttgcaggcacccacctctagacgctaccgcagagccagagcccaaagccctcaccccggcctctgcacttgcccatctgcgtgctccccctctcgcaaggggtttctgcagagggggctactgaacagatggaatcttgctctcttgctcagactggagtgcagtggcatgaccttggctcactgcaacctcacctctcgggttcaagcgattctgcctcagcctctcgagtagctgggactacaggtgggagacctccacagaacccttccagcaagctgtcttctaaagcaaacaagaaaaggaaagtctgagcagttttgattagatttcccagaagtcaaagcaaggaaaaatgaaaaagcttcatttctcacgttcttaaaagagagcacagatgttgcatcatctggttagataccctgagaataaaatctggatccagtgagaggaaagattctgggtgctcatgaaaaaagaaacaaaacaaaacttgggagcctcttgagagtgtacagcatcagcccttgccaactcttgtttatatgcatttaactttcagttaaccatgggaataattcatgaaaatccaatctacaaacaaaggccatcctaacgttcatgttattcttttccctaagaatctttcacaagagctataatcaagtagaattatgctttgatttgaattctaattcaattgaaaataaaaaatgagggccggacgcggtggctcatgcctgtaatcccagcgctttgggaggctgaggtggacggatcacgaggtcaggagatcgagaccatcctggctaacacggtgaaacccgatccctactaaaaatacaaaaaattagccgggcgtggtggcaggcgcctgtagtcccagctactcgggaggctgaggcaggagaatggcgtgaacccaggaggcagaggttgcagtgagccgagatcatgctactgcactccagcctgggcgacagagcgagactctgtgtataaataaataaataaataaataaataacgaaaaggttgccattgccctttctggggaaagtgataatgaggaaagactagtttcttaacccaagtcagctttagagtcggcaaggatgcaatttgaggtgatccaggaaaactctattagcatggtatttcccatacagattcatttcttttaggcctgaagtctttttggcacttcttaataaaatcacagatacctcttggaaaaaagcttatcctttatcaatttctatcagttaaccactcagatgaggataaaggcctgagtcagaaaggacagagagaggttccacaaagagataaaagatgagtggccataaggagtccttgaaaacacacctctctagcccatcaaaaaatgcagcaccttaaactcaagtccatcttactagcctttagcagtaccccaccactctcaaaatttccagcattaaatgtctcggagctatataaaaggcagacttaggtataagtaggaagagatatcaagggcttgggtatcatttcagcactaatggagcttatggcatgtatgaatgaacctgatgcgtggtctccacggtagattgttacaattgaggtcccacatttatgagattcccagtgaaaacaaatctcacagcttcacctgagagaaacattactgtcagtctcagatacaaaagcctgctgctattaggtacctatacacctgctgaaaatggaccagctttgctgtagtagtgcgcgcaggcaaa

SEQ ID NO: 373596 - DNA, 3072 bp, Homo sapiens
cgtcagtggacctgcagcccaggcaacggggctgcggacggcgcgcgtgccctgcctcgcctcacgccggtagctgatgctcccgcggcagctgccaccccagcgccccagccacggcttcagaggctctcgcacgctggcttttttttttccccccccctttggtgaactcgcagtacttgggctgagcccgaaatctcgcgagatgctgcaggcgtcagtgcggcttcccactaggcgcgtggtacccgaggccgggccggagccgcaggccagccgcgattccttcgggcgatgctgggggctttccggtcggggccgcagccgcttccggagccgcgggcgagagagtcggggtttcaccgtgttagccaggatggtctcgatctcctgacctcgtgatccgcccacctccgcctctccaagtgctgggattacaggcatgagccaccgcgcccggcccttgtatttttaaactttgactttatggagacgaacaccatcgtttgctgaacacttgaaacatgatgaaagagccacagagttggcagaactgtttgaaaatgctgtgcaagcggtcttctctgtcttctttatggccagtaaaattctccagaagagatttatggcagcctcactcccagtagtttctgcatttagtgagataaggaatggattttcttctgtgtattgctgacacgaacaggagacggaaatactgagtagaagagggcggttccctggctaaggccccaccctcaagcctggatacccgcggccctaaatgagaagaggcgtttctgtttggggcccaaaaagttgccttttgacccaccacgccccctatcctgcccccatataaaccccaaaccccaacctccagagcataccagcaggtgaggagatacgaggcaagccgactgacggcaaaacgacgtagcagagaaagagagaagaggagggacgtctggacaccgagagatgtttggctcggggcagtcagagcggagtccagcccctgggcggcccaactccaggggaagatcaccttcccacttcatccatccccacccttccagctccccatccatcctgctgaaagccatttccaccactcaataaaacctcgcattcatccttcaagtacgtgtgtgacccgatttttcctggattctggaaaagagctcggaatacagaaagctgtcccctggtcctttgcccttgtgaaaaagcagaaggtccattgagctggttaacactccagctgtctgtggtggccaagctgaaagagctttgtaacactggggttgcaggcacccacctctagacgctaccgcagagccagagcccaaagccctcaccccggcctctgcacttgcccatctgcgtgctccccctctcgcaaggggtttctgcagagggggctactgaacagatggaatcttgctctcttgctcagactggagtgcagtggcatgaccttggctcactgcaacctcacctctcgggttcaagcgattctgcctcagcctctcgagtagctgggactacaggtgggagacctccacagaacccttccagcaagctgtcttctaaagcaaacaagaaaaggaaagtctgagcagttttgattagatttcccagaagtcaaagcaaggaaaaatgaaaaagcttcatttctcacgttcttaaaagagagcacagatgttgcatcatctggttagataccctgagaataaaatctggatccagtgagaggaaagattctgggtgctcatgaaaaaagaaacaaaacaaaacttgggagcctcttgagagtgtacagcatcagcccttgccaactcttgtttatatgcatttaactttcagttaaccatgggaataattcatgaaaatccaatctacaaacaaaggccatcctaacgttcatgttattcttttccctaagaatctttcacaagagctataatcaagtagaattatgctttgatttgaattctaattcaattgaaaataaaaaatgagggccggacgcggtggctcatgcctgtaatcccagcgctttgggaggctgaggtggacggatcacgaggtcaggagatcgagaccatcctggctaacacggtgaaacccgatccctactaaaaatacaaaaaattagccgggcgtggtggcaggcgcctgtagtcccagctactcgggaggctgaggcaggagaatggcgtgaacccaggaggcagaggttgcagtgagccgagatcatgctactgcactccagcctgggcgacagagcgagactctgtgtataaataaataaataaataaataaataacgaaaaggttgccattgccctttctggggaaagtgataatgaggaaagactagtttcttaacccaagtcagctttagagtcggcaaggatgcaatttgaggtgatccaggaaaactctattagcatggtatttcccatacagattcatttcttttaggcctgaagtctttttggcacttcttaataaaatcacagatacctcttggaaaaaagcttatcctttatcaatttctatcagttaaccactcagatgaggataaaggcctgagtcagaaaggacagagagaggttccacaaagagataaaagatgagtggccataaggagtccttgaaaacacacctctctagcccatcaaaaaatgcagcaccttaaactcaagtccatcttactagcctttagcagtaccccaccactctcaaaatttccagcattaaatgtctcggagctatataaaaggcagacttaggtataagtaggaagagatatcaagggcttgggtatcatttcagcactaatggagcttatggcatgtatgaatgaacctgatgcgtggtctccacggtagattgttacaattgaggtcccacatttatgagattcccagtgaaaacaaatctcacagcttcacctgagagaaacattactgtcagtctcagatacaaaagcctgctgctattaggtacctatacacctgctgaaaatggaccagctttgctgtagtagtgcgcgcaggcaaa

SEQ ID NO: 373597 - DNA, 2306 bp, Homo sapiens
cgtcagtggacctgcagcccaggcaacggggctgcggacggcgcgcgtgccctgcctcgcctcacgccggtagctgatgctcccgcggcagctgccaccccagcgccccagccacggcttcagaggctctcgcacgctggcttttttttttccccccccctttggtgaactcgcagtacttgggctgagcccgaaatctcgcgagatgctgcaggcgtcagtgcggcttcccactaggcgcgtggtacccgaggccgggccggagccgcaggccagccgcgattccttcgggcgatgctgggggctttccggtcggggccgcagccgcttccggagccgcgggcgagagagtcggggtttcaccgtgttagccaggatggtctcgatctcctgacctcgtgatccgcccacctccgcctctccaagtgctgggattacaggcatgagccaccgcgcccggcccttgtatttttaaactttgactttatggagacgaacaccatcgtttgctgaacacttgaaacatgatgaaagagccacagagttggcagaactgtttgaaaatgctgtgcaagcggtcttctctgtcttctttatggccagtaaaattctccagaagagatttatggcagcctcactcccagtagtttctgcatttagtgagataagatggaatcttgctctcttgctcagactggagtgcagtggcatgaccttggctcactgcaacctcacctctcgggttcaagcgattctgcctcagcctctcgagtagctgggactacaggtgggagacctccacagaacccttccagcaagctgtcttctaaagcaaacaagaaaaggaaagtctgagcagttttgattagatttcccagaagtcaaagcaaggaaaaatgaaaaagcttcatttctcacgttcttaaaagagagcacagatgttgcatcatctggttagataccctgagaataaaatctggatccagtgagaggaaagattctgggtgctcatgaaaaaagaaacaaaacaaaacttgggagcctcttgagagtgtacagcatcagcccttgccaactcttgtttatatgcatttaactttcagttaaccatgggaataattcatgaaaatccaatctacaaacaaaggccatcctaacgttcatgttattcttttccctaagaatctttcacaagagctataatcaagtagaattatgctttgatttgaattctaattcaattgaaaataaaaaatgagggccggacgcggtggctcatgcctgtaatcccagcgctttgggaggctgaggtggacggatcacgaggtcaggagatcgagaccatcctggctaacacggtgaaacccgatccctactaaaaatacaaaaaattagccgggcgtggtggcaggcgcctgtagtcccagctactcgggaggctgaggcaggagaatggcgtgaacccaggaggcagaggttgcagtgagccgagatcatgctactgcactccagcctgggcgacagagcgagactctgtgtataaataaataaataaataaataaataacgaaaaggttgccattgccctttctggggaaagtgataatgaggaaagactagtttcttaacccaagtcagctttagagtcggcaaggatgcaatttgaggtgatccaggaaaactctattagcatggtatttcccatacagattcatttcttttaggcctgaagtctttttggcacttcttaataaaatcacagatacctcttggaaaaaagcttatcctttatcaatttctatcagttaaccactcagatgaggataaaggcctgagtcagaaaggacagagagaggttccacaaagagataaaagatgagtggccataaggagtccttgaaaacacacctctctagcccatcaaaaaatgcagcaccttaaactcaagtccatcttactagcctttagcagtaccccaccactctcaaaatttccagcattaaatgtctcggagctatataaaaggcagacttaggtataagtaggaagagatatcaagggcttgggtatcatttcagcactaatggagcttatggcatgtatgaatgaacctgatgcgtggtctccacggtagattgttacaattgaggtcccacatttatgagattcccagtgaaaacaaatctcacagcttcacctgagagaaacattactgtcagtctcagatacaaaagcctgctgctattaggtacctatacacctgctgaaaatggaccagctttgctgtagtagtgcgcgcaggcaaa

SEQ ID NO: 373598 - DNA, 2320 bp, Homo sapiens
cgtcagtggacctgcagcccaggcaacggggctgcggacggcgcgcgtgccctgcctcgcctcacgccggtagctgatgctcccgcggcagctgccaccccagcgccccagccacggcttcagaggctctcgcacgctggcttttttttttccccccccctttggtgaactcgcagtacttgggctgagcccgaaatctcgcgagatgctgcaggcgtcagtgcggcttcccactaggcgcgtggtacccgaggccgggccggagccgcaggccagccgcgattccttcgggcgatgctgggggctttccggtcggggccgcagccgcttccggagccgcgggcgaggtgcgttccccagcctggtttgctctgggctctgacccgccgccgcgaatctccgctcgtaactccgggcctgaacctggaggagggaggatttcctctgtgcagctttcgagcggtagactcaccctgccaggcagacctagattggcataaccagagatcagttccagttgtgatgcagtgggtgtctacacacttctgatgacacctttattttaaaagctgatgttccaaggtgcaagcggtcttctctgtcttctttatggccagtaaaattctccagaagagatttatggcagcctcactcccagtagtttctgcatttagtgagataagatggaatcttgctctcttgctcagactggagtgcagtggcatgaccttggctcactgcaacctcacctctcgggttcaagcgattctgcctcagcctctcgagtagctgggactacaggtgggagacctccacagaacccttccagcaagctgtcttctaaagcaaacaagaaaaggaaagtctgagcagttttgattagatttcccagaagtcaaagcaaggaaaaatgaaaaagcttcatttctcacgttcttaaaagagagcacagatgttgcatcatctggttagataccctgagaataaaatctggatccagtgagaggaaagattctgggtgctcatgaaaaaagaaacaaaacaaaacttgggagcctcttgagagtgtacagcatcagcccttgccaactcttgtttatatgcatttaactttcagttaaccatgggaataattcatgaaaatccaatctacaaacaaaggccatcctaacgttcatgttattcttttccctaagaatctttcacaagagctataatcaagtagaattatgctttgatttgaattctaattcaattgaaaataaaaaatgagggccggacgcggtggctcatgcctgtaatcccagcgctttgggaggctgaggtggacggatcacgaggtcaggagatcgagaccatcctggctaacacggtgaaacccgatccctactaaaaatacaaaaaattagccgggcgtggtggcaggcgcctgtagtcccagctactcgggaggctgaggcaggagaatggcgtgaacccaggaggcagaggttgcagtgagccgagatcatgctactgcactccagcctgggcgacagagcgagactctgtgtataaataaataaataaataaataaataacgaaaaggttgccattgccctttctggggaaagtgataatgaggaaagactagtttcttaacccaagtcagctttagagtcggcaaggatgcaatttgaggtgatccaggaaaactctattagcatggtatttcccatacagattcatttcttttaggcctgaagtctttttggcacttcttaataaaatcacagatacctcttggaaaaaagcttatcctttatcaatttctatcagttaaccactcagatgaggataaaggcctgagtcagaaaggacagagagaggttccacaaagagataaaagatgagtggccataaggagtccttgaaaacacacctctctagcccatcaaaaaatgcagcaccttaaactcaagtccatcttactagcctttagcagtaccccaccactctcaaaatttccagcattaaatgtctcggagctatataaaaggcagacttaggtataagtaggaagagatatcaagggcttgggtatcatttcagcactaatggagcttatggcatgtatgaatgaacctgatgcgtggtctccacggtagattgttacaattgaggtcccacatttatgagattcccagtgaaaacaaatctcacagcttcacctgagagaaacattactgtcagtctcagatacaaaagcctgctgctattaggtacctatacacctgctgaaaatggaccagctttgctgtagtagtgcgcgcaggcaaa

SEQ ID NO: 373599 - DNA, 2661 bp, Homo sapiens
cgtcagtggacctgcagcccaggcaacggggctgcggacggcgcgcgtgccctgcctcgcctcacgccggtagctgatgctcccgcggcagctgccaccccagcgccccagccacggcttcagaggctctcgcacgctggcttttttttttccccccccctttggtgaactcgcagtacttgggctgagcccgaaatctcgcgagatgctgcaggcgtcagtgcggcttcccactaggcgcgtggtacccgaggccgggccggagccgcaggccagccgcgattccttcgggcgatgctgggggctttccggtcggggccgcagccgcttccggagccgcgggcgaggtgcgttccccagcctggtttgctctgggctctgacccgccgccgcgaatctccgctcgtaactccgggcctgaacctggaggagggaggatttcctctgtgcagctttcgagcggtagactcaccctgccaggcagacctagattggcataaccagagatcagttccagttgtgatgcagtgggtgtctacacacttctgatgacacctttattttaaaagctgatgttccaaggtgcaagcggtcttctctgtcttctttatggccagtaaaattctccagaagagatttatggcagcctcactcccagtagtttctgcatttagtgagataaggaatggattttcttctgtgtattgctgacacgaacaggagacggaaatactgagtagaagagggcggttccctggctaaggccccaccctcaagcctggatacccgcggccctaaatgagaagaggcgtttctgtttggggcccaaaaagttgccttttgacccaccacgccccctatcctgcccccatataaaccccaaaccccaacctccagagcataccagcaggtgaggagatacgaggcaagccgactgacggcaaaacgacgtagcagagaaagagagaagaggagggacgtctggacaccgagagatgtttggctcggggcagtcagagcggagtccagcccctgggcggcccaactccaggggaagatcaccttcccacttcatccatccccacccttccagctccccatccatcctgctgaaagccatttccaccactcaataaaacctcgcattcatccttcaagtacgtgtgtgacccgatttttcctggattctggaaaagagctcggaatacagaaagctgtcccctggtcctttgcccttgtgaaaaagcagaaggtccattgagctggttaacactccagctgtctgtggtggccaagctgaaagagctttgtaacactggggttgcaggcacccacctctagacgctaccgcagagccagagcccaaagccctcaccccggcctctgcacttgcccatctgcgtgctccccctctcgcaaggggtttctgcagagggggctactgaacagatggaatcttgctctcttgctcagactggagtgcagtggcatgaccttggctcactgcaacctcacctctcgggttcaagcgattctgcctcagcctctcgagtagctgggactacaggtgggagacctccacagaacccttccagcaagctgtcttctaaagcaaacaagaaaaggaaagtctgagcagttttgattagatttcccagaagtcaaagcaaggaaaaatgaaaaagcttcatttctcacgttcttaaaagagagcacagatgttgcatcatctggttagataccctgagaataaaatctggatccagtgagaggaaagattctgggtgctcatgaaaaaagaaacaaaacaaaacttgggagcctcttgagagtgtacagcatcagcccttgccaactcttgtttatatgcatttaactttcagttaaccatgggaataattcataaataaataaataaataacgaaaaggttgccattgccctttctggggaaagtgataatgaggaaagactagtttcttaacccaagtcagctttagagtcggcaaggatgcaatttgaggtgatccaggaaaactctattagcatggtatttcccatacagattcatttcttttaggcctgaagtctttttggcacttcttaataaaatcacagatacctcttggaaaaaagcttatcctttatcaatttctatcagttaaccactcagatgaggataaaggcctgagtcagaaaggacagagagaggttccacaaagagataaaagatgagtggccataaggagtccttgaaaacacacctctctagcccatcaaaaaatgcagcaccttaaactcaagtccatcttactagcctttagcagtaccccaccactctcaaaatttccagcattaaatgtctcggagctatataaaaggcagacttaggtataagtaggaagagatatcaagggcttgggtatcatttcagcactaatggagcttatggcatgtatgaatgaacctgatgcgtggtctccacggtagattgttacaattgaggtcccacatttatgagattcccagtgaaaacaaatctcacagcttcacctgagagaaacattactgtcagtctcagatacaaaagcctgctgctattaggtacctatacacctgctgaaaatggaccagctttgctgtagtagtgcgcgcaggcaaa

SEQ ID NO: 373600 - DNA, 2309 bp, Homo sapiens
cgtcagtggacctgcagcccaggcaacggggctgcggacggcgcgcgtgccctgcctcgcctcacgccggtagctgatgctcccgcggcagctgccaccccagcgccccagccacggcttcagaggctctcgcacgctggcttttttttttccccccccctttggtgaactcgcagtacttgggctgagcccgaaatctcgcgagatgctgcaggcgtcagtgcggcttcccactaggcgcgtggtacccgaggccgggccggagccgcaggccagccgcgattccttcgggcgatgctgggggctttccggtcggggccgcagccgcttccggagccgcgggcgaggtgcgttccccagcctggtttgctctgggctctgacccgccgccgcgaatctccgctcgtaactccgggcctgaacctggaggagggaggatttcctctgtgcagctttcgagcggtagactcaccctgccaggcagacctagattggcataaccagagatcagttccagttgtgatgcagtgggtgtctacacacttctgatgacacctttattttaaaagctgatgttccaaggtgcaagcggtcttctctgtcttctttatggccagtaaaattctccagaagagatttatggcagcctcactcccagtagtttctgcatttagtgagataaggaatggattttcttctgtgtattgctgacacgaacaggagacggaaatactgagtagaagagggcggttccctggctaaggccccaccctcaagcctggatacccgcggccctaaatgagaagaggcgtttctgtttggggcccaaaaagttgccttttgacccaccacgccccctatcctgcccccatataaaccccaaaccccaacctccagagcataccagcaggtgaggagatacgaggcaagccgactgacggcaaaacgacgtagcagagaaagagagaagaggagggacgtctggacaccgagagatgtttggctcggggcagtcagagcggagtccagcccctgggcggcccaactccaggggaagatcaccttcccacttcatccatccccacccttccagctccccatccatcctgctgaaagccatttccaccactcaataaaacctcgcattcatccttcaagtacgtgtgtgacccgatttttcctggattctggaaaagagctcggaatacagaaagctgtcccctggtcctttgcccttgtgaaaaagcagaaggtccattgagctggttaacactccagctgtctgtggtggccaagctgaaagagctttgtaacactggggttgcaggcacccacctctagacgctaccgcagagccagagcccaaagccctcaccccggcctctgcacttgcccatctgcgtgctccccctctcgcaaggggtttctgcagagggggctactgaacagatggaatcttgctctcttgctcagactggagttgcagtgagccgagatcatgctactgcactccagcctgggcgacagagcgagactctgtgtataaataaataaataaataaataaataacgaaaaggttgccattgccctttctggggaaagtgataatgaggaaagactagtttcttaacccaagtcagctttagagtcggcaaggatgcaatttgaggtgatccaggaaaactctattagcatggtatttcccatacagattcatttcttttaggcctgaagtctttttggcacttcttaataaaatcacagatacctcttggaaaaaagcttatcctttatcaatttctatcagttaaccactcagatgaggataaaggcctgagtcagaaaggacagagagaggttccacaaagagataaaagatgagtggccataaggagtccttgaaaacacacctctctagcccatcaaaaaatgcagcaccttaaactcaagtccatcttactagcctttagcagtaccccaccactctcaaaatttccagcattaaatgtctcggagctatataaaaggcagacttaggtataagtaggaagagatatcaagggcttgggtatcatttcagcactaatggagcttatggcatgtatgaatgaacctgatgcgtggtctccacggtagattgttacaattgaggtcccacatttatgagattcccagtgaaaacaaatctcacagcttcacctgagagaaacattactgtcagtctcagatacaaaagcctgctgctattaggtacctatacacctgctgaaaatggaccagctttgctgtagtagtgcgcgcaggcaaa

SEQ ID NO: 373601 - DNA, 1810 bp, Homo sapiens
cgtcagtggacctgcagcccaggcaacggggctgcggacggcgcgcgtgccctgcctcgcctcacgccggtagctgatgctcccgcggcagctgccaccccagcgccccagccacggcttcagaggctctcgcacgctggcttttttttttccccccccctttggtgaactcgcagtacttgggctgagcccgaaatctcgcgagatgctgcaggcgtcagtgcggcttcccactaggcgcgtggtacccgaggccgggccggagccgcaggccagccgcgattccttcgggcgatgctgggggctttccggtcggggccgcagccgcttccggagccgcgggcgaggtgcgttccccagcctggtttgctctgggctctgacccgccgccgcgaatctccgctcgtaactccgggcctgaacctggaggagggaggatttcctctgtgcagctttcgagcggtagactcaccctgccaggcagacctagattggcataaccagagatcagttccagttgtgatgcagtgggtgtctacacacttctgatgacacctttattttaaaagctgatgttccaaggtgcaagcggtcttctctgtcttctttatggccagtaaaattctccagaagagatttatggcagcctcactcccagtagtttctgcatttagtgagataaggaatggattttcttctgtgtattgctgacacgaacaggagacggaaatactgagtagaagagggcggttccctggctaaggccccaccctcaagcctggatacccgcggccctaaatgagaagaggcgtttctgtttggggcccaaaaagttgccttttgacccaccacgccccctatcctgcccccatataaaccccaaaccccaacctccagagcataccagcaggtgaggagatacgaggcaagccgactgacggcaaaacgacgtagcagagaaagagagaagaggagggacgtctggacaccgagagatgtttggctcggggcagtcagagcggagtccagcccctgggcggcccaactccaggggaagatcaccttcccacttcatccatccccacccttccagctccccatccatcctgctgaaagccatttccaccactcaataaaacctcgcattcatccttcaagtacgtgtgtgacccgatttttcctggattctggaaaagagctcggaatacagaaagctgtcccctggtcctttgcccttgtgaaaaagcagaaggtccattgagctggttaacactccagctgtctgtggtggccaagctgaaagagctttgtaacactggggttgcaggcacccacctctagacgctaccgcagagccagagcccaaagccctcaccccggcctctgcacttgcccatctgcgtgctccccctctcgcaaggggtttctgcagagggggctactgaacagatggaatcttgctctcttgctcagactggagtgcagtggcatgaccttggctcactgcaacctcacctctcgggttcaagcgattctgcctcagcctctcgagtagctgggactacaggtgggagacctccacagaacccttccagcaagctgtcttctaaagcaaacaagaaaaggaaagtctgagcagttttgattagatttcccagaagtcaaagcaaggaaaaatgaaaaagcttcatttctcacgttcttaaaagagagcacagatgttgcatcatctggttagataccctgagaatatcggagtgcggccgaataaaggcaaaccgaataagcggtgattacataggtggagtag

SEQ ID NO: 373602 - DNA, 1325 bp, Homo sapiens
cgtcagtggacctgcagcccaggcaacggggctgcggacggcgcgcgtgccctgcctcgcctcacgccggtagctgatgctcccgcggcagctgccaccccagcgccccagccacggcttcagaggctctcgcacgctggcttttttttttccccccccctttggtgaactcgcagtacttgggctgagcccgaaatctcgcgagatgctgcaggcgtcagtgcggcttcccactaggcgcgtggtacccgaggccgggccggagccgcaggccagccgcgattccttcgggcgatgctgggggctttccggtcggggccgcagccgcttccggagccgcgggcgaggtgcgttccccagcctggtttgctctgggctctgacccgccgccgcgaatctccgctcgtaactccgggcctgaacctggaggagggaggatttcctctgtgcagctttcgagcggtagactcaccctgccaggcagacctagattggcataaccagagatcagttccagttgtgatgcagtgggtgtctacacacttctgatgacacctttattttaaaagctgatgttccaagagagtcggggtttcaccgtgttagccaggatggtctcgatctcctgacctcgtgatccgcccacctccgcctctccaagtgctgggattacaggcatgagccaccgcgcccggcccttgtatttttaaactttgactttatggagacgaacaccatcgtttgctgaacacttgaaacatgatgaaagagccacagagttggcagaactgtttgaaaatgctatttttagggcagtttttagtgtcattatgttgctgctacatatttggaagatggaacaagcccagacaaaggaggattcttttttactcatcttaaatccattttattttccttcatctgagccccttaaaactaatgtgttactggtgcaagcggtcttctctgtcttctttatggccagtaaaattctccagaagagatttatggcagcctcactcccagtagtttctgcatttagtgagataagccacagcaattgtctgctattttaaaagcactgtgatgcttaaatattccagctgctacatcggacaggtgtctgatgatcctgagaacagtcatcaaaaagtagaacttgagcctggaatacattctctggcatagccatagtcaatcaccagtataattaatgtaaatggacactggatagcttttttgtgaattctgatgcagcacaaagagactttaattgtttccaaaaagaaaatgtctgagattaaaatctagagttttatgactta

SEQ ID NO: 373603 - DNA, 439 bp, Homo sapiens
gagcagaagggcctgacgtaccaccgcatcgtagaggctttccggtttgcctacgccaagaggaccctgcttggggaccccaagtttgtggatgtgactgaggccagctctggggtctcagcaggtggtccgcaacatgacctctgagttcttcgctgcccagctccggtcccagatctctgaccacaccactcacccgatctcctactacaagcccgagttctacacgccggatgacgggggcactgctcacctgtctgtcgtcgcagaggacggcagtgctgtgtccgccaccagcaccatcaacctctactttggctccaaggtctgctccccggtcagtgggatcctgttcaataatgaatggacgacttcagctctcccagcatcaccaatgagtttggggcacccccctcacctgccaatttcatccagccag

SEQ ID NO: 373604 - DNA, 242 bp, Homo sapiens
acttatatgccgatttaaatcgttctctaagaaaaggtggtatttcctctcactgcaggttctaccagactctcatcacctgcttgccaagcagcagccaagggaaaacagtttgaaatttactgctaacaattggttcacatacataccgggtacgggggactcttgcctgtagtcccagctactcaggaggctgaggctggaggaatgcttgagtccaggagttcaagtccagcccaggt

SEQ ID NO: 373605 - DNA, 3089 bp, Homo sapiens
  misc_feature (497)..(497): n is a, c, g, or t
cgtgtctacctctgccttctgtggacaccatgcgccttggtccttgtgtcatggtgtatttacactgccgtactcacccataactgcgtgctccttacaaaaccccatccaagccagagccgtctcgatgccaaccccctctcctcccttcaggcctgtgcagagggaatttttcatggtgcctgttttgatgatttttttctccatctaactgaagtcctttggcatgggccaagctttcttcatggtggcttggtttggaactgtttccttgctttactgggatcccctggtggaaaggggtggggggttggggcggtaaagggtgctgatgatttgccacaggagggaaaaaaccttcctttccttgatttgcagctctaatcctcatccttagccccatccctatctgccatggtgggtcggggagagccctgaggagccttttggttcccaagtccatcttgatgttcactcttcccctcactcctgagagnccttctgccatcttggtccccagacccggccttgccactcagtgtccctaccactcgagaccctggctccaaaacgccactcatcccacagcaaatcatgttggtcgtgctccgttgtgtacccatctagtgaaggcacagtgttgctgagttgcatgactcatctcattctcttctgggacatactgacattttgcaaacatgcatgctttgcaaggaaagctgcagaactcattttcatactgtaacctgatgccatgtcacccgtgacccgttcagtaggagagaatagactgtcgcttgctgtctttcgtttcaggtaaatccatttcggatggccactcgtggcatgttcccgacagcccttcctgtcccgagcatcactacaagcaaatggaaggtgacaggaatgttccacctgttccccctgcgtccagcaccccttataaaccaccctatggaaagctactattacctccaggcacggatggtggcaaagaaggcccgcgagtcctgaatggcaacccacagcaggaagacgggggactggccggtatcacagagcagcagtcaggtgccttcgacagatgggagatgattcaagcacaggagcttcacaataagctcaaaataaaacaaaatttgcaacagctgaactctgatatcagcgccatcactacttggctgaaaaaaactgaagcagagctggaaatgttaaagatggcaaagcctccctctgatatccaggaaatagaactgagagtgaagagactgcaggagatactgaaagcctttgacacttacaaggcattagtggtctctgtcaacgtgagcagcaaggaatttctgcaaaccgagagccccgaatccacagagctccaaagtagactccgccagctgagcctgctctgggaagcagcacagggcgcagtggacagctggagagggggcttacgacagtcgctcatgcagtgccagggctctaagacacggccgcgctctgatgtgttgttttttaaggagacttccaccagttgagtcaaaatctgctgctgtggttagcgagtgccaagaaccggaggcagaaggctcatgtcaccgatccaaaggcagacccccgggctctcctagagtgtcggagggaactaatgcaactggaaaaggagctggtagaacgtcaacctcaagtggacatgttacaggagatttcaaacagccttctcattaagggacatggagaagactgtattgaagctgaagaaaaggtgcatgttattgagaagaaactcaaacagttacgggagcaagtgtcccaagatttaatggccttgcagggaacccagaacccagcctcacccctgcccagcttcgacgaggtagactcgggggaccagcctcctgcaacatccgtgccagctccccgagcaaagagttcagagcagtgagaactacagaaggcgaggaggagacagagagcagggtccccggcagcacacggccacagcgctccttcctctcaagggtggtccgggcagccctacccctgcagctgctcctcctgctgctgctgctcctggcctgcctgctgccctcctccgaagaagactacagctgcactcaggccaacaactttgcccggtccttttaccccatgctgaggtacaccaatgggccaccccccacatagagggcatagctggccacagtgctacaccacctgcctgattgccaagggtgcccagcacgtggccccagaccaatctgagtgacttagtgttggcaaggtcccgggacctgtgcagacttcttctgggcttacccagcacgggctccctggagcccagggcagctttcagattgtgttcctccccaggagcagggaacctgtgtggcaggtgccccgggtattttggcagaactagttgattagtttagggatctctggaaatgtcagtttcctgaagagccaagcactttgtgaattctggtttgtttgtaaaacagcattattataatgtaggtatggtcaatgagcagtggtgtccatcacatatattatagaagcaagcgagcacattccaccctagaaatggttcagaaactcataggcacccttagctgatggaaacaatcaatcatatttaatacgcttagaatcagttttactccaatcagctggcaattttgagctgccggttatacaccaaaatgttctgttcagtacctagctctgctcttttatattgctttaaatttttaaagaaattatattgcatggatgtggttatttgtgcatattttttaacaatgcccaatctgtatgaataatgtaaacttcgatttttttttaaaaaaattagattttagctggagcttttgactaatgtaaagtaaatgccaaactaccgacttgatagggatgtttttgtaagttaattttctaagactttttcacatccaaagtgatgctttgctttgggttttaactgtttggccacggcgggggtgggggcggggggttggtacagaaacttgaagctgtttgtgatatgtacaactcagatgtttctcattaaaaaacaaaattagcca

SEQ ID NO: 373606 - DNA, 1570 bp, Homo sapiens
taaagccaaaataatgaaacactttatttatatcatgttaaactctctacgacagtgccatagacattaaagggacacagtaaggaaaacactccctggaggaagggaaagcaggtctcaaaatctgctttcacagagcagcaaacattcatttctacaaggcccaaatgtaaagcctgcaaatgaagtcaacaaattagtgtaatgatacaaagcattcgtctgagaaaatggcaaattatagccaaccaacaggctctgaagtacacattgaatgacaaaaggtataggaccaacagttaaggcatttagacacccaacagaggaaacaaatgcaaaaacatccattgtacagttaacaggaactgttcgcggctggtatcaccactccttatgtgcttcccatagaggaaacccaccaccagtttaccagtggctggccctacaagtgaataggatcctcggaattaaaaaacaaacaaacaaacaaacaaaaaacctccctgactccaaagcaacaaaaatggcactacgatcatacatcacagacaatgcacatcttaagagctgccactggagccaaaattccagcaagtttgagagctataaagaataagtggcacgtgttttcacactgtagtatatcacactccacagggaagcagcagtgcctaaaagatgtgaattttacatgagtacacttccaaggaacatattccacgtgtttggggaaagcagtcacagacaggaggtgatcacagtacccactagagctcatgaacctgagatgggacatgggaataacagattatgcatcttattttccatctgtcattgctgctgttgtgtaaaggctcatgcagacccatctaagctgaggagatgggatctaaaggtacagcagaagacaaccctaacttcaccgcccctccattctgctgcgactcagctcacaaagcagattctcacagaagcaagtcctggggcaggagcaatactggcccgctaggcaagcagaagacttgcgtgccagtccaagctttgccatgagtagttttatgaccttgaataggtgaatttgcccccgtgggctttaatttacacagatatgaaaggtggagttgaactttgatgtgagaggtttacaaacttactgtgtctgtaggggtgttctggacattgtggtgggaggtaagggggtatcacaagggggccccatttaaatcacagcagccgtgcatgtcaggttgcacctgatagattctgcagttttaaaatatttttctttaaatttttaaactgtttgaagtgcatggtcactgtcagcactggacttggactgcctgtgttcagctcaatcacctactccccacgtgaccttcagcaagtttgcttagaccgtgtctagttccacaaccagaaaataaggaaatagcagttattataataaggattaaatgtgaatgtctgaggcactgagaactgtgtctggcacagatattatctttagatactaaataatgtgtttttatctttttaaaagattttcagcaacttaaaaaaaaatgtg

SEQ ID NO: 373607 - DNA, 4437 bp, Homo sapiens
  misc_feature (7)..(7): n is a, c, g, or t
  misc_feature (15)..(15): n is a, c, g, or t
gcatttnatgccccntttgactctagaccatcccacctttttagtgctccctgggggccaggagcgcttcagcctctaccaaaccagaagtctgatccatgagctgaagaataaagaaattcattttcaaaggaaggcgaactacctgtgccctaaccttggaagctggagaaaagttactgctcacaactgacctgaaaactaaagagtctgtgggtaggagaatcagtcaacttcaggacagctggaaagacatggagccccagctggcagagatgattaagcagttccagagcactgtagagacctgggaccagtgtgaaaagaaaatcaaggagttgaaaagcaggctgcaagttttaaaggcacaaagtgaagatcctcttccagagcttcacgaggacctccataacgaaaaagagctgattaaggaactagaacagtctttggctagctggactcagaacttgaaagaacttcaaactatgaaggcggacttaacccggcacgttctcgtggaagatgtgatggttttgaaggagcaaatagagcatttgcacagacaatgggaggacctctgcttaagggtggccatacgtaaacaggagattgaagacagactcaatacatgggttgtattcaatgaaaaaaataaagagttgtgtgcctggctggtgcagatggaaaacaaagttctacagacagcggacattagtattgaagaaatgattgaaaagttacagaaggactgcatggaagaaataaacttgtttagtgaaaacaagttacagttaaagcagatgggtgaccagttgatcaaggccagcaacaaatcaagagcagctgagatcgatgacaagctcaacaaaattaacgatcgttggcaacatctttttgatgtcatcggatcaagggtgaagaagctgaaggagacctttgcttttattcagcagttggacaaaaacatgagcaaccttcgcacctggttggctcgaattgagtctgagctttccaagcctgttgtttatgatgtctgcgatgatcaagagatccagaagaggctcgctgagcagcaggatctacagcgagatattgaacaacacagcgcaggggtggagtccgtgtttaacatctgtgacgtcctactgcacgactccgatgcctgtgcaaatgagaccgagtgtgactcgatccagcagaccaccaggagcctggacagacgctggaggaacatttgtgccatgtccatggagcggcgcatgaaaatcgaggagacgtggcgcctgtggcagaagtttttagacgactattctcgctttgaggactggctcaagtcagctgagaggacggcagcctgcccaaattcctcagaggtgttgtacacgagtgccaaagaggaactgaagaggtttgaggcctttcagcggcagattcatgagcggctcactcagctggagctcatcaacaagcagtaccggcggctggcccgggagaaccgcacagacacggccagcaggctgaagcagatggtccacgagggcaaccagcgctgggacaaccttcagaggcgggtcacagccgtcctgcggagactcaggcatttcaccaaccagagggaagaatttgagggcaccagggagagcattctggtgtggctcacagagatggacctgcagctgaccaacgtggagcacttctcagagagtgacgccgatgacaagatgcgccaactgaatggcttccaacaggaaattacattaaataccaacaagattgatcagctcattgtgtttggggagcagctgattcagaagagcgagcccctggatgctgtgctgattgaggatgagctggaggaactccaccgctactgccaggaggtgtttggaagggtctcccggttccaccggcggctcacctcctgcactccgggcttggaagatgaaaaggaggcctctgagaatgaaacagacatggaagaccccagagaaatccagactgattcttggcgtaaacggggagagagcgaggaaccgtcatctcctcagtccctgtgtcatctagtggccccagggcacgagcggtctggctgcgagacccctgtcagcgtggactccatccccctggagtgggaccacacaggcgacgtggggggctcctcctctcacgaagaggacgaggagggcccatactacagcgcactgtcaggtaaatccatttcggatggccactcgtggcatgttcccgacagcccttcctgtcccgagcatcactacaagcaaatggaaggtgacaggaatgttccacctgttccccctgcgtccagcaccccttataaaccaccctatggaaagctactattacctccaggcacggatggtggcaaagaaggcccgcgagtcctgaatggcaacccacagcaggaagacgggggactggccggtatcacagagcagcagtcaggtgccttcgacagatgggagatgattcaagcacaggagcttcacaataagctcaaaataaaacaaaatttgcaacagctgaactctgatatcagcgccatcactacttggctgaaaaaaactgaagcagagctggaaatgttaaagatggcaaagcctccctctgatatccaggaaatagaactgagagtgaagagactgcaggagatactgaaagcctttgacacttacaaggcattagtggtctctgtcaacgtgagcagcaaggaatttctgcaaaccgagagccccgaatccacagagctccaaagtagactccgccagctgagcctgctctgggaagcagcacagggcgcagtggacagctggagagggggcttacgacagtcgctcatgcagtgccaggacttccaccagttgagtcaaaatctgctgctgtggttagcgagtgccaagaaccggaggcagaaggctcatgtcaccgatccaaaggcagacccccgggctctcctagagtgtcggagggaactaatgcaactggaaaaggagctggtagaacgtcaacctcaagtggacatgttacaggagatttcaaacagccttctcattaagggacatggagaagactgtattgaagctgaagaaaaggtgcatgttattgagaagaaactcaaacagttacgggagcaagtgtcccaagatttaatggccttgcagggaacccagaacccagcctcacccctgcccagcttcgacgaggtagactcgggggaccagcctcctgcaacatccgtgccagctccccgagcaaagagttcagagcagtgagaactacagaaggcgaggaggagacagagagcagggtccccggcagcacacggccacagcgctccttcctctcaagggtggtccgggcagccctacccctgcagctgctcctcctgctgctgctgctcctggcctgcctgctgccctcctccgaagaagactacagctgcactcaggccaacaactttgcccggtccttttaccccatgctgaggtacaccaatgggccaccccccacatagagggcatagctggccacagtgctacaccacctgcctgattgccaagggtgcccagcacgtggccccagaccaatctgagtgacttagtgttggcaaggtcccgggacctgtgcagacttcttctgggcttacccagcacgggctccctggagcccagggcagctttcagattgtgttcctccccaggagcagggaacctgtgtggcaggtgccccgggtattttggcagaactagttgattagtttagggatctctggaaatgtcagtttcctgaagagccaagcactttgtgaattctggtttgtttgtaaaacagcattattataatgtaggtatggtcaatgagcagtggtgtccatcacatatattatagaagcaagcgagcacattccaccctagaaatggttcagaaactcataggcacccttagctgatggaaacaatcaatcatatttaatacgcttagaatcagttttactccaatcagctggcaattttgagctgccggttatacaccaaaatgttctgttcagtacctagctctgctcttttatattgctttaaatttttaaagaaattatattgcatggatgtggttatttgtgcatattttttaacaatgcccaatctgtatgaataatgtaaacttcgatttttttttaaaaaaattagattttagctggagcttttgactaatgtaaagtaaatgccaaactaccgacttgatagggatgtttttgtaagttaattttctaagactttttcacatccaaagtgatgctttgctttgggttttaactgtttggccacggcgggggtgggggcggggggttggtacagaaacttgaagctgtttgtgatatgtacaactcagatgtttctcattaaaaaacaaaattagcca

SEQ ID NO: 373608 - DNA, 4506 bp, Homo sapiens
  misc_feature (7)..(7): n is a, c, g, or t
  misc_feature (15)..(15): n is a, c, g, or t
gcatttnatgccccntttgactctagaccatcccacctttttagtgctccctgggggccaggagcgcttcagcctctaccaaaccagaagtctgatccatgagctgaagaataaagaaattcattttcaaaggaaggcgaactacctgtgccctaaccttggaagctggagaaaagttactgctcacaactgacctgaaaactaaagagtctgtgggtaggagaatcagtcaacttcaggacagctggaaagacatggagccccagctggcagagatgattaagcagttccagagcactgtagagacctgggaccagtgtgaaaagaaaatcaaggagttgaaaagcaggctgcaagttttaaaggcacaaagtgaagatcctcttccagagcttcacgaggacctccataacgaaaaagagctgattaaggaactagaacagtctttggctagctggactcagaacttgaaagaacttcaaactatgaaggcggacttaacccggcacgttctcgtggaagatgtgatggttttgaaggagcaaatagagcatttgcacagacaatgggaggacctctgcttaagggtggccatacgtaaacaggagattgaagacagactcaatacatgggttgtattcaatgaaaaaaataaagagttgtgtgcctggctggtgcagatggaaaacaaagttctacagacagcggacattagtattgaagaaatgattgaaaagttacagaaggactgcatggaagaaataaacttgtttagtgaaaacaagttacagttaaagcagatgggtgaccagttgatcaaggccagcaacaaatcaagagcagctgagatcgatgacaagctcaacaaaattaacgatcgttggcaacatctttttgatgtcatcggatcaagggtgaagaagctgaaggagacctttgcttttattcagcagttggacaaaaacatgagcaaccttcgcacctggttggctcgaattgagtctgagctttccaagcctgttgtttatgatgtctgcgatgatcaagagatccagaagaggctcgctgagcagcaggatctacagcgagatattgaacaacacagcgcaggggtggagtccgtgtttaacatctgtgacgtcctactgcacgactccgatgcctgtgcaaatgagaccgagtgtgactcgatccagcagaccaccaggagcctggacagacgctggaggaacatttgtgccatgtccatggagcggcgcatgaaaatcgaggagacgtggcgcctgtggcagaagtttttagacgactattctcgctttgaggactggctcaagtcagctgagaggacggcagcctgcccaaattcctcagaggtgttgtacacgagtgccaaagaggaactgaagaggtttgaggcctttcagcggcagattcatgagcggctcactcagctggagctcatcaacaagcagtaccggcggctggcccgggagaaccgcacagacacggccagcaggctgaagcagatggtccacgagggcaaccagcgctgggacaaccttcagaggcgggtcacagccgtcctgcggagactcaggcatttcaccaaccagagggaagaatttgagggcaccagggagagcattctggtgtggctcacagagatggacctgcagctgaccaacgtggagcacttctcagagagtgacgccgatgacaagatgcgccaactgaatggcttccaacaggaaattacattaaataccaacaagattgatcagctcattgtgtttggggagcagctgattcagaagagcgagcccctggatgctgtgctgattgaggatgagctggaggaactccaccgctactgccaggaggtgtttggaagggtctcccggttccaccggcggctcacctcctgcactccgggcttggaagatgaaaaggaggcctctgagaatgaaacagacatggaagaccccagagaaatccagactgattcttggcgtaaacggggagagagcgaggaaccgtcatctcctcagtccctgtgtcatctagtggccccagggcacgagcggtctggctgcgagacccctgtcagcgtggactccatccccctggagtgggaccacacaggcgacgtggggggctcctcctctcacgaagaggacgaggagggcccatactacagcgcactgtcagatgtagaaatccctgaaaatcctgaggcatatcttaaaatgaccacaaaaactttgaaagcgtcttctggtaaatccatttcggatggccactcgtggcatgttcccgacagcccttcctgtcccgagcatcactacaagcaaatggaaggtgacaggaatgttccacctgttccccctgcgtccagcaccccttataaaccaccctatggaaagctactattacctccaggcacggatggtggcaaagaaggcccgcgagtcctgaatggcaacccacagcaggaagacgggggactggccggtatcacagagcagcagtcaggtgccttcgacagatgggagatgattcaagcacaggagcttcacaataagctcaaaataaaacaaaatttgcaacagctgaactctgatatcagcgccatcactacttggctgaaaaaaactgaagcagagctggaaatgttaaagatggcaaagcctccctctgatatccaggaaatagaactgagagtgaagagactgcaggagatactgaaagcctttgacacttacaaggcattagtggtctctgtcaacgtgagcagcaaggaatttctgcaaaccgagagccccgaatccacagagctccaaagtagactccgccagctgagcctgctctgggaagcagcacagggcgcagtggacagctggagagggggcttacgacagtcgctcatgcagtgccaggacttccaccagttgagtcaaaatctgctgctgtggttagcgagtgccaagaaccggaggcagaaggctcatgtcaccgatccaaaggcagacccccgggctctcctagagtgtcggagggaactaatgcaactggaaaaggagctggtagaacgtcaacctcaagtggacatgttacaggagatttcaaacagccttctcattaagggacatggagaagactgtattgaagctgaagaaaaggtgcatgttattgagaagaaactcaaacagttacgggagcaagtgtcccaagatttaatggccttgcagggaacccagaacccagcctcacccctgcccagcttcgacgaggtagactcgggggaccagcctcctgcaacatccgtgccagctccccgagcaaagagttcagagcagtgagaactacagaaggcgaggaggagacagagagcagggtccccggcagcacacggccacagcgctccttcctctcaagggtggtccgggcagccctacccctgcagctgctcctcctgctgctgctgctcctggcctgcctgctgccctcctccgaagaagactacagctgcactcaggccaacaactttgcccggtccttttaccccatgctgaggtacaccaatgggccaccccccacatagagggcatagctggccacagtgctacaccacctgcctgattgccaagggtgcccagcacgtggccccagaccaatctgagtgacttagtgttggcaaggtcccgggacctgtgcagacttcttctgggcttacccagcacgggctccctggagcccagggcagctttcagattgtgttcctccccaggagcagggaacctgtgtggcaggtgccccgggtattttggcagaactagttgattagtttagggatctctggaaatgtcagtttcctgaagagccaagcactttgtgaattctggtttgtttgtaaaacagcattattataatgtaggtatggtcaatgagcagtggtgtccatcacatatattatagaagcaagcgagcacattccaccctagaaatggttcagaaactcataggcacccttagctgatggaaacaatcaatcatatttaatacgcttagaatcagttttactccaatcagctggcaattttgagctgccggttatacaccaaaatgttctgttcagtacctagctctgctcttttatattgctttaaatttttaaagaaattatattgcatggatgtggttatttgtgcatattttttaacaatgcccaatctgtatgaataatgtaaacttcgatttttttttaaaaaaattagattttagctggagcttttgactaatgtaaagtaaatgccaaactaccgacttgatagggatgtttttgtaagttaattttctaagactttttcacatccaaagtgatgctttgctttgggttttaactgtttggccacggcgggggtgggggcggggggttggtacagaaacttgaagctgtttgtgatatgtacaactcagatgtttctcattaaaaaacaaaattagcca

SEQ ID NO: 373609 - DNA, 4290 bp, Homo sapiens
ctggaactgcttatcatctctgccagctggggctccatgtctttccagctgtcctgaagttgactaagcagttccagagcactgtagagacctgggaccagtgtgaaaagaaaatcaaggagttgaaaagcaggctgcaagttttaaaggcacaaagtgaagatcctcttccagagcttcacgaggacctccataacgaaaaagagctgattaaggaactagaacagtctttggctagctggactcagaacttgaaagaacttcaaactatgaaggcggacttaacccggcacgttctcgtggaagatgtgatggttttgaaggagcaaatagagcatttgcacagacaatgggaggacctctgcttaagggtggccatacgtaaacaggagattgaagacagactcaatacatgggttgtattcaatgaaaaaaataaagagttgtgtgcctggctggtgcagatggaaaacaaagttctacagacagcggacattagtattgaagaaatgattgaaaagttacagaaggactgcatggaagaaataaacttgtttagtgaaaacaagttacagttaaagcagatgggtgaccagttgatcaaggccagcaacaaatcaagagcagctgagatcgatgacaagctcaacaaaattaacgatcgttggcaacatctttttgatgtcatcggatcaagggtgaagaagctgaaggagacctttgcttttattcagcagttggacaaaaacatgagcaaccttcgcacctggttggctcgaattgagtctgagctttccaagcctgttgtttatgatgtctgcgatgatcaagagatccagaagaggctcgctgagcagcaggatctacagcgagatattgaacaacacagcgcaggggtggagtccgtgtttaacatctgtgacgtcctactgcacgactccgatgcctgtgcaaatgagaccgagtgtgactcgatccagcagaccaccaggagcctggacagacgctggaggaacatttgtgccatgtccatggagcggcgcatgaaaatcgaggagacgtggcgcctgtggcagaagtttttagacgactattctcgctttgaggactggctcaagtcagctgagaggacggcagcctgcccaaattcctcagaggtgttgtacacgagtgccaaagaggaactgaagaggtttgaggcctttcagcggcagattcatgagcggctcactcagctggagctcatcaacaagcagtaccggcggctggcccgggagaaccgcacagacacggccagcaggctgaagcagatggtccacgagggcaaccagcgctgggacaaccttcagaggcgggtcacagccgtcctgcggagactcaggcatttcaccaaccagagggaagaatttgagggcaccagggagagcattctggtgtggctcacagagatggacctgcagctgaccaacgtggagcacttctcagagagtgacgccgatgacaagatgcgccaactgaatggcttccaacaggaaattacattaaataccaacaagattgatcagctcattgtgtttggggagcagctgattcagaagagcgagcccctggatgctgtgctgattgaggatgagctggaggaactccaccgctactgccaggaggtgtttggaagggtctcccggttccaccggcggctcacctcctgcactccgggcttggaagatgaaaaggaggcctctgagaatgaaacagacatggaagaccccagagaaatccagactgattcttggcgtaaacggggagagagcgaggaaccgtcatctcctcagtccctgtgtcatctagtggccccagggcacgagcggtctggctgcgagacccctgtcagcgtggactccatccccctggagtgggaccacacaggcgacgtggggggctcctcctctcacgaagaggacgaggagggcccatactacagcgcactgtcagatgtagaaatccctgaaaatcctgaggcatatcttaaaatgaccacaaaaactttgaaagcgtcttctggtaaatccatttcggatggccactcgtggcatgttcccgacagcccttcctgtcccgagcatcactacaagcaaatggaaggtgacaggaatgttccacctgttccccctgcgtccagcaccccttataaaccaccctatggaaagctactattacctccaggcacggatggtggcaaagaaggcccgcgagtcctgaatggcaacccacagcaggaagacgggggactggccggtatcacagagcagcagtcaggtgccttcgacagatgggagatgattcaagcacaggagcttcacaataagctcaaaataaaacaaaatttgcaacagctgaactctgatatcagcgccatcactacttggctgaaaaaaactgaagcagagctggaaatgttaaagatggcaaagcctccctctgatatccaggaaatagaactgagagtgaagagactgcaggagatactgaaagcctttgacacttacaaggcattagtggtctctgtcaacgtgagcagcaaggaatttctgcaaaccgagagccccgaatccacagagctccaaagtagactccgccagctgagcctgctctgggaagcagcacagggcgcagtggacagctggagagggggcttacgacagtcgctcatgcagtgccaggacttccaccagttgagtcaaaatctgctgctgtggttagcgagtgccaagaaccggaggcagaaggctcatgtcaccgatccaaaggcagacccccgggctctcctagagtgtcggagggaactaatgcaactggaaaaggagctggtagaacgtcaacctcaagtggacatgttacaggagatttcaaacagccttctcattaagggacatggagaagactgtattgaagctgaagaaaaggtgcatgttattgagaagaaactcaaacagttacgggagcaagtgtcccaagatttaatggccttgcagggaacccagaacccagcctcacccctgcccagcttcgacgaggtagactcgggggaccagcctcctgcaacatccgtgccagctccccgagcaaagagttcagagcagtgagaactacagaaggcgaggaggagacagagagcagggtccccggcagcacacggccacagcgctccttcctctcaagggtggtccgggcagccctacccctgcagctgctcctcctgctgctgctgctcctggcctgcctgctgccctcctccgaagaagactacagctgcactcaggccaacaactttgcccggtccttttaccccatgctgaggtacaccaatgggccaccccccacatagagggcatagctggccacagtgctacaccacctgcctgattgccaagggtgcccagcacgtggccccagaccaatctgagtgacttagtgttggcaaggtcccgggacctgtgcagacttcttctgggcttacccagcacgggctccctggagcccagggcagctttcagattgtgttcctccccaggagcagggaacctgtgtggcaggtgccccgggtattttggcagaactagttgattagtttagggatctctggaaatgtcagtttcctgaagagccaagcactttgtgaattctggtttgtttgtaaaacagcattattataatgtaggtatggtcaatgagcagtggtgtccatcacatatattatagaagcaagcgagcacattccaccctagaaatggttcagaaactcataggcacccttagctgatggaaacaatcaatcatatttaatacgcttagaatcagttttactccaatcagctggcaattttgagctgccggttatacaccaaaatgttctgttcagtacctagctctgctcttttatattgctttaaatttttaaagaaattatattgcatggatgtggttatttgtgcatattttttaacaatgcccaatctgtatgaataatgtaaacttcgatttttttttaaaaaaattagattttagctggagcttttgactaatgtaaagtaaatgccaaactaccgacttgatagggatgtttttgtaagttaattttctaagactttttcacatccaaagtgatgctttgctttgggttttaactgtttggccacggcgggggtgggggcggggggttggtacagaaacttgaagctgtttgtgatatgtacaactcagatgtttctcattaaaaaacaaaattagcca

SEQ ID NO: 373610 - DNA, 3407 bp, Homo sapiens
gcgagcctgggggctgctgaaatgacttcctctaagtagccagcttcccctcacctctggcaagggctgcctaaaccacagcctgcccccagctgctgagacagctttgcaagacattgctgatgtactccagctgctatgtaatgaacttgaaagcctgttctgtagctggcatcaggactggtgaattaggccctctgctgccattgcagtttggggatgaacccctggcagcaggtcgcttgggatgtagaagggaaggagggcgtcctggcactctgcatgctttggctctgacccctcccatgtgatgcaggcctttcagcggcagattcatgagcggctcactcagctggagctcatcaacaagcagtaccggcggctggcccgggagaaccgcacagacacggccagcaggctgaagcagatggtccacgagggcaaccagcgctgggacaaccttcagaggcgggtcacagccgtcctgcggagactcaggcatttcaccaaccagagggaagaatttgagggcaccagggagagcattctggtgtggctcacagagatggacctgcagctgaccaacgtggagcacttctcagagagtgacgccgatgacaagatgcgccaactgaatggcttccaacaggaaattacattaaataccaacaagattgatcagctcattgtgtttggggagcagctgattcagaagagcgagcccctggatgctgtgctgattgaggatgagctggaggaactccaccgctactgccaggaggtgtttggaagggtctcccggttccaccggcggctcacctcctgcactccgggcttggaagatgaaaaggaggcctctgagaatgaaacagacatggaagaccccagagaaatccagactgattcttggcgtaaacggggagagagcgaggaaccgtcatctcctcagtccctgtgtcatctagtggccccagggcacgagcggtctggctgcgagacccctgtcagcgtggactccatccccctggagtgggaccacacaggcgacgtggggggctcctcctctcacgaagaggacgaggagggcccatactacagcgcactgtcagatgtagaaatccctgaaaatcctgaggcatatcttaaaatgaccacaaaaactttgaaagcgtcttctggtaaatccatttcggatggccactcgtggcatgttcccgacagcccttcctgtcccgagcatcactacaagcaaatggaaggtgacaggaatgttccacctgttccccctgcgtccagcaccccttataaaccaccctatggaaagctactattacctccaggcacggatggtggcaaagaaggcccgcgagtcctgaatggcaacccacagcaggaagacgggggactggccggtatcacagagcagcagtcaggtgccttcgacagatgggagatgattcaagcacaggagcttcacaataagctcaaaataaaacaaaatttgcaacagctgaactctgatatcagcgccatcactacttggctgaaaaaaactgaagcagagctggaaatgttaaagatggcaaagcctccctctgatatccaggaaatagaactgagagtgaagagactgcaggagatactgaaagcctttgacacttacaaggcattagtggtctctgtcaacgtgagcagcaaggaatttctgcaaaccgagagccccgaatccacagagctccaaagtagactccgccagctgagcctgctctgggaagcagcacagggcgcagtggacagctggagagggggcttacgacagtcgctcatgcagtgccaggacttccaccagttgagtcaaaatctgctgctgtggttagcgagtgccaagaaccggaggcagaaggctcatgtcaccgatccaaaggcagacccccgggctctcctagagtgtcggagggaactaatgcaactggaaaaggagctggtagaacgtcaacctcaagtggacatgttacaggagatttcaaacagccttctcattaagggacatggagaagactgtattgaagctgaagaaaaggtgcatgttattgagaagaaactcaaacagttacgggagcaagtgtcccaagatttaatggccttgcagggaacccagaacccagcctcacccctgcccagcttcgacgaggtagactcgggggaccagcctcctgcaacatccgtgccagctccccgagcaaagagttcagagcagtgagaactacagaaggcgaggaggagacagagagcagggtccccggcagcacacggccacagcgctccttcctctcaagggtggtccgggcagccctacccctgcagctgctcctcctgctgctgctgctcctggcctgcctgctgccctcctccgaagaagactacagctgcactcaggccaacaactttgcccggtccttttaccccatgctgaggtacaccaatgggccaccccccacatagagggcatagctggccacagtgctacaccacctgcctgattgccaagggtgcccagcacgtggccccagaccaatctgagtgacttagtgttggcaaggtcccgggacctgtgcagacttcttctgggcttacccagcacgggctccctggagcccagggcagctttcagattgtgttcctccccaggagcagggaacctgtgtggcaggtgccccgggtattttggcagaactagttgattagtttagggatctctggaaatgtcagtttcctgaagagccaagcactttgtgaattctggtttgtttgtaaaacagcattattataatgtaggtatggtcaatgagcagtggtgtccatcacatatattatagaagcaagcgagcacattccaccctagaaatggttcagaaactcataggcacccttagctgatggaaacaatcaatcatatttaatacgcttagaatcagttttactccaatcagctggcaattttgagctgccggttatacaccaaaatgttctgttcagtacctagctctgctcttttatattgctttaaatttttaaagaaattatattgcatggatgtggttatttgtgcatattttttaacaatgcccaatctgtatgaataatgtaaacttcgatttttttttaaaaaaattagattttagctggagcttttgactaatgtaaagtaaatgccaaactaccgacttgatagggatgtttttgtaagttaattttctaagactttttcacatccaaagtgatgctttgctttgggttttaactgtttggccacggcgggggtgggggcggggggttggtacagaaacttgaagctgtttgtgatatgtacaactcagatgtttctcattaaaaaacaaaattagcca

SEQ ID NO: 373611 - DNA, 1501 bp, Homo sapiens
ttttttttttatcattgataggactaaactgtcttcaacttactaactggagtttctttacccagcagttcagagcagtgagaactacagaaggcgaggaggagacagagagcaggtaacggggctttaccgtgacagcagtgcgttcccctgctccacactcccactgactcagtcttgccaatgccactatcaaggtccttgcaaaaatctggttttcttttgtctggaaagggctggttttctcctctgaaactgaaccccaactgttggccctatttaaatctcaggtcttggatttcttacttacataagcaggggcttaggtaatagagtgggttgtgcctgtggagcctcccaatcagctctcaacctcctctgttggcagggtccccggcagcacacggccacagcgctccttcctctcaagggtggtccgggcagccctacccctgcagctgctcctcctgctgctgctgctcctggcctgcctgctgccctcctccgaagaagactacagctgcactcaggccaacaactttgcccggtccttttaccccatgctgaggtacaccaatgggccaccccccacatagagggcatagctggccacagtgctacaccacctgcctgattgccaagggtgcccagcacgtggccccagaccaatctgagtgacttagtgttggcaaggtcccgggacctgtgcagacttcttctgggcttacccagcacgggctccctggagcccagggcagctttcagattgtgttcctccccaggagcagggaacctgtgtggcaggtgccccgggtattttggcagaactagttgattagtttagggatctctggaaatgtcagtttcctgaagagccaagcactttgtgaattctggtttgtttgtaaaacagcattattataatgtaggtatggtcaatgagcagtggtgtccatcacatatattatagaagcaagcgagcacattccaccctagaaatggttcagaaactcataggcacccttagctgatggaaacaatcaatcatatttaatacgcttagaatcagttttactccaatcagctggcaattttgagctgccggttatacaccaaaatgttctgttcagtacctagctctgctcttttatattgctttaaatttttaaagaaattatattgcatggatgtggttatttgtgcatattttttaacaatgcccaatctgtatgaataatgtaaacttcgatttttttttaaaaaaattagattttagctggagcttttgactaatgtaaagtaaatgccaaactaccgacttgatagggatgtttttgtaagttaattttctaagactttttcacatccaaagtgatgctttgctttgggttttaactgtttggccacggcgggggtgggggcggggggttggtacagaaacttgaagctgtttgtgatatgtacaactcagatgtttctcattaaaaaacaaaattagcca

SEQ ID NO: 373612 - DNA, 4779 bp, Homo sapiens
  misc_feature (7)..(7): n is a, c, g, or t
  misc_feature (15)..(15): n is a, c, g, or t
  misc_feature (4779)..(4779): n is a, c, g, or t
gcatttnatgccccntttgactctagaccatcccacctttttagtgctccctgggggccaggagcgcttcagcctctaccaaaccagaagtctgatccatgagctgaagaataaagaaattcattttcaaaggaaggcgaactacctgtgccctaaccttggaagctggagaaaagttactgctcacaactgacctgaaaactaaagagtctgtgggtaggagaatcagtcaacttcaggacagctggaaagacatggagccccagctggcagagatgattaagcagttccagagcactgtagagacctgggaccagtgtgaaaagaaaatcaaggagttgaaaagcaggctgcaagttttaaaggcacaaagtgaagatcctcttccagagcttcacgaggacctccataacgaaaaagagctgattaaggaactagaacagtctttggctagctggactcagaacttgaaagaacttcaaactatgaaggcggacttaacccggcacgttctcgtggaagatgtgatggttttgaaggagcaaatagagcatttgcacagacaatgggaggacctctgcttaagggtggccatacgtaaacaggagattgaagacagactcaatacatgggttgtattcaatgaaaaaaataaagagttgtgtgcctggctggtgcagatggaaaacaaagttctacagacagcggacattagtattgaagaaatgattgaaaagttacagaaggactgcatggaagaaataaacttgtttagtgaaaacaagttacagttaaagcagatgggtgaccagttgatcaaggccagcaacaaatcaagagcagctgagatcgatgacaagctcaacaaaattaacgatcgttggcaacatctttttgatgtcatcggatcaagggtgaagaagctgaaggagacctttgcttttattcagcagttggacaaaaacatgagcaaccttcgcacctggttggctcgaattgagtctgagctttccaagcctgttgtttatgatgtctgcgatgatcaagagatccagaagaggctcgctgagcagcaggatctacagcgagatattgaacaacacagcgcaggggtggagtccgtgtttaacatctgtgacgtcctactgcacgactccgatgcctgtgcaaatgagaccgagtgtgactcgatccagcagaccaccaggagcctggacagacgctggaggaacatttgtgccatgtccatggagcggcgcatgaaaatcgaggagacgtggcgcctgtggcagaagtttttagacgactattctcgctttgaggactggctcaagtcagctgagaggacggcagcctgcccaaattcctcagaggtgttgtacacgagtgccaaagaggaactgaagaggtttgaggcctttcagcggcagattcatgagcggctcactcagctggagctcatcaacaagcagtaccggcggctggcccgggagaaccgcacagacacggccagcaggctgaagcagatggtccacgagggcaaccagcgctgggacaaccttcagaggcgggtcacagccgtcctgcggagactcaggcatttcaccaaccagagggaagaatttgagggcaccagggagagcattctggtgtggctcacagagatggacctgcagctgaccaacgtggagcacttctcagagagtgacgccgatgacaagatgcgccaactgaatggcttccaacaggaaattacattaaataccaacaagattgatcagctcattgtgtttggggagcagctgattcagaagagcgagcccctggatgctgtgctgattgaggatgagctggaggaactccaccgctactgccaggaggtgtttggaagggtctcccggttccaccggcggctcacctcctgcactccgggcttggaagatgaaaaggaggcctctgagaatgaaacagacatggaagaccccagagaaatccagactgattcttggcgtaaacggggagagagcgaggaaccgtcatctcctcagtccctgtgtcatctagtggccccagggcacgagcggtctggctgcgagacccctgtcagcgtggactccatccccctggagtgggaccacacaggcgacgtggggggctcctcctctcacgaagaggacgaggagggcccatactacagcgcactgtcagatgtagaaatccctgaaaatcctgaggcatatcttaaaatgaccacaaaaactttgaaagcgtcttctggtaaatccatttcggatggccactcgtggcatgttcccgacagcccttcctgtcccgagcatcactacaagcaaatggaaggtgacaggaatgttccacctgttccccctgcgtccagcaccccttataaaccaccctatggaaagctactattacctccaggcacggatggtggcaaagaaggcccgcgagtcctgaatggcaacccacagcaggaagacgggggactggccggtatcacagagcagcagtcaggtgccttcgacagatgggagatgattcaagcacaggagcttcacaataagctcaaaataaaacaaaatttgcaacagctgaactctgatatcagcgccatcactacttggctgaaaaaaactgaagcagagctggaaatgttaaagatggcaaagcctccctctgatatccaggaaatagaactgagagtgaagagactgcaggagatactgaaagcctttgacacttacaaggcattagtggtctctgtcaacgtgagcagcaaggaatttctgcaaaccgagagccccgaatccacagagctccaaagtagactccgccagctgagcctgctctgggaagcagcacagggcgcagtggacagctggagagggggcttacgacagtcgctcatgcagtgccaggacttccaccagttgagtcaaaatctgctgctgtggttagcgagtgccaagaaccggaggcagaaggctcatgtcaccgatccaaaggcagacccccgggctctcctagagtgtcggagggaactaatgcaactggaaaaggagctggtagaacgtcaacctcaagtggacatgttacaggagatttcaaacagccttctcattaagggacatggagaagactgtattgaagctgaagaaaaggtgcatgttattgagaagaaactcaaacagttacgggagcaagtgtcccaagatttaatggccttgcagggaacccagaacccagcctcacccctgcccagcttcgacgaggtagactcgggggaccagcctcctgcaacatccgtgccagctccccgagcaaagagttcagagcagtgagaactacagaaggcgaggaggagacagagagcagggtccccggcagcacacggccacagcgctccttcctctcaagggtggtccgggcagccctacccctgcagctgctcctcctgctgctgctgctcctggcctgcctgctgccctcctccgaagaagactacagctgcactcaggccaacaactttgcccggtccttttaccccatgctgaggtacaccaatgggccaccccccacatagagggcatagctggccacagtgctacaccacctgcctgattgccaagggtgcccagcacgtggccccagaccaatctgagtgacttagtgttggcaaggtcccgggacctgtgcagacttcttctgggcttacccagcacgggctccctggagcccagggcagctttcagattgtgttcctccccaggagcagggaacctgtgtggcaggtgccccgggtattttggcagaactagttgattagtttagggatctctggaaatgtcagtttcctgaagagccaagcactttgtgaattctggtttgtttgtaaaacagcattattataatgtaggtatggtcaatgagcagtggtgtccatcacatatattatagaagcaagcgagcacattccaccctagaaatggttcagaaactcataggcacccttagctgatggaaacaatcaatcatatttaatacgcttagaatcagttttactccaatcagctggcaattttgagctgccggttatacaccaaaatgttctgttcagtacctagctctgctcttttatattgctttaaatttttaaagaaattatattgcatggatgtggttatttgtgcatattttttaacaatgcccaatctgtatgaataatgtaaacttcgatttttttttaaaaaaattagattttagctggagcttttgactaatgtaaagtaaatgccaaactaccgacttgatagggatgtttttgtaagttaattttctaagactttttcacatccaaagtgatgctttgctttgggttttaactgtttggccacggcgggggtgggggcggggggttggtacagaaacttgaagctgtttgtgatatgtacaactcagatgtttctcattaaaaaacaaaattagccaaaaaaaaaacacatcaaactcaaagcagcacatatgaacgaaaaagaagaacgagagccgacagcagaagataagaaaaagaaacgaagacgagggaccgcacaaacaacgagcgaaacaacaaagccagcatgagagagaaccacagaagcataaaaagagggaaccaagaggacgagaaagcacagaacacgccgggcagacaccagtgcgcagaagaagaacgaggagagggaaaaacagaaaaaaaaagaataatacaccgaagatacn

SEQ ID NO: 373613 - DNA, 1037 bp, Homo sapiens
gatcctggtgctaacggtctgtggtttttactgtcctcctgtgttaaacgatacagctgcactcaggccaacaactttgcccggtccttttaccccatgctgaggtacaccaatgggccaccccccacatagagggcatagctggccacagtgctacaccacctgcctgattgccaagggtgcccagcacgtggccccagaccaatctgagtgacttagtgttggcaaggtcccgggacctgtgcagacttcttctgggcttacccagcacgggctccctggagcccagggcagctttcagattgtgttcctccccaggagcagggaacctgtgtggcaggtgccccgggtattttggcagaactagttgattagtttagggatctctggaaatgtcagtttcctgaagagccaagcactttgtgaattctggtttgtttgtaaaacagcattattataatgtaggtatggtcaatgagcagtggtgtccatcacatatattatagaagcaagcgagcacattccaccctagaaatggttcagaaactcataggcacccttagctgatggaaacaatcaatcatatttaatacgcttagaatcagttttactccaatcagctggcaattttgagctgccggttatacaccaaaatgttctgttcagtacctagctctgctcttttatattgctttaaatttttaaagaaattatattgcatggatgtggttatttgtgcatattttttaacaatgcccaatctgtatgaataatgtaaacttcgatttttttttaaaaaaattagattttagctggagcttttgactaatgtaaagtaaatgccaaactaccgacttgatagggatgtttttgtaagttaattttctaagactttttcacatccaaagtgatgctttgctttgggttttaactgtttggccacggcgggggtgggggcggggggttggtacagaaacttgaagctgtttgtgatatgtacaactcagatgtttctcattaaaaaacaaaattagcca

SEQ ID NO: 373614 - DNA, 4349 bp, Homo sapiens
  misc_feature (7)..(7): n is a, c, g, or t
  misc_feature (15)..(15): n is a, c, g, or t
gcatttnatgccccntttgactctagaccatcccacctttttagtgctccctgggggccaggagcgcttcagcctctaccaaaccagaagtctgatccatgagctgaagaataaagaaattcattttcaaaggaaggcgaactacctgtgccctaaccttggaagctggagaaaagttactgctcacaactgacctgaaaactaaagagtctgtgggtaggagaatcagtcaacttcaggacagctggaaagacatggagccccagctggcagagatgattaagcagttccagagcactgtagagacctgggaccagtgtgaaaagaaaatcaaggagttgaaaagcaggctgcaagttttaaaggcacaaagtgaagatcctcttccagagcttcacgaggacctccataacgaaaaagagctgattaaggaactagaacagtctttggctagctggactcagaacttgaaagaacttcaaactatgaaggcggacttaacccggcacgttctcgtggaagatgtgatggttttgaaggagcaaatagagcatttgcacagacaatgggaggacctctgcttaagggtggccatacgtaaacaggagattgaagacagactcaatacatgggttgtattcaatgaaaaaaataaagagttgtgtgcctggctggtgcagatggaaaacaaagttctacagacagcggacattagtattgaagaaatgattgaaaagttacagaaggactgcatggaagaaataaacttgtttagtgaaaacaagttacagttaaagcagatgggtgaccagttgatcaaggccagcaacaaatcaagagcagctgagatcgatgacaagctcaacaaaattaacgatcgttggcaacatctttttgatgtcatcggatcaagggtgaagaagctgaaggagacctttgcttttattcagcagttggacaaaaacatgagcaaccttcgcacctggttggctcgaattgagtctgagctttccaagcctgttgtttatgatgtctgcgatgatcaagagatccagaagaggctcgctgagcagcaggatctacagcgagatattgaacaacacagcgcaggggtggagtccgtgtttaacatctgtgacgtcctactgcacgactccgatgcctgtgcaaatgagaccgagtgtgactcgatccagcagaccaccaggagcctggacagacgctggaggaacatttgtgccatgtccatggagcggcgcatgaaaatcgaggagacgtggcgcctgtggcagaagtttttagacgactattctcgctttgaggactggctcaagtcagctgagaggacggcagcctgcccaaattcctcagaggtgttgtacacgagtgccaaagaggaactgaagaggtttgaggcctttcagcggcagattcatgagcggctcactcagctggagctcatcaacaagcagtaccggcggctggcccgggagaaccgcacagacacggccagcaggctgaagcagatggtccacgagggcaaccagcgctgggacaaccttcagaggcgggtcacagccgtcctgcggagactcaggcatttcaccaaccagagggaagaatttgagggcaccagggagagcattctggtgtggctcacagagatggacctgcagctgaccaacgtggagcacttctcagagagtgacgccgatgacaagatgcgccaactgaatggcttccaacaggaaattacattaaataccaacaagattgatcagctcattgtgtttggggagcagctgattcagaagagcgagcccctggatgctgtgctgattgaggatgagctggaggaactccaccgctactgccaggaggtgtttggaagggtctcccggttccaccggcggctcacctcctgcactccgggcttggaagatgaaaaggaggcctctgagaatgaaacagacatggaagaccccagagaaatccagactgattcttggcgtaaacggggagagagcgaggaaccgtcatctcctcagtccctgtgtcatctagtggccccagggcacgagcggtctggctgcgagacccctgtcagcgtggactccatccccctggagtgggaccacacaggcgacgtggggggctcctcctctcacgaagaggacgaggagggcccatactacagcgcactgtcagatgtagaaatccctgaaaatcctgaggcatatcttaaaatgaccacaaaaactttgaaagcgtcttctggtaaatccatttcggatggccactcgtggcatgttcccgacagcccttcctgtcccgagcatcactacaagcaaatggaaggtgacaggaatgttccacctgttccccctgcgtccagcaccccttataaaccaccctatggaaagctactattacctccaggcacggatggtggcaaagaaggcccgcgagtcctgaatggcaacccacagcaggaagacgggggactggccggtatcacagagcagcagtcaggtgccttcgacagatgggagatgattcaagcacaggagcttcacaataagctcaaaataaaacaaaatttgcaacagctgaactctgatatcagcgccatcactacttggctgaaaaaaactgaagcagagctggaaatgttaaagatggcaaagcctccctctgatatccaggaaatagaactgagagtgaagagactgcaggagatactgaaagcctttgacacttacaaggcattagtggtctctgtcaacgtgagcagcaaggaatttctgcaaaccgagagccccgaatccacagagctccaaagtagactccgccagctgagcctgctctgggaagcagcacagggcgcagtggacagctggagagggggcttacgacagtcgctcatgcagtgccaggacttccaccagttgagtcaaaatctgctgctgtggttagcgagtgccaagaaccggaggcagaaggctcatgtcaccgatccaaaggcagacccccgggctctcctagagtgtcggagggaactaatgcaactggaaaaggagctggtagaacgtcaacctcaagtggacatgttacaggagatttcaaacagccttctcattaagggacatggagaagactgtattgaagctgaagaaaaggtgcatgttattgagaagaaactcaaacagttacgggagcaagtgtcccaagatttaatggccttgcagggaacccagaacccagcctcacccctgcccagcttcgacgaggtagactcgggggaccagcctcctgcaacatccgtgccagctccccgagcaaagagttcagagcagtgagaactacagaaggcgaggaggagacagagagcagggtccccggcagcacacggccacagcgctccttcctctcaagggtggtccgggcagccctacccctgcagctgctcctcctgctgctgctgctcctggcctgcctgctgccctcctccgaagaagactacagctgcactcaggccaacaactttgcccggtccttttaccccatgctgaggccaccgagttgattagagggtcactgctccatcgttgcttcaggcaaaagagtctccatcttcattccaaatgaggtgagtgtttgagaggccttttctgcccttaagtagagatgcgggacaagtcaaagttgcagtgaaaggaagtgtggtctgcatttcaaagcttaatattgtgcatgtcaatttttgtctcttcctcaggataagggcctttaagctggtttgctccccatctccagggaggccactgcagcttctttcactcaaagctcagtgtattcccaaaactcttttatgaggtagtctgggttttatatcgtctgcaaatctttcattgcccacatgcaagggacattttcacatgactcttggcactaagataacttcaaatgaatgaattgcttttctccccatctgtaaaggatataattctaatcaaactcagaatgattacagaaaatctatccaaataatcgatgcactggataccaggacttttgtgagctgcattttacttgtatacacaggacctgtggtcataaatcaatcacaagtgtgagattagctgactaaagatgaaattgttctttttaagaagatacattaaagcagagcttcttaactcttctgaaattgtactcaagcatttgtgttcaggtgccctttcccaggaagactagccctggttttcatcaaattctcaaaggactctctaaccccacaataagaattcagaatagaatgtagacactacttagcctaattactgtaa

SEQ ID NO: 373615 - DNA, 3443 bp, Homo sapiens
  misc_feature (7)..(7): n is a, c, g, or t
  misc_feature (15)..(15): n is a, c, g, or t
gcatttnatgccccntttgactctagaccatcccacctttttagtgctccctgggggccaggagcgcttcagcctctaccaaaccagaagtctgatccatgagctgaagaataaagaaattcattttcaaaggaaggcgaactacctgtgccctaaccttggaagctggagaaaagttactgctcacaactgacctgaaaactaaagagtctgtgggtaggagaatcagtcaacttcaggacagctggaaagacatggagccccagctggcagagatgattaagcagttccagagcactgtagagacctgggaccagtgtgaaaagaaaatcaaggagttgaaaagcaggctgcaagttttaaaggcacaaagtgaagatcctcttccagagcttcacgaggacctccataacgaaaaagagctgattaaggaactagaacagtctttggctagctggactcagaacttgaaagaacttcaaactatgaaggcggacttaacccggcacgttctcgtggaagatgtgatggttttgaaggagcaaatagagcatttgcacagacaatgggaggacctctgcttaagggtggccatacgtaaacaggagattgaagacagactcaatacatgggttgtattcaatgaaaaaaataaagagttgtgtgcctggctggtgcagatggaaaacaaagttctacagacagcggacattagtattgaagaaatgattgaaaagttacagaaggactgcatggaagaaataaacttgtttagtgaaaacaagttacagttaaagcagatgggtgaccagttgatcaaggccagcaacaaatcaagagcagctgagatcgatgacaagctcaacaaaattaacgatcgttggcaacatctttttgatgtcatcggatcaagggtgaagaagctgaaggagacctttgcttttattcagcagttggacaaaaacatgagcaaccttcgcacctggttggctcgaattgagtctgagctttccaagcctgttgtttatgatgtctgcgatgatcaagagatccagaagaggctcgctgagcagcaggatctacagcgagatattgaacaacacagcgcaggggtggagtccgtgtttaacatctgtgacgtcctactgcacgactccgatgcctgtgcaaatgagaccgagtgtgactcgatccagcagaccaccaggagcctggacagacgctggaggaacatttgtgccatgtccatggagcggcgcatgaaaatcgaggagacgtggcgcctgtggcagaagtttttagacgactattctcgctttgaggactggctcaagtcagctgagaggacggcagcctgcccaaattcctcagaggtgttgtacacgagtgccaaagaggaactgaagaggtttgaggcctttcagcggcagattcatgagcggctcactcagctggagctcatcaacaagcagtaccggcggctggcccgggagaaccgcacagacacggccagcaggctgaagcagatggtccacgagggcaaccagcgctgggacaaccttcagaggcgggtcacagccgtcctgcggagactcaggcatttcaccaaccagagggaagaatttgagggcaccagggagagcattctggtgtggctcacagagatggacctgcagctgaccaacgtggagcacttctcagagagtgacgccgatgacaagatgcgccaactgaatggcttccaacaggaaattacattaaataccaacaagattgatcagctcattgtgtttggggagcagctgattcagaagagcgagcccctggatgctgtgctgattgaggatgagctggaggaactccaccgctactgccaggaggtgtttggaagggtctcccggttccaccggcggctcacctcctgcactccgggcttggaagatgaaaaggaggcctctgagaatgaaacagacatggaagaccccagagaaatccagactgattcttggcgtaaacggggagagagcgaggaaccgtcatctcctcagtccctgtgtcatctagtggccccagggcacgagcggtctggctgcgagacccctgtcagcgtggactccatccccctggagtgggaccacacaggcgacgtggggggctcctcctctcacgaagaggacgaggagggcccatactacagcgcactgtcagatgtagaaatccctgaaaatcctgaggcatatcttaaaatgaccacaaaaactttgaaagcgtcttctggtaaatccatttcggatggccactcgtggcatgttcccgacagcccttcctgtcccgagcatcactacaagcaaatggaaggtgacaggaatgttccacctgttccccctgcgtccagcaccccttataaaccaccctatggaaagctactattacctccaggcacggatggtggcaaagaaggcccgcgagtcctgaatggcaacccacagcaggaagacgggggactggccggtatcacagagcagcagtcaggtgccttcgacagatgggagatgattcaagcacaggagcttcacaataagctcaaaataaaacaaaatttgcaacagctgaactctgatatcagcgccatcactacttggctgaaaaaaactgaagcagagctggaaatgttaaagatggcaaagcctccctctgatatccaggaaatagaactgagagtgaagagactgcaggagatactgaaagcctttgacacttacaaggcattagtggtctctgtcaacgtgagcagcaaggaatttctgcaaaccgagagccccgaatccacagagctccaaagtagactccgccagctgagcctgctctgggaagcagcacagggcgcagtggacagctggagagggggcttacgacagtcgctcatgcagtgccaggacttccaccagttgagtcaaaatctgctgctgtggttagcgagtgccaagaaccggaggcagaaggctcatgtcaccgatccaaaggcagacccccgggctctcctagagtgtcggagggaactaatgcaactggaaaaggagctggtagaacgtcaacctcaagtggacatgttacaggagatttcaaacagccttctcattaagggacatggagaagactgtattgaagctgaagaaaaggtgcatgttattgagaagaaactcaaacagttacgggagcaagtgtcccaagatttaatggccttgcagggaacccagaacccagcctcacccctgcccagcttcgacgaggtagactcgggggaccagcctcctgcaacatccgtgccagctccccgagcaaagttcagagcagtaagaactgtattgtatgtttctgcaggattatagagccttagaaacaaagaatgtatgtgtaccacgtgtgttgaggtaatctgaggg

SEQ ID NO: 373616 - DNA, 2634 bp, Homo sapiens
  misc_feature (7)..(7): n is a, c, g, or t
  misc_feature (15)..(15): n is a, c, g, or t
  misc_feature (2493)..(2493): n is a, c, g, or t
gcatttnatgccccntttgactctagaccatcccacctttttagtgctccctgggggccaggagcgcttcagcctctaccaaaccagaagtctgatccatgagctgaagaataaagaaattcattttcaaaggaaggcgaactacctgtgccctaaccttggaagctggagaaaagttactgctcacaactgacctgaaaactaaagagtctgtgggtaggagaatcagtcaacttcaggacagctggaaagacatggagccccagctggcagagatgattaagcagttccagagcactgtagagacctgggaccagtgtgaaaagaaaatcaaggagttgaaaagcaggctgcaagttttaaaggcacaaagtgaagatcctcttccagagcttcacgaggacctccataacgaaaaagagctgattaaggaactagaacagtctttggctagctggactcagaacttgaaagaacttcaaactatgaaggcggacttaacccggcacgttctcgtggaagatgtgatggttttgaaggagcaaatagagcatttgcacagacaatgggaggacctctgcttaagggtggccatacgtaaacaggagattgaagacagactcaatacatgggttgtattcaatgaaaaaaataaagagttgtgtgcctggctggtgcagatggaaaacaaagttctacagacagcggacattagtattgaagaaatgattgaaaagttacagaaggactgcatggaagaaataaacttgtttagtgaaaacaagttacagttaaagcagatgggtgaccagttgatcaaggccagcaacaaatcaagagcagctgagatcgatgacaagctcaacaaaattaacgatcgttggcaacatctttttgatgtcatcggatcaagggtgaagaagctgaaggagacctttgcttttattcagcagttggacaaaaacatgagcaaccttcgcacctggttggctcgaattgagtctgagctttccaagcctgttgtttatgatgtctgcgatgatcaagagatccagaagaggctcgctgagcagcaggatctacagcgagatattgaacaacacagcgcaggggtggagtccgtgtttaacatctgtgacgtcctactgcacgactccgatgcctgtgcaaatgagaccgagtgtgactcgatccagcagaccaccaggagcctggacagacgctggaggaacatttgtgccatgtccatggagcggcgcatgaaaatcgaggagacgtggcgcctgtggcagaagtttttagacgactattctcgctttgaggactggctcaagtcagctgagaggacggcagcctgcccaaattcctcagaggtgttgtacacgagtgccaaagaggaactgaagaggtttgaggcctttcagcggcagattcatgagcggctcactcagctggagctcatcaacaagcagtaccggcggctggcccgggagaaccgcacagacacggccagcaggctgaagcagatggtccacgagggcaaccagcgctgggacaaccttcagaggcgggtcacagccgtcctgcggagactcaggcatttcaccaaccagagggaagaatttgagggcaccagggagagcattctggtgtggctcacagagatggacctgcagctgaccaacgtggagcacttctcagagagtgacgccgatgacaagatgcgccaactgaatggcttccaacaggaaattacattaaataccaacaagattgatcagctcattgtgtttggggagcagctgattcagaagagcgagcccctggatgctgtgctgattgaggatgagctggaggaactccaccgctactgccaggaggtgtttggaagggtctcccggttccaccggcggctcacctcctgcactccgggcttggaagatgaaaaggaggcctctgagaatgaaacagacatggaagaccccagagaaatccagactgattcttggcgtaaacggggagagagcgaggaaccgtcatctcctcagtccctgtgtcatctagtggccccagggcacgagcggtctggctgcgagacccctgtcagcgtggactccatccccctggagtgggaccacacaggcgacgtggggggctcctcctctcacgaagaggacgaggagggcccatactacagcgcactgtcagatgtagaaatccctgaaaatcctgaggcatatcttaaaatgaccacaaaaactttgaaagcgtcttctggtaaatccatttcggatggccactcgtggcatgttcccgacagcccttcctgtcccgagcatcactacaagcaaatggaaggtgacaggaatgttccacctgttccccctgcgaacctatgatcataggttcgcagggggagtggtaaggagaggatggtttgggctccttcctctttttagaaatatacaagcagaaatctcattctctcaagtngttataaaatgtgcaaaatacaagcctcctttgcccagaggcaccatttacatctggtattcacctttgctaagagatagagatctatatatactccacgtgctcacgcacgcgtgcactcgcagccaagctcacacaatt

SEQ ID NO: 373617 - DNA, 724 bp, Homo sapiens
  misc_feature (7)..(7): n is a, c, g, or t
  misc_feature (15)..(15): n is a, c, g, or t
gcatttnatgccccntttgactctagaccatcccacctttttagtgctccctgggggccaggagcgcttcagcctctaccaaaccagaagtctgatccatgagctgaagaataaagaaattcattttcaaaggaaggcgaactacctgtgccctaaccttggaagctggagaaaagttactgctcacaactgacctgaaaactaaagagtctgtgggtaggagaatcagtcaacttcaggacagctggaaagacatggagccccagctggcagagatgattaagcagttccagagcactgtagagacctgggaccagtgtgaaaagaaaatcaaggagttgaaaagcaggctgcaagttttaaaggcacaaagtgaagatcctcttccagagcttcacgaggacctccataacgaaaaagagctgattaaggaactagaacagtctttggctagctggactcagaacttgaaagaacttcaaactatgaaggcggacttaacccggcacgttctcgtggaagatgtgatggttttgaaggagcaaatagagcatttgcacagacaatgggaggacctctgcttaagggtaagtcagctcactgcagggcacggctgtttgggagtggattgaaatgtctctgaaggccagacaaagtagaaaggagcttaatttcattgaaccggaggcccttttcagtgggacccctggcccggccgctgctc

SEQ ID NO: 373618 - DNA, 423 bp, Homo sapiens
ttttttaaccaccctgacccctaattagctggaggcagagaaatctgttgcattattgctttttttaattggcgattttttaattccaggtgccttcgacagatgggagatgattcaagcacaggagcttcacaataagctcaaaataaaacaaaatttgcaacagctgaactctgatatcagcgccatcactacttggctgaaaaaaactgaagcagagctggaaatgttaaagatggcaaagcctccctctgatatccaggaaatagaactgagagtgaagagactgcaggtgagttagaggtgtggtggggaagagggattcagaatgtgcatgtgaacgcattgctatgctggacgagcagatcccatgtattcgtggcataggcgcagcttgcagatggtgtatgtagaggtcactct

SEQ ID NO: 373619 - DNA, 444 bp, Homo sapiens
aagccctaccttcatagtggcacttttattcgcggcctcctggcactgtgctgagtgtcttccttctttcctcttcctcattttggggccctggcatttagtttaaagctggtcctcgtattcagtgggtaaggccagaaaagcaaatgactgtgatggattggaagcagtaagccatgttcctggcacaccctcttccagggctctaagacacggccgcgctctgatgtgttgttttttaaggagacttccaccagttgagtcaaaatctgctgctgtggttagcgagtgccaagaaccggaggcagaaggctcatgtcaccgatccaaaggcagacccccgggctctcctagagtgtcggagggaactaatggtaagtttcctcccaagggctctgtactgccaccagcctctgtcagccccagagaggcagcacactcagg

SEQ ID NO: 373620 - DNA, 1552 bp, Homo sapiens
  misc_feature (497)..(497): n is a, c, g, or t
cgtgtctacctctgccttctgtggacaccatgcgccttggtccttgtgtcatggtgtatttacactgccgtactcacccataactgcgtgctccttacaaaaccccatccaagccagagccgtctcgatgccaaccccctctcctcccttcaggcctgtgcagagggaatttttcatggtgcctgttttgatgatttttttctccatctaactgaagtcctttggcatgggccaagctttcttcatggtggcttggtttggaactgtttccttgctttactgggatcccctggtggaaaggggtggggggttggggcggtaaagggtgctgatgatttgccacaggagggaaaaaaccttcctttccttgatttgcagctctaatcctcatccttagccccatccctatctgccatggtgggtcggggagagccctgaggagccttttggttcccaagtccatcttgatgttcactcttcccctcactcctgagagnccttctgccatcttggtccccagacccggccttgccactcagtgtccctaccactcgagaccctggctccaaaacgccactcatcccacagcaaatcatgttggtcgtgctccgttgtgtacccatctagtgaaggcacagtgttgctgagttgcatgactcatctcattctcttctgggacatactgacattttgcaaacatgcatgctttgcaaggaaagctgcagaactcattttcatactgtaacctgatgccatgtcacccgtgacccgttcagtaggagagaatagactgtcgcttgctgtctttcgtttcaggtaaatccatttcggatggccactcgtggcatgttcccgacagcccttcctgtcccgagcatcactacaagcaaatggaaggtgacaggaatgttccacctgttccccctgcgtccagcaccccttataaaccaccctatgtaagtcttaacttcactgggagtacagcctatgtctgtgagtcatacttacatttgcaagagagagagattttggtgtaaactgcgtgtattcattccccaggcatattttgagttggttttcttatggtgacagtgtctctgttgagctgtccatacttcattagaaccccggcaaaaccgattagacttagagataggttctggccaaaaaccatctttctgtatgttggtgtggtgtaacagtcattattactgtcgagtcaggtgtctgtgcaaatagtgagcaagcaaggtgctggctttcctgactgctcctgagctctcaagcctttgtctttttgttgttgttgtggagacggagtctcattctgtcacccaggctggagtgcactggcacgatcttgacttactgcaatctctgcctcctgggttcaagtgattttcctgcctcagcctcccaagtagctgcgattacaggtgtgcaccaccatgcctggctaatttttgtatttttagtagagatgggggtttcaccatgttggccaggctggtcttgaactcctgacctcaagtgatccacctgcctcagcctc

SEQ ID NO: 373621 - DNA, 3548 bp, Homo sapiens
gtttatttcttccatgcagtccttctgtaacttttcaatcatttcttcaatactaatgtccgctgtctgtagaactttgtttaccatctgcaccagccaggcacacaactctttatttttttcattgaatacaacccatgtattgagtctgtcttcaatctcctgtttacgtatggccacccttaagcagaggtcctccgatgcctgtgcaaatgagaccgagtgtgactcgatccagcagaccaccaggagcctggacagacgctggaggaacatttgtgccatgtccatggagcggcgcatgaaaatcgaggagacgtggcgcctgtggcagaagtttttagacgactattctcgctttgaggactggctcaagtcagctgagaggacggcagcctgcccaaattcctcagaggtgttgtacacgagtgccaaagaggaactgaagaggtttgaggcctttcagcggcagattcatgagcggctcactcagctggagctcatcaacaagcagtaccggcggctggcccgggagaaccgcacagacacggccagcaggctgaagcagatggtccacgagggcaaccagcgctgggacaaccttcagaggcgggtcacagccgtcctgcggagactcaggcatttcaccaaccagagggaagaatttgagggcaccagggagagcattctggtgtggctcacagagatggacctgcagctgaccaacgtggagcacttctcagagagtgacgccgatgacaagatgcgccaactgaatggcttccaacaggaaattacattaaataccaacaagattgatcagctcattgtgtttggggagcagctgattcagaagagcgagcccctggatgctgtgctgattgaggatgagctggaggaactccaccgctactgccaggaggtgtttggaagggtctcccggttccaccggcggctcacctcctgcactccgggcttggaagatgaaaaggaggcctctgagaatgaaacagacatggaagaccccagagaaatccagactgattcttggcgtaaacggggagagagcgaggaaccgtcatctcctcagtccctgtgtcatctagtggccccagggcacgagcggtctggctgcgagacccctgtcagcgtggactccatccccctggagtgggaccacacaggcgacgtggggggctcctcctctcacgaagaggacgaggagggcccatactacagcgcactgtcagatgtagaaatccctgaaaatcctgaggcatatcttaaaatgaccacaaaaactttgaaagcgtcttctggtaaatccatttcggatggccactcgtggcatgttcccgacagcccttcctgtcccgagcatcactacaagcaaatggaaggtgacaggaatgttccacctgttccccctgcgtccagcaccccttataaaccaccctatggaaagctactattacctccaggcacggatggtggcaaagaaggcccgcgagtcctgaatggcaacccacagcaggaagacgggggactggccggtatcacagagcagcagtcaggtgccttcgacagatgggagatgattcaagcacaggagcttcacaataagctcaaaataaaacaaaatttgcaacagctgaactctgatatcagcgccatcactacttggctgaaaaaaactgaagcagagctggaaatgttaaagatggcaaagcctccctctgatatccaggaaatagaactgagagtgaagagactgcaggagatactgaaagcctttgacacttacaaggcattagtggtctctgtcaacgtgagcagcaaggaatttctgcaaaccgagagccccgaatccacagagctccaaagtagactccgccagctgagcctgctctgggaagcagcacagggcgcagtggacagctggagagggggcttacgacagtcgctcatgcagtgccaggacttccaccagttgagtcaaaatctgctgctgtggttagcgagtgccaagaaccggaggcagaaggctcatgtcaccgatccaaaggcagacccccgggctctcctagagtgtcggagggaactaatgcaactggaaaaggagctggtagaacgtcaacctcaagtggacatgttacaggagatttcaaacagccttctcattaagggacatggagaagactgtattgaagctgaagaaaaggtgcatgttattgagaagaaactcaaacagttacgggagcaagtgtcccaagatttaatggccttgcagggaacccagaacccagcctcacccctgcccagcttcgacgaggtagactcgggggaccagcctcctgcaacatccgtgccagctccccgagcaaagagttcagagcagtgagaactacagaaggcgaggaggagacagagagcagggtccccggcagcacacggccacagcgctccttcctctcaagggtggtccgggcagccctacccctgcagctgctcctcctgctgctgctgctcctggcctgcctgctgccctcctccgaagaagactacagctgcactcaggccaacaactttgcccggtccttttaccccatgctgaggtacaccaatgggccaccccccacatagagggcatagctggccacagtgctacaccacctgcctgattgccaagggtgcccagcacgtggccccagaccaatctgagtgacttagtgttggcaaggtcccgggacctgtgcagacttcttctgggcttacccagcacgggctccctggagcccagggcagctttcagattgtgttcctccccaggagcagggaacctgtgtggcaggtgccccgggtattttggcagaactagttgattagtttagggatctctggaaatgtcagtttcctgaagagccaagcactttgtgaattctggtttgtttgtaaaacagcattattataatgtaggtatggtcaatgagcagtggtgtccatcacatatattatagaagcaagcgagcacattccaccctagaaatggttcagaaactcataggcacccttagctgatggaaacaatcaatcatatttaatacgcttagaatcagttttactccaatcagctggcaattttgagctgccggttatacaccaaaatgttctgttcagtacctagctctgctcttttatattgctttaaatttttaaagaaattatattgcatggatgtggttatttgtgcatattttttaacaatgcccaatctgtatgaataatgtaaacttcgatttttttttaaaaaaattagattttagctggagcttttgactaatgtaaagtaaatgccaaactaccgacttgatagggatgtttttgtaagttaattttctaagactttttcacatccaaagtgatgctttgctttgggttttaactgtttggccacggcgggggtgggggcggggggttggtacagaaacttgaagctgtttgtgatatgtacaactcagatgtttctcattaaaaaacaaaattagcca

SEQ ID NO: 373622 - DNA, 2626 bp, Homo sapiens
tgcagaagcctatgagttgattaattctaacaactggatactgtggtttagggcttggaagatgaaaaggaggcctctgagaatgaaacagacatggaagaccccagagaaatccagactgattcttggcgtaaacggggagagagcgaggaaccgtcatctcctcagtccctgtgtcatctagtggccccagggcacgagcggtctggctgcgagacccctgtcagcgtggactccatccccctggagtgggaccacacaggcgacgtggggggctcctcctctcacgaagaggacgaggagggcccatactacagcgcactgtcagatgtagaaatccctgaaaatcctgaggcatatcttaaaatgaccacaaaaactttgaaagcgtcttctggtaaatccatttcggatggccactcgtggcatgttcccgacagcccttcctgtcccgagcatcactacaagcaaatggaaggtgacaggaatgttccacctgttccccctgcgtccagcaccccttataaaccaccctatggaaagctactattacctccaggcacggatggtggcaaagaaggcccgcgagtcctgaatggcaacccacagcaggaagacgggggactggccggtatcacagagcagcagtcaggtgccttcgacagatgggagatgattcaagcacaggagcttcacaataagctcaaaataaaacaaaatttgcaacagctgaactctgatatcagcgccatcactacttggctgaaaaaaactgaagcagagctggaaatgttaaagatggcaaagcctccctctgatatccaggaaatagaactgagagtgaagagactgcaggagatactgaaagcctttgacacttacaaggcattagtggtctctgtcaacgtgagcagcaaggaatttctgcaaaccgagagccccgaatccacagagctccaaagtagactccgccagctgagcctgctctgggaagcagcacagggcgcagtggacagctggagagggggcttacgacagtcgctcatgcagtgccaggacttccaccagttgagtcaaaatctgctgctgtggttagcgagtgccaagaaccggaggcagaaggctcatgtcaccgatccaaaggcagacccccgggctctcctagagtgtcggagggaactaatgcaactggaaaaggagctggtagaacgtcaacctcaagtggacatgttacaggagatttcaaacagccttctcattaagggacatggagaagactgtattgaagctgaagaaaaggtgcatgttattgagaagaaactcaaacagttacgggagcaagtgtcccaagatttaatggccttgcagggaacccagaacccagcctcacccctgcccagcttcgacgaggtagactcgggggaccagcctcctgcaacatccgtgccagctccccgagcaaagagttcagagcagtgagaactacagaaggcgaggaggagacagagagcagggtccccggcagcacacggccacagcgctccttcctctcaagggtggtccgggcagccctacccctgcagctgctcctcctgctgctgctgctcctggcctgcctgctgccctcctccgaagaagactacagctgcactcaggccaacaactttgcccggtccttttaccccatgctgaggtacaccaatgggccaccccccacatagagggcatagctggccacagtgctacaccacctgcctgattgccaagggtgcccagcacgtggccccagaccaatctgagtgacttagtgttggcaaggtcccgggacctgtgcagacttcttctgggcttacccagcacgggctccctggagcccagggcagctttcagattgtgttcctccccaggagcagggaacctgtgtggcaggtgccccgggtattttggcagaactagttgattagtttagggatctctggaaatgtcagtttcctgaagagccaagcactttgtgaattctggtttgtttgtaaaacagcattattataatgtaggtatggtcaatgagcagtggtgtccatcacatatattatagaagcaagcgagcacattccaccctagaaatggttcagaaactcataggcacccttagctgatggaaacaatcaatcatatttaatacgcttagaatcagttttactccaatcagctggcaattttgagctgccggttatacaccaaaatgttctgttcagtacctagctctgctcttttatattgctttaaatttttaaagaaattatattgcatggatgtggttatttgtgcatattttttaacaatgcccaatctgtatgaataatgtaaacttcgatttttttttaaaaaaattagattttagctggagcttttgactaatgtaaagtaaatgccaaactaccgacttgatagggatgtttttgtaagttaattttctaagactttttcacatccaaagtgatgctttgctttgggttttaactgtttggccacggcgggggtgggggcggggggttggtacagaaacttgaagctgtttgtgatatgtacaactcagatgtttctcattaaaaaacaaaattagcca

SEQ ID NO: 373623 - DNA, 2656 bp, Homo sapiens
  misc_feature (7)..(7): n is a, c, g, or t
  misc_feature (15)..(15): n is a, c, g, or t
gcatttnatgccccntttgactctagaccatcccacctttttagtgctccctgggggccaggagcgcttcagcctctaccaaaccagaagtctgatccatgagctgaagaataaagaaattcattttcaaaggaaggcgaactacctgtgccctaaccttggaagctggagaaaagttactgctcacaactgacctgaaaactaaagagtctgtgggtaggagaatcagtcaacttcaggacagctggaaagacatggagccccagctggcagagatgattaagcagttccagagcactgtagagacctgggaccagtgtgaaaagaaaatcaaggagttgaaaagcaggctgcaagttttaaaggcacaaagtgaagatcctcttccagagcttcacgaggacctccataacgaaaaagagctgattaaggaactagaacagtctttggctagctggactcagaacttgaaagaacttcaaactatgaaggcggacttaacccggcacgttctcgtggaagatgtgatggttttgaaggagcaaatagagcatttgcacagacaatgggaggacctctgcttaagggtggccatacgtaaacaggagattgaagacagactcaatacatgggttgtattcaatgaaaaaaataaagagttgtgtgcctggctggtgcagatggaaaacaaagttctacagacagcggacattagtattgaagaaatgattgaaaagttacagaaggactgcatggaagaaataaacttgtttagtgaaaacaagttacagttaaagcagatgggtgaccagttgatcaaggccagcaacaaatcaagagcagctgagatcgatgacaagctcaacaaaattaacgatcgttggcaacatctttttgatgtcatcggatcaagggtgaagaagctgaaggagacctttgcttttattcagcagttggacaaaaacatgagcaaccttcgcacctggttggctcgaattgagtctgagctttccaagcctgttgtttatgatgtctgcgatgatcaagagatccagaagaggctcgctgagcagcaggatctacagcgagatattgaacaacacagcgcaggggtggagtccgtgtttaacatctgtgacgtcctactgcacgactccgatgcctgtgcaaatgagaccgagtgtgactcgatccagcagaccaccaggagcctggacagacgctggaggaacatttgtgccatgtccatggagcggcgcatgaaaatcgaggagacgtggcgcctgtggcagaagtttttagacgactattctcgctttgaggactggctcaagtcagctgagaggacggcagcctgcccaaattcctcagaggtgttgtacacgagtgccaaagaggaactgaagaggtttgaggcctttcagcggcagattcatgagcggctcactcagctggagctcatcaacaagcagtaccggcggctggcccgggagaaccgcacagacacggccagcaggctgaagcagatggtccacgagggcaaccagcgctgggacaaccttcagaggcgggtcacagccgtcctgcggagactcaggcatttcaccaaccagagggaagaatttgagggcaccagggagagcattctggtgtggctcacagagatggactacagctgcactcaggccaacaactttgcccggtccttttaccccatgctgaggtacaccaatgggccaccccccacatagagggcatagctggccacagtgctacaccacctgcctgattgccaagggtgcccagcacgtggccccagaccaatctgagtgacttagtgttggcaaggtcccgggacctgtgcagacttcttctgggcttacccagcacgggctccctggagcccagggcagctttcagattgtgttcctccccaggagcagggaacctgtgtggcaggtgccccgggtattttggcagaactagttgattagtttagggatctctggaaatgtcagtttcctgaagagccaagcactttgtgaattctggtttgtttgtaaaacagcattattataatgtaggtatggtcaatgagcagtggtgtccatcacatatattatagaagcaagcgagcacattccaccctagaaatggttcagaaactcataggcacccttagctgatggaaacaatcaatcatatttaatacgcttagaatcagttttactccaatcagctggcaattttgagctgccggttatacaccaaaatgttctgttcagtacctagctctgctcttttatattgctttaaatttttaaagaaattatattgcatggatgtggttatttgtgcatattttttaacaatgcccaatctgtatgaataatgtaaacttcgatttttttttaaaaaaattagattttagctggagcttttgactaatgtaaagtaaatgccaaactaccgacttgatagggatgtttttgtaagttaattttctaagactttttcacatccaaagtgatgctttgctttgggttttaactgtttggccacggcgggggtgggggcggggggttggtacagaaacttgaagctgtttgtgatatgtacaactcagatgtttctcattaaaaaacaaaattagcca

SEQ ID NO: 373624 - DNA, 4529 bp, Homo sapiens
  misc_feature (7)..(7): n is a, c, g, or t
  misc_feature (15)..(15): n is a, c, g, or t
gcatttnatgccccntttgactctagaccatcccacctttttagtgctccctgggggccaggagcgcttcagcctctaccaaaccagaagtctgatccatgagctgaagaataaagaaattcattttcaaaggaaggcgaactacctgtgccctaaccttggaagctggagaaaagttactgctcacaactgacctgaaaactaaagagtctgtgggtaggagaatcagtcaacttcaggacagctggaaagacatggagccccagctggcagagatgattaagcagttccagagcactgtagagacctgggaccagtgtgaaaagaaaatcaaggagttgaaaagcaggctgcaagttttaaaggcacaaagtgaagatcctcttccagagcttcacgaggacctccataacgaaaaagagctgattaaggaactagaacagtctttggctagctggactcagaacttgaaagaacttcaaactatgaaggcggacttaacccggcacgttctcgtggaagatgtgatggttttgaaggagcaaatagagcatttgcacagacaatgggaggacctctgcttaagggtggccatacgtaaacaggagattgaagacagactcaatacatgggttgtattcaatgaaaaaaataaagagttgtgtgcctggctggtgcagatggaaaacaaagttctacagacagcggacattagtattgaagaaatgattgaaaagttacagaaggactgcatggaagaaataaacttgtttagtgaaaacaagttacagttaaagcagatgggtgaccagttgatcaaggccagcaacaaatcaagagcagctgagatcgatgacaagctcaacaaaattaacgatcgttggcaacatctttttgatgtcatcggatcaagggtgaagaagctgaaggagacctttgcttttattcagcagttggacaaaaacatgagcaaccttcgcacctggttggctcgaattgagtctgagctttccaagcctgttgtttatgatgtctgcgatgatcaagagatccagaagaggctcgctgagcagcaggatctacagcgagatattgaacaacacagcgcaggggtggagtccgtgtttaacatctgtgacgtcctactgcacgactccgatgcctgtgcaaatgagaccgagtgtgactcgatccagcagaccaccaggagcctggacagacgctggaggaacatttgtgccatgtccatggagcggcgcatgaaaatcgaggagacgtggcgcctgtggcagaagtttttagacgactattctcgctttgaggactggctcaagtcagctgagaggacggcagcctgcccaaattcctcagaggtgttgtacacgagtgccaaagaggaactgaagaggtttgaggcctttcagcggcagattcatgagcggctcactcagctggagctcatcaacaagcagtaccggcggctggcccgggagaaccgcacagacacggccagcaggctgaagcagatggtccacgagggcaaccagcgctgggacaaccttcagaggcgggtcacagccgtcctgcggagactcaggcatttcaccaaccagagggaagaatttgagggcaccagggagagcattctggtgtggctcacagagatggacctgcagctgaccaacgtggagcacttctcagagagtgacgccgatgacaagatgcgccaactgaatggcttccaacaggaaattacattaaataccaacaagattgatcagctcattgtgtttggggagcagctgattcagaagagcgagcccctggatgctgtgctgattgaggatgagctggaggaactccaccgctactgccaggaggtgtttggaagggtctcccggttccaccggcggctcacctcctgcactccgggcttggaagatgaaaaggaggcctctgagaatgaaacagacatggaagaccccagagaaatccagactgattcttggcgtaaacggggagagagcgaggaaccgtcatctcctcagtccctgtgtcatctagtggccccagggcacgagcggtctggctgcgagacccctgtcagcgtggactccatccccctggagtgggaccacacaggcgacgtggggggctcctcctctcacgaagaggacgaggagggcccatactacagcgcactgtcagatgtagaaatccctgaaaatcctgaggcatatcttaaaatgaccacaaaaactttgaaagcgtcttctggtaaatccatttcggatggccactcgtggcatgttcccgacagcccttcctgtcccgagcatcactacaagcaaatggaaggtgacaggaatgttccacctgttccccctgcgtccagcaccccttataaaccaccctatggaaagctactattacctccaggcacggatggtggcaaagaaggcccgcgagtcctgaatggcaacccacagcaggaagacgggggactggccggtatcacagagcagcagtcaggtgccttcgacagatgggagatgattcaagcacaggagcttcacaataagctcaaaataaaacaaaatttgcaacagctgaactctgatatcagcgccatcactacttggctgaaaaaaactgaagcagagctggaaatgttaaagatggcaaagcctccctctgatatccaggaaatagaactgagagtgaagagactgcaggagatactgaaagcctttgacacttacaaggcattagtggtctctgtcaacgtgagcagcaaggaatttctgcaaaccgagagccccgaatccacagagctccaaagtagactccgccagctgagcctgctctgggaagcagcacagggcgcagtggacagctggagagggggcttacgacagtcgctcatgcagtgccaggacttccaccagttgagtcaaaatctgctgctgtggttagcgagtgccaagaaccggaggcagaaggctcatgtcaccgatccaaaggcagacccccgggctctcctagagtgtcggagggaactaatgcaactggaaaaggagctggtagaacgtcaacctcaagtggacatgttacaggagatttcaaacagccttctcattaagggacatggagaagactgtattgaagctgaagaaaaggtgcatgttattgagaagaaactcaaacagttacgggagcaagtgtcccaagatttaatggccttgcagggaacccagaacccagcctcacccctgcccagcttcgacgaggtagactcgggggaccagcctcctgcaacatccgtgccagctccccgagcaaagagttcagagcagtgagaactacagaaggcgaggaggagacagagagcagggtccccggcagcacacggccacagcgctccttcctctcaagggtggtccgggcagccctacccctgcagctgctcctcctgctgctgctgctcctggcctgcctgctgccctcctccgaagaagactacagctgcactcaggccaacaactttgcccggtccttttaccccatgctgaggtacaccaatgggccaccccccacatagagggcatagctggccacagtgctacaccacctgcctgattgccaagggtgcccagcacgtggccccagaccaatctgagtgacttagtgttggcaaggtcccgggacctgtgcagacttcttctgggcttacccagcacgggctccctggagcccagggcagctttcagattgtgttcctccccaggagcagggaacctgtgtggcaggtgccccgggtattttggcagaactagttgattagtttagggatctctggaaatgtcagtttcctgaagagccaagcactttgtgaattctggtttgtttgtaaaacagcattattataatgtaggtatggtcaatgagcagtggtgtccatcacatatattatagaagcaagcgagcacattccaccctagaaatggttcagaaactcataggcacccttagctgatggaaacaatcaatcatatttaatacgcttagaatcagttttactccaatcagctggcaattttgagctgccggttatacaccaaaatgttctgttcagtacctagctctgctcttttatattgctttaaatttttaaagaaattatattgcatggatgtggttatttgtgcatattttttaacaatgcccaatctgtatgaataatgtaaacttcgatttttttttaaaaaaattagattttagctggagcttttgactaatgtaaagtaaatgccaaactaccgacttgatagggatgtttttgtaagttaattttctaagactttttcacatccaaagtgatgctttgctttgggttttaactgtttggccacggcgggggtgggggcggggggttggtacagaaacttgaagctgtttgtgatatgtacaactcagatgtttctcattaaaaaacaaaattagccagacttctgttgtactgaattctg

SEQ ID NO: 373625 - DNA, 4388 bp, Homo sapiens
  misc_feature (7)..(7): n is a, c, g, or t
  misc_feature (15)..(15): n is a, c, g, or t
gcatttnatgccccntttgactctagaccatcccacctttttagtgctccctgggggccaggagcgcttcagcctctaccaaaccagaagtctgatccatgagctgaagaataaagaaattcattttcaaaggaaggcgaactacctgtgccctaaccttggaagctggagaaaagttactgctcacaactgacctgaaaactaaagagtctgtgggtaggagaatcagtcaacttcaggacagctggaaagacatggagccccagctggcagagatgattaagcagttccagagcactgtagagacctgggaccagtgtgaaaagaaaatcaaggagttgaaaagcaggctgcaagttttaaaggcacaaagtgaagatcctcttccagagcttcacgaggacctccataacgaaaaagagctgattaaggaactagaacagtctttggctagctggactcagaacttgaaagaacttcaaactatgaaggcggacttaacccggcacgttctcgtggaagatgtgatggttttgaaggagcaaatagagcatttgcacagacaatgggaggacctctgcttaagggtggccatacgtaaacaggagattgaagacagactcaatacatgggttgtattcaatgaaaaaaataaagagttgtgtgcctggctggtgcagatggaaaacaaagttctacagacagcggacattagtattgaagaaatgattgaaaagttacagaaggactgcatggaagaaataaacttgtttagtgaaaacaagttacagttaaagcagatgggtgaccagttgatcaaggccagcaacaaatcaagagcagctgagatcgatgacaagctcaacaaaattaacgatcgttggcaacatctttttgatgtcatcggatcaagggtgaagaagctgaaggagacctttgcttttattcagcagttggacaaaaacatgagcaaccttcgcacctggttggctcgaattgagtctgagctttccaagcctgttgtttatgatgtctgcgatgatcaagagatccagaagaggctcgctgagcagcaggatctacagcgagatattgaacaacacagcgcaggggtggagtccgtgtttaacatctgtgacgtcctactgcacgactccgatgcctgtgcaaatgagaccgagtgtgactcgatccagcagaccaccaggagcctggacagacgctggaggaacatttgtgccatgtccatggagcggcgcatgaaaatcgaggagacgtggcgcctgtggcagaagtttttagacgactattctcgctttgaggactggctcaagtcagctgagaggacggcagcctgcccaaattcctcagaggtgttgtacacgagtgccaaagaggaactgaagaggtttgaggcctttcagcggcagattcatgagcggctcactcagctggagctcatcaacaagcagtaccggcggctggcccgggagaaccgcacagacacggccagcaggctgaagcagatggtccacgagggcaaccagcgctgggacaaccttcagaggcgggtcacagccgtcctgcggagactcaggcatttcaccaaccagagggaagaatttgagggcaccagggagagcattctggtgtggctcacagagatggacctgcagctgaccaacgtggagcacttctcagagagtgacgccgatgacaagatgcgccaactgaatggcttccaacaggaaattacattaaataccaacaagattgatcagctcattgtgtttggggagcagctgattcagaagagcgagcccctggatgctgtgctgattgaggatgagctggaggaactccaccgctactgccaggaggtgtttggaagggtctcccggttccaccggcggctcacctcctgcactccgggcttggaagatgaaaaggaggcctctgagaatgaaacagacatggaagaccccagagaaatccagactgattcttggcgtaaacggggagagagcgaggaaccgtcatctcctcagtccctgtgtcatctagtggccccagggcacgagcggtctggctgcgagacccctgtcagcgtggactccatccccctggagtgggaccacacaggcgacgtggggggctcctcctctcacgaagaggacgaggagggcccatactacagcgcactgtcagatgtagaaatccctgaaaatcctgaggcatatcttaaaatgaccacaaaaactttgaaagcgtcttctggtaaatccatttcggatggccactcgtggcatgttcccgacagcccttcctgtcccgagcatcactacaagcaaatggaaggtgacaggaatgttccacctgttccccctgcgtccagcaccccttataaaccaccctatggaaagctactattacctccaggcacggatggtggcaaagaaggcccgcgagtcctgaatggcaacccacagcaggaagacgggggactggccggtatcacagagcagcagtcaggtgccttcgacagatgggagatgattcaagcacaggagcttcacaataagctcaaaataaaacaaaatttgcaacagctgaactctgatatcagcgccatcactacttggctgaaaaaaactgaagcagagctggaaatgttaaagatggcaaagcctccctctgatatccaggaaatagaactgagagtgaagagactgcaggagatactgaaagcctttgacacttacaaggcattagtggtctctgtcaacgtgagcagcaaggaatttctgcaaaccgagagccccgaatccacagagctccaaagtagactccgccagctgagcctgctctgggaagcagcacagggcgcagtggacagctggagagggggcttacgacagtcgctcatgcagtgccaggacttccaccagttgagtcaaaatctgctgctgtggttagcgagtgccaagaaccggaggcagaaggctcatgtcaccgatccaaaggcagacccccgggctctcctagagtgtcggagggaactaatgcaactggaaaaggagctggtagaacgtcaacctcaagtggacatgttacaggagatttcaaacagccttctcattaagggacatggagaagactgtattgaagctgaagaaaaggtgcatgttattgagaagaaactcaaacagttacgggagcaagtgtcccaagatttaatggccttgcagggaacccagaacccagcctcacccctgcccagcttcgacgaggtagactcgggggaccagcctcctgcaacatccgtgccagctccccgagcaaagagttcagagcagtgagaactacagaaggcgaggaggagacagagagcagggtccccggcagcacacggccacagcgctccttcctctcaagggtggtccgggcagccctacccctgcagctgctcctcctgctgctgctgctcctggcctgcctgctgccctcctccgaagaagactacagctgcactcaggccaacaactttgcccggtccttttaccccatgctgaggtacaccaatgggccaccccccacatagagggcatagctggccacagtgctacaccacctgcctgattgccaagggtgcccagcacgtggccccagaccaatctgagtgacttagtgttggcaaggtcccgggacctgtgcagacttcttctgggcttacccagcacgggctccctggagcccagggcagctttcagattgtgttcctccccaggagcagggaacctgtgtggcaggtgccccgggtattttggcagaactagttgattagtttagggatctctggaaatgtcagtttcctgaagagccaagcactttgtgaattctggtttgtttgtaaaacagcattattataatgtaggtatggtcaatgagcagtggtgtccatcacatatattatagaagcaagcgagcacattccaccctagaaatggttcagaaactcataggcacccttagctgatggaaacaatcaatcatatttaatacgcttagaatcagttttactccaatcagctggcaattttgagctgccggttatacaccaaaatgttctgttcagtacctagctctgctcttttatattgctttaaatttttaaagaaattatattgcatggatgtttttgtaagttaattttctaagactttttcacatccaaagtgatgctttgctttgggttttaactgtttggccacggcgggggtgggggcggggggttggtacagaaacttgaagctgtttgtgatatgtacaactcagatgtttctcattaaaaaacaaaattagccagacttctgttgtactgaattctg

SEQ ID NO: 373626 - DNA, 4190 bp, Homo sapiens
  misc_feature (7)..(7): n is a, c, g, or t
  misc_feature (15)..(15): n is a, c, g, or t
gcatttnatgccccntttgactctagaccatcccacctttttagtgctccctgggggccaggagcgcttcagcctctaccaaaccagaagtctgatccatgagctgaagaataaagaaattcattttcaaaggaaggcgaactacctgtgccctaaccttggaagctggagaaaagttactgctcacaactgacctgaaaactaaagagtctgtgggtaggagaatcagtcaacttcaggacagctggaaagacatggagccccagctggcagagatgattaagcagttccagagcactgtagagacctgggaccagtgtgaaaagaaaatcaaggagttgaaaagcaggctgcaagttttaaaggcacaaagtgaagatcctcttccagagcttcacgaggacctccataacgaaaaagagctgattaaggaactagaacagtctttggctagctggactcagaacttgaaagaacttcaaactatgaaggcggacttaacccggcacgttctcgtggaagatgtgatggttttgaaggagcaaatagagcatttgcacagacaatgggaggacctctgcttaagggtggccatacgtaaacaggagattgaagacagactcaatacatgggttgtattcaatgaaaaaaataaagagttgtgtgcctggctggtgcagatggaaaacaaagttctacagacagcggacattagtattgaagaaatgattgaaaagttacagaaggactgcatggaagaaataaacttgtttagtgaaaacaagttacagttaaagcagatgggtgaccagttgatcaaggccagcaacaaatcaagagcagctgagatcgatgacaagctcaacaaaattaacgatcgttggcaacatctttttgatgtcatcggatcaagggtgaagaagctgaaggagacctttgcttttattcagcagttggacaaaaacatgagcaaccttcgcacctggttggctcgaattgagtctgagctttccaagcctgttgtttatgatgtctgcgatgatcaagagatccagaagaggctcgctgagcagcaggatctacagcgagatattgaacaacacagcgcaggggtggagtccgtgtttaacatctgtgacgtcctactgcacgactccgatgcctgtgcaaatgagaccgagtgtgactcgatccagcagaccaccaggagcctggacagacgctggaggaacatttgtgccatgtccatggagcggcgcatgaaaatcgaggagacgtggcgcctgtggcagaagtttttagacgactattctcgctttgaggactggctcaagtcagctgagaggacggcagcctgcccaaattcctcagaggtgttgtacacgagtgccaaagaggaactgaagaggtttgaggcctttcagcggcagattcatgagcggctcactcagctggagctcatcaacaagcagtaccggcggctggcccgggagaaccgcacagacacggccagcaggctgaagcagatggtccacgagggcaaccagcgctgggacaaccttcagaggcgggtcacagccgtcctgcggagactcaggcatttcaccaaccagagggaagaatttgagggcaccagggagagcattctggtgtggctcacagagatggacctgcagctgaccaacgtggagcacttctcagagagtgacgccgatgacaagatgcgccaactgaatggcttccaacaggaaattacattaaataccaacaagattgatcagctcattgtgtttggggagcagctgattcagaagagcgagcccctggatgctgtgctgattgaggatgagctggaggaactccaccgctactgccaggaggtgtttggaagggtctcccggttccaccggcggctcacctcctgcactccgggcttggaagatgaaaaggaggcctctgagaatgaaacagacatggaagaccccagagaaatccagactgattcttggcgtaaacggggagagagcgaggaaccgtcatctcctcagtccctgtgtcatctagtggccccagggcacgagcggtctggctgcgagacccctgtcagcgtggactccatccccctggagtgggaccacacaggcgacgtggggggctcctcctctcacgaagaggacgaggagggcccatactacagcgcactgtcagatgtagaaatccctgaaaatcctgaggcatatcttaaaatgaccacaaaaactttgaaagcgtcttctggtaaatccatttcggatggccactcgtggcatgttcccgacagcccttcctgtcccgagcatcactacaagcaaatggaaggtgacaggaatgttccacctgttccccctgcgtccagcaccccttataaaccaccctatggaaagctactattacctccaggcacggatggtggcaaagaaggcccgcgagtcctgaatggcaacccacagcaggaagacgggggactggccggtatcacagagcagcagtcaggtgccttcgacagatgggagatgattcaagcacaggagcttcacaataagctcaaaataaaacaaaatttgcaacagctgaactctgatatcagcgccatcactacttggctgaaaaaaactgaagcagagctggaaatgttaaagatggcaaagcctccctctgatatccaggaaatagaactgagagtgaagagactgcaggagatactgaaagcctttgacacttacaaggcattagtggtctctgtcaacgtgagcagcaaggaatttctgcaaaccgagagccccgaatccacagagctccaaagtagactccgccagctgagcctgctctgggaagcagcacagggcgcagtggacagctggagagggggcttacgacagtcgctcatgcagtgccaggacttccaccagttgagtcaaaatctgctgctgtggttagcgagtgccaagaaccggaggcagaaggctcatgtcaccgatccaaaggcagacccccgggctctcctagagtgtcggagggaactaatgcaactggaaaaggagctggtagaacgtcaacctcaagtggacatgttacaggagatttcaaacagccttctcattaagggacatggagaagactgtattgaagagttcagagcagtgagaactacagaaggcgaggaggagacagagagcagggtccccggcagcacacggccacagcgctccttcctctcaagggtggtccgggcagccctacccctgcagctgctcctcctgctgctgctgctcctggcctgcctgctgccctcctccgaagaagactacagctgcactcaggccaacaactttgcccggtccttttaccccatgctgaggccaccgagttgattagagggtcactgctccatcgttgcttcaggcaaaagagtctccatcttcattccaaatgaggctcatgcagacccatctaagctgaggagatgggatctaaaggtacagcagaagacaaccctaacttcaccgcccctccattctgctgcgactcagctcacaaagcagattctcacagaagcaagtcctggggcaggagcaatactggcccgctaggcaagcagaagacttgcgtgccagtccaagctttgccatgagtagttttatgaccttgaataggtgaatttgcccccgtgggctttaatttacacagatatgaaaggtggagttgaactttgatgtgagaggtttacaaacttactgtgtctgtaggggtgttctggacattgtggtgggaggtaagggggtatcacaagggggccccatttaaatcacagcagccgtgcatgtcaggttgcacctgatagattctgcagttttaaaatatttttctttaaatttttaaactgtttgaagtgcatggtcactgtcagcactggacttggactgcctgtgttcagctcaatcacctactccccacgtgaccttcagcaagtttgcttagaccgtgtctagttccacaaccagaaaataaggaaatagcagttattataataaggattaaatgtgaatgtctgaggcactgagaactgtgtctggcacagatattatctttagatactaaataatgtgtttttatctttttaaaagattttcagcaacttaaaaaaaaatgtg

SEQ ID NO: 373627 - DNA, 3013 bp, Homo sapiens
  misc_feature (7)..(7): n is a, c, g, or t
  misc_feature (15)..(15): n is a, c, g, or t
gcatttnatgccccntttgactctagaccatcccacctttttagtgctccctgggggccaggagcgcttcagcctctaccaaaccagaagtctgatccatgagctgaagaataaagaaattcattttcaaaggaaggcgaactacctgtgccctaaccttggaagctggagaaaagttactgctcacaactgacctgaaaactaaagagtctgtgggtaggagaatcagtcaacttcaggacagctggaaagacatggagccccagctggcagagatgattaagcagttccagagcactgtagagacctgggaccagtgtgaaaagaaaatcaaggagttgaaaagcaggctgcaagttttaaaggcacaaagtgaagatcctcttccagagcttcacgaggacctccataacgaaaaagagctgattaaggaactagaacagtctttggctagctggactcagaacttgaaagaacttcaaactatgaaggcggacttaacccggcacgttctcgtggaagatgtgatggttttgaaggagcaaatagagcatttgcacagacaatgggaggacctctgcttaagggtggccatacgtaaacaggagattgaagacagactcaatacatgggttgtattcaatgaaaaaaataaagagttgtgtgcctggctggtgcagatggaaaacaaagttctacagacagcggacattagtattgaagaaatgattgaaaagttacagaaggactgcatggaagaaataaacttgtttagtgaaaacaagttacagttaaagcagatgggtgaccagttgatcaaggccagcaacaaatcaagagcagctgagatcgatgacaagctcaacaaaattaacgatcgttggcaacatctttttgatgtcatcggatcaagggtgaagaagctgaaggagacctttgcttttattcagcagttggacaaaaacatgagcaaccttcgcacctggttggctcgaattgagtctgagctttccaagcctgttgtttatgatgtctgcgatgatcaagagatccagaagaggctcgctgagcagcaggatctacagcgagatattgaacaacacagcgcaggggtggagtccgtgtttaacatctgtgacgtcctactgcacgactccgatgcctgtgcaaatgagaccgagtgtgactcgatccagcagaccaccaggagcctggacagacgctggaggaacatttgtgccatgtccatggagcggcgcatgaaaatcgaggagacgtggcgcctgtggcagaagtttttagacgactattctcgctttgaggactggctcaagtcagctgagaggacggcagcctgcccaaattcctcagaggtgttgtacacgagtgccaaagaggaactgaagaggtttgaggcctttcagcggcagattcatgagcggctcactcagctggagctcatcaacaagcagtaccggcggctggcccgggagaaccgcacagacacggccagcaggctgaagcagatggtccacgagggcaaccagcgctgggacaaccttcagaggcgggtcacagccgtcctgcggagactcaggcatttcaccaaccagagggaagaatttgagggcaccagggagagcattctggtgtggctcacagagatggacctgcagctgaccaacgtggagcacttctcagagagtgacgccgatgacaagatgcgccaactgaatggcttccaacaggaaattacattaaataccaacaagattgatcagctcattgtgtttggggagcagctgattcagaagagcgagcccctggatgctgtgctgattgaggatgagctggaggaactccaccgctactgccaggaggtgtttggaagggtctcccggttccaccggcggctcacctcctgcactccgggcttggaagatgaaaaggaggcctctgagaatgaaacagacatggaagaccccagagaaatccagactgattcttggcgtaaacggggagagagcgaggaaccgtcatctcctcagtccctgtgtcatctagtggccccagggcacgagcggtctggctgcgagacccctgtcagcgtggactccatccccctggagtgggaccacacaggcgacgtggggggctcctcctctcacgaagaggacgaggagggcccatactacagcgcactgtcagatgtagaaatccctgaaaatcctgaggcatatcttaaaatgaccacaaaaactttgaaagcgtcttctggtaaatccatttcggatggccactcgtggcatgttcccgacagcccttcctgtcccgagcatcactacaagcaaatggaaggtgacaggaatgttccacctgttccccctgcgtccagcaccccttataaaccaccctatgtaagtcttaacttcactgggagtacagcctatgtctgtgagtcatacttacatttgcaagagagagagattttggtgtaaactgcgtgtattcattccccaggcatattttgagttggttttcttatggtgacagtgtctctgttgagctgtccatacttcattagaaccccggcaaaaccgattagacttagagataggttctggccaaaaaccatctttctgtatgttggtgtggtgtaacagtcattattactgtcgagtcaggtgtctgtgcaaatagtgagcaagcaaggtgctggctttcctgactgctcctgagctctcaagcctttgtctttttgttgttgttgtggagacggagtctcattctgtcacccaggctggagtgcactggcacgatcttgacttactgcaatctctgcctcctgggttcaagtgattttcctgcctcagcctcccaagtagctgcgattacaggtgtgcaccaccatgcctggctaatttttgtatttttagtagagatgggggtttcaccatgttggccaggctggtcttgaactcctgacctcaagtgatccacctgcctcagcctc

SEQ ID NO: 373628 - DNA, 2084 bp, Homo sapiens
  misc_feature (1651)..(1651): n is a, c, g, or t
  misc_feature (1874)..(1874): n is a, c, g, or t
cactctgtaagttcaccgccggtcgggtccggccgccgcgctgtccagctcctgagaccttgctgtccgccggtctgccgtctgcgcgcctcacgctcctcagccctggaccggggacaagtaaccctcggtgacaagaccaaagtgcactgctgcccacacagttcctacctttctggcttcaattcttcagaagagtttgccgtcctttggggagaacgtgatttttgttatctcagcccactgacttcattgatctctaatcttttttaattccttgggccaactttgttcgtgcccccacactgtagccagaagcccgttggcgagctctggcacctgcaaaccaccccgtggaacgagtgtttcctctggctgagggttggagaggaggtgtggtctcagcaggcggcccgtagcctcacagccaggcctggtggtgaggtcaccatgtccaccaaggtgcccatctatctgaagcgtggcagtcgcaagggcaagaaggagaagcttcgggacctgctgtcctcggacatgatcagcccaccgctgggggacttccgccacaccattcatattggcagtggcggcggcagtgacatgtttggcgacatctccttcctgcagggcaagttccacctcctgccggggaccatggtggaggggcctgaagaagatggcaccttcgacctccccttccagttcacccgcaccgccaccgtgtgtgggcgggagctcccggacggcccatcccctctgctcaagaacgccatctccctcccggttatcggtggaccccaggctctcaccctgcccacagcccaggctccacccaagccccctcgcctgcacctggagacccctcagccttccccacaggagggagggagtgtggacatctggaggattccagagactggctcccccaacagtggactgaccccggagtcaggggccgaggagcccttcctgtccaatgccagctccctgctgtccctgcacgtggacctggggccttccatcctggatgatgtcctgcagatcatggatcaggacctggacagcatgcagatccccacataggacacgaggctgcctaggctggggtcccaggtggggcccagccaggaggtggggtgtggacccggccctggcggcggagtcagggtcccaagatcccacctgtatggtcgctggccagtgattctccttctgagccgtgtttcccctctccctccctctccacgtgggcagggcaggccccatcgctttcctctgataaccacatggacacatcctgaagtcagcccaggcgccctgagcatcttggggcacctggaccccatcacaatactccttcttccttcaggtccctgggtgaaggctttgctgaaaccgaccccccttttcacgtcccttctgcctctgccccgttggatgccctgactgggggcaggggaagagacagggcacagctggccacagggctcagccactgagcaggctgttccgggcctttggctttgcatcctggacggggagtgtcctgtcagggaccagatgtgtcctgcctcatccctagctccaatcccttccccacgtgaccggggattctggttgcaataaaacatgctgctgctggtaaaaaaanaaaacaaaaatgaaaccacgaatcaataaaaaaaaaaaaaaaagggggggggcgcccataaaaaattccccccgggggggcccccagttttacgctcttcccccgttttttttgttcacaagggggcccccttatgagggggggcgcatattataataaggacgagggacgacgcgcgccgctgctttaaccacccgcctcgtgacgtggacacacactggtnccgtgggggaacatccttgagggagggacccctactttgcggtgggcggcgccacctatgggagcaacactccccacaggagatttagaagccccgacagcaaaataacacttgctgaccgcgttcttactgcgtgtaaccacacgcgcaaatagtgctgagcgtgggaaagaatgggtccacggaatgacttttcgaacattttaccgg

SEQ ID NO: 373629 - DNA, 347 bp, Homo sapiens
gtgagttcgggctgggattttcgcagcttcgcgggggtcccccgagaggcccatctctgtggcgccccgccccagctcgcgccctggctctgcctctcacctcactcagttcctttcgagggctcctagggctccatggggcttcccacccgcatctgggttcccgcagcctcgcccgtgcccgccacggtccgtgggggcgcaacgcatcccgaccccgaattccccgttctgccctccattttgtgtccgggcccccgcccccctcccgagacccaggggtgccccgccgcccagcatccccaccggggctgggggccgtatttttagccgatagtgagttgttc

SEQ ID NO: 373630 - DNA, 1976 bp, Homo sapiens
cactctgtaagttcaccgccggtcgggtccggccgccgcgctgtccagctcctgagaccttgctgtccgccggtctgccgtctgcgcgcctcacgctcctcagccctggaccggggacaagtaaccctcggtgacaagaccaaagtgcactgctgcccacacagttcctacctttctggcttcaattcttcagaagagtttgccgtcctttggggagaacgtgatttttgttatctcagcccactgacttcattgatctctaatcttttttaattccttgggccaactttgttcgtgcccccacactgtagccagaagcccgttggcgagctctggcacctgcaaaccaccccgtggaacgagtgtttcctctggctgagggttggagaggaggtgtggtctcagcaggcggcccgtagcctcacagccaggcctggtggtgaggtcaccatgtccaccaaggtgcccatctatctgaagcgtggcagtcgcaagggcaagaaggagaagcttcgggacctgctgtcctcggacatgatcagcccaccgctgggggacttccgccacaccattcatattggcagtggcggcggcagtgacatgtttggcgacatctccttcctgcagggcaagttccacctcctgccggggaccatggtggaggggcctgaagaagatggcaccttcgacctccccttccagttcacccgcaccgccaccgtgtgtgggcgggagctcccggacggcccatcccctctgctcaagaacgccatctccctcccggttatcggtggaccccaggctctcaccctgcccacagcccaggctccacccaagccccctcgcctgcacctggagacccctcagccttccccacaggagggagggagtgtggacatctggaggattccagagactggctcccccaacagtggactgaccccggagtcaggggccgaggagcccttcctgtccaatgccagctccctgctgtccctgcacgtggacctggggccttccatcctggatgatgtcctgcagatcatggatcaggacctggacagcatgcagatccccacataggacacgaggctgcctaggctggggtcccaggtggggcccagccaggaggtggggtgtggacccggccctggcggcggagtcagggtcccaagatcccacctgtatggtcgctggccagtgattctccttctgagccgtgtttcccctctccctccctctccacgtgggcagggcaggccccatcgctttcctctgataaccacatggacacatcctgaagtcagcccaggcgccctgagcatcttggggcacctggaccccatcacaatactccttcttccttcaggtccctgggtgaaggctttgctgaaaccgaccccccttttcacgtcccttctgcctctgccccgttggatgccctgactgggggcaggggaagagacagggcacagctggccacagggctcagccactgagcaggctgttccgggcctttggctttgcatcctggacggggagtgtcctgtcagggaccagatgtgtcctgcctcatccctagctccaatcccttccccacgtgaccggggattctggttgcaataaaacatgctgctgctggtggcggagctccctgtccctttgccccaggtttcctcccggaggcagacagtctcccagagctgagggcttgcctctggagaccccagccccagagggctttgtggaggacaggccttgccctcaagaatgtcgtacctgacgctgagcctgtcatgagaatgcaacaggagcaaaccaagtgttgctgtgacattgattcagatgtttggcaagaggtggctgagcactggggtgggcttggcactgtgccaagcctggggccaatccctgcccagtcagctggggtctggtgggggacacccaagaataaaagaataaccacaaagtgtgca

SEQ ID NO: 373631 - DNA, 3399 bp, Homo sapiens
  misc_feature (2)..(2): n is a, c, g, or t
  misc_feature (4)..(6): n is a, c, g, or t
gnannngatgcggctgtggtggcggcggcggcggccgagcgcgggtggcggctgtggcggcggaggggggcgcgggccggcgatggcgcggcggccctgagggcgcggggcgggcggcggccggagggcgggcggcgcgggaggaagcggcggcggtggctccatggcccgggcgcgctgagggacccggcgctcgcctcagcccggcggcggcggcggccgaacaatgaagctcctgaagccgacctgggtcaaccacaatggcaagccgattttttcagttgatattcaccctgacgggaccaagttcgcaactggaggacaagggcaggattctgggaaggttgtgatctggaatatgtctccagtcctccaggaggatgacgagaaggatgaaaatattcccaagatgctttgccagatggacaatcacttagcatgtgtgaactgtgtgcggtggtcaaacagtgggatgtatttagcttctgggggagatgacaaactgattatggtgtggaagcgggctacgtacatcggccccagcaccgtgttcggctccagtggtaagcttgccaatgtggagcagtggcggtgtgtctctatcctccggaatcattcaggcgatgtgatggatgtagcatggtctccccacgatgcctggctagcctcatgcagcgtggataacactgtcgtcatctggaatgctgtaaagttcccagaaattctagctactctgagaggtcattctggcttggtcaaagggttgacatgggaccctgttggtaaatacatagcttctcaagctgatgaccgcagcctaaaggtgtggaggacgctggactggcagttggagaccagcatcaccaagccttttgatgagtgtggaggaacgacccatgtgttgcggctcagctggtcacctgatgggcattacctggtgtctgcccatgccatgaacaactcaggccccactgcccagatcatcgaacgggagggatggaagaccaacatggactttgttgggcaccggaaagctgtgactgtcgtgaaattcaacccaaaaatcttcaaaaagaagcagaagaatgggagttctgcgaagcctagctgcccgtactgctgctgtgctgttggcagcaaggaccgctcgctttctgtctggctcacatgtctgaaacggccgctggtggtcatccatgaactgtttgacaaatccatcatggatatttcctggactctgaatgggctgggcatcttggtatgctctatggacggctctgtggcattcctcgacttctcccaggatgagcttggcgatcccctgagcgaggaggagaagagccgcattcaccagtccacctatggcaagagcctagccatcatgaccgaggcccagctctccacagccgtcattgagaaccctgagatgctcaagtaccagcgaaggcagcagcagcagcagctggaccagaagagtgctgcgaccagggagatgggctcagccacctcagtcgcaggcgttgtcaacggggagagtcttgaagatatcaggaagaatcttttgaagaaacaagttgagactcggacagcagatggccggagaagaatcacgcctctctgcatagcacagctggacactggggacttctccacggcattctttaacagcatccccctctcgggctccctggcgggcaccatgctctcttctcatagcagtccacagctactgccactggactccagtacccctaactccttcggcgcctcgaagccttgcacagagcctgtggtggctgccagtgccagacctgcaggcgattctgtcaataaagacagtatgaatgctacctctactcctgctgcattgtcaccttctgtgttaacgaccccgtccaagatcgaacccatgaaagcgtttgactcccggttcacagagcggtccaaagccacaccaggtgctcctgccctgaccagcatgactccgacagctgtggaaagggatgttcacagacaggtggttgtggtgaaagaagagtctctacactccatcctggcaggaagtgatatgacggtatcacagatcttgctgacgcagcatggaatcccagtaatgaacctgtccgatgggaaggcgtactgctttaatccgtcactttccacatggaacctggtttctgacaagcaggactcactggctcagtgtgcagactttaggagcagcctgccatcccaggacgccatgctgtgctcaggaccgttagccataatccagggccgcacctccaactcgggaaggcaggctgcccggctcttctccgtgcctcatgtggtgcagcaagagaccaccctggcctacctagagaaccaggtggcagcagcactcaccctgcagtccagccacgagtaccgccattggctcctcgtctacgcacggtacctcgtaaacgaagggtttgaataccgacttcgagaaatatgcaaggacttactgggtccggttcactactccactggaagccagtgggagtcaacagtagtgggtctgcggaagagggagctgctgaaggagctgctaccagtcatcgggcagaacctccgattccagcgcctcttcaccgagtgtcaggaacagctcgacatcctgagggacaagtagcctgccccagcctgccctggctgcagcaagggcagggccacactctcgccgctgatgacatgcaggaccgcctctcacctgaccaggctgtagggggaggagacactggcaggagatgtgctgtcctgcaccagcgccagcccagctccctgggcagatgtgccctgtgtcctgggtctgacattgcctcaggagggggaagctcatccctccctccaagcccccgatgcggagctagggctggagctctgcccaggtgccctggggccagcaaggcagtcccaggcctgccgtctccagcacggccccaaggtggacactagcccctgctgctgcaggcgccatgctgcttcagcagtgacgattgagccatttgtgagagagaatccggaagcgttaggtattacagcagactgacctaagacctatgtaaaaggaaagctgttccaacacacggactatttttgtactagaatttgctaacttgtaatattgaatttcctttggccgataatcaggatttccctataagtcacttggacattggtcacttgtaggaaatttaaactctaattatgacagctacactgaaaaataattgtactgaaattaacttgtctatcttcatttggttttaatttttaaatgtttgtaaaaagagactgttttgggggaatggggcaaaggggtgggcgatttcttttgtaagtgtaaaataaatgaacacgcattgaatacca

SEQ ID NO: 373632 - DNA, 569 bp, Homo sapiens
tacagtcaatggcatctgacaattagtagcattgttttctttcttagtagtacatatagaacctgtaaatcctagattcaattaaatatagtatattaagtggctttaattttctttttacttttctgtaactttgcagattttctatcatgaaaacatactgcctttggacctagaaaaaagttatttgaatgtataaagtactggatgtggcacctgactttcaaggctgacttttgttcttacttgatgacagggacttctccacggcattctttaacagcatccccctctcgggctccctggcgggcaccatgctctcttctcatagcagtccacagctactgccactggactccagtacccctaactccttcggcgcctcgaagccttgcacagagcctgtggtggctgccagtgccagacctgcaggcgattctgtcaataaagacaggttagtgggtgccaaggcttgttcctgtccctggggaaagttcaggtttgcacatagttttgaggacagagaattttattctgtttgcactttgtggccccttcaatcaaaaaag

SEQ ID NO: 373633 - DNA, 463 bp, Homo sapiens
tcaaagacatccatagaggaagccccttaggggcaggaggtgaggacttcatctcaacatcggctggtggttggtaggggagctttttcttttctttccttttttttgttttgtgtatgtagtattgagtttttggtaacatgttaggagttaatgttgcaaagagtagtttacatcttcactttctgaagacacttgaatttgggtccggttcactactccactggaagccagtgggagtcaacagtagtggtaggtgcttctttcattgttgctgcaagaattctttcttgaaacatgaaggtggagattttttaaataagccaaagtgctttgaaattgtgtcccgttagacttctccagcacccagcctcaggtcccagcatcagtgagagggtgacatgccgacggccctccacaacctggcaggagctgggccctggacatcaggagccacggagtg

SEQ ID NO: 373634 - DNA, 2635 bp, Homo sapiens
tacagtcaatggcatctgacaattagtagcattgttttctttcttagtagtacatatagaacctgtaaatcctagattcaattaaatatagtatattaagtggctttaattttctttttacttttctgtaactttgcagattttctatcatgaaaacatactgcctttggacctagaaaaaagttatttgaatgtataaagtactggatgtggcacctgactttcaaggctgacttttgttcttacttgatgacagggacttctccacggcattctttaacagcatccccctctcgggctccctggcgggcaccatgctctcttctcatagcagtccacagctactgccactggactccagtacccctaactccttcggcgcctcgaagccttgcacagagcctgtggtggctgccagtgccagacctgcaggcgattctgtcaataaagacagtatgaatgctacctctactcctgctgcattgtcaccttctgtgttaacgaccccgtccaagatcgaacccatgaaagcgtttgactcccggttcacagagcggtccaaagccacaccaggtgctcctgccctgaccagcatgactccgacagctgtggaaaggttaaaagagcagaaccttgtgaaagagctgaggccccgagacctcctggagagcagcagtgacagcgatgagaaagtccctttggctaaggcttcctcactgtccaagcgaaaacttgagcttgaggtagagacagtagagaagaagaagaaagggcggcctcggaaggactctcgtctcatgcctgtgtctctgtctgtccagtctccagctgccctaaccgcagagaaggaggccatgtgtctgtctgcaccagcacttgcactgaagctgccaattccaagcccccagagagcattcaccctccaggtcagctccgatccttccatgtacattgaggtggagaatgaagtgacagtggtggggggcgtgaagctgagccgcctgaagtgcaaccgggaagggaaggagtgggagacggtactcaccagccggatcctcactgctgcgggcagctgtgacgtggtgtgtgtcgcctgtgaaaaaaggatgctgtcagtgttctccacctgtggtcgccgtctcctctctcccatcctcctgccatccccgatctctactttgcattgcacaggctcctacgtcatggcgctcaccgctgcagccacactctctgtctgggatgttcacagacaggtggttgtggtgaaagaagagtctctacactccatcctggcaggaagtgatatgacggtatcacagatcttgctgacgcagcatggaatcccagtaatgaacctgtccgatgggaaggcgtactgctttaatccgtcactttccacatggaacctggtttctgacaagcaggactcactggctcagtgtgcagactttaggagcagcctgccatcccaggacgccatgctgtgctcaggaccgttagccataatccagggccgcacctccaactcgggaaggcaggctgcccggctcttctccgtgcctcatgtggtgcagcaagagaccaccctggcctacctagagaaccaggtggcagcagcactcaccctgcagtccagccacgagtaccgccattggctcctcgtctacgcacggtacctcgtaaacgaagggtttgaataccgacttcgagaaatatgcaaggacttactgggtccggttcactactccactggaagccagtgggagtcaacagtagtgggtctgcggaagagggagctgctgaaggagctgctaccagtcatcgggcagaacctccgattccagcgcctcttcaccgagtgtcaggaacagctcgacatcctgagggacaagtagcctgccccagcctgccctggctgcagcaagggcagggccacactctcgccgctgatgacatgcaggaccgcctctcacctgaccaggctgtagggggaggagacactggcaggagatgtgctgtcctgcaccagcgccagcccagctccctgggcagatgtgccctgtgtcctgggtctgacattgcctcaggagggggaagctcatccctccctccaagcccccgatgcggagctagggctggagctctgcccaggtgccctggggccagcaaggcagtcccaggcctgccgtctccagcacggccccaaggtggacactagcccctgctgctgcaggcgccatgctgcttcagcagtgacgattgagccatttgtgagagagaatccggaagcgttaggtattacagcagactgacctaagacctatgtaaaaggaaagctgttccaacacacggactatttttgtactagaatttgctaacttgtaatattgaatttcctttggccgataatcaggatttccctataagtcacttggacattggtcacttgtaggaaatttaaactctaattatgacagctacactgaaaaataattgtactgaaattaacttgtctatcttcatttggttttaatttttaaatgtttgtaaaaagagactgttttgggggaatggggcaaaggggtgggcgatttcttttgtaagtgtaaaataaatgaacacgcattgaatacca

SEQ ID NO: 373635 - DNA, 1458 bp, Homo sapiens
gtagggatatcgtcgaaccacggcgctcgggcgctcaccgtgcagcacactctctgtctgggatgttcacagacaggtggttgtggtgaaagaagagtctctacactccatcctggcaggaagtgatatgacggtatcacagatcttgctgacgcagcatggaatcccagtaatgaacctgtccgatgggaaggcgtactgctttaatccgtcactttccacatggaacctggtttctgacaagcaggactcactggctcagtgtgcagactttaggagcagcctgccatcccaggacgccatgctgtgctcaggaccgttagccataatccagggccgcacctccaactcgggaaggcaggctgcccggctcttctccgtgcctcatgtggtgcagcaagagaccaccctggcctacctagagaaccaggtggcagcagcactcaccctgcagtccagccacgagtaccgccattggctcctcgtctacgcacggtacctcgtaaacgaagggtttgaataccgacttcgagaaatatgcaaggacttactgggtccggttcactactccactggaagccagtgggagtcaacagtagtgggtctgcggaagagggagctgctgaaggagctgctaccagtcatcgggcagaacctccgattccagcgcctcttcaccgagtgtcaggaacagctcgacatcctgagggacaagtagcctgccccagcctgccctggctgcagcaagggcagggccacactctcgccgctgatgacatgcaggaccgcctctcacctgaccaggctgtagggggaggagacactggcaggagatgtgctgtcctgcaccagcgccagcccagctccctgggcagatgtgccctgtgtcctgggtctgacattgcctcaggagggggaagctcatccctccctccaagcccccgatgcggagctagggctggagctctgcccaggtgccctggggccagcaaggcagtcccaggcctgccgtctccagcacggccccaaggtggacactagcccctgctgctgcaggcgccatgctgcttcagcagtgacgattgagccatttgtgagagagaatccggaagcgttaggtattacagcagactgacctaagacctatgtaaaaggaaagctgttccaacacacggactatttttgtactagaatttgctaacttgtaatattgaatttcctttggccgataatcaggatttccctataagtcacttggacattggtcacttgtaggaaatttaaactctaattatgacagctacactgaaaaataattgtactgaaattaacttgtctatcttcatttggttttaatttttaaatgtttgtaaaaagagactgttttgggggaatggggcaaaggggtgggcgatttcttttgtaagtgtaaaataaatgaacacgcattgaatacca

SEQ ID NO: 373636 - DNA, 1954 bp, Homo sapiens
  misc_feature (2)..(2): n is a, c, g, or t
  misc_feature (4)..(6): n is a, c, g, or t
gnannngatgcggctgtggtggcggcggcggcggccgagcgcgggtggcggctgtggcggcggaggggggcgcgggccggcgatggcgcggcggccctgagggcgcggggcgggcggcggccggagggcgggcggcgcgggaggaagcggcggcggtggctccatggcccgggcgcgctgagggacccggcgctcgcctcagcccggcggcggcggcggccgaacaatgaagctcctgaagccgacctgggtcaaccacaatggcaagccgattttttcagttgatattcaccctgacgggaccaagttcgcaactggaggacaagggcaggattctgggaaggttgtgatctggaatatgtctccagtcctccaggaggatgacgagaaggatgaaaatattcccaagatgctttgccagatggacaatcacttagcatgtgtgaactgtgtgcggtggtcaaacagtgggatgtatttagcttctgggggagatgacaaactgattatggtgtggaagcgggctacgtacatcggccccagcaccgtgttcggctccagtggtaagcttgccaatgtggagcagtggcggtgtgtctctatcctccggaatcattcaggcgatgtgatggatgtagcatggtctccccacgatgcctggctagcctcatgcagcgtggataacactgtcgtcatctggaatgctgtaaagttcccagaaattctagctactctgagaggtcattctggcttggtcaaagggttgacatgggaccctgttggtaaatacatagcttctcaagctgatgaccgcagcctaaaggtgtggaggacgctggactggcagttggagaccagcatcaccaagccttttgatgagtgtggaggaacgacccatgtgttgcggctcagctggtcacctgatgggcattacctggtgtctgcccatgccatgaacaactcaggccccactgcccagatcatcgaacgggagggatggaagaccaacatggactttgttgggcaccggaaagctgtgactgtcgtgaaattcaacccaaaaatcttcaaaaagaagcagaagaatgggagttctgcgaagcctagctgcccgtactgctgctgtgctgttggcagcaaggaccgctcgctttctgtctggctcacatgtctgaaacggccgctggtggtcatccatgaactgtttgacaaatccatcatggatatttcctggactctgaatgggctgggcatcttggtatgctctatggacggctctgtggcattcctcgacttctcccaggatgagcttggcgatcccctgagcgaggaggagaagagccgcattcaccagtccacctatggcaagagcctagccatcatgaccgaggcccagctctccacagccgtcattgagaaccctgagatgctcaagtaccagcgaaggcagcagcagcagcagctggaccagaagagtgctgcgaccagggagatgggctcagccacctcagtcgcaggcgttgtcaacggggagagtcttgaagatatcaggaagaatcttttgaagaaacaagttgagactcggacagcagatggccggagaagaatcacgcctctctgcatagcacagctggacactggggacttctccacggcattctttaacagcatccccctctcgggctccctggcgggcaccatgctctcttctcatagcagtccacagctactgccactggactccagtacccctaactccttcggcgcctcgaagccttgcacagagcctgtggtggctgccagtgccagacctgcaggcgattctgtcaataaagacaggttagtgggtgccaaggcttgttcctgtccctggggaaagttcaggtttgcacatagttttgaggacagagaattttattctgtttgcactttgtggccccttcaatcaaaaaag

SEQ ID NO: 373637 - DNA, 188 bp, Homo sapiens
aaagaagagtctctacactccatcctggcaggtaatgcaggcaacaggctgtccctactcttttgggggcccaagttcatgtctgatgctgcagaagggccccgctcagagagccaggctctggcctcagcccagggctctcagtgaggcaggaggtgtggttacgctgcaggagacacacacttttt

SEQ ID NO: 373638 - DNA, 374 bp, Homo sapiens
aatggcttgccctccctatttgccaaggcagtgttgatgcatttgctgctgggactgtgggagcctagagtacagatttctcctttgatatgtttgaaaacacttgctgatcagagcacacccagaactcattcccatgctgtcctcaggaagtgatatgacggtatcacagatcttgctgacgcagcatggaatcccagtaatgaacctgtccgatgggaaggcgtactgctttaatccgtcactttccacatggtaagcaagctgacccccagtcctattccctggaagagtgtctgtctgctctagacagcagagcaaagggtcgtggcctacagggctgcctagccctgcttttcctgagagtcaggccc

SEQ ID NO: 373639 - DNA, 407 bp, Homo sapiens
cagccattctcagtgatggaatgctttctcccactgttggactttcagttgtctgatgtttggagaatcttctagcagtttagactttaactgaatctgttgagtttgatacacttcaatgaataaaagccaatttagatactgtatttttttttctttgtttccaggcaagccgattttttcagttgatattcaccctgacgggaccaagttcgcaactggaggacaaggtatgtttatggaataaagaaagggaaagcttaacagccctgccaccttgctcttctcctgctgtccatttagctgtagagggaatacttgctatttttcaggatggatgcaacgctgtttaaaatgtacagttataatgtgttatctgaatgaataaaatcaaaatccttttatgg

SEQ ID NO: 373640 - DNA, 4020 bp, Homo sapiens
  misc_feature (2)..(2): n is a, c, g, or t
  misc_feature (4)..(6): n is a, c, g, or t
gnannngatgcggctgtggtggcggcggcggcggccgagcgcgggtggcggctgtggcggcggaggggggcgcgggccggcgatggcgcggcggccctgagggcgcggggcgggcggcggccggagggcgggcggcgcgggaggaagcggcggcggtggctccatggcccgggcgcgctgagggacccggcgctcgcctcagcccggcggcggcggcggccgaacaatgaagctcctgaagccgacctgggtcaaccacaatggcaagccgattttttcagttgatattcaccctgacgggaccaagttcgcaactggaggacaagggcaggattctgggaaggttgtgatctggaatatgtctccagtcctccaggaggatgacgagaaggatgaaaatattcccaagatgctttgccagatggacaatcacttagcatgtgtgaactgtgtgcggtggtcaaacagtgggatgtatttagcttctgggggagatgacaaactgattatggtgtggaagcgggctacgtacatcggccccagcaccgtgttcggctccagtggtaagcttgccaatgtggagcagtggcggtgtgtctctatcctccggaatcattcaggcgatgtgatggatgtagcatggtctccccacgatgcctggctagcctcatgcagcgtggataacactgtcgtcatctggaatgctgtaaagttcccagaaattctagctactctgagaggtcattctggcttggtcaaagggttgacatgggaccctgttggtaaatacatagcttctcaagctgatgaccgcagcctaaaggtgtggaggacgctggactggcagttggagaccagcatcaccaagccttttgatgagtgtggaggaacgacccatgtgttgcggctcagctggtcacctgatgggcattacctggtgtctgcccatgccatgaacaactcaggccccactgcccagatcatcgaacgggagggatggaagaccaacatggactttgttgggcaccggaaagctgtgactgtcgtgaaattcaacccaaaaatcttcaaaaagaagcagaagaatgggagttctgcgaagcctagctgcccgtactgctgctgtgctgttggcagcaaggaccgctcgctttctgtctggctcacatgtctgaaacggccgctggtggtcatccatgaactgtttgacaaatccatcatggatatttcctggactctgaatgggctgggcatcttggtatgctctatggacggctctgtggcattcctcgacttctcccaggatgagcttggcgatcccctgagcgaggaggagaagagccgcattcaccagtccacctatggcaagagcctagccatcatgaccgaggcccagctctccacagccgtcattgagaaccctgagatgctcaagtaccagcgaaggcagcagcagcagcagctggaccagaagagtgctgcgaccagggagatgggctcagccacctcagtcgcaggcgttgtcaacggggagagtcttgaagatatcaggaagaatcttttgaagaaacaagttgagactcggacagcagatggccggagaagaatcacgcctctctgcatagcacagctggacactggggacttctccacggcattctttaacagcatccccctctcgggctccctggcgggcaccatgctctcttctcatagcagtccacagctactgccactggactccagtacccctaactccttcggcgcctcgaagccttgcacagagcctgtggtggctgccagtgccagacctgcaggcgattctgtcaataaagacagtatgaatgctacctctactcctgctgcattgtcaccttctgtgttaacgaccccgtccaagatcgaacccatgaaagcgtttgactcccggttcacagagcggtccaaagccacaccaggtgctcctgccctgaccagcatgactccgacagctgtggaaaggttaaaagagcagaaccttgtgaaagagctgaggccccgagacctcctggagagcagcagtgacagcgatgagaaagtccctttggctaaggcttcctcactgtccaagcgaaaacttgagcttgaggtagagacagtagagaagaagaagaaagggcggcctcggaaggactctcgtctcatgcctgtgtctctgtctgtccagtctccagctgccctaaccgcagagaaggaggccatgtgtctgtctgcaccagcacttgcactgaagctgccaattccaagcccccagagagcattcaccctccaggtcagctccgatccttccatgtacattgaggtggagaatgaagtgacagtggtggggggcgtgaagctgagccgcctgaagtgcaaccgggaagggaaggagtgggagacggtactcaccagccggatcctcactgctgcgggcagctgtgacgtggtgtgtgtcgcctgtgaaaaaaggatgctgtcagtgttctccacctgtggtcgccgtctcctctctcccatcctcctgccatccccgatctctactttgcattgcacaggctcctacgtcatggcgctcaccgctgcagccacactctctgtctgggatgttcacagacaggtggttgtggtgaaagaagagtctctacactccatcctggcaggaagtgatatgacggtatcacagatcttgctgacgcagcatggaatcccagtaatgaacctgtccgatgggaaggcgtactgctttaatccgtcactttccacatggaacctggtttctgacaagcaggactcactggctcagtgtgcagactttaggagcagcctgccatcccaggacgccatgctgtgctcaggaccgttagccataatccagggccgcacctccaactcgggaaggcaggctgcccggctcttctccgtgcctcatgtggtgcagcaagagaccaccctggcctacctagagaaccaggtggcagcagcactcaccctgcagtccagccacgagtaccgccattggctcctcgtctacgcacggtacctcgtaaacgaagggtttgaataccgacttcgagaaatatgcaaggacttactgggtccggttcactactccactggaagccagtgggagtcaacagtagtgggtctgcggaagagggagctgctgaaggagctgctaccagtcatcgggcagaacctccgattccagcgcctcttcaccgagtgtcaggaacagctcgacatcctgagggacaagtagcctgccccagcctgccctggctgcagcaagggcagggccacactctcgccgctgatgacatgcaggaccgcctctcacctgaccaggctgtagggggaggagacactggcaggagatgtgctgtcctgcaccagcgccagcccagctccctgggcagatgtgccctgtgtcctgggtctgacattgcctcaggagggggaagctcatccctccctccaagcccccgatgcggagctagggctggagctctgcccaggtgccctggggccagcaaggcagtcccaggcctgccgtctccagcacggccccaaggtggacactagcccctgctgctgcaggcgccatgctgcttcagcagtgacgattgagccatttgtgagagagaatccggaagcgttaggtattacagcagactgacctaagacctatgtaaaaggaaagctgttccaacacacggactatttttgtactagaatttgctaacttgtaatattgaatttcctttggccgataatcaggatttccctataagtcacttggacattggtcacttgtaggaaatttaaactctaattatgacagctacactgaaaaataattgtactgaaattaacttgtctatcttcatttggttttaatttttaaatgtttgtaaaaagagactgttttgggggaatggggcaaaggggtgggcgatttcttttgtaagtgtaaaataaatgaacacgcattgaatacca

SEQ ID NO: 373641 - DNA, 4792 bp, Homo sapiens
  misc_feature (2)..(2): n is a, c, g, or t
  misc_feature (4)..(6): n is a, c, g, or t
gnannngatgcggctgtggtggcggcggcggcggccgagcgcgggtggcggctgtggcggcggaggggggcgcgggccggcgatggcgcggcggccctgagggcgcggggcgggcggcggccggagggcgggcggcgcgggaggaagcggcggcggtggctccatggcccgggcgcgctgagggacccggcgctcgcctcagcccggcggcggcggcggccgaacaatgaagctcctgaagccgacctgggtcaaccacaatggcaagccgattttttcagttgatattcaccctgacgggaccaagttcgcaactggaggacaagggcaggattctgggaaggttgtgatctggaatatgtctccagtcctccaggaggatgacgagaaggatgaaaatattcccaagatgctttgccagatggacaatcacttagcatgtgtgaactgtgtgcggtggtcaaacagtgggatgtatttagcttctgggggagatgacaaactgattatggtgtggaagcgggctacgtacatcggccccagcaccgtgttcggctccagtggtaagcttgccaatgtggagcagtggcggtgtgtctctatcctccggaatcattcaggcgatgtgatggatgtagcatggtctccccacgatgcctggctagcctcatgcagcgtggataacactgtcgtcatctggaatgctgtaaagttcccagaaattctagctactctgagaggtcattctggcttggtcaaagggttgacatgggaccctgttggtaaatacatagcttctcaagctgatgaccgcagcctaaaggtgtggaggacgctggactggcagttggagaccagcatcaccaagccttttgatgagtgtggaggaacgacccatgtgttgcggctcagctggtcacctgatgggcattacctggtgtctgcccatgccatgaacaactcaggccccactgcccagatcatcgaacgggagggatggaagaccaacatggactttgttgggcaccggaaagctgtgactgtcgtgaaattcaacccaaaaatcttcaaaaagaagcagaagaatgggagttctgcgaagcctagctgcccgtactgctgctgtgctgttggcagcaaggaccgctcgctttctgtctggctcacatgtctgaaacggccgctggtggtcatccatgaactgtttgacaaatccatcatggatatttcctggactctgaatgggctgggcatcttggtatgctctatggacggctctgtggcattcctcgacttctcccaggatgagcttggcgatcccctgagcgaggaggagaagagccgcattcaccagtccacctatggcaagagcctagccatcatgaccgaggcccagctctccacagccgtcattgagaaccctgagatgctcaagtaccagcgaaggcagcagcagcagcagctggaccagaagagtgctgcgaccagggagatgggctcagccacctcagtcgcaggcgttgtcaacggggagagtcttgaagatatcaggaagaatcttttgaagaaacaagttgagactcggacagcagatggccggagaagaatcacgcctctctgcatagcacagctggacactggggacttctccacggcattctttaacagcatccccctctcgggctccctggcgggcaccatgctctcttctcatagcagtccacagctactgccactggactccagtacccctaactccttcggcgcctcgaagccttgcacagagcctgtggtggctgccagtgccagacctgcaggcgattctgtcaataaagacagtatgaatgctacctctactcctgctgcattgtcaccttctgtgttaacgaccccgtccaagatcgaacccatgaaagcgtttgactcccggttcacagagcggtccaaagccacaccaggtgctcctgccctgaccagcatgactccgacagctgtggaaaggttaaaagagcagaaccttgtgaaagagctgaggccccgagacctcctggagagcagcagtgacagcgatgagaaagtccctttggctaaggcttcctcactgtccaagcgaaaacttgagcttgaggtagagacagtagagaagaagaagaaagggcggcctcggaaggactctcgtctcatgcctgtgtctctgtctgtccagtctccagctgccctaaccgcagagaaggaggccatgtgtctgtctgcaccagcacttgcactgaagctgccaattccaagcccccagagagcattcaccctccaggtcagctccgatccttccatgtacattgaggtggagaatgaagtgacagtggtggggggcgtgaagctgagccgcctgaagtgcaaccgggaagggaaggagtgggagacggtactcaccagccggatcctcactgctgcgggcagctgtgacgtggtgtgtgtcgcctgtgaaaaaaggatgctgtcagtgttctccacctgtggtcgccgtctcctctctcccatcctcctgccatccccgatctctactttgcattgcacaggctcctacgtcatggcgctcaccgctgcagccacactctctgtctgggatgttcacagacaggtggttgtggtgaaagaagagtctctacactccatcctggcaggaagtgatatgacggtatcacagatcttgctgacgcagcatggaatcccagtaatgaacctgtccgatgggaaggcgtactgctttaatccgtcactttccacatggaacctggtttctgacaagcaggactcactggctcagtgtgcagactttaggagcagcctgccatcccaggacgccatgctgtgctcaggaccgttagccataatccagggccgcacctccaactcgggaaggcaggctgcccggctcttctccgtgcctcatgtggtgcagcaagagaccaccctggcctacctagagaaccaggtggcagcagcactcaccctgcagtccagccacgagtaccgccattggctcctcgtctacgcacggtacctcgtaaacgaagggtttgaataccgacttcgagaaatatgcaaggacttactgggtccggttcactactccactggaagccagtgggagtcaacagtagtgggtctgcggaagagggagctgctgaaggagctgctaccagtcatcgggcagaacctccgattccagcgcctcttcaccgagtgtcaggaacagctcgacatcctgagggacaagtagcctgccccagcctgccctggctgcagcaagggcagggccacactctcgccgctgatgacatgcaggaccgcctctcacctgaccaggctgtagggggaggagacactggcaggagatgtgctgtcctgcaccagcgccagcccagctccctgggcagatgtgccctgtgtcctgggtctgacattgcctcaggagggggaagctcatccctccctccaagcccccgatgcggagctagggctggagctctgcccaggtgccctggggccagcaaggcagtcccaggcctgccgtctccagcacggccccaaggtggacactagcccctgctgctgcaggcgccatgctgcttcagcagtgacgattgagccatttgtgagagagaatccggaagcgttaggtattacagcagactgacctaagacctatgtaaaaggaaagctgttccaacacacggactatttttgtactagaatttgctaacttgtaatattgaatttcctttggccgataatcaggatttccctataagtcacttggacattggtcacttgtaggaaatttaaactctaattatgacagctacactgaaaaataattgtactgaaattaacttgtctatcttcatttggttttaatttttaaatgtttgtaaaaagagactgttttgggggaatggggcaaaggggtgggcgatttcttttgtaagtgtaaaataaatgaacacgcattgaataccaaaaaaaactgatttctcttgccttttccttctaactttcatcctccccacacagtgcatctctctcctgaagtagatggtgacagaacatgagagccagaagggatcctttgtgtcatctcattcccccctgtcatggttaatactgcgtgtcaacttgattggattgaaggatgcaatattgatcctggatgtgtctgtgagggtgttgccaaaggagattaacatttgagtcaggctggggaaggcagacccactcttaatcaggtgggcaccatctaatcagctgccaacgaatataaagcaggcagaaaaatgtgaagagatgagacttgcttagcctcccagcctacatctttctcccgtgctggatgcttcctgccctcaaacatcggactcccaagttcttcaattttgggactcgaactggctctccttgctcctcagcttgcagatggcctattgtgggaccttgtgattgtgtaagttaatacttaataaactttcatatatatctattagttctgtccctgtagagaaccctaatataccccccatgcagaaattcatttcacagtgtagagtggtcacttctgtggtcatgaagcaccataggtcaccttgcacacgtcatctcacaagtgaggagtcatggttcatggtggttcatggttctggtcttgctgtgccccaggtccagatcatactgtgcaccaagggctgcagctgtttggacaatttcatgaaaggaaatcagtatttacagtcttggg

SEQ ID NO: 373642 - DNA, 3511 bp, Homo sapiens
tttgtttcttcaactcaccaatcattcttctgtatacctagcactgcaccaggcgctgaggttagagaaataactaagactgcgcccttcacccctgatggcaggataggcaagatgtgatggatgtagcatggtctccccacgatgcctggctagcctcatgcagcgtggataacactgtcgtcatctggaatgctgtaaagttcccagaaattctagctactctgagaggtcattctggcttggtcaaagggttgacatgggaccctgttggtaaatacatagcttctcaagctgatgaccgcagcctaaaggtgtggaggacgctggactggcagttggagaccagcatcaccaagccttttgatgagtgtggaggaacgacccatgtgttgcggctcagctggtcacctgatgggcattacctggtgtctgcccatgccatgaacaactcaggccccactgcccagatcatcgaacgggagggatggaagaccaacatggactttgttgggcaccggaaagctgtgactgtcgtgaaattcaacccaaaaatcttcaaaaagaagcagaagaatgggagttctgcgaagcctagctgcccgtactgctgctgtgctgttggcagcaaggaccgctcgctttctgtctggctcacatgtctgaaacggccgctggtggtcatccatgaactgtttgacaaatccatcatggatatttcctggactctgaatgggctgggcatcttggtatgctctatggacggctctgtggcattcctcgacttctcccaggatgagcttggcgatcccctgagcgaggaggagaagagccgcattcaccagtccacctatggcaagagcctagccatcatgaccgaggcccagctctccacagccgtcattgagaaccctgagatgctcaagtaccagcgaaggcagcagcagcagcagctggaccagaagagtgctgcgaccagggagatgggctcagccacctcagtcgcaggcgttgtcaacggggagagtcttgaagatatcaggaagaatcttttgaagaaacaagttgagactcggacagcagatggccggagaagaatcacgcctctctgcatagcacagctggacactggggacttctccacggcattctttaacagcatccccctctcgggctccctggcgggcaccatgctctcttctcatagcagtccacagctactgccactggactccagtacccctaactccttcggcgcctcgaagccttgcacagagcctgtggtggctgccagtgccagacctgcaggcgattctgtcaataaagacagtatgaatgctacctctactcctgctgcattgtcaccttctgtgttaacgaccccgtccaagatcgaacccatgaaagcgtttgactcccggttcacagagcggtccaaagccacaccaggtgctcctgccctgaccagcatgactccgacagctgtggaaaggttaaaagagcagaaccttgtgaaagagctgaggccccgagacctcctggagagcagcagtgacagcgatgagaaagtccctttggctaaggcttcctcactgtccaagcgaaaacttgagcttgaggtagagacagtagagaagaagaagaaagggcggcctcggaaggactctcgtctcatgcctgtgtctctgtctgtccagtctccagctgccctaaccgcagagaaggaggccatgtgtctgtctgcaccagcacttgcactgaagctgccaattccaagcccccagagagcattcaccctccaggtcagctccgatccttccatgtacattgaggtggagaatgaagtgacagtggtggggggcgtgaagctgagccgcctgaagtgcaaccgggaagggaaggagtgggagacggtactcaccagccggatcctcactgctgcgggcagctgtgacgtggtgtgtgtcgcctgtgaaaaaaggatgctgtcagtgttctccacctgtggtcgccgtctcctctctcccatcctcctgccatccccgatctctactttgcattgcacaggctcctacgtcatggcgctcaccgctgcagccacactctctgtctgggatgttcacagacaggtggttgtggtgaaagaagagtctctacactccatcctggcaggaagtgatatgacggtatcacagatcttgctgacgcagcatggaatcccagtaatgaacctgtccgatgggaaggcgtactgctttaatccgtcactttccacatggaacctggtttctgacaagcaggactcactggctcagtgtgcagactttaggagcagcctgccatcccaggacgccatgctgtgctcaggaccgttagccataatccagggccgcacctccaactcgggaaggcaggctgcccggctcttctccgtgcctcatgtggtgcagcaagagaccaccctggcctacctagagaaccaggtggcagcagcactcaccctgcagtccagccacgagtaccgccattggctcctcgtctacgcacggtacctcgtaaacgaagggtttgaataccgacttcgagaaatatgcaaggacttactgggtccggttcactactccactggaagccagtgggagtcaacagtagtgggtctgcggaagagggagctgctgaaggagctgctaccagtcatcgggcagaacctccgattccagcgcctcttcaccgagtgtcaggaacagctcgacatcctgagggacaagtagcctgccccagcctgccctggctgcagcaagggcagggccacactctcgccgctgatgacatgcaggaccgcctctcacctgaccaggctgtagggggaggagacactggcaggagatgtgctgtcctgcaccagcgccagcccagctccctgggcagatgtgccctgtgtcctgggtctgacattgcctcaggagggggaagctcatccctccctccaagcccccgatgcggagctagggctggagctctgcccaggtgccctggggccagcaaggcagtcccaggcctgccgtctccagcacggccccaaggtggacactagcccctgctgctgcaggcgccatgctgcttcagcagtgacgattgagccatttgtgagagagaatccggaagcgttaggtattacagcagactgacctaagacctatgtaaaaggaaagctgttccaacacacggactatttttgtactagaatttgctaacttgtaatattgaatttcctttggccgataatcaggatttccctataagtcacttggacattggtcacttgtaggaaatttaaactctaattatgacagctacactgaaaaataattgtactgaaattaacttgtctatcttcatttggttttaatttttaaatgtttgtaaaaagagactgttttgggggaatggggcaaaggggtgggcgatttcttttgtaagtgtaaaataaatgaacacgcattgaatacca

SEQ ID NO: 373643 - DNA, 4089 bp, Homo sapiens
  misc_feature (2)..(2): n is a, c, g, or t
  misc_feature (4)..(6): n is a, c, g, or t
gnannngatgcggctgtggtggcggcggcggcggccgagcgcgggtggcggctgtggcggcggaggggggcgcgggccggcgatggcgcggcggccctgagggcgcggggcgggcggcggccggagggcgggcggcgcgggaggaagcggcggcggtggctccatggcccgggcgcgctgagggacccggcgctcgcctcagcccggcggcggcggcggccgaacaatgaagctcctgaagccgacctgggtcaaccacaatggcaagccgattttttcagttgatattcaccctgacgggaccaagttcgcaactggaggacaagggcaggattctgggaaggttgtgatctggaatatgtctccagtcctccaggaggatgacgagaaggatgaaaatattcccaagatgctttgccagatggacaatcacttagcatgtgtgaactgtgtgcggtggtcaaacagtgggatgtatttagcttctgggggagatgacaaactgattatggtgtggaagcgggctacgtacatcggccccagcaccgtgttcggctccagtggtaagcttgccaatgtggagcagtggcggtgtgtctctatcctccggaatcattcaggcgaacttcccacgttctgctgtttgtcctgctgaacagaatcagtaccttcatcagcggatcactaagtccatgtgatggatgtagcatggtctccccacgatgcctggctagcctcatgcagcgtggataacactgtcgtcatctggaatgctgtaaagttcccagaaattctagctactctgagaggtcattctggcttggtcaaagggttgacatgggaccctgttggtaaatacatagcttctcaagctgatgaccgcagcctaaaggtgtggaggacgctggactggcagttggagaccagcatcaccaagccttttgatgagtgtggaggaacgacccatgtgttgcggctcagctggtcacctgatgggcattacctggtgtctgcccatgccatgaacaactcaggccccactgcccagatcatcgaacgggagggatggaagaccaacatggactttgttgggcaccggaaagctgtgactgtcgtgaaattcaacccaaaaatcttcaaaaagaagcagaagaatgggagttctgcgaagcctagctgcccgtactgctgctgtgctgttggcagcaaggaccgctcgctttctgtctggctcacatgtctgaaacggccgctggtggtcatccatgaactgtttgacaaatccatcatggatatttcctggactctgaatgggctgggcatcttggtatgctctatggacggctctgtggcattcctcgacttctcccaggatgagcttggcgatcccctgagcgaggaggagaagagccgcattcaccagtccacctatggcaagagcctagccatcatgaccgaggcccagctctccacagccgtcattgagaaccctgagatgctcaagtaccagcgaaggcagcagcagcagcagctggaccagaagagtgctgcgaccagggagatgggctcagccacctcagtcgcaggcgttgtcaacggggagagtcttgaagatatcaggaagaatcttttgaagaaacaagttgagactcggacagcagatggccggagaagaatcacgcctctctgcatagcacagctggacactggggacttctccacggcattctttaacagcatccccctctcgggctccctggcgggcaccatgctctcttctcatagcagtccacagctactgccactggactccagtacccctaactccttcggcgcctcgaagccttgcacagagcctgtggtggctgccagtgccagacctgcaggcgattctgtcaataaagacagtatgaatgctacctctactcctgctgcattgtcaccttctgtgttaacgaccccgtccaagatcgaacccatgaaagcgtttgactcccggttcacagagcggtccaaagccacaccaggtgctcctgccctgaccagcatgactccgacagctgtggaaaggttaaaagagcagaaccttgtgaaagagctgaggccccgagacctcctggagagcagcagtgacagcgatgagaaagtccctttggctaaggcttcctcactgtccaagcgaaaacttgagcttgaggtagagacagtagagaagaagaagaaagggcggcctcggaaggactctcgtctcatgcctgtgtctctgtctgtccagtctccagctgccctaaccgcagagaaggaggccatgtgtctgtctgcaccagcacttgcactgaagctgccaattccaagcccccagagagcattcaccctccaggtcagctccgatccttccatgtacattgaggtggagaatgaagtgacagtggtggggggcgtgaagctgagccgcctgaagtgcaaccgggaagggaaggagtgggagacggtactcaccagccggatcctcactgctgcgggcagctgtgacgtggtgtgtgtcgcctgtgaaaaaaggatgctgtcagtgttctccacctgtggtcgccgtctcctctctcccatcctcctgccatccccgatctctactttgcattgcacaggctcctacgtcatggcgctcaccgctgcagccacactctctgtctgggatgttcacagacaggtggttgtggtgaaagaagagtctctacactccatcctggcaggaagtgatatgacggtatcacagatcttgctgacgcagcatggaatcccagtaatgaacctgtccgatgggaaggcgtactgctttaatccgtcactttccacatggaacctggtttctgacaagcaggactcactggctcagtgtgcagactttaggagcagcctgccatcccaggacgccatgctgtgctcaggaccgttagccataatccagggccgcacctccaactcgggaaggcaggctgcccggctcttctccgtgcctcatgtggtgcagcaagagaccaccctggcctacctagagaaccaggtggcagcagcactcaccctgcagtccagccacgagtaccgccattggctcctcgtctacgcacggtacctcgtaaacgaagggtttgaataccgacttcgagaaatatgcaaggacttactgggtccggttcactactccactggaagccagtgggagtcaacagtagtgggtctgcggaagagggagctgctgaaggagctgctaccagtcatcgggcagaacctccgattccagcgcctcttcaccgagtgtcaggaacagctcgacatcctgagggacaagtagcctgccccagcctgccctggctgcagcaagggcagggccacactctcgccgctgatgacatgcaggaccgcctctcacctgaccaggctgtagggggaggagacactggcaggagatgtgctgtcctgcaccagcgccagcccagctccctgggcagatgtgccctgtgtcctgggtctgacattgcctcaggagggggaagctcatccctccctccaagcccccgatgcggagctagggctggagctctgcccaggtgccctggggccagcaaggcagtcccaggcctgccgtctccagcacggccccaaggtggacactagcccctgctgctgcaggcgccatgctgcttcagcagtgacgattgagccatttgtgagagagaatccggaagcgttaggtattacagcagactgacctaagacctatgtaaaaggaaagctgttccaacacacggactatttttgtactagaatttgctaacttgtaatattgaatttcctttggccgataatcaggatttccctataagtcacttggacattggtcacttgtaggaaatttaaactctaattatgacagctacactgaaaaataattgtactgaaattaacttgtctatcttcatttggttttaatttttaaatgtttgtaaaaagagactgttttgggggaatggggcaaaggggtgggcgatttcttttgtaagtgtaaaataaatgaacacgcattgaatacca

SEQ ID NO: 373644 - DNA, 3158 bp, Homo sapiens
tgcagatgcttctttcagtgtggaggaacgacccatgtgttgcggctcagctggtcacctgatgggcattacctggtgtctgcccatgccatgaacaactcaggccccactgcccagatcatcgaacgggagggatggaagaccaacatggactttgttgggcaccggaaagctgtgactgtcgtgaaattcaacccaaaaatcttcaaaaagaagcagaagaatgggagttctgcgaagcctagctgcccgtactgctgctgtgctgttggcagcaaggaccgctcgctttctgtctggctcacatgtctgaaacggccgctggtggtcatccatgaactgtttgacaaatccatcatggatatttcctggactctgaatgggctgggcatcttggtatgctctatggacggctctgtggcattcctcgacttctcccaggatgagcttggcgatcccctgagcgaggaggagaagagccgcattcaccagtccacctatggcaagagcctagccatcatgaccgaggcccagctctccacagccgtcattgagaaccctgagatgctcaagtaccagcgaaggcagcagcagcagcagctggaccagaagagtgctgcgaccagggagatgggctcagccacctcagtcgcaggcgttgtcaacggggagagtcttgaagatatcaggaagaatcttttgaagaaacaagttgagactcggacagcagatggccggagaagaatcacgcctctctgcatagcacagctggacactggggacttctccacggcattctttaacagcatccccctctcgggctccctggcgggcaccatgctctcttctcatagcagtccacagctactgccactggactccagtacccctaactccttcggcgcctcgaagccttgcacagagcctgtggtggctgccagtgccagacctgcaggcgattctgtcaataaagacagtatgaatgctacctctactcctgctgcattgtcaccttctgtgttaacgaccccgtccaagatcgaacccatgaaagcgtttgactcccggttcacagagcggtccaaagccacaccaggtgctcctgccctgaccagcatgactccgacagctgtggaaaggttaaaagagcagaaccttgtgaaagagctgaggccccgagacctcctggagagcagcagtgacagcgatgagaaagtccctttggctaaggcttcctcactgtccaagcgaaaacttgagcttgaggtagagacagtagagaagaagaagaaagggcggcctcggaaggactctcgtctcatgcctgtgtctctgtctgtccagtctccagctgccctaaccgcagagaaggaggccatgtgtctgtctgcaccagcacttgcactgaagctgccaattccaagcccccagagagcattcaccctccaggtcagctccgatccttccatgtacattgaggtggagaatgaagtgacagtggtggggggcgtgaagctgagccgcctgaagtgcaaccgggaagggaaggagtgggagacggtactcaccagccggatcctcactgctgcgggcagctgtgacgtggtgtgtgtcgcctgtgaaaaaaggatgctgtcagtgttctccacctgtggtcgccgtctcctctctcccatcctcctgccatccccgatctctactttgcattgcacaggctcctacgtcatggcgctcaccgctgcagccacactctctgtctgggatgttcacagacaggtggttgtggtgaaagaagagtctctacactccatcctggcaggaagtgatatgacggtatcacagatcttgctgacgcagcatggaatcccagtaatgaacctgtccgatgggaaggcgtactgctttaatccgtcactttccacatggaacctggtttctgacaagcaggactcactggctcagtgtgcagactttaggagcagcctgccatcccaggacgccatgctgtgctcaggaccgttagccataatccagggccgcacctccaactcgggaaggcaggctgcccggctcttctccgtgcctcatgtggtgcagcaagagaccaccctggcctacctagagaaccaggtggcagcagcactcaccctgcagtccagccacgagtaccgccattggctcctcgtctacgcacggtacctcgtaaacgaagggtttgaataccgacttcgagaaatatgcaaggacttactgggtccggttcactactccactggaagccagtgggagtcaacagtagtgggtctgcggaagagggagctgctgaaggagctgctaccagtcatcgggcagaacctccgattccagcgcctcttcaccgagtgtcaggaacagctcgacatcctgagggacaagtagcctgccccagcctgccctggctgcagcaagggcagggccacactctcgccgctgatgacatgcaggaccgcctctcacctgaccaggctgtagggggaggagacactggcaggagatgtgctgtcctgcaccagcgccagcccagctccctgggcagatgtgccctgtgtcctgggtctgacattgcctcaggagggggaagctcatccctccctccaagcccccgatgcggagctagggctggagctctgcccaggtgccctggggccagcaaggcagtcccaggcctgccgtctccagcacggccccaaggtggacactagcccctgctgctgcaggcgccatgctgcttcagcagtgacgattgagccatttgtgagagagaatccggaagcgttaggtattacagcagactgacctaagacctatgtaaaaggaaagctgttccaacacacggactatttttgtactagaatttgctaacttgtaatattgaatttcctttggccgataatcaggatttccctataagtcacttggacattggtcacttgtaggaaatttaaactctaattatgacagctacactgaaaaataattgtactgaaattaacttgtctatcttcatttggttttaatttttaaatgtttgtaaaaagagactgttttgggggaatggggcaaaggggtgggcgatttcttttgtaagtgtaaaataaatgaacacgcattgaatacca

SEQ ID NO: 373645 - DNA, 3168 bp, Homo sapiens
  misc_feature (2)..(2): n is a, c, g, or t
  misc_feature (4)..(6): n is a, c, g, or t
gnannngatgcggctgtggtggcggcggcggcggccgagcgcgggtggcggctgtggcggcggaggggggcgcgggccggcgatggcgcggcggccctgagggcgcggggcgggcggcggccggagggcgggcggcgcgggaggaagcggcggcggtggctccatggcccgggcgcgctgagggacccggcgctcgcctcagcccggcggcggcggcggccgaacaatgaagctcctgaagccgacctgggtcaaccacaatggcaagccgattttttcagttgatattcaccctgacgggaccaagttcgcaactggaggacaagggcaggattctgggaaggttgtgatctggaatatgtctccagtcctccaggaggatgacgagaaggatgaaaatattcccaagatgctttgccagatggacaatcacttagcatgtgtgaactgtgtgcggtggtcaaacagtgggatgtatttagcttctgggggagatgacaaactgattatggtgtggaagcgggctacgtacatcggccccagcaccgtgttcggctccagtggtaagcttgccaatgtggagcagtggcggtgtgtctctatcctccggaatcattcaggcgatgtgatggatgtagcatggtctccccacgatgcctggctagcctcatgcagcgtggataacactgtcgtcatctggaatgctgtaaagttcccagaaattctagctactctgagaggtcattctggcttggtcaaagggttgacatgggaccctgttggtaaatacatagcttctcaagctgatgaccgcagcctaaaggtgtggaggacgctggactggcagttggagaccagcatcaccaagccttttgatgagtgtggaggaacgacccatgtgttgcggctcagctggtcacctgatgggcattacctggtgtctgcccatgccatgaacaactcaggccccactgcccagatcatcgaacgggagggatggaagaccaacatggactttgttgggcaccggaaagctgtgactgtcgtgaaattcaacccaaaaatcttcaaaaagaagcagaagaatgggagttctgcgaagcctagctgcccgtactgctgctgtgctgttggcagcaaggaccgctcgctttctgtctggctcacatgtctgaaacggccgctggtggtcatccatgaactgtttgacaaatccatcatggatatttcctggactctgaatgggctgggcatcttggtatgctctatggacggctctgtggcattcctcgacttctcccaggatgagcttggcgatcccctgagcgaggaggagaagagccgcattcaccagtccacctatggcaagagcctagccatcatgaccgaggcccagctctccacagccgtcattgagaaccctgagatgctcaagtaccagcgaaggcagcagcagcagcagctggaccagaagagtgctgcgaccagggagatgggctcagccacctcagtcgcaggcgttgtcaacggggagagtcttgaagatatcaggaagaatcttttgaagaaacaagttgagactcggacagcagatggccggagaagaatcacgcctctctgcatagcacagctggacactggggacttctccacggcattctttaacagcatccccctctcgggctccctggcgggcaccatgctctcttctcatagcagtccacagctactgccactggactccagtacccctaactccttcggcgcctcgaagccttgcacagagcctgtggtggctgccagtgccagacctgcaggcgattctgtcaataaagacagtatgaatgctacctctactcctgctgcattgtcaccttctgtgttaacgaccccgtccaagatcgaacccatgaaagcgtttgactcccggttcacagagcggtccaaagccacaccaggtgctcctgccctgaccagcatgactccgacagctgtggaaaggttaaaagagcagaaccttgtgaaagagctgaggccccgagacctcctggagagcagcagtgacagcgatgagaaagtccctttggctaaggcttcctcactgtccaagcgaaaacttgagcttgaggtagagacagtagagaagaagaagaaagggcggcctcggaaggactctcgtctcatgcctgtgtctctgtctgtccagtctccagctgccctaaccgcagagaaggaggccatgtgtctgtctgcaccagcacttgcactgaagctgccaattccaagcccccagagagcattcaccctccagggtctgcggaagagggagctgctgaaggagctgctaccagtcatcgggcagaacctccgattccagcgcctcttcaccgagtgtcaggaacagctcgacatcctgagggacaagtagcctgccccagcctgccctggctgcagcaagggcagggccacactctcgccgctgatgacatgcaggaccgcctctcacctgaccaggctgtagggggaggagacactggcaggagatgtgctgtcctgcaccagcgccagcccagctccctgggcagatgtgccctgtgtcctgggtctgacattgcctcaggagggggaagctcatccctccctccaagcccccgatgcggagctagggctggagctctgcccaggtgccctggggccagcaaggcagtcccaggcctgccgtctccagcacggccccaaggtggacactagcccctgctgctgcaggcgccatgctgcttcagcagtgacgattgagccatttgtgagagagaatccggaagcgttaggtattacagcagactgacctaagacctatgtaaaaggaaagctgttccaacacacggactatttttgtactagaatttgctaacttgtaatattgaatttcctttggccgataatcaggatttccctataagtcacttggacattggtcacttgtaggaaatttaaactctaattatgacagctacactgaaaaataattgtactgaaattaacttgtctatcttcatttggttttaatttttaaatgtttgtaaaaagagactgttttgggggaatggggcaaaggggtgggcgatttcttttgtaagtgtaaaataaatgaacacgcattgaatacca

SEQ ID NO: 373646 - DNA, 2318 bp, Homo sapiens
  misc_feature (2)..(2): n is a, c, g, or t
  misc_feature (4)..(6): n is a, c, g, or t
  misc_feature (2257)..(2257): n is a, c, g, or t
gnannngatgcggctgtggtggcggcggcggcggccgagcgcgggtggcggctgtggcggcggaggggggcgcgggccggcgatggcgcggcggccctgagggcgcggggcgggcggcggccggagggcgggcggcgcgggaggaagcggcggcggtggctccatggcccgggcgcgctgagggacccggcgctcgcctcagcccggcggcggcggcggccgaacaatgaagctcctgaagccgacctgggtcaaccacaatggcaagccgattttttcagttgatattcaccctgacgggaccaagttcgcaactggaggacaagggcaggattctgggaaggttgtgatctggaatatgtctccagtcctccaggaggatgacgagaaggatgaaaatattcccaagatgctttgccagatggacaatcacttagcatgtgtgaactgtgtgcggtggtcaaacagtgggatgtatttagcttctgggggagatgacaaactgattatggtgtggaagcgggctacgtacatcggccccagcaccgtgttcggctccagtggtaagcttgccaatgtggagcagtggcggtgtgtctctatcctccggaatcattcaggcgatgtgatggatgtagcatggtctccccacgatgcctggctagcctcatgcagcgtggataacactgtcgtcatctggaatgctgtaaagttcccagaaattctagctactctgagaggtcattctggcttggtcaaagggttgacatgggaccctgttggtaaatacatagcttctcaagctgatgaccgcagcctaaaggtgtggaggacgctggactggcagttggagaccagcatcaccaagccttttgatgagtgtggaggaacgacccatgtgttgcggctcagctggtcacctgatgggcattacctggtgtctgcccatgccatgaacaactcaggccccactgcccagatcatcgaacgggagggatggaagaccaacatggactttgttgggcaccggaaagctgtgactgtcgtgaaattcaacccaaaaatcttcaaaaagaagcagaagaatgggagttctgcgaagcctagctgcccgtactgctgctgtgctgttggcagcaaggaccgctcgctttctgtctggctcacatgtctgaaacggccgctggtggtcatccatgaactgtttgacaaatccatcatggatatttcctggactctgaatgggctgggcatcttggtatgctctatggacggctctgtggcattcctcgacttctcccaggatgagcttggcgatcccctgagcgaggaggagaagagccgcattcaccagtccacctatggcaagagcctagccatcatgaccgaggcccagctctccacagccgtcattgagaaccctgagatgctcaagtaccagcgaaggcagcagcagcagcagctggaccagaagagtgctgcgaccagggagatgggctcagccacctcagtcgcaggcgttgtcaacggggagagtcttgaagatatcaggaagaatcttttgaagaaacaagttgagactcggacagcagatggccggagaagaatcacgcctctctgcatagcacagctggacactggggacttctccacggcattctttaacagcatccccctctcgggctccctggcgggcaccatgctctcttctcatagcagtccacagctactgccactggactccagtacccctaactccttcggcgcctcgaagccttgcacagagcctgtggtggctgccagtgccagacctgcaggcgattctgtcaataaagacagtatgaatgctacctctactcctgctgcattgtcaccttctgtgttaacgaccccgtccaagatcgaacccatgaaagcgtttgactcccggttcacagagcggtccaaagccacaccaggtgctcctgccctgaccagcatgactccgacagctgtggaaaggttaaaagagcagaaccttgtgaaagagctgaggccccgagacctcctggagagcagcagtgacagcgatgagaaagtccctttggctaaggcttcctcactgtccaagcgaaaacttgagcttgaggtagagacagtagagaagaagaagaaagggcggcctcggaaggactctcgtctcatgcctgtgtctctgtctgtccagtctccagctgccctaaccgcagagaaggaggccatgtgcccgccaggagcncgagagggggatgctctcttctcatagcagtcacacagctgctgcactgactcagtacaga

SEQ ID NO: 373647 - DNA, 1871 bp, Homo sapiens
  misc_feature (2)..(2): n is a, c, g, or t
  misc_feature (4)..(6): n is a, c, g, or t
gnannngatgcggctgtggtggcggcggcggcggccgagcgcgggtggcggctgtggcggcggaggggggcgcgggccggcgatggcgcggcggccctgagggcgcggggcgggcggcggccggagggcgggcggcgcgggaggaagcggcggcggtggctccatggcccgggcgcgctgagggacccggcgctcgcctcagcccggcggcggcggcggccgaacaatgaagctcctgaagccgacctgggtcaaccacaatggcaagccgattttttcagttgatattcaccctgacgggaccaagttcgcaactggaggacaagggcaggattctgggaaggttgtgatctggaatatgtctccagtcctccaggaggatgacgagaaggatgaaaatattcccaagatgctttgccagatggacaatcacttagcatgtgtgaactgtgtgcggtggtcaaacagtgggatgtatttagcttctgggggagatgacaaactgattatggtgtggaagcgggctacgtacatcggccccagcaccgtgttcggctccagtggtaagcttgccaatgtggagcagtggcggtgtgtctctatcctccggaatcattcaggcgatgtgatggatgtagcatggtctccccacgatgcctggctagcctcatgcagcgtggataacactgtcgtcatctggaatgctgtaaagttcccagaaattctagctactctgagaggtcattctggcttggtcaaagggttgacatgggaccctgttggtaaatacatagcttctcaagctgatgaccgcagcctaaaggtgtggaggacgctggactggcagttggagaccagcatcaccaagccttttgatgagtgtggaggaacgacccatgtgttgcggctcagctggtcacctgatgggcattacctggtgtctgcccatgccatgaacaactcaggccccactgcccagatcatcgaacgggagggatggaagaccaacatggactttgttgggcaccggaaagctgtgactgtcgtgaaattcaacccaaaaatcttcaaaaagaagcagaagaatgggagttctgcgaagcctagctgcccgtactgctgctgtgctgttggcagcaaggaccgctcgctttctgtctggctcacatgtctgaaacggccgctggtggtcatccatgaactgtttgacaaatccatcatggatatttcctggactctgaatgggctgggcatcttggtatgctctatggacggctctgtggcattcctcgacttctcccaggatgagcttggcgatcccctgagcgaggaggagaagagccgcattcaccagtccacctatggcaagagcctagccatcatgaccgaggcccagctctccacagccgtcattgagaaccctgagatgctcaagtaccagcgaaggcagcagcagcagcagctggaccagaagagtgctgcgaccagggagatgggctcagccacctcagtcgcaggcgttgtcaacggggagagtcttgaagatatcaggaagaatcttttgaagaaacaagttgagactcggacagcagatggccggagaagaatcacgcctctctgcatagcacagctggacactggggacttctccacggcattctttaacagcatccccctctcgggctccctggcgggcaccatgctctcttctcatagcagtccacagctactgccactggactccagtacccctaactccttcggcgcctcgaagccttgcacagagcctgtggtggctgccagtgccagacctgcaggcgattctgtcaataaagacagtatgaatgcgtccgtcgaagttgggttaccgg

SEQ ID NO: 373648 - DNA, 1947 bp, Homo sapiens
  misc_feature (2)..(2): n is a, c, g, or t
  misc_feature (4)..(6): n is a, c, g, or t
gnannngatgcggctgtggtggcggcggcggcggccgagcgcgggtggcggctgtggcggcggaggggggcgcgggccggcgatggcgcggcggccctgagggcgcggggcgggcggcggccggagggcgggcggcgcgggaggaagcggcggcggtggctccatggcccgggcgcgctgagggacccggcgctcgcctcagcccggcggcggcggcggccgaacaatgaagctcctgaagccgacctgggtcaaccacaatggcaagccgattttttcagttgatattcaccctgacgggaccaagttcgcaactggaggacaagggcaggattctgggaaggttgtgatctggaatatgtctccagtcctccaggaggatgacgagaaggatgaaaatattcccaagatgctttgccagatggacaatcacttagcatgtgtgaactgtgtgcggtggtcaaacagtgggatgtatttagcttctgggggagatgacaaactgattatggtgtggaagcgggctacgtacatcggccccagcaccgtgttcggctccagtggtaagcttgccaatgtggagcagtggcggtgtgtctctatcctccggaatcattcaggcgatgtgatggatgtagcatggtctccccacgatgcctggctagcctcatgcagcgtggataacactgtcgtcatctggaatgctgtaaagttcccagaaattctagctactctgagaggtcattctggcttggtcaaagggttgacatgggaccctgttggtaaatacatagcttctcaagctgatgaccgcagcctaaaggtgtggaggacgctggactggcagttggagaccagcatcaccaagccttttgatgagtgtggaggaacgacccatgtgttgcggctcagctggtcacctgatgggcattacctggtgtctgcccatgccatgaacaactcaggccccactgcccagatcatcgaacgggagggatggaagaccaacatggactttgttgggcaccggaaagctgtgactgtcgtgaaattcaacccaaaaatcttcaaaaagaagcagaagaatgggagttctgcgaagcctagctgcccgtactgctgctgtgctgttggcagcaaggaccgctcgctttctgtctggctcacatgtctgaaacggccgctggtggtcatccatgaactgtttgacaaatccatcatggatatttcctggactctgaatgggctgggcatcttggtatgctctatggacggctctgtggcattcctcgacttctcccaggatgagcttggcgatcccctgagcgaggaggagaagagccgcattcaccagtccacctatggcaagagcctagccatcatgaccgaggcccagctctccacagccgtcattgagaaccctgagatgctcaagtaccagcgaaggcagcagcagcagcagctggaccagaagagtgctgcgaccagggagatgggctcagccacctcagtcgcaggcgttgtcaacggggagagtcttgaagatatcaggaagaatcttttgaagaaacaagttgagactcggacagcagatggccggagaagaatcacgcctctctgcatagcacagctggacactgggtactggttcattcccctttcatggtcttatctggcgagatcttcctgtcttctttcagcggttaacactttcacagtgaggatcttcacgggtccttcacaacctgactggtagaacatggaagcaaggaagtgaagctcagcttcccgcagtctcaaagcccatactcctcctggagcccttgtgcacacctgaatcatgtgaggggtgggagtgctaaggcggccagcacatctgctgcacttcactgttgccagggcaccagaggacgcacaaggaaagcagtcagtcaggctgattttttt

SEQ ID NO: 373649 - DNA, 4279 bp, Homo sapiens
accggagggggaggggcggagagccaccgcggagcgcgcgcggggttggttgccgcgagcgtgggggagcgtggaccgcggcgctgctcagcggtggggctgccttcccccggccctcctccctggtccctggcgagggcactggcggcggcggggccggggtccgcaaggccggagaaggccgccgggcccgggcatggtggtctggggcaacgcggaagaagctccaccatgaggcgaggtggatggaggaagcgagctgaaaatgatggctgggaaacatggggtgggtatatggctgccaaggtccagaaattggaggaacagtttcgatcagatgctgctatgcagaaggatgggacttcatctacaatttttagtggagttgccatctatgttaatggatacacagatccttccgctgaggaattgagaaaactaatgatgttgcatggaggtcaataccatgtatattattccagatctaaaacaacacatattattgccacaaatcttcccaatgccaaaattaaagaattaaagggggaaaaagtaattcgaccagaatggattgtggaaagcatcaaagctggacgactcctctcctacattccatatcagctgtacaccaagcagtccagtgtgcagaaaggtctcagctttaatcctgtatgcagacctgaggatcctctgccaggtccaagcaatatagccaaacagctcaacaacagggtaaatcacatcgttaagaagattgaaacggaaaatgaagtcaaagtcaatggcatgaacagttggaatgaagaagatgaaaataatgattttagttttgtggatctggagcagacctctccgggaaggaaacagaatggaattccgcatcccagagggagcactgccatttttaatggacacactcctagctctaatggtgccttaaagacacaggattgcttggtgcccatggtcaacagtgttgccagcaggctttctccagccttttcccaggaggaggataaggctgagaagagcagcactgatttcagagactgcactctgcagcagttgcagcaaagcaccagaaacacagatgctttgcggaatccacacagaactaattctttctcattatcacctttgcacagtaacactaaaatcaatggtgctcaccactccactgttcaggggccttcaagcacaaaaagcacttcttcagtatctacgtttagcaaggcagcaccttcagtgccatccaaaccttcagactgcaattttatttcaaacttctattctcattcaagactgcatcacatatcaatgtggaagtgtgaattgactgagtttgtcaataccctacaaagacaaagtaatggtatctttccaggaagggaaaagttaaaaaaaatgaaaacaggcaggtctgcacttgttgtaactgacacaggagatatgtcagtattgaattctcccagacatcagagctgtataatgcatgttgatatggattgcttctttgtatcagtgggtatacgaaatagaccagatctcaaaggaaaaccagtggctgttacaagtaacagaggcacaggaagggcacctttacgtcctggcgctaacccccagctggagtggcagtattaccagaataaaatcctgaaaggcaaagcagcagatataccagattcatcattgtgggagaatccagattctgcgcaagcaaatggaattgattctgttttgtcaagggctgaaattgcatcttgtagttatgaggccaggcaacttggcattaagaacggaatgttttttgggcatgctaaacaactatgtcctaatcttcaagctgttccatacgattttcatgcatataaggaagtcgcacaaacattgtatgaaacattggcaagctacactcataacattgaagctgtcagttgtgatgaagcgctggtagacattaccgaaatccttgcagagaccaaacttactcctgatgaatttgcaaatgctgttcgtatggaaatcaaagaccagacgaaatgtgctgcctctgttggaattggttctaatattctcctggctagaatggcaactagaaaagcaaaaccagatgggcagtaccacctaaaaccagaagaagtagatgattttatcagaggccagctagtgaccaatctaccaggagttggacattcaatggaatctaagttggcatctttgggaattaaaacttgtggagacttgcagtatatgaccatggcaaaactccaaaaagaatttggtcccaaaacaggtcagatgctttataggttctgccgtggcttggatgatagaccagttcgaactgaaaaggaaagaaaatctgtttcagctgagatcaactatggaataaggtttactcagccaaaagaggcagaagcttttcttctgagtctttcagaagaaattcaaagaagactagaagccactggcatgaagggtaaacgtctaactctcaaaatcatggtacgaaagcctggggctcctgtagaaactgcaaaatttggaggccatggaatttgtgataacattgccaggactgtaactcttgaccaggcaacagataatgcaaaaataattggaaaggcgatgctaaacatgtttcatacaatgaaactaaatatatcagatatgagaggggttgggattcacgtgaatcagttggttccaactaatctgaacccttccacatgtcccagtcgcccatcagttcagtcaagccactttcctagtgggtcatactctgtccgtgatgtcttccaagttcagaaagctaagaaatccaccgaagaggagcacaaagaagtatttcgggctgctgtggatctggaaatatcatctgcttctagaacttgcactttcttgccaccttttcctgcacatctgccgaccagtcctgatactaacaaggctgagtcttcagggaaatggaatggtctacatactcctgtcagtgtgcagtcgagacttaacctgagtatagaggtcccgtcaccttcccagctggatcagtctgttttagaagcacttccacctgatctccgggaacaagtagagcaagtctgtgctgtccagcaagcagagtcacatggcgacaaaaagaaagaaccagtaaatggctgtaatacaggaattttgccacaaccagttgggacagtcttgttgcaaataccagaacctcaagaatcgaacagtgacgcaggaataaatttaatagcccttccagcattttcacaggtggaccctgaggtatttgctgcccttcctgctgaacttcagagggagctgaaagcagcgtatgatcaaagacaaaggcagggcgagaacagcactcaccagcagtcagccagcgcatctgtgccaaagaatcctttacttcatctaaaggcagcagtgaaagaaaagaaaagaaacaagaagaaaaaaaccattggttcaccaaaaaggattcagagtcctttgaataacaagctgcttaacagtcctgcaaaaactctgccaggggcctgtggcagtccccagaagttaattgatgggtttctaaaacatgaaggacctcctgcagagaaacccctggaagaactctctgcttctacttcaggtgtgccaggcctttctagtttgcagtctgacccagctggctgtgtgagacctccagcacccaatctagctggagctgttgaattcaatgatgtgaagaccttgctcagagaatggataactacaatttcagatccaatggaagaagacattctccaagttgtgaaatactgtactgatctaatagaagaaaaagatttggaaaaactggatctagttataaaatacatgaaaaggctgatgcagcaatcggtggaatcggtttggaatatggcatttgactttattcttgacaatgtccaggtggttttacaacaaacttatggaagcacattaaaagttacataaatattaccagagagcctgatgctctctgatagctgtgccataagtgcttgtgaggtatttgcaaagtgcatgatagtaatgctcggagtttttataattttaaatttcttttaaagcaagtgttttgtacatttcttttcaaaaagtgccaaatttgtcagtattgcatgtaaataattgtgttaattattttactgtagcatagattctatttacaaaatgtttgtttataaagttttatggatttttacagtgaagtgtttacagttgtttaataaagaactgtatgtat

SEQ ID NO: 373650 - DNA, 2057 bp, Homo sapiens
ttattgccttgccttatggtttatgtttatgaggtcatcattatgttctggtcactagcacagaataaggtccatttatttatttagtttttaaaatttttttttttcaaaaaaggggggagaaaatgtaacctttgtgattggtttaccttttctttaattctagggtgggtatatggctgccaaggtccagaaattggaggaacagtttcgatcagatgctgctatgcagaaggatgggacttcatctacaatttttagtggagttgccatctatgttaatggatacacagatccttccgctgaggaattgagaaaactaatgatgttgcatggaggtcaataccatgtatattattccagatctaaaacaacacatattattgccacaaatcttcccaatgccaaaattaaagaattaaagggggaaaaagtaattcgaccagaatggattgtggaaagcatcaaagctggacgactcctctcctacattccatatcagctgtacaccaagcagtccagtgtgcagaaaggtctcagctttaatcctgtatgcagacctgaggatcctctgccaggtccaagcaatatagccaaacagctcaacaacagggtaaatcacatcgttaagaagattgaaacggaaaatgaagtcaaagtcaatggcatgaacagttggaatgaagaagatgaaaataatgattttagttttgtggatctggagcagacctctccgggaaggaaacagaatggaattccgcatcccagagggagcactgccatttttaatggacacactcctagctctaatggtgccttaaagacacaggattgcttggtgcccatggtcaacagtgttgccagcaggctttctccagccttttcccaggaggaggataaggctgagaagagcagcactgatttcagagactgcactctgcagcagttgcagcaaagcaccagaaacacagatgctttgcggaatccacacagaactaattctttctcattatcacctttgcacagtaacactaaaatcaatggtgctcaccactccactgttcaggggccttcaagcacaaaaagcacttcttcagtatctacgtttagcaaggcagcaccttcagtgccatccaaaccttcagactgcaattttatttcaaacttctattctcattcaagactgcatcacatatcaatgtggaagtgtgaattgactgagtttgtcaataccctacaaagacaaagtaatggtatctttccaggaagggaaaagttaaaaaaaatgaaaacaggcaggtctgcacttgttgtaactgacacaggtagatacttattaaaattgtcttcttaagaaacagtcatgcttgatcattttgctcttatgctattattggtatttctggtcaatatgaagttctcataaaagtctctaagtatgtcaaatcatgtaagttacagtaagcataacatagaaagctaatttattaaaatatttttaaaacaattagatataattgtggctgactgaaaattttcagagaatttaaacagtaagatggttgggattctgagcattcattcctcacgtagaccttatcagttggtgaagttttgaactgtgttaatataacatctatccagtgcttaaactcctgtaagaatgaaattggtttgataagagtaattgttaatttctagaagcttgcatcataatgattttttaattttgacatagagctgttgtaattaacagtggtaaactttcagtgagattatttcacatcttaagtacattggttcattgtattttgttttttaatacttttcttgtcatcaaaaacaaatgcacacacagtagcatactgtttttctgggccagtcattataaattagtatctggtttgaaattttagttccttttacagattataggatttttttatggggagagacctcagagattaatactctataatttatagctgtggaaactgaggtatagagagaagctcatggttctgtcctagaaagtgatagagactctatgtggggtg

SEQ ID NO: 373651 - DNA, 759 bp, Homo sapiens
gcagtgtacctgctgttcatcactcccgccaatattttttgagaagtatttcatttaaaaaagataaaaatagtgaagtttccaagtagactgtcctctcttaatttttttttatcctaatttaaaaccttagttgacgagaacatcagtggaatacagtattccacttgtttggattttctgattttaaagatcttttggtatattttgggagaattggatactctgaagtttgagatgaatgaccactcactagctactttagaaattgtttttgtaataagtcatatagaatgctgtttgaatactttcatttacctttattctagaaacaggatccaggagatagtgaaaaggatttgctgaggattttgcttagctgaattcatattttcactttagttttcctagaagcatactctttattctgggttctaggttgggattcacgtgaatcagttggttccaactaatctgaacccttccacatgtcccagtcgcccatcagttcagtcaagccactttcctagtgggtcatactctgtccgtgatgtcttccaagttcagaaagctaagaaatccaccgaagaggagcacaaagaaggttggtggtcatcagtgtggttcttttttaggtgctgcttatgtccttggaaagacggcagttggttttaaaattgacacagctttatgtgattttaaaaatttatattcttcattatgatgaatcagtaataaagtttttttatttgtaatgga

SEQ ID NO: 373652 - DNA, 722 bp, Homo sapiens
ttttaatagatgctgagcgtgatagtgagtaaccaacatgtttaatattcaaagttaaaatacttgagaacaattattaggtatataggaaagtggaatggtagtttctccacgtttgtctttccatagccaaaagaggcagaagcttttcttctgagtctttcagaagaaattcaaagaagactagaagccactggcatgaagggtaaacgtctaactctcaaaatcatggtacgaaagcctggggctcctgtagaaactgcaaaatttggaggccatggaatttgtgataacattgccaggtaagctcacctcagaaatgatattggtaattatatttcagtacaggttgttgtaagtaatagaaaatgaagaaaaccaaggaggagtttgaataaagacctgtaaacccgttaatctggtattctgtagaagcaggcatcagcccaaggcattcagcttaggttaatgcacttggtttcagcgaggcccacacacaggaggttggtttgacggcattgctgaccttggcagcctttgcttggcatctttgggctgttaactttactgcatggacagaaagaaagggcaaggctgcagaccaaagggactgctatagtttcgggacttggtgaaacttttttcctgaggaaaatttcaatgtagttcttaaaaacaatgatacaggccaggtgtggtggctcatacctgtaatcccagca

SEQ ID NO: 373653 - DNA, 284 bp, Homo sapiens
tatggcattcacttttataatcttctttgtaactgtttacaacttttctataactcttttaaacagttccatactactttagtactagtgaatacatatggaatgaagcttttgttttttaattctatcacttacaggactgtaactcttgaccaggcaacagataatgcaaaaataattggaaaggcgatgctaaacatgtttcatacaatgaaactaaatatatcagatatgagaggggtaagtatatagtaacattgtaaattctgactttgtgtaatgta

SEQ ID NO: 373654 - DNA, 4934 bp, Homo sapiens
ttattgccttgccttatggtttatgtttatgaggtcatcattatgttctggtcactagcacagaataaggtccatttatttatttagtttttaaaatttttttttttcaaaaaaggggggagaaaatgtaacctttgtgattggtttaccttttctttaattctagggtgggtatatggctgccaaggtccagaaattggaggaacagtttcgatcagatgctgctatgcagaaggatgggacttcatctacaatttttagtggagttgccatctatgttaatggatacacagatccttccgctgaggaattgagaaaactaatgatgttgcatggaggtcaataccatgtatattattccagatctaaaacaacacatattattgccacaaatcttcccaatgccaaaattaaagaattaaagggggaaaaagtaattcgaccagaatggattgtggaaagcatcaaagctggacgactcctctcctacattccatatcagctgtacaccaagcagtccagtgtgcagaaaggtctcagctttaatcctgtatgcagacctgaggatcctctgccaggtccaagcaatatagccaaacagctcaacaacagggtaaatcacatcgttaagaagattgaaacggaaaatgaagtcaaagtcaatggcatgaacagttggaatgaagaagatgaaaataatgattttagttttgtggatctggagcagacctctccgggaaggaaacagaatggaattccgcatcccagagggagcactgccatttttaatggacacactcctagctctaatggtgccttaaagacacaggattgcttggtgcccatggtcaacagtgttgccagcaggctttctccagccttttcccaggaggaggataaggctgagaagagcagcactgatttcagagactgcactctgcagcagttgcagcaaagcaccagaaacacagatgctttgcggaatccacacagaactaattctttctcattatcacctttgcacagtaacactaaaatcaatggtgctcaccactccactgttcaggggccttcaagcacaaaaagcacttcttcagtatctacgtttagcaaggcagcaccttcagtgccatccaaaccttcagactgcaattttatttcaaacttctattctcattcaagactgcatcacatatcaatgtggaagtgtgaattgactgagtttgtcaataccctacaaagacaaagtaatggtatctttccaggaagggaaaagttaaaaaaaatgaaaacaggcaggtctgcacttgttgtaactgacacaggagatatgtcagtattgaattctcccagacatcagagctgtataatgcatgttgatatggattgcttctttgtatcagtgggtatacgaaatagaccagatctcaaaggaaaaccagtggctgttacaagtaacagaggcacaggaagggcacctttacgtcctggcgctaacccccagctggagtggcagtattaccagaataaaatcctgaaaggcaaagcagcagatataccagattcatcattgtgggagaatccagattctgcgcaagcaaatggaattgattctgttttgtcaagggctgaaattgcatcttgtagttatgaggccaggcaacttggcattaagaacggaatgttttttgggcatgctaaacaactatgtcctaatcttcaagctgttccatacgattttcatgcatataaggaagtcgcacaaacattgtatgaaacattggcaagctacactcataacattgaagctgtcagttgtgatgaagcgctggtagacattaccgaaatccttgcagagaccaaacttactcctgatgaatttgcaaatgctgttcgtatggaaatcaaagaccagacgaaatgtgctgcctctgttggaattggttctaatattctcctggctagaatggcaactagaaaagcaaaaccagatgggcagtaccacctaaaaccagaagaagtagatgattttatcagaggccagctagtgaccaatctaccaggagttggacattcaatggaatctaagttggcatctttgggaattaaaacttgtggagacttgcagtatatgaccatggcaaaactccaaaaagaatttggtcccaaaacaggtcagatgctttataggttctgccgtggcttggatgatagaccagttcgaactgaaaaggaaagaaaatctgtttcagctgagatcaactatggaataaggtttactcagccaaaagaggcagaagcttttcttctgagtctttcagaagaaattcaaagaagactagaagccactggcatgaagggtaaacgtctaactctcaaaatcatggtacgaaagcctggggctcctgtagaaactgcaaaatttggaggccatggaatttgtgataacattgccaggactgtaactcttgaccaggcaacagataatgcaaaaataattggaaaggcgatgctaaacatgtttcatacaatgaaactaaatatatcagatatgagaggggttgggattcacgtgaatcagttggttccaactaatctgaacccttccacatgtcccagtcgcccatcagttcagtcaagccactttcctagtgggtcatactctgtccgtgatgtcttccaagttcagaaagctaagaaatccaccgaagaggagcacaaagaagtatttcgggctgctgtggatctggaaatatcatctgcttctagaacttgcactttcttgccaccttttcctgcacatctgccgaccagtcctgatactaacaaggctgagtcttcagggaaatggaatggtctacatactcctgtcagtgtgcagtcgagacttaacctgagtatagaggtcccgtcaccttcccagctggatcagtctgttttagaagcacttccacctgatctccgggaacaagtagagcaagtctgtgctgtccagcaagcagagtcacatggcgacaaaaagaaagaaccagtaaatggctgtaatacaggaattttgccacaaccagttgggacagtcttgttgcaaataccagaacctcaagaatcgaacagtgacgcaggaataaatttaatagcccttccagcattttcacaggtggaccctgaggtatttgctgcccttcctgctgaacttcagagggagctgaaagcagcgtatgatcaaagacaaaggcagggcgagaacagcactcaccagcagtcagccagcgcatctgtgccaaagaatcctttacttcatctaaaggcagcagtgaaagaaaagaaaagaaacaagaagaaaaaaaccattggttcaccaaaaaggattcagagtcctttgaataacaagctgcttaacagtcctgcaaaaactctgccaggggcctgtggcagtccccagaagttaattgatgggtttctaaaacatgaaggacctcctgcagagaaacccctggaagaactctctgcttctacttcaggtgtgccaggcctttctagtttgcagtctgacccagctggctgtgtgagacctccagcacccaatctagctggagctgttgaattcaatgatgtgaagaccttgctcagagaatggataactacaatttcaggttggcttggcctgtgttaagatggcccaaggctgagatgtagtcgtctcatgatttgagaacataaacagactaaactatgcagatttaacccatttctctaactctgataagcttaaagcagctacccccaaatcttttaaattctgggacttgctttgaaaagtaacaaagcccattcctttgatagctgttagtgacatagttgtagaaatgcagttttcctttatccatgcagatctctgactttctccttcaaaaagactggtcctcatttgaagtttttcccccttcctagatccaatggaagaagacattctccaagttgtgaaatactgtactgatctaatagaagaaaaagatttggaaaaactggatctagttataaaatacatgaaaaggctgatgcagcaatcggtggaatcggtttggaatatggcatttgactttattcttgacaatgtccaggtggttttacaacaaacttatggaagcacattaaaagttacataaatattaccagagagcctgatgctctctgatagctgtgccataagtgcttgtgaggtatttgcaaagtgcatgatagtaatgctcggagtttttataattttaaatttcttttaaagcaagtgttttgtacatttcttttcaaaaagtgccaaatttgtcagtattgcatgtaaataattgtgttaattattttactgtagcatagattctatttacaaaatgtttgtttataaagttttatggatttttacagtgaagtgtttacagttgtttaataaagaactgtatgtatattttgtacaggctcctttttgtgaatccttaaaaactcaactctaggaagcaactactgtttattatactaaaaggctgaaaaacctccaggccagactgctaagctctgaaattcctgagaggtctcagaccgggattctacttgttccaagaaagggtaaagcttctaaaccatcttattcttgtctccaagcatgaacacaggagcatgttaagaaaatctttactacttcttccatgcggagaaatctacatattttgaattagaaacaccctcacacccacttgaagatttttttcctgggaacattatgtcccgtagatcagaggtggtgttgtctttttgcttctactggccattgagaaactttgatgataaaaaagaacggtatagatttttcaaacgtatataaaatatttttatgttatatgttatgccataactttaaaataaaaatagtttaaaattctaaa

SEQ ID NO: 373655 - DNA, 5022 bp, Homo sapiens
ttattgccttgccttatggtttatgtttatgaggtcatcattatgttctggtcactagcacagaataaggtccatttatttatttagtttttaaaatttttttttttcaaaaaaggggggagaaaatgtaacctttgtgattggtttaccttttctttaattctagggtgggtatatggctgccaaggtccagaaattggaggaacagtttcgatcagatgctgctatgcagaaggatgggacttcatctacaatttttagtggagttgccatctatgttaatggatacacagatccttccgctgaggaattgagaaaactaatgatgttgcatggaggtcaataccatgtatattattccagatctaaaacaacacatattattgccacaaatcttcccaatgccaaaattaaagaattaaagggggaaaaagtaattcgaccagaatggattgtggaaagcatcaaagctggacgactcctctcctacattccatatcagctgtacaccaagcagtccagtgtgcagaaaggtctcagctttaatcctgtatgcagacctgaggatcctctgccaggtccaagcaatatagccaaacagctcaacaacagggtaaatcacatcgttaagaagattgaaacggaaaatgaagtcaaagtcaatggcatgaacagttggaatgaagaagatgaaaataatgattttagttttgtggatctggagcagacctctccgggaaggaaacagaatggaattccgcatcccagagggagcactgccatttttaatggacacactcctagctctaatggtgccttaaagacacaggattgcttggtgcccatggtcaacagtgttgccagcaggctttctccagccttttcccaggaggaggataaggctgagaagagcagcactgatttcagagactgcactctgcagcagttgcagcaaagcaccagaaacacagatgctttgcggaatccacacagaactaattctttctcattatcacctttgcacagtaacactaaaatcaatggtgctcaccactccactgttcaggggccttcaagcacaaaaagcacttcttcagtatctacgtttagcaaggcagcaccttcagtgccatccaaaccttcagactgcaattttatttcaaacttctattctcattcaagactgcatcacatatcaatgtggaagtgtgaattgactgagtttgtcaataccctacaaagacaaagtaatggtatctttccaggaagggaaaagttaaaaaaaatgaaaacaggcaggtctgcacttgttgtaactgacacaggagatatgtcagtattgaattctcccagacatcagagctgtataatgcatgttgatatggattgcttctttgtatcagtgggtatacgaaatagaccagatctcaaaggaaaaccagtggctgttacaagtaacagaggcacaggaagggcacctttacgtcctggcgctaacccccagctggagtggcagtattaccagaataaaatcctgaaaggcaaagcagcagatataccagattcatcattgtgggagaatccagattctgcgcaagcaaatggaattgattctgttttgtcaagggctgaaattgcatcttgtagttatgaggccaggcaacttggcattaagaacggaatgttttttgggcatgctaaacaactatgtcctaatcttcaagctgttccatacgattttcatgcatataaggaagtcgcacaaacattgtatgaaacattggcaagctacactcataacattgaagctgtcagttgtgatgaagcgctggtagacattaccgaaatccttgcagagaccaaacttactcctgatgaatttgcaaatgctgttcgtatggaaatcaaagaccagacgaaatgtgctgcctctgttggaattggttctaatattctcctggctagaatggcaactagaaaagcaaaaccagatgggcagtaccacctaaaaccagaagaagtagatgattttatcagaggccagctagtgaccaatctaccaggagttggacattcaatggaatctaagttggcatctttgggaattaaaacttgtggagacttgcagtatatgaccatggcaaaactccaaaaagaatttggtcccaaaacaggtcagatgctttataggttctgccgtggcttggatgatagaccagttcgaactgaaaaggaaagaaaatctgtttcagctgagatcaactatggaataaggtttactcagccaaaagaggcagaagcttttcttctgagtctttcagaagaaattcaaagaagactagaagccactggcatgaagggtaaacgtctaactctcaaaatcatggtacgaaagcctggggctcctgtagaaactgcaaaatttggaggccatggaatttgtgataacattgccaggactgtaactcttgaccaggcaacagataatgcaaaaataattggaaaggcgatgctaaacatgtttcatacaatgaaactaaatatatcagatatgagaggggttgggattcacgtgaatcagttggttccaactaatctgaacccttccacatgtcccagtcgcccatcagttcagtcaagccactttcctagtgggtcatactctgtccgtgatgtcttccaagttcagaaagctaagaaatccaccgaagaggagcacaaagaagtatttcgggctgctgtggatctggaaatatcatctgcttctagaacttgcactttcttgccaccttttcctgcacatctgccgaccagtcctgatactaacaaggctgagtcttcagggaaatggaatggtctacatactcctgtcagtgtgcagtcgagacttaacctgagtatagaggtcccgtcaccttcccagctggatcagtctgttttagaagcacttccacctgatctccgggaacaagtagagcaagtctgtgctgtccagcaagcagagtcacatggcgacaaaaagaaagaaccagtaaatggctgtaatacaggaattttgccacaaccagttgggacagtcttgttgcaaataccagaacctcaagaatcgaacagtgacgcaggaataaatttaatagcccttccagcattttcacaggtggaccctgaggtatttgctgcccttcctgctgaacttcagagggagctgaaagcagcgtatgatcaaagacaaaggcagggcgagaacagcactcaccagcagtcagccagcgcatctgtgccaaagaatcctttacttcatctaaaggcagcagtgaaagaaaagaaaagaaacaagaagaaaaaaaccattggttcaccaaaaaggattcagagtcctttgaataacaagctgcttaacagtcctgcaaaaactctgccaggggcctgtggcagtccccagaagttaattgatgggtttctaaaacatgaaggacctcctgcagagaaacccctggtaattccttaactttgacctttatgagatcttaatatacctggataatgtgtgaatatagcaattttatcctttgttttcttaacaggaagaactctctgcttctacttcaggtgtgccaggcctttctagtttgcagtctgacccagctggctgtgtgagacctccagcacccaatctagctggagctgttgaattcaatgatgtgaagaccttgctcagagaatggataactacaatttcaggttggcttggcctgtgttaagatggcccaaggctgagatgtagtcgtctcatgatttgagaacataaacagactaaactatgcagatttaacccatttctctaactctgataagcttaaagcagctacccccaaatcttttaaattctgggacttgctttgaaaagtaacaaagcccattcctttgatagctgttagtgacatagttgtagaaatgcagttttcctttatccatgcagatctctgactttctccttcaaaaagactggtcctcatttgaagtttttcccccttcctagatccaatggaagaagacattctccaagttgtgaaatactgtactgatctaatagaagaaaaagatttggaaaaactggatctagttataaaatacatgaaaaggctgatgcagcaatcggtggaatcggtttggaatatggcatttgactttattcttgacaatgtccaggtggttttacaacaaacttatggaagcacattaaaagttacataaatattaccagagagcctgatgctctctgatagctgtgccataagtgcttgtgaggtatttgcaaagtgcatgatagtaatgctcggagtttttataattttaaatttcttttaaagcaagtgttttgtacatttcttttcaaaaagtgccaaatttgtcagtattgcatgtaaataattgtgttaattattttactgtagcatagattctatttacaaaatgtttgtttataaagttttatggatttttacagtgaagtgtttacagttgtttaataaagaactgtatgtatattttgtacaggctcctttttgtgaatccttaaaaactcaactctaggaagcaactactgtttattatactaaaaggctgaaaaacctccaggccagactgctaagctctgaaattcctgagaggtctcagaccgggattctacttgttccaagaaagggtaaagcttctaaaccatcttattcttgtctccaagcatgaacacaggagcatgttaagaaaatctttactacttcttccatgcggagaaatctacatattttgaattagaaacaccctcacacccacttgaagatttttttcctgggaacattatgtcccgtagatcagaggtggtgttgtctttttgcttctactggccattgagaaactttgatgataaaaaagaacggtatagatttttcaaacgtatataaaatatttttatgttatatgttatgccataactttaaaataaaaatagtttaaaattctaaa

SEQ ID NO: 373656 - DNA, 4535 bp, Homo sapiens
ttattgccttgccttatggtttatgtttatgaggtcatcattatgttctggtcactagcacagaataaggtccatttatttatttagtttttaaaatttttttttttcaaaaaaggggggagaaaatgtaacctttgtgattggtttaccttttctttaattctagggtgggtatatggctgccaaggtccagaaattggaggaacagtttcgatcagatgctgctatgcagaaggatgggacttcatctacaatttttagtggagttgccatctatgttaatggatacacagatccttccgctgaggaattgagaaaactaatgatgttgcatggaggtcaataccatgtatattattccagatctaaaacaacacatattattgccacaaatcttcccaatgccaaaattaaagaattaaagggggaaaaagtaattcgaccagaatggattgtggaaagcatcaaagctggacgactcctctcctacattccatatcagctgtacaccaagcagtccagtgtgcagaaaggtctcagctttaatcctgtatgcagacctgaggatcctctgccaggtccaagcaatatagccaaacagctcaacaacagggtaaatcacatcgttaagaagattgaaacggaaaatgaagtcaaagtcaatggcatgaacagttggaatgaagaagatgaaaataatgattttagttttgtggatctggagcagacctctccgggaaggaaacagaatggaattccgcatcccagagggagcactgccatttttaatggacacactcctagctctaatggtgccttaaagacacaggattgcttggtgcccatggtcaacagtgttgccagcaggctttctccagccttttcccaggaggaggataaggctgagaagagcagcactgatttcagagactgcactctgcagcagttgcagcaaagcaccagaaacacagatgctttgcggaatccacacagaactaattctttctcattatcacctttgcacagtaacactaaaatcaatggtgctcaccactccactgttcaggggccttcaagcacaaaaagcacttcttcagtatctacgtttagcaaggcagcaccttcagtgccatccaaaccttcagactgcaattttatttcaaacttctattctcattcaagactgcatcacatatcaatgtggaagtgtgaattgactgagtttgtcaataccctacaaagacaaagtaatggtatctttccaggaagggaaaagttaaaaaaaatgaaaacaggcaggtctgcacttgttgtaactgacacaggagatatgtcagtattgaattctcccagacatcagagctgtataatgcatgttgatatggattgcttctttgtatcagtgggtatacgaaatagaccagatctcaaaggaaaaccagtggctgttacaagtaacagaggcacaggaagggcacctttacgtcctggcgctaacccccagctggagtggcagtattaccagaataaaatcctgaaaggcaaagcagcagatataccagattcatcattgtgggagaatccagattctgcgcaagcaaatggaattgattctgttttgtcaagggctgaaattgcatcttgtagttatgaggccaggcaacttggcattaagaacggaatgttttttgggcatgctaaacaactatgtcctaatcttcaagctgttccatacgattttcatgcatataaggaagtcgcacaaacattgtatgaaacattggcaagctacactcataacattgaagctgtcagttgtgatgaagcgctggtagacattaccgaaatccttgcagagaccaaacttactcctgatgaatttgcaaatgctgttcgtatggaaatcaaagaccagacgaaatgtgctgcctctgttggaattggttctaatattctcctggctagaatggcaactagaaaagcaaaaccagatgggcagtaccacctaaaaccagaagaagtagatgattttatcagaggccagctagtgaccaatctaccaggagttggacattcaatggaatctaagttggcatctttgggaattaaaacttgtggagacttgcagtatatgaccatggcaaaactccaaaaagaatttggtcccaaaacaggtcagatgctttataggttctgccgtggcttggatgatagaccagttcgaactgaaaaggaaagaaaatctgtttcagctgagatcaactatggaataaggtttactcagccaaaagaggcagaagcttttcttctgagtctttcagaagaaattcaaagaagactagaagccactggcatgaagggtaaacgtctaactctcaaaatcatggtacgaaagcctggggctcctgtagaaactgcaaaatttggaggccatggaatttgtgataacattgccaggactgtaactcttgaccaggcaacagataatgcaaaaataattggaaaggcgatgctaaacatgtttcatacaatgaaactaaatatatcagatatgagaggggttgggattcacgtgaatcagttggttccaactaatctgaacccttccacatgtcccagtcgcccatcagttcagtcaagccactttcctagtgggtcatactctgtccgtgatgtcttccaagttcagaaagctaagaaatccaccgaagaggagcacaaagaagtatttcgggctgctgtggatctggaaatatcatctgcttctagaacttgcactttcttgccaccttttcctgcacatctgccgaccagtcctgatactaacaaggctgagtcttcagggaaatggaatggtctacatactcctgtcagtgtgcagtcgagacttaacctgagtatagaggtcccgtcaccttcccagctggatcagtctgttttagaagcacttccacctgatctccgggaacaagtagagcaagtctgtgctgtccagcaagcagagtcacatggcgacaaaaagaaagaaccagtaaatggctgtaatacaggaattttgccacaaccagttgggacagtcttgttgcaaataccagaacctcaagaatcgaacagtgacgcaggaataaatttaatagcccttccagcattttcacaggtggaccctgaggtatttgctgcccttcctgctgaacttcagagggagctgaaagcagcgtatgatcaaagacaaaggcagggcgagaacagcactcaccagcagtcagccagcgcatctgtgccaaagaatcctttacttcatctaaaggcagcagtgaaagaaaagaaaagaaacaagaagaaaaaaaccattggttcaccaaaaaggattcagagtcctttgaataacaagctgcttaacagtcctgcaaaaactctgccaggggcctgtggcagtccccagaagttaattgatgggtttctaaaacatgaaggacctcctgcagagaaacccctggaagaactctctgcttctacttcaggtgtgccaggcctttctagtttgcagtctgacccagctggctgtgtgagacctccaagttgtgaaatactgtactgatctaatagaagaaaaagatttggaaaaactggatctagttataaaatacatgaaaaggctgatgcagcaatcggtggaatcggtttggaatatggcatttgactttattcttgacaatgtccaggtggttttacaacaaacttatggaagcacattaaaagttacataaatattaccagagagcctgatgctctctgatagctgtgccataagtgcttgtgaggtatttgcaaagtgcatgatagtaatgctcggagtttttataattttaaatttcttttaaagcaagtgttttgtacatttcttttcaaaaagtgccaaatttgtcagtattgcatgtaaataattgtgttaattattttactgtagcatagattctatttacaaaatgtttgtttataaagttttatggatttttacagtgaagtgtttacagttgtttaataaagaactgtatgtatattttgtacaggctcctttttgtgaatccttaaaaactcaactctaggaagcaactactgtttattatactaaaaggctgaaaaacctccaggccagactgctaagctctgaaattcctgagaggtctcagaccgggattctacttgttccaagaaagggtaaagcttctaaaccatcttattcttgtctccaagcatgaacacaggagcatgttaagaaaatctttactacttcttccatgcggagaaatctacatattttgaattagaaacaccctcacacccacttgaagatttttttcctgggaacattatgtcccgtagatcagaggtggtgttgtctttttgcttctactggccattgagaaactttgatgataaaaaagaacggtatagatttttcaaacgtatataaaatatttttatgttatatgttatgccataactttaaaataaaaatagtttaaaattctaaa

SEQ ID NO: 373657 - DNA, 3029 bp, Homo sapiens
gcggccgctcccacatcagaatgttaacagcatcttgtagttatgaggccaggcaacttggcattaagaacggaatgttttttgggcatgctaaacaactatgtcctaatcttcaagctgttccatacgattttcatgcatataaggaagtcgcacaaacattgtatgaaacattggcaagctacactcataacattgaagctgtcagttgtgatgaagcgctggtagacattaccgaaatccttgcagagaccaaacttactcctgatgaatttgcaaatgctgttcgtatggaaatcaaagaccagacgaaatgtgctgcctctgttggaattggttctaatattctcctggctagaatggcaactagaaaagcaaaaccagatgggcagtaccacctaaaaccagaagaagtagatgattttatcagaggccagctagtgaccaatctaccaggagttggacattcaatggaatctaagttggcatctttgggaattaaaacttgtggagacttgcagtatatgaccatggcaaaactccaaaaagaatttggtcccaaaacaggtcagatgctttataggttctgccgtggcttggatgatagaccagttcgaactgaaaaggaaagaaaatctgtttcagctgagatcaactatggaataaggtttactcagccaaaagaggcagaagcttttcttctgagtctttcagaagaaattcaaagaagactagaagccactggcatgaagggtaaacgtctaactctcaaaatcatggtacgaaagcctggggctcctgtagaaactgcaaaatttggaggccatggaatttgtgataacattgccaggactgtaactcttgaccaggcaacagataatgcaaaaataattggaaaggcgatgctaaacatgtttcatacaatgaaactaaatatatcagatatgagaggggttgggattcacgtgaatcagttggttccaactaatctgaacccttccacatgtcccagtcgcccatcagttcagtcaagccactttcctagtgggtcatactctgtccgtgatgtcttccaagttcagaaagctaagaaatccaccgaagaggagcacaaagaagtatttcgggctgctgtggatctggaaatatcatctgcttctagaacttgcactttcttgccaccttttcctgcacatctgccgaccagtcctgatactaacaaggctgagtcttcagggaaatggaatggtctacatactcctgtcagtgtgcagtcgagacttaacctgagtatagaggtcccgtcaccttcccagctggatcagtctgttttagaagcacttccacctgatctccgggaacaagtagagcaagtctgtgctgtccagcaagcagagtcacatggcgacaaaaagaaagaaccagtaaatggctgtaatacaggaattttgccacaaccagttgggacagtcttgttgcaaataccagaacctcaagaatcgaacagtgacgcaggaataaatttaatagcccttccagcattttcacaggtggaccctgaggtatttgctgcccttcctgctgaacttcagagggagctgaaagcagcgtatgatcaaagacaaaggcagggcgagaacagcactcaccagcagtcagccagcgcatctgtgccaaagaatcctttacttcatctaaaggcagcagtgaaagaaaagaaaagaaacaagaagaaaaaaaccattggttcaccaaaaaggattcagagtcctttgaataacaagctgcttaacagtcctgcaaaaactctgccaggggcctgtggcagtccccagaagttaattgatgggtttctaaaacatgaaggacctcctgcagagaaacccctggaagaactctctgcttctacttcaggtgtgccaggcctttctagtttgcagtctgacccagctggctgtgtgagacctccagcacccaatctagctggagctgttgaattcaatgatgtgaagaccttgctcagagaatggataactacaatttcagatccaatggaagaagacattctccaagttgtgaaatactgtactgatctaatagaagaaaaagatttggaaaaactggatctagttataaaatacatgaaaaggctgatgcagcaatcggtggaatcggtttggaatatggcatttgactttattcttgacaatgtccaggtggttttacaacaaacttatggaagcacattaaaagttacataaatattaccagagagcctgatgctctctgatagctgtgccataagtgcttgtgaggtatttgcaaagtgcatgatagtaatgctcggagtttttataattttaaatttcttttaaagcaagtgttttgtacatttcttttcaaaaagtgccaaatttgtcagtattgcatgtaaataattgtgttaattattttactgtagcatagattctatttacaaaatgtttgtttataaagttttatggatttttacagtgaagtgtttacagttgtttaataaagaactgtatgtatattttgtacaggctcctttttgtgaatccttaaaaactcaactctaggaagcaactactgtttattatactaaaaggctgaaaaacctccaggccagactgctaagctctgaaattcctgagaggtctcagaccgggattctacttgttccaagaaagggtaaagcttctaaaccatcttattcttgtctccaagcatgaacacaggagcatgttaagaaaatctttactacttcttccatgcggagaaatctacatattttgaattagaaacaccctcacacccacttgaagatttttttcctgggaacattatgtcccgtagatcagaggtggtgttgtctttttgcttctactggccattgagaaactttgatgataaaaaagaacggtatagatttttcaaacgtatataaaatatttttatgttatatgttatgccataactttaaaataaaaatagtttaaaattctaaa

SEQ ID NO: 373658 - DNA, 2514 bp, Homo sapiens
gcagtgtacctgctgttcatcactcccgccaatattttttgagaagtatttcatttaaaaaagataaaaatagtgaagtttccaagtagactgtcctctcttaatttttttttatcctaatttaaaaccttagttgacgagaacatcagtggaatacagtattccacttgtttggattttctgattttaaagatcttttggtatattttgggagaattggatactctgaagtttgagatgaatgaccactcactagctactttagaaattgtttttgtaataagtcatatagaatgctgtttgaatactttcatttacctttattctagaaacaggatccaggagatagtgaaaaggatttgctgaggattttgcttagctgaattcatattttcactttagttttcctagaagcatactctttattctgggttctaggttgggattcacgtgaatcagttggttccaactaatctgaacccttccacatgtcccagtcgcccatcagttcagtcaagccactttcctagtgggtcatactctgtccgtgatgtcttccaagttcagaaagctaagaaatccaccgaagaggagcacaaagaagtatttcgggctgctgtggatctggaaatatcatctgcttctagaacttgcactttcttgccaccttttcctgcacatctgccgaccagtcctgatactaacaaggctgagtcttcagggaaatggaatggtctacatactcctgtcagtgtgcagtcgagacttaacctgagtatagaggtcccgtcaccttcccagctggatcagtctgttttagaagcacttccacctgatctccgggaacaagtagagcaagtctgtgctgtccagcaagcagagtcacatggcgacaaaaagaaagaaccagtaaatggctgtaatacaggaattttgccacaaccagttgggacagtcttgttgcaaataccagaacctcaagaatcgaacagtgacgcaggaataaatttaatagcccttccagcattttcacaggtggaccctgaggtatttgctgcccttcctgctgaacttcagagggagctgaaagcagcgtatgatcaaagacaaaggcagggcgagaacagcactcaccagcagtcagccagcgcatctgtgccaaagaatcctttacttcatctaaaggcagcagtgaaagaaaagaaaagaaacaagaagaaaaaaaccattggttcaccaaaaaggattcagagtcctttgaataacaagctgcttaacagtcctgcaaaaactctgccaggggcctgtggcagtccccagaagttaattgatgggtttctaaaacatgaaggacctcctgcagagaaacccctggaagaactctctgcttctacttcaggtgtgccaggcctttctagtttgcagtctgacccagctggctgtgtgagacctccagcacccaatctagctggagctgttgaattcaatgatgtgaagaccttgctcagagaatggataactacaatttcagatccaatggaagaagacattctccaagttgtgaaatactgtactgatctaatagaagaaaaagatttggaaaaactggatctagttataaaatacatgaaaaggctgatgcagcaatcggtggaatcggtttggaatatggcatttgactttattcttgacaatgtccaggtggttttacaacaaacttatggaagcacattaaaagttacataaatattaccagagagcctgatgctctctgatagctgtgccataagtgcttgtgaggtatttgcaaagtgcatgatagtaatgctcggagtttttataattttaaatttcttttaaagcaagtgttttgtacatttcttttcaaaaagtgccaaatttgtcagtattgcatgtaaataattgtgttaattattttactgtagcatagattctatttacaaaatgtttgtttataaagttttatggatttttacagtgaagtgtttacagttgtttaataaagaactgtatgtatattttgtacaggctcctttttgtgaatccttaaaaactcaactctaggaagcaactactgtttattatactaaaaggctgaaaaacctccaggccagactgctaagctctgaaattcctgagaggtctcagaccgggattctacttgttccaagaaagggtaaagcttctaaaccatcttattcttgtctccaagcatgaacacaggagcatgttaagaaaatctttactacttcttccatgcggagaaatctacatattttgaattagaaacaccctcacacccacttgaagatttttttcctgggaacattatgtcccgtagatcagaggtggtgttgtctttttgcttctactggccattgagaaactttgatgataaaaaagaacggtatagatttttcaaacgtatataaaatatttttatgttatatgttatgccataactttaaaataaaaatagtttaaaattctaaa

SEQ ID NO: 373659 - DNA, 2065 bp, Homo sapiens
cctccctggggtgggatctaatttgagcttcaccaaggctattcatatctgttggccccaattgcaggacattctgtgagtatatttggacttacctggtcatgtgatagtggctggtagtatatatacacttctttccagactacacatagtacttcaggcttcaatgacaaaaggccaagacgttccaaaaatgtgctgatttggaggtggctttcctagcttgatggtctgtaccttacattgattatccacagtattcaaattgaaatttaaagtggcgtgttaactcccaaacacctcatctccgagcatgctttaacttcctactcatatgtttggcattttatagctggatcagtctgttttagaagcacttccacctgatctccgggaacaagtagagcaagtctgtgctgtccagcaagcagagtcacatggcgacaaaaagaaagaaccagtaaatggctgtaatacaggaattttgccacaaccagttgggacagtcttgttgcaaataccagaacctcaagaatcgaacagtgacgcaggaataaatttaatagcccttccagcattttcacaggtggaccctgaggtatttgctgcccttcctgctgaacttcagagggagctgaaagcagcgtatgatcaaagacaaaggcagggcgagaacagcactcaccagcagtcagccagcgcatctgtgccaaagaatcctttacttcatctaaaggcagcagtgaaagaaaagaaaagaaacaagaagaaaaaaaccattggttcaccaaaaaggattcagagtcctttgaataacaagctgcttaacagtcctgcaaaaactctgccaggggcctgtggcagtccccagaagttaattgatgggtttctaaaacatgaaggacctcctgcagagaaacccctggaagaactctctgcttctacttcaggtgtgccaggcctttctagtttgcagtctgacccagctggctgtgtgagacctccagcacccaatctagctggagctgttgaattcaatgatgtgaagaccttgctcagagaatggataactacaatttcagatccaatggaagaagacattctccaagttgtgaaatactgtactgatctaatagaagaaaaagatttggaaaaactggatctagttataaaatacatgaaaaggctgatgcagcaatcggtggaatcggtttggaatatggcatttgactttattcttgacaatgtccaggtggttttacaacaaacttatggaagcacattaaaagttacataaatattaccagagagcctgatgctctctgatagctgtgccataagtgcttgtgaggtatttgcaaagtgcatgatagtaatgctcggagtttttataattttaaatttcttttaaagcaagtgttttgtacatttcttttcaaaaagtgccaaatttgtcagtattgcatgtaaataattgtgttaattattttactgtagcatagattctatttacaaaatgtttgtttataaagttttatggatttttacagtgaagtgtttacagttgtttaataaagaactgtatgtatattttgtacaggctcctttttgtgaatccttaaaaactcaactctaggaagcaactactgtttattatactaaaaggctgaaaaacctccaggccagactgctaagctctgaaattcctgagaggtctcagaccgggattctacttgttccaagaaagggtaaagcttctaaaccatcttattcttgtctccaagcatgaacacaggagcatgttaagaaaatctttactacttcttccatgcggagaaatctacatattttgaattagaaacaccctcacacccacttgaagatttttttcctgggaacattatgtcccgtagatcagaggtggtgttgtctttttgcttctactggccattgagaaactttgatgataaaaaagaacggtatagatttttcaaacgtatataaaatatttttatgttatatgttatgccataactttaaaataaaaatagtttaaaattctaaa

SEQ ID NO: 373660 - DNA, 1913 bp, Homo sapiens
gacaaagagtaatggagtcactgttgtctaattattgcagtatataatgggcaaagtctaagctgttgcattaagagctcttcatattgggataatatctgaagtatacagtatgagtaaatatcatcatatttctagttggatttgtgtctgtactttcaggatttaaacacaccactttttactttttaaaaaagttggaataggacattaccacaaatgtcttaaatacttgttcagctagttgtcctttgagatgaatacattaaaggatgttggttcaaaatgcatcacaaacatcaaacccacatttagtactacccatcatagatgagcaacatgccaaaggtcaaattagtaagtggcaaagcaaagagagaattggagagcctgtactttgggccattgccattcactgcctctcacttggggcaggaggggaggtgtaggctagggagcctgttgtatttgggaggagaaaagagaacccaatactgtcatccagactatccatactatcattttgttgaggatcttatatccatctgctcttagtgccaaagaatcctttacttcatctaaaggcagcagtgaaagaaaagaaaagaaacaagaagaaaaaaaccattggttcaccaaaaaggattcagagtcctttgaataacaagctgcttaacagtcctgcaaaaactctgccaggggcctgtggcagtccccagaagttaattgatgggtttctaaaacatgaaggacctcctgcagagaaacccctggaagaactctctgcttctacttcaggtgtgccaggcctttctagtttgcagtctgacccagctggctgtgtgagacctccagcacccaatctagctggagctgttgaattcaatgatgtgaagaccttgctcagagaatggataactacaatttcagatccaatggaagaagacattctccaagttgtgaaatactgtactgatctaatagaagaaaaagatttggaaaaactggatctagttataaaatacatgaaaaggctgatgcagcaatcggtggaatcggtttggaatatggcatttgactttattcttgacaatgtccaggtggttttacaacaaacttatggaagcacattaaaagttacataaatattaccagagagcctgatgctctctgatagctgtgccataagtgcttgtgaggtatttgcaaagtgcatgatagtaatgctcggagtttttataattttaaatttcttttaaagcaagtgttttgtacatttcttttcaaaaagtgccaaatttgtcagtattgcatgtaaataattgtgttaattattttactgtagcatagattctatttacaaaatgtttgtttataaagttttatggatttttacagtgaagtgtttacagttgtttaataaagaactgtatgtatattttgtacaggctcctttttgtgaatccttaaaaactcaactctaggaagcaactactgtttattatactaaaaggctgaaaaacctccaggccagactgctaagctctgaaattcctgagaggtctcagaccgggattctacttgttccaagaaagggtaaagcttctaaaccatcttattcttgtctccaagcatgaacacaggagcatgttaagaaaatctttactacttcttccatgcggagaaatctacatattttgaattagaaacaccctcacacccacttgaagatttttttcctgggaacattatgtcccgtagatcagaggtggtgttgtctttttgcttctactggccattgagaaactttgatgataaaaaagaacggtatagatttttcaaacgtatataaaatatttttatgttatatgttatgccataactttaaaataaaaatagtttaaaattctaaa

SEQ ID NO: 373661 - DNA, 1756 bp, Homo sapiens
tgcttcccattttctactagtgcattttgcccaggttctgctgttgtagtgggtttctttaagttagtactcttaattccttattcttgctcttaattccttattcttgctctaaccattttgaagatttaatcagctttgatattggggaactgttaagaattcgtacagatcagaaaagtgagatttgaaaacaaagtctgttttgtgaaaaagagaaaccagctaccatctacaattagctcaggtttgactttgacctcgtcttttccactaggtggaccctgaggtatttgctgcccttcctgctgaacttcagagggagctgaaagcagcgtatgatcaaagacaaaggcagggcgagaacagcactcaccagcagtcagccagcgcatctgtgccaaagaatcctttacttcatctaaaggcagcagtgaaagaaaagaaaagaaacaagaagaaaaaaaccattggttcaccaaaaaggattcagagtcctttgaataacaagctgcttaacagtcctgcaaaaactctgccaggggcctgtggcagtccccagaagttaattgatgggtttctaaaacatgaaggacctcctgcagagaaacccctggaagaactctctgcttctacttcaggtgtgccaggcctttctagtttgcagtctgacccagctggctgtgtgagacctccagcacccaatctagctggagctgttgaattcaatgatgtgaagaccttgctcagagaatggataactacaatttcagatccaatggaagaagacattctccaagttgtgaaatactgtactgatctaatagaagaaaaagatttggaaaaactggatctagttataaaatacatgaaaaggctgatgcagcaatcggtggaatcggtttggaatatggcatttgactttattcttgacaatgtccaggtggttttacaacaaacttatggaagcacattaaaagttacataaatattaccagagagcctgatgctctctgatagctgtgccataagtgcttgtgaggtatttgcaaagtgcatgatagtaatgctcggagtttttataattttaaatttcttttaaagcaagtgttttgtacatttcttttcaaaaagtgccaaatttgtcagtattgcatgtaaataattgtgttaattattttactgtagcatagattctatttacaaaatgtttgtttataaagttttatggatttttacagtgaagtgtttacagttgtttaataaagaactgtatgtatattttgtacaggctcctttttgtgaatccttaaaaactcaactctaggaagcaactactgtttattatactaaaaggctgaaaaacctccaggccagactgctaagctctgaaattcctgagaggtctcagaccgggattctacttgttccaagaaagggtaaagcttctaaaccatcttattcttgtctccaagcatgaacacaggagcatgttaagaaaatctttactacttcttccatgcggagaaatctacatattttgaattagaaacaccctcacacccacttgaagatttttttcctgggaacattatgtcccgtagatcagaggtggtgttgtctttttgcttctactggccattgagaaactttgatgataaaaaagaacggtatagatttttcaaacgtatataaaatatttttatgttatatgttatgccataactttaaaataaaaatagtttaaaattctaaa

SEQ ID NO: 373662 - DNA, 3769 bp, Homo sapiens
ttattgccttgccttatggtttatgtttatgaggtcatcattatgttctggtcactagcacagaataaggtccatttatttatttagtttttaaaatttttttttttcaaaaaaggggggagaaaatgtaacctttgtgattggtttaccttttctttaattctagggtgggtatatggctgccaaggtccagaaattggaggaacagtttcgatcagatgctgctatgcagaaggatgggacttcatctacaatttttagtggagttgccatctatgttaatggatacacagatccttccgctgaggaattgagaaaactaatgatgttgcatggaggtcaataccatgtatattattccagatctaaaacaacacatattattgccacaaatcttcccaatgccaaaattaaagaattaaagggggaaaaagtaattcgaccagaatggattgtggaaagcatcaaagctggacgactcctctcctacattccatatcagctgtacaccaagcagtccagtgtgcagaaaggtctcagctttaatcctgtatgcagacctgaggatcctctgccaggtccaagcaatatagccaaacagctcaacaacagggtaaatcacatcgttaagaagattgaaacggaaaatgaagtcaaagtcaatggcatgaacagttggaatgaagaagatgaaaataatgattttagttttgtggatctggagcagacctctccgggaaggaaacagaatggaattccgcatcccagagggagcactgccatttttaatggacacactcctagctctaatggtgccttaaagacacaggattgcttggtgcccatggtcaacagtgttgccagcaggctttctccagccttttcccaggaggaggataaggctgagaagagcagcactgatttcagagactgcactctgcagcagttgcagcaaagcaccagaaacacagatgctttgcggaatccacacagaactaattctttctcattatcacctttgcacagtaacactaaaatcaatggtgctcaccactccactgttcaggggccttcaagcacaaaaagcacttcttcagtatctacgtttagcaaggcagcaccttcagtgccatccaaaccttcagactgcaattttatttcaaacttctattctcattcaagactgcatcacatatcaatgtggaagtgtgaattgactgagtttgtcaataccctacaaagacaaagtaatggtatctttccaggaagggaaaagttaaaaaaaatgaaaacaggcaggtctgcacttgttgtaactgacacaggagatatgtcagtattgaattctcccagacatcagagctgtataatgcatgttgatatggattgcttctttgtatcagtgggtatacgaaatagaccagatctcaaaggaaaaccagtggctgttacaagtaacagaggcacaggaagggcacctttacgtcctggcgctaacccccagctggagtggcagtattaccagaataaaatcctgaaaggcaaagcagcagatataccagattcatcattgtgggagaatccagattctgcgcaagcaaatggaattgattctgttttgtcaagggctgaaattgcatcttgtagttatgaggccaggcaacttggcattaagaacggaatgttttttgggcatgctaaacaactatgtcctaatcttcaagctgttccatacgattttcatgcatataaggaagtcgcacaaacattgtatgaaacattggcaagctacactcataacattgaagctgtcagttgtgatgaagcgctggtagacattaccgaaatccttgcagagaccaaacttactcctgatgaatttgcaaatgctgttcgtatggaaatcaaagaccagacgaaatgtgctgcctctgttggaattggttctaatattctcctggctagaatggcaactagaaaagcaaaaccagatgggcagtaccacctaaaaccagaagaagtagatgattttatcagaggccagctagtgaccaatctaccaggagttggacattcaatggaatctaagttggcatctttgggaattaaaacttgtggagacttgcagtatatgaccatggcaaaactccaaaaagaatttggtcccaaaacaggtcagatgctttataggttctgccgtggcttggatgatagaccagttcgaactgaaaaggaaagaaaatctgtttcagctgagatcaactatggaataaggtttactcagccaaaagaggcagaagcttttcttctgagtctttcagaagaaattcaaagaagactagaagccactggcatgaagggtaaacgtctaactctcaaaatcatggtacgaaagcctggggctcctgtagaaactgcaaaatttggaggccatggaatttgtgataacattgccaggactgtaactcttgaccaggcaacagataatgcaaaaataattggaaaggcgatgctaaacatgtttcatacaatgaaactaaatatatcagatatgagaggggttgggattcacgtgaatcagttggttccaactaatctgaacccttccacatgtcccagtcgcccatcagttcagtcaagccactttcctagtgggtcatactctgtccgtgatgtcttccaagttcagaaagctaagaaatccaccgaagaggagcacaaagaagtatttcgggctgctgtggatctggaaatatcatctgcttctagaacttgcactttcttgccaccttttcctgcacatctgccgaccagtcctgatactaacaaggctgagtcttcagggaaatggaatggtctacatactcctgtcagtgtgcagtcgagacttaacctgagtatagaggtcccgtcaccttcccaggtacatttttgtagtcctaaatataagtacattttatactcctaaatataaatacaaaaatacaagtttacaaatgaaaatggcatttttatttcttcatctgtttaaccaagaaagggagaacgggccacttgtttgggtagatcatgatgttggattctaaataagcaatatttgggttgagtgaaagtgcttttgcaaagatttgccactcttgcaagttgtaaagcatagctgaaaggcagtcctcctgtggactgccattgtctgtgacagtggtcatcatgcagacttactgtattcagcaaggcagctttggtgattagtggtgaagtagaggccttatgtcgaagggtttttgcagtatttgcaaacaggtctctggagatttggatggtttaattcagcgtgtgtgggctgtacatgtgatatactgctggtccttgaaagtaaggtagcaccttaagctatattgggcaagtttatttgtgcctctgctccccctgcatggaaggaggcggaaggagatgttaaatactggctgcaaaactaggggaaagggcaatgctgatatgcttgtatggcgacagatacccacaattagttactcctggcaagataagattggtccacccagttgatgggatagcatgtttccaaagggccagatgtggattttcaggtaggccctggccaaaggaacagtggattctgtcctgtaagttagagaaaattcagcttctagaaaacctttcttccaagtgtgctgctctcagagtagaattatttgtatttatgggcagtctctcatctgaaaggtgaactttggacccaggactgttacct

SEQ ID NO: 373663 - DNA, 598 bp, Homo sapiens
gttttgtgcataaatggtgggtattttgtgttaataaacttgttattagtagcttattctgcatacttaactatattccctttcctaggagttggacattcaatggaatctaagttggcatctttgggaattaaaacttgtggagacttgcagtatatgaccatggcaaaactccaaaaagaatttggtcccaaaacaggtcagatgctttataggttctgccgtggcttggatgatagaccagttcgaactgaaaaggaaagaaaatctgtttcagctgagatcaactatggaataaggtttactcaggtactgatcattgaacagattttgccatctgttgctctttatatttttacatagtcctacctctacaactaaaccattagaccctcaatgcttgaaattaagtcttaaaactgttgtatccccagagccttaagaaggccttttaaggcactgtgtggtaaggtgtagccccagataagactgagactgaggaaacttagctcttggggaaatatactaaaagattatgctttggaggccagttattagagaacttgagattataattattctaattaacagtgaaaaa

SEQ ID NO: 373664 - DNA, 375 bp, Homo sapiens
tgccaaagtcaatttttatatataaaaaggaataattagtcttaaggacctttcctaattcctaatgacatttcttctctccccacctttaggctgatgcagcaatcggtggaatcggtttggaatatggcatttgactttattcttgacaatgtccaggtggttttacaacaaacttatggaagcacattaaaagttacataaatattaccagagagcctgatgctctctgatagctgtgccataagtgcttgtgaggtatttgcaaagtgcatgatagtaatgctcggagtttttataattttaaatttcttttaaagcaagtgttttgtacatttcttttcaaaaagtgccaaatttgtcagtattgcatgt

SEQ ID NO: 373665 - DNA, 4755 bp, Homo sapiens
accggagggggaggggcggagagccaccgcggagcgcgcgcggggttggttgccgcgagcgtgggggagcgtggaccgcggcgctgctcagcggtggggctgccttcccccggccctcctccctggtccctggcgagggcactggcggcggcggggccggggtccgcaaggccggagaaggccgccgggcccgggcatggtggtctggggcaacgcggaagaagctccaccatgaggcgaggtggatggaggaagcgagctgaaaatgatggctgggaaacatggggtgggtatatggctgccaaggtccagaaattggaggaacagtttcgatcagatgctgctatgcagaaggatgggacttcatctacaatttttagtggagttgccatctatgttaatggatacacagatccttccgctgaggaattgagaaaactaatgatgttgcatggaggtcaataccatgtatattattccagatctaaaacaacacatattattgccacaaatcttcccaatgccaaaattaaagaattaaagggggaaaaagtaattcgaccagaatggattgtggaaagcatcaaagctggacgactcctctcctacattccatatcagctgtacaccaagcagtccagtgtgcagaaaggtctcagctttaatcctgtatgcagacctgaggatcctctgccaggtccaagcaatatagccaaacagctcaacaacagggtaaatcacatcgttaagaagattgaaacggaaaatgaagtcaaagtcaatggcatgaacagttggaatgaagaagatgaaaataatgattttagttttgtggatctggagcagacctctccgggaaggaaacagaatggaattccgcatcccagagggagcactgccatttttaatggacacactcctagctctaatggtgccttaaagacacaggattgcttggtgcccatggtcaacagtgttgccagcaggctttctccagccttttcccaggaggaggataaggctgagaagagcagcactgatttcagagactgcactctgcagcagttgcagcaaagcaccagaaacacagatgctttgcggaatccacacagaactaattctttctcattatcacctttgcacagtaacactaaaatcaatggtgctcaccactccactgttcaggggccttcaagcacaaaaagcacttcttcagtatctacgtttagcaaggcagcaccttcagtgccatccaaaccttcagactgcaattttatttcaaacttctattctcattcaagactgcatcacatatcaatgtggaagtgtgaattgactgagtttgtcaataccctacaaagacaaagtaatggtatctttccaggaagggaaaagttaaaaaaaatgaaaacaggcaggtctgcacttgttgtaactgacacaggagatatgtcagtattgaattctcccagacatcagagctgtataatgcatgttgatatggattgcttctttgtatcagtgggtatacgaaatagaccagatctcaaaggaaaaccagtggctgttacaagtaacagaggcacaggaagggcacctttacgtcctggcgctaacccccagctggagtggcagtattaccagaataaaatcctgaaaggcaaagcagcagatataccagattcatcattgtgggagaatccagattctgcgcaagcaaatggaattgattctgttttgtcaagggctgaaattgcatcttgtagttatgaggccaggcaacttggcattaagaacggaatgttttttgggcatgctaaacaactatgtcctaatcttcaagctgttccatacgattttcatgcatataaggaagtcgcacaaacattgtatgaaacattggcaagctacactcataacattgaagctgtcagttgtgatgaagcgctggtagacattaccgaaatccttgcagagaccaaacttactcctgatgaatttgcaaatgctgttcgtatggaaatcaaagaccagacgaaatgtgctgcctctgttggaattggttctaatattctcctggctagaatggcaactagaaaagcaaaaccagatgggcagtaccacctaaaaccagaagaagtagatgattttatcagaggccagctagtgaccaatctaccaggagttggacattcaatggaatctaagttggcatctttgggaattaaaacttgtggagacttgcagtatatgaccatggcaaaactccaaaaagaatttggtcccaaaacaggtcagatgctttataggttctgccgtggcttggatgatagaccagttcgaactgaaaaggaaagaaaatctgtttcagctgagatcaactatggaataaggtttactcagccaaaagaggcagaagcttttcttctgagtctttcagaagaaattcaaagaagactagaagccactggcatgaagggtaaacgtctaactctcaaaatcatggtacgaaagcctggggctcctgtagaaactgcaaaatttggaggccatggaatttgtgataacattgccaggactgtaactcttgaccaggcaacagataatgcaaaaataattggaaaggcgatgctaaacatgtttcatacaatgaaactaaatatatcagatatgagaggggttgggattcacgtgaatcagttggttccaactaatctgaacccttccacatgtcccagtcgcccatcagttcagtcaagccactttcctagtgggtcatactctgtccgtgatgtcttccaagttcagaaagctaagaaatccaccgaagaggagcacaaagaagtatttcgggctgctgtggatctggaaatatcatctgcttctagaacttgcactttcttgccaccttttcctgcacatctgccgaccagtcctgatactaacaaggctgagtcttcagggaaatggaatggtctacatactcctgtcagtgtgcagtcgagacttaacctgagtatagaggtcccgtcaccttcccagctggatcagtctgttttagaagcacttccacctgatctccgggaacaagtagagcaagtctgtgctgtccagcaagcagagtcacatggcgacaaaaagaaagaaccagtaaatggctgtaatacaggaattttgccacaaccagttgggacagtcttgttgcaaataccagaacctcaagaatcgaacagtgacgcaggaataaatttaatagcccttccagcattttcacaggtggaccctgaggtatttgctgcccttcctgctgaacttcagagggagctgaaagcagcgtatgatcaaagacaaaggcagggcgagaacagcactcaccagcagtcagccagcgcatctgtgccaaagaatcctttacttcatctaaaggcagcagtgaaagaaaagaaaagaaacaagaagaaaaaaaccattggttcaccaaaaaggattcagagtcctttgaataacaagctgcttaacagtcctgcaaaaactctgccaggggcctgtggcagtccccagaagttaattgatgggtttctaaaacatgaaggacctcctgcagagaaacccctggaagaactctctgcttctacttcaggtgtgccaggcctttctagtttgcagtctgacccagctggctgtgtgagacctccagcacccaatctagctggagctgttgaattcaatgatgtgaagaccttgctcagagaatggataactacaatttcagatccaatggaagaagacattctccaagttgtgaaatactgtactgatctaatagaagaaaaagatttggaaaaactggatctagttataaaatacatgaaaaggctgatgcagcaatcggtggaatcggtttggaatatggcatttgactttattcttgacaatgtccaggtggttttacaacaaacttatggaagcacattaaaagttacataaatattaccagagagcctgatgctctctgatagctgtgccataagtgcttgtgaggtatttgcaaagtgcatgatagtaatgctcggagtttttataattttaaatttcttttaaagcaagtgttttgtacatttcttttcaaaaagtgccaaatttgtcagtattgcatgtaaataattgtgttaattattttactgtagcatagattctatttacaaaatgtttgtttataaagttttatggatttttacagtgaagtgtttacagttgtttaataaagaactgtatgtatattttgtacaggctcctttttgtgaatccttaaaaactcaactctaggaagcaactactgtttattatactaaaaggctgaaaaacctccaggccagactgctaagctctgaaattcctgagaggtctcagaccgggattctacttgttccaagaaagggtaaagcttctaaaccatcttattcttgtctccaagcatgaacacaggagcatgttaagaaaatctttactacttcttccatgcggagaaatctacatattttgaattagaaacaccctcacacccacttgaagatttttttcctgggaacattatgtcccgtagatcagaggtggtgttgtctttttgcttctactggccattgagaaactttgatgataaaaaagaacggtatagatttttcaaacgtatataaaatatttttatgttatatgttatgccataactttaaaataaaaatagtttaaaattctaaa

SEQ ID NO: 373666 - DNA, 4636 bp, Homo sapiens
ttattgccttgccttatggtttatgtttatgaggtcatcattatgttctggtcactagcacagaataaggtccatttatttatttagtttttaaaatttttttttttcaaaaaaggggggagaaaatgtaacctttgtgattggtttaccttttctttaattctagggtgggtatatggctgccaaggtccagaaattggaggaacagtttcgatcagatgctgctatgcagaaggatgggacttcatctacaatttttagtggagttgccatctatgttaatggatacacagatccttccgctgaggaattgagaaaactaatgatgttgcatggaggtcaataccatgtatattattccagatctaaaacaacacatattattgccacaaatcttcccaatgccaaaattaaagaattaaagggggaaaaagtaattcgaccagaatggattgtggaaagcatcaaagctggacgactcctctcctacattccatatcagctgtacaccaagcagtccagtgtgcagaaaggtctcagctttaatcctgtatgcagacctgaggatcctctgccaggtccaagcaatatagccaaacagctcaacaacagggtaaatcacatcgttaagaagattgaaacggaaaatgaagtcaaagtcaatggcatgaacagttggaatgaagaagatgaaaataatgattttagttttgtggatctggagcagacctctccgggaaggaaacagaatggaattccgcatcccagagggagcactgccatttttaatggacacactcctagctctaatggtgccttaaagacacaggattgcttggtgcccatggtcaacagtgttgccagcaggctttctccagccttttcccaggaggaggataaggctgagaagagcagcactgatttcagagactgcactctgcagcagttgcagcaaagcaccagaaacacagatgctttgcggaatccacacagaactaattctttctcattatcacctttgcacagtaacactaaaatcaatggtgctcaccactccactgttcaggggccttcaagcacaaaaagcacttcttcagtatctacgtttagcaaggcagcaccttcagtgccatccaaaccttcagactgcaattttatttcaaacttctattctcattcaagactgcatcacatatcaatgtggaagtgtgaattgactgagtttgtcaataccctacaaagacaaagtaatggtatctttccaggaagggaaaagttaaaaaaaatgaaaacaggcaggtctgcacttgttgtaactgacacaggagatatgtcagtattgaattctcccagacatcagagctgtataatgcatgttgatatggattgcttctttgtatcagtgggtatacgaaatagaccagatctcaaaggaaaaccagtggctgttacaagtaacagaggcacaggaagggcacctttacgtcctggcgctaacccccagctggagtggcagtattaccagaataaaatcctgaaaggcaaagcagcagatataccagattcatcattgtgggagaatccagattctgcgcaagcaaatggaattgattctgttttgtcaagggctgaaattgcatcttgtagttatgaggccaggcaacttggcattaagaacggaatgttttttgggcatgctaaacaactatgtcctaatcttcaagctgttccatacgattttcatgcatataaggaagtcgcacaaacattgtatgaaacattggcaagctacactcataacattgaagctgtcagttgtgatgaagcgctggtagacattaccgaaatccttgcagagaccaaacttactcctgatgaatttgcaaatgctgttcgtatggaaatcaaagaccagacgaaatgtgctgcctctgttggaattggttctaatattctcctggctagaatggcaactagaaaagcaaaaccagatgggcagtaccacctaaaaccagaagaagtagatgattttatcagaggccagctagtgaccaatctaccaggagttggacattcaatggaatctaagttggcatctttgggaattaaaacttgtggagacttgcagtatatgaccatggcaaaactccaaaaagaatttggtcccaaaacaggtcagatgctttataggttctgccgtggcttggatgatagaccagttcgaactgaaaaggaaagaaaatctgtttcagctgagatcaactatggaataaggtttactcagccaaaagaggcagaagcttttcttctgagtctttcagaagaaattcaaagaagactagaagccactggcatgaagggtaaacgtctaactctcaaaatcatggtacgaaagcctggggctcctgtagaaactgcaaaatttggaggccatggaatttgtgataacattgccaggactgtaactcttgaccaggcaacagataatgcaaaaataattggaaaggcgatgctaaacatgtttcatacaatgaaactaaatatatcagatatgagaggggttgggattcacgtgaatcagttggttccaactaatctgaacccttccacatgtcccagtcgcccatcagttcagtcaagccactttcctagtgggtcatactctgtccgtgatgtcttccaagttcagaaagctaagaaatccaccgaagaggagcacaaagaagtatttcgggctgctgtggatctggaaatatcatctgcttctagaacttgcactttcttgccaccttttcctgcacatctgccgaccagtcctgatactaacaaggctgagtcttcagggaaatggaatggtctacatactcctgtcagtgtgcagtcgagacttaacctgagtatagaggtcccgtcaccttcccagctggatcagtctgttttagaagcacttccacctgatctccgggaacaagtagagcaagtctgtgctgtccagcaagcagagtcacatggcgacaaaaagaaagaaccagtaaatggctgtaatacaggaattttgccacaaccagttgggacagtcttgttgcaaataccagaacctcaagaatcgaacagtgacgcaggaataaatttaatagcccttccagcattttcacaggtggaccctgaggtatttgctgcccttcctgctgaacttcagagggagctgaaagcagcgtatgatcaaagacaaaggcagggcgagaacagcactcaccagcagtcagccagcgcatctgtgccaaagaatcctttacttcatctaaaggcagcagtgaaagaaaagaaaagaaacaagaagaaaaaaaccattggttcaccaaaaaggattcagagtcctttgaataacaagctgcttaacagtcctgcaaaaactctgccaggggcctgtggcagtccccagaagttaattgatgggtttctaaaacatgaaggacctcctgcagagaaacccctggaagaactctctgcttctacttcaggtgtgccaggcctttctagtttgcagtctgacccagctggctgtgtgagacctccagcacccaatctagctggagctgttgaattcaatgatgtgaagaccttgctcagagaatggataactacaatttcagatccaatggaagaagacattctccaagttgtgaaatactgtactgatctaatagaagaaaaagatttggaaaaactggatctagttataaaatacatgaaaaggctgatgcagcaatcggtggaatcggtttggaatatggcatttgactttattcttgacaatgtccaggtggttttacaacaaacttatggaagcacattaaaagttacataaatattaccagagagcctgatgctctctgatagctgtgccataagtgcttgtgaggtatttgcaaagtgcatgatagtaatgctcggagtttttataattttaaatttcttttaaagcaagtgttttgtacatttcttttcaaaaagtgccaaatttgtcagtattgcatgtaaataattgtgttaattattttactgtagcatagattctatttacaaaatgtttgtttataaagttttatggatttttacagtgaagtgtttacagttgtttaataaagaactgtatgtatattttgtacaggctcctttttgtgaatccttaaaaactcaactctaggaagcaactactgtttattatactaaaaggctgaaaaacctccaggccagactgctaagctctgaaattcctgagaggtctcagaccgggattctacttgttccaagaaagggtaaagcttctaaaccatcttattcttgtctccaagcatgaacacaggagcatgttaagaaaatctttactacttcttccatgcggagaaatctacatattttgaattagaaacaccctcacacccacttgaagatttttttcctgggaacattatgtcccgtagatcagaggtggtgttgtctttttgcttctactggccattgagaaactttgatgataaaaaagaacggtatagatttttcaaacgtatataaaatatttttatgttatatgttatgccataactttaaaataaaaatagtttaaaattctaaa

SEQ ID NO: 373667 - DNA, 4912 bp, Homo sapiens
accggagggggaggggcggagagccaccgcggagcgcgcgcggggttggttgccgcgagcgtgggggagcgtggaccgcggcgctgctcagcggtggggctgccttcccccggccctcctccctggtccctggcgagggcactggcggcggcggggccggggtccgcaaggccggagaaggccgccgggcccgggcatggtggtctggggcaacgcggaagaagctccaccatgaggcgaggtggatggaggaagcgagctgaaaatgatggctgggaaacatggggtgggtatatggctgccaaggtccagaaattggaggaacagtttcgatcagatgctgctatgcagaaggatgggacttcatctacaatttttagtggagttgccatctatgttaatggatacacagattggttttcatgcttcacttcacactgaagaatatgtaagagctttcagaagtgaacttcaaagagccctcttaacttcatccagtagaagggcaatgtattttccagttccaaatttctggagtaattagttttcaaagagcagctagtagacggatccttccgctgaggaattgagaaaactaatgatgttgcatggaggtcaataccatgtatattattccagatctaaaacaacacatattattgccacaaatcttcccaatgccaaaattaaagaattaaagggggaaaaagtaattcgaccagaatggattgtggaaagcatcaaagctggacgactcctctcctacattccatatcagctgtacaccaagcagtccagtgtgcagaaaggtctcagctttaatcctgtatgcagacctgaggatcctctgccaggtccaagcaatatagccaaacagctcaacaacagggtaaatcacatcgttaagaagattgaaacggaaaatgaagtcaaagtcaatggcatgaacagttggaatgaagaagatgaaaataatgattttagttttgtggatctggagcagacctctccgggaaggaaacagaatggaattccgcatcccagagggagcactgccatttttaatggacacactcctagctctaatggtgccttaaagacacaggattgcttggtgcccatggtcaacagtgttgccagcaggctttctccagccttttcccaggaggaggataaggctgagaagagcagcactgatttcagagactgcactctgcagcagttgcagcaaagcaccagaaacacagatgctttgcggaatccacacagaactaattctttctcattatcacctttgcacagtaacactaaaatcaatggtgctcaccactccactgttcaggggccttcaagcacaaaaagcacttcttcagtatctacgtttagcaaggcagcaccttcagtgccatccaaaccttcagactgcaattttatttcaaacttctattctcattcaagactgcatcacatatcaatgtggaagtgtgaattgactgagtttgtcaataccctacaaagacaaagtaatggtatctttccaggaagggaaaagttaaaaaaaatgaaaacaggcaggtctgcacttgttgtaactgacacaggagatatgtcagtattgaattctcccagacatcagagctgtataatgcatgttgatatggattgcttctttgtatcagtgggtatacgaaatagaccagatctcaaaggaaaaccagtggctgttacaagtaacagaggcacaggaagggcacctttacgtcctggcgctaacccccagctggagtggcagtattaccagaataaaatcctgaaaggcaaagcagcagatataccagattcatcattgtgggagaatccagattctgcgcaagcaaatggaattgattctgttttgtcaagggctgaaattgcatcttgtagttatgaggccaggcaacttggcattaagaacggaatgttttttgggcatgctaaacaactatgtcctaatcttcaagctgttccatacgattttcatgcatataaggaagtcgcacaaacattgtatgaaacattggcaagctacactcataacattgaagctgtcagttgtgatgaagcgctggtagacattaccgaaatccttgcagagaccaaacttactcctgatgaatttgcaaatgctgttcgtatggaaatcaaagaccagacgaaatgtgctgcctctgttggaattggttctaatattctcctggctagaatggcaactagaaaagcaaaaccagatgggcagtaccacctaaaaccagaagaagtagatgattttatcagaggccagctagtgaccaatctaccaggagttggacattcaatggaatctaagttggcatctttgggaattaaaacttgtggagacttgcagtatatgaccatggcaaaactccaaaaagaatttggtcccaaaacaggtcagatgctttataggttctgccgtggcttggatgatagaccagttcgaactgaaaaggaaagaaaatctgtttcagctgagatcaactatggaataaggtttactcagccaaaagaggcagaagcttttcttctgagtctttcagaagaaattcaaagaagactagaagccactggcatgaagggtaaacgtctaactctcaaaatcatggtacgaaagcctggggctcctgtagaaactgcaaaatttggaggccatggaatttgtgataacattgccaggactgtaactcttgaccaggcaacagataatgcaaaaataattggaaaggcgatgctaaacatgtttcatacaatgaaactaaatatatcagatatgagaggggttgggattcacgtgaatcagttggttccaactaatctgaacccttccacatgtcccagtcgcccatcagttcagtcaagccactttcctagtgggtcatactctgtccgtgatgtcttccaagttcagaaagctaagaaatccaccgaagaggagcacaaagaagtatttcgggctgctgtggatctggaaatatcatctgcttctagaacttgcactttcttgccaccttttcctgcacatctgccgaccagtcctgatactaacaaggctgagtcttcagggaaatggaatggtctacatactcctgtcagtgtgcagtcgagacttaacctgagtatagaggtcccgtcaccttcccagctggatcagtctgttttagaagcacttccacctgatctccgggaacaagtagagcaagtctgtgctgtccagcaagcagagtcacatggcgacaaaaagaaagaaccagtaaatggctgtaatacaggaattttgccacaaccagttgggacagtcttgttgcaaataccagaacctcaagaatcgaacagtgacgcaggaataaatttaatagcccttccagcattttcacaggtggaccctgaggtatttgctgcccttcctgctgaacttcagagggagctgaaagcagcgtatgatcaaagacaaaggcagggcgagaacagcactcaccagcagtcagccagcgcatctgtgccaaagaatcctttacttcatctaaaggcagcagtgaaagaaaagaaaagaaacaagaagaaaaaaaccattggttcaccaaaaaggattcagagtcctttgaataacaagctgcttaacagtcctgcaaaaactctgccaggggcctgtggcagtccccagaagttaattgatgggtttctaaaacatgaaggacctcctgcagagaaacccctggaagaactctctgcttctacttcaggtgtgccaggcctttctagtttgcagtctgacccagctggctgtgtgagacctccagcacccaatctagctggagctgttgaattcaatgatgtgaagaccttgctcagagaatggataactacaatttcagatccaatggaagaagacattctccaagttgtgaaatactgtactgatctaatagaagaaaaagatttggaaaaactggatctagttataaaatacatgaaaaggctgatgcagcaatcggtggaatcggtttggaatatggcatttgactttattcttgacaatgtccaggtggttttacaacaaacttatggaagcacattaaaagttacataaatattaccagagagcctgatgctctctgatagctgtgccataagtgcttgtgaggtatttgcaaagtgcatgatagtaatgctcggagtttttataattttaaatttcttttaaagcaagtgttttgtacatttcttttcaaaaagtgccaaatttgtcagtattgcatgtaaataattgtgttaattattttactgtagcatagattctatttacaaaatgtttgtttataaagttttatggatttttacagtgaagtgtttacagttgtttaataaagaactgtatgtatattttgtacaggctcctttttgtgaatccttaaaaactcaactctaggaagcaactactgtttattatactaaaaggctgaaaaacctccaggccagactgctaagctctgaaattcctgagaggtctcagaccgggattctacttgttccaagaaagggtaaagcttctaaaccatcttattcttgtctccaagcatgaacacaggagcatgttaagaaaatctttactacttcttccatgcggagaaatctacatattttgaattagaaacaccctcacacccacttgaagatttttttcctgggaacattatgtcccgtagatcagaggtggtgttgtctttttgcttctactggccattgagaaactttgatgataaaaaagaacggtatagatttttcaaacgtatataaaatatttttatgttatatgttatgccataactttaaaataaaaatagtttaaaattctaaa

SEQ ID NO: 373668 - DNA, 4577 bp, Homo sapiens
ttattgccttgccttatggtttatgtttatgaggtcatcattatgttctggtcactagcacagaataaggtccatttatttatttagtttttaaaatttttttttttcaaaaaaggggggagaaaatgtaacctttgtgattggtttaccttttctttaattctagggtgggtatatggctgccaaggtccagaaattggaggaacagtttcgatcagatgctgctatgcagaaggatgggacttcatctacaatttttagtggagttgccatctatgttaatggatacacagatccttccgctgaggaattgagaaaactaatgatgttgcatggaggtcaataccatgtatattattccagatctaaaacaacacatattattgccacaaatcttcccaatgccaaaattaaagaattaaagggggaaaaagtaattcgaccagaatggattgtggaaagcatcaaagctggacgactcctctcctacattccatatcagctgtacaccaagcagtccagtgtgcagaaaggtctcagctttaatcctgtatgcagacctgaggatcctctgccaggtccaagcaatatagccaaacagctcaacaacagggtaaatcacatcgttaagaagattgaaacggaaaatgaagtcaaagtcaatggcatgaacagttggaatgaagaagatgaaaataatgattttagttttgtggatctggagcagacctctccgggaaggaaacagaatggaattccgcatcccagagggagcactgccatttttaatggacacactcctagctctaatggtgccttaaagacacaggattgcttggtgcccatggtcaacagtgttgccagcaggctttctccagccttttcccaggaggaggataaggctgagaagagcagcactgatttcagagactgcactctgcagcagttgcagcaaagcaccagaaacacagatgctttgcggaatccacacagaactaattctttctcattatcacctttgcacagtaacactaaaatcaatggtgctcaccactccactgttcaggggccttcaagcacaaaaagcacttcttcagtatctacgtttagcaaggcagcaccttcagtgccatccaaaccttcagactgcaattttatttcaaacttctattctcattcaagactgcatcacatatcaatgtggaagtgtgaattgactgagtttgtcaataccctacaaagacaaagtaatggtatctttccaggaagggaaaagttaaaaaaaatgaaaacaggcaggtctgcacttgttgtaactgacacaggagatatgtcagtattgaattctcccagacatcagagctgtataatgcatgttgatatggattgcttctttgtatcagtgggtatacgaaatagaccagatctcaaaggaaaaccagtggctgttacaagtaacagaggcacaggaagggcacctttacgtcctggcgctaacccccagctggagtggcagtattaccagaataaaatcctgaaaggcaaagcagcagatataccagattcatcattgtgggagaatccagattctgcgcaagcaaatggaattgattctgttttgtcaagggctgaaattgcatcttgtagttatgaggccaggcaacttggcattaagaacggaatgttttttgggcatgctaaacaactatgtcctaatcttcaagctgttccatacgattttcatgcatataaggaagtcgcacaaacattgtatgaaacattggcaagctacactcataacattgaagctgtcagttgtgatgaagcgctggtagacattaccgaaatccttgcagagaccaaacttactcctgatgaatttgcaaatgctgttcgtatggaaatcaaagaccagacgaaatgtgctgcctctgttggaattggttctaatattctcctggctagaatggcaactagaaaagcaaaaccagatgggcagtaccacctaaaaccagaagaagtagatgattttatcagaggccagctagtgaccaatctaccaggagttggacattcaatggaatctaagttggcatctttgggaattaaaacttgtggagacttgcagtatatgaccatggcaaaactccaaaaagaatttggtcccaaaacaggtcagatgctttataggttctgccgtggcttggatgatagaccagttcgaactgaaaaggaaagaaaatctgtttcagctgagatcaactatggaataaggtttactcagccaaaagaggcagaagcttttcttctgagtctttcagaagaaattcaaagaagactagaagccactggcatgaagggtaaacgtctaactctcaaaatcatggtacgaaagcctggggctcctgtagaaactgcaaaatttggaggccatggaatttgtgataacattgccaggactgtaactcttgaccaggcaacagataatgcaaaaataattggaaaggcgatgctaaacatgtttcatacaatgaaactaaatatatcagatatgagagggtcgcccatcagttcagtcaagccactttcctagtgggtcatactctgtccgtgatgtcttccaagttcagaaagctaagaaatccaccgaagaggagcacaaagaagtatttcgggctgctgtggatctggaaatatcatctgcttctagaacttgcactttcttgccaccttttcctgcacatctgccgaccagtcctgatactaacaaggctgagtcttcagggaaatggaatggtctacatactcctgtcagtgtgcagtcgagacttaacctgagtatagaggtcccgtcaccttcccagctggatcagtctgttttagaagcacttccacctgatctccgggaacaagtagagcaagtctgtgctgtccagcaagcagagtcacatggcgacaaaaagaaagaaccagtaaatggctgtaatacaggaattttgccacaaccagttgggacagtcttgttgcaaataccagaacctcaagaatcgaacagtgacgcaggaataaatttaatagcccttccagcattttcacaggtggaccctgaggtatttgctgcccttcctgctgaacttcagagggagctgaaagcagcgtatgatcaaagacaaaggcagggcgagaacagcactcaccagcagtcagccagcgcatctgtgccaaagaatcctttacttcatctaaaggcagcagtgaaagaaaagaaaagaaacaagaagaaaaaaaccattggttcaccaaaaaggattcagagtcctttgaataacaagctgcttaacagtcctgcaaaaactctgccaggggcctgtggcagtccccagaagttaattgatgggtttctaaaacatgaaggacctcctgcagagaaacccctggaagaactctctgcttctacttcaggtgtgccaggcctttctagtttgcagtctgacccagctggctgtgtgagacctccagcacccaatctagctggagctgttgaattcaatgatgtgaagaccttgctcagagaatggataactacaatttcagatccaatggaagaagacattctccaagttgtgaaatactgtactgatctaatagaagaaaaagatttggaaaaactggatctagttataaaatacatgaaaaggctgatgcagcaatcggtggaatcggtttggaatatggcatttgactttattcttgacaatgtccaggtggttttacaacaaacttatggaagcacattaaaagttacataaatattaccagagagcctgatgctctctgatagctgtgccataagtgcttgtgaggtatttgcaaagtgcatgatagtaatgctcggagtttttataattttaaatttcttttaaagcaagtgttttgtacatttcttttcaaaaagtgccaaatttgtcagtattgcatgtaaataattgtgttaattattttactgtagcatagattctatttacaaaatgtttgtttataaagttttatggatttttacagtgaagtgtttacagttgtttaataaagaactgtatgtatattttgtacaggctcctttttgtgaatccttaaaaactcaactctaggaagcaactactgtttattatactaaaaggctgaaaaacctccaggccagactgctaagctctgaaattcctgagaggtctcagaccgggattctacttgttccaagaaagggtaaagcttctaaaccatcttattcttgtctccaagcatgaacacaggagcatgttaagaaaatctttactacttcttccatgcggagaaatctacatattttgaattagaaacaccctcacacccacttgaagatttttttcctgggaacattatgtcccgtagatcagaggtggtgttgtctttttgcttctactggccattgagaaactttgatgataaaaaagaacggtatagatttttcaaacgtatataaaatatttttatgttatatgttatgccataactttaaaataaaaatagtttaaaattctaaa

SEQ ID NO: 373669 - DNA, 2877 bp, Homo sapiens
ttattgccttgccttatggtttatgtttatgaggtcatcattatgttctggtcactagcacagaataaggtccatttatttatttagtttttaaaatttttttttttcaaaaaaggggggagaaaatgtaacctttgtgattggtttaccttttctttaattctagggtgggtatatggctgccaaggtccagaaattggaggaacagtttcgatcagatgctgctatgcagaaggatgggacttcatctacaatttttagtggagttgccatctatgttaatggatacacagatccttccgctgaggaattgagaaaactaatgatgttgcatggaggtcaataccatgtatattattccagatctaaaacaacacatattattgccacaaatcttcccaatgccaaaattaaagaattaaagggggaaaaagtaattcgaccagaatggattgtggaaagcatcaaagctggacgactcctctcctacattccatatcagctgtacaccaagcagtccagtgtgcagaaaggtctcagctttaatcctgtatgcagacctgaggatcctctgccaggtccaagcaatatagccaaacagctcaacaacagggtaaatcacatcgttaagaagattgaaacggaaaatgaagtcaaagtcaatggcatgaacagttggaatgaagaagatgaaaataatgattttagttttgtggatctggagcagacctctccgggaaggaaacagaatggaattccgcatcccagagggagcactgccatttttaatggacacactcctagctctaatggtgccttaaagacacaggattgcttggtgcccatggtcaacagtgttgccagcaggctttctccagccttttcccaggaggaggataaggctgagaagagcagcactgatttcagagactgcactctgcagcagttgcagcaaagcaccagaaacacagatgctttgcggaatccacacagaactaattctttctcattatcacctttgcacagtaacactaaaatcaatggtgctcaccactccactgttcaggggccttcaagcacaaaaagcacttcttcagtatctacgtttagcaaggcagcaccttcagtgccatccaaaccttcagactgcaattttatttcaaacttctattctcattcaagactgcatcacatatcaatgtggaagtgtgaattgactgagtttgtcaataccctacaaagacaaagtaatggtatctttccaggaagggaaaagttaaaaaaaatgaaaacaggcaggtctgcacttgttgtaactgacacaggagatatgtcagtattgaattctcccagacatcagagctgtataatgcatgttgatatggattgcttctttgtatcagtgggtatacgaaatagaccagatctcaaaggaaaaccagtggctgttacaagtaacagaggcacaggaagggcacctttacgtcctggcgctaacccccagctggagtggcagtattaccagaataaaatcctgaaaggcaaagcagcagatataccagattcatcattgtgggagaatccagattctgcgcaagcaaatggaattgattctgttttgtcaagggctgaaattgcatcttgtagttatgaggccaggcaacttggcattaagaacggaatgttttttgggcatgctaaacaactatgtcctaatcttcaagctgttccatacgattttcatgcatataaggaagtcgcacaaacattgtatgaaacattggcaagctacactcataacattgaagctgtcagttgtgatgaagcgctggtagacattaccgaaatccttgcagagaccaaacttactcctgatgaatttgcaaatgctgttcgtatggaaatcaaagaccagacgaaatgtgctgcctctgttggaattggttctaatattctcctggctagaatggcaactagaaaagcaaaaccagatgggcagtaccacctaaaaccagaagaagtagatgattttatcagaggccagctagtgaccaatctaccaggagttggacattcaatggaatctaagttggcatctttgggaattaaaacttgtggagacttgcagtatatgaccatggcaaaactccaaaaagaatttggtcccaaaacaggtcagatgctttataggttctgccgtggcttggatgatagaccagttcgaactgaaaaggaaagaaaatctgtttcagctgagatcaactatggaataaggtttactcagccaaaagaggcagaagcttttcttctgagtctttcagaagaaattcaaagaagactagaagccactggcatgaagggtaaacgtctaactctcaaaatcatggtacgaaagcctggggctcctgtagaaactgcaaaatttggaggccatggaatttgtgataacattgccaggtaagctcacctcagaaatgatattggtaattatatttcagtacaggttgttgtaagtaatagaaaatgaagaaaaccaaggaggagtttgaataaagacctgtaaacccgttaatctggtattctgtagaagcaggcatcagcccaaggcattcagcttaggttaatgcacttggtttcagcgaggcccacacacaggaggttggtttgacggcattgctgaccttggcagcctttgcttggcatctttgggctgttaactttactgcatggacagaaagaaagggcaaggctgcagaccaaagggactgctatagtttcgggacttggtgaaacttttttcctgaggaaaatttcaatgtagttcttaaaaacaatgatacaggccaggtgtggtggctcatacctgtaatcccagca

SEQ ID NO: 373670 - DNA, 929 bp, Homo sapiens
agcgggctgcagggctgcgggcgcttggttcggcctggcccggccggcggctcctaacaccgggcgggcggctgcggcggcacttccgggttggccttctccatgttggtctcgggaacgtgaaggggcggggcctcgaggtcaggggtcagcacctccctggttgccgtggcgactggaggcgcgcgacgcgggcgcaatggcggggacccggggcttgatgctgcttgggcctggcccagtggcgggtcctagggacgtgggtacctgcagaggccggcagatggagattcagaaacataaggacaacaagaaacttccccaaggtatcattatagtctttagacttcagacacacaccacacctcaaatatatacacaactgaaaggaaaattaaggaagtttttcaaagaaccctattccgagtaagaagtgtgttgcatgaatttctaaggtcaaagatgttgattcattcatagtgtgaggcccagaaatcggcatttttaaacaagtacactggacatttctaaagctggctaaagtttgagagacactatccaagggaaatttctccgtaactctttttctcagaagaaaagtaaactaaaagtaaaaataagcagtaccactaagtttcaagtgatcttctcctaaaagaagaaaaggcctatattcaggcacaagaaaagtatattctcttttatccatgcagaaaacagctagtggttgaaaatcaacacttcagacctcttgtctacataaagccaactgcccctttgttttactgatgtcttcaatgattttacttagatttttctacggcatttactgaattagctaagcagacacagatccagtccttcatgaatatggtttgggactctctactgaatcagcactcttagcttcaccgacatagtctcttggt

SEQ ID NO: 373671 - DNA, 476 bp, Homo sapiens
cctcgcgggggcagcccaggggcacggccgctccgggggtcccctttcgtctggagaaacacagaggcccaccatcacctggccgcgccgtgcaggcctctgcgcggacccccgcccctgtctccaccttccccaggcctgcgggcacgtgaggcctggccacacggacccgggcggagggctgcgggggtgaagggagccccccgccccaattctgcacccctggcctcccgcctgcctccttgcggccgagcagcctccgctgcctccgcgcctcccgcccgcccggcgttcgtccgcaggctcggcccggctcctcctcccgaccccggtaatacgaaccgccggcggctaacgcggcctcgctccctctcgcaaacctctccctcctcctcctccccctcgcctcagctcctcctctcgggcgggagcgggtagccaggggtggagtgggggagggcggggaacgcggccgc

SEQ ID NO: 373672 - DNA, 1728 bp, Homo sapiens
agcgggctgcagggctgcgggcgcttggttcggcctggcccggccggcggctcctaacaccgggcgggcggctgcggcggcacttccgggttggccttctccatgttggtctcgggaacgtgaaggggcggggcctcgaggtcaggggtcagcacctccctggttgccgtggcgactggaggcgcgcgacgcgggcgcaatggcggggacccggggcttgatgctgcttgggcctggcccagtggcgggtcctagggacgtgggtacctgcagaggccggcagatggagattcagaaacataaggacaacaagaaacttccccaaggtatcattatagtctttagacttcagacacacaccacacctcaaatatatacacaactgaaaggaaaattaaggaagtttttcaaagaaccctattccgagtaagaagtgtgttgcatgaatttctaagagccagaaaatgcatgacacaggagaagatgtaccctcatctgttcagtgagagatgtgcaaatcaacatcaacacagaactgctgaagaaaaaaaatatgtgtgtggattatatatatacatataaggtgtgtatatatatatatatatatatttacatatatagtatgggctatttcacctttgcaagctgggagccattaagtaatggctaccaccactcccccacccccttcagtaaaacacatcctgaacattgggcccatgttttcaagaagaatgtgccccactgccccttggaaactccatttcatttacttggttcagttagttaatgacggtccattttgactcaaatatccagttccctttcatcaatcatgtctttctggactgtcagttttagggcaaggattacaaagcccttccatgcagatatccacagagaaagacccagacccacatccccatttaggattgcttagggactcatttcttccgcttccttccaaatgaaaagaatgagctatgtgaaaggggaaaaccccactggaaaatgaatgttggtgactcaagtgttaatctagaaagtcttatgatttggtgctggaaaagggcattgtaataagatggttctttataccatgcaaaccaggggaatacaaaacactgtcaaccatgaaaataagatttaatttggaatcacaacacatagggttttttccactttaaattctttttattcattcatatttgttataaatattcaatagaaatgcagtttttcaagactgaaatggtctttaatgaagcaagccatgtgtggcttttcaggcgagcattttcatgcttggttaactgtaaggatgttcatgttcctttcccaaaaaatatgatttgtgattctgcttaggtctctgaaaagcaacttattcactggagatgtgaggagccatccgcacatcacaattctatagacatcaaacgcatgaagcatttcggatctgctttaagactgaggcagactttccatctggacacagccgaccatccatgtgtcattacaatgaatccagcacttccctggaagctggaagggtcaaattcaacttcaactctgccacttcctgcttaacttgctgtttaaccttgggcaagctgccatcccacacgaggccgaaggtgtcggtttttaaaatacagaaattgggttccatgagggattatcaatatactgctggtgggccaaattccatctgctacttgcctttgt

SEQ ID NO: 373673 - DNA, 815 bp, Homo sapiens
agcgggctgcagggctgcgggcgcttggttcggcctggcccggccggcggctcctaacaccgggcgggcggctgcggcggcacttccgggttggccttctccatgttggtctcgggaacgtgaaggggcggggcctcgaggtcaggggtcagcacctccctggttgccgtggcgactggaggcgcgcgacgcgggcgcaatggcggggacccggggcttgatgctgcttgggcctggcccagtggcgggtcctagggacgtgggtacctgcagaggccggcagatggagattcagaaacataaggacaacaagaaacttccccaaggtatcattatagtctttagacttcagacacacaccacacctcaaatatatacacaactgaaaggaaaattaaggaagtttttcaaagaaccctattccgagtaagaagtgtgttgcatgaatttctaaggtctctgaaaagcaacttattcactggagatgtgaggagccatccgcacatcacaattctatagacatcaaacgcatgaagcatttcggatctgctttaagactgaggcagactttccatctggacacagccgaccatccatgtgtcattacaatgaatccagcacttccctggaagctggaagggtcaaattcaacttcaactctgccacttcctgcttaacttgctgtttaaccttgggcaagctgccatcccacacgaggccgaaggtgtcggtttttaaaatacagaaattgggttccatgagggattatcaatatactgctggtgggccaaattccatctgctacttgcctttgt

SEQ ID NO: 373674 - DNA, 915 bp, Homo sapiens
agcgggctgcagggctgcgggcgcttggttcggcctggcccggccggcggctcctaacaccgggcgggcggctgcggcggcacttccgggttggccttctccatgttggtctcgggaacgtgaaggggcggggcctcgaggtcaggggtcagcacctccctggttgccgtggcgactggaggcgcgcgacgcgggcgcaatggcggggacccggggcttgatgctgcttgggcctggcccagtggcgggtcctagggacgtgggtacctgcagaggccggcagatggagattcagaaacataaggacaacaagaaacttccccaaggtatcattatagtctttagacttcagacacacaccacacctcaaatatatacacaactgaaaggaaaattaaggaagtttttcaaagaaccctattccgagtaagaagtgtgttgcatgaatttctaagagccagaaaatgcatgacacaggagaagatgtaccctcatctgttcagtgagagatgtgcaaatcaacatcaacacagaactgctgaagaaaaaaaatatgtctctgaaaagcaacttattcactggagatgtgaggagccatccgcacatcacaattctatagacatcaaacgcatgaagcatttcggatctgctttaagactgaggcagactttccatctggacacagccgaccatccatgtgtcattacaatgaatccagcacttccctggaagctggaagggtcaaattcaacttcaactctgccacttcctgcttaacttgctgtttaaccttgggcaagctgccatcccacacgaggccgaaggtgtcggtttttaaaatacagaaattgggttccatgagggattatcaatatactgctggtgggccaaattccatctgctacttgcctttgt

SEQ ID NO: 373675 - DNA, 1776 bp, Homo sapiens
cctcgcgggggcagcccaggggcacggccgctccgggggtcccctttcgtctggagaaacacagaggcccaccatcacctggccgcgccgtgcaggcctctgcgcggacccccgcccctgtctccaccttccccaggcctgcgggcacgtgaggcctggccacacggacccgggcggagggctgcgggggtgaagggagccccccgccccaattctgcacccctggcctcccgcctgcctccttgcggccgagcagcctccgctgcctccgcgcctcccgcccgcccggcgttcgtccgcaggctcggcccggctcctcctcccgaccccgatggagattcagaaacataaggacaacaagaaacttccccaaggtatcattatagtctttagacttcagacacacaccacacctcaaatatatacacaactgaaaggaaaattaaggaagtttttcaaagaaccctattccgagtaagaagtgtgttgcatgaatttctaagagccagaaaatgcatgacacaggagaagatgtaccctcatctgttcagtgagagatgtgcaaatcaacatcaacacagaactgctgaagaaaaaaaatatgtgtgtggattatatatatacatataaggtgtgtatatatatatatatatatatttacatatatagtatgggctatttcacctttgcaagctgggagccattaagtaatggctaccaccactcccccacccccttcagtaaaacacatcctgaacattgggcccatgttttcaagaagaatgtgccccactgccccttggaaactccatttcatttacttggttcagttagttaatgacggtccattttgactcaaatatccagttccctttcatcaatcatgtctttctggactgtcagttttagggcaaggattacaaagcccttccatgcagatatccacagagaaagacccagacccacatccccatttaggattgcttagggactcatttcttccgcttccttccaaatgaaaagaatgagctatgtgaaaggggaaaaccccactggaaaatgaatgttggtgactcaagtgttaatctagaaagtcttatgatttggtgctggaaaagggcattgtaataagatggttctttataccatgcaaaccaggggaatacaaaacactgtcaaccatgaaaataagatttaatttggaatcacaacacatagggttttttccactttaaattctttttattcattcatatttgttataaatattcaatagaaatgcagtttttcaagactgaaatggtctttaatgaagcaagccatgtgtggcttttcaggcgagcattttcatgcttggttaactgtaaggatgttcatgttcctttcccaaaaaatatgatttgtgattctgcttaggtctctgaaaagcaacttattcactggagatgtgaggagccatccgcacatcacaattctatagacatcaaacgcatgaagcatttcggatctgctttaagactgaggcagactttccatctggacacagccgaccatccatgtgtcattacaatgaatccagcacttccctggaagctggaagggtcaaattcaacttcaactctgccacttcctgcttaacttgctgtttaaccttgggcaagctgccatcccacacgaggccgaaggtgtcggtttttaaaatacagaaattgggttccatgagggattatcaatatactgctggtgggccaaattccatctgctacttgcctttgt

SEQ ID NO: 373676 - DNA, 3073 bp, Homo sapiens
  misc_feature (9)..(10): n is a, c, g, or t
  misc_feature (12)..(12): n is a, c, g, or t
  misc_feature (61)..(61): n is a, c, g, or t
  misc_feature (150)..(150): n is a, c, g, or t
  misc_feature (181)..(181): n is a, c, g, or t
aatgaaggnngncacccaaatccccaatcaatgcctgttcaatcaacaaacatctaacagnacattatgtggtagcatattgccaggccgtgagatgcgaatataaataggaaccgcccctcatctgcaggcgctcacaacctagttagnaaacagtaaaacaattaagcgcgccgtgganataggcccacttgtcctgggaaatgaggggaagctggggtttgcagtggtttgattgaagggggactacatgttagaggcacagactgggtgcaggtacacccaaaggaacgagaagagtggaaggaaacaacatccacaaagtaaccacatgctggcgtatcgaaggccgtgatttacggttttgagactttacctcgccagcaaaggggggccagtctgttagcggtgcagattggaggggtgacattggaagctgtccaggaaaaagaaaatggaactggggagcagaaggcctacgcaagagggcgggacagacaggacttgtgactagtagctctggactgaggaatcctccctgctttctggtgcgggagagctagtggatgatggtgccaataacctggatggggaaagtaagctccctcctggaatgcttcattcacaacctccattttcagcaacatcccatctactggtgcttcctggtcgagatacaagtttcctgaaactgctgctctgttttgggcctcacccggccaacagctcactagctggcaagcagtagtatcaagatggcggccccctaggactggctagtcatgtgacctcgggtttcccaagtttgaagcccggcagtcctttcgggggcaaggttcacctgtcacgaaacgagtgtcaccccttcgactctcgcaagccaatcggcatctgagactgggccactgcggtgaggcgatcggaagattggtcctttccagtcgcctagctagggccaatcacggagcgtcccatacttcgcgggcccgcccgtaggccggggagaagcaggaatatcgtcacagcgtggcggtattattacctaaggactcgataggaggtgggacgcgtgttgattgacaggcagatttccctaccgggatttgagaatttggcgcagtgccccgccttagaggtggggccttatttgattgccaagtaatattccccaatggagtactagctcatggtgacgggcaggcagcttgactaatgagtcctcggcgtggccggcgcagctctccaatcgccgggcggcgggccccagtctgagcggcgatggcggcggcggcggcggcggcagcagcagcgggggctgcgggcggtcggggctccgggccggggcggcggcgccatcttgtgcccggggccggtggggaggccggggagggggccccggggggcgcaggggactacgggaacggcctggagtctgaggaactggagcctgaggagctgctgctggagcccgagccggagcccgagcccgaagaggagccgccccggccccgcgcccccccgggagctccgggccctgggcctggttcgggagcccccggcagccaagaggaggaggaggagccgggactggtcgagggtgacccgggggacggcgccattgaggacccggagctggaagctatcaaagctcgagtcagggagatggaggaagaagctgagaagctaaaggagctacagaacgaggtagagaagcagatgaatatgagtccacctccaggcaatgctggcccggtgatcatgtccattgaggagaagatggaggctgatgcccgttccatctatgttggcaatgtggactatggtgcaacagcagaagagctggaagctcactttcatggctgtggttcagtcaaccgtgttaccatactgtgtgacaaatttagtggccatcccaaagggtttgcgtatatagagttctcagacaaagagtcagtgaggacttccttggccttagatgagtccctatttagaggaaggcaaatcaaggtgatcccaaaacgaaccaacagaccaggcatcagcacaacagaccggggttttccacgagcccgctaccgcgcccggaccaccaactacaacagctcccgctctcgattctacagtggttttaacagcaggccccggggtcgcgtctacaggggccgggctagagcgacatcatggtattccccttactaaaaaaagtgtgtattaggaggagagagaggaaaaaaagaggaaagaaggaaaaaaaaaaaagaattaaaaaaaaaaaaaagaaaaacagaagatgaccttgatggaaaaaaaatattttttaaaaaaaagatatactgtggaaggggggagaatcccataactaactgctgaggagggacctgctttggggagtaggggaaggcccagggagtggggcagggggctgcttattcactctggggattcgccatggacacgtctcaactgcgcaagctgctgcccatgtttccctgccccacttcacccccttgggggctgctcaagggtaggtgggcgtgggtggtaggaggttttttttttacccagggctctggaaggacaccaaactgttctgcttgttaccttccctccgtcttctcctcgcctttcacagtcccctcctgcctgctcctgtccagccaggtctaccacccaccccacccctcttctccggctccctgcccctccagattgcctggtgatctattttgtttccttttgtgtttctttttctgttttgagtgtctttctttgcaggtttctgtagccggaagatctccgttccgctcccagcggctccagtgtaaattccccttccccctggggaaatgcactaccttgttttggggggtttaggggtgtttttgtttttcagttgttttgtttttttgtttttttttttttcctttgccttttttcccttttatttggagggaatgggaggaagtgggaacagggaggtgggaggtggattttgtttatttttttagctcatttccaggggtgggaatttttttttaatatgtgtcatgaataaagttgtttttgaaaataa

SEQ ID NO: 373677 - DNA, 2229 bp, Homo sapiens
  misc_feature (9)..(10): n is a, c, g, or t
  misc_feature (12)..(12): n is a, c, g, or t
  misc_feature (61)..(61): n is a, c, g, or t
  misc_feature (150)..(150): n is a, c, g, or t
  misc_feature (181)..(181): n is a, c, g, or t
aatgaaggnngncacccaaatccccaatcaatgcctgttcaatcaacaaacatctaacagnacattatgtggtagcatattgccaggccgtgagatgcgaatataaataggaaccgcccctcatctgcaggcgctcacaacctagttagnaaacagtaaaacaattaagcgcgccgtgganataggcccacttgtcctgggaaatgaggggaagctggggtttgcagtggtttgattgaagggggactacatgttagaggcacagactgggtgcaggtacacccaaaggaacgagaagagtggaaggaaacaacatccacaaagtaaccacatgctggcgtatcgaaggccgtgatttacggttttgagactttacctcgccagcaaaggggggccagtctgttagcggtgcagattggaggggtgacattggaagctgtccaggaaaaagaaaatggaactggggagcagaaggcctacgcaagagggcgggacagacaggacttgtgactagtagctctggactgaggaatcctccctgctttctggtgcgggagagctagtggatgatggtgccaataacctggatggggaaagtaagctccctcctggaatgcttcattcacaacctccattttcagcaacatcccatctactggtgcttcctggtcgagatacaagtttcctgaaactgctgctctgttttgggcctcacccggccaacagctcactagctggcaagcagtagtatcaagatggcggccccctaggactggctagtcatgtgacctcgggtttcccaagtttgaagcccggcagtcctttcgggggcaaggttcacctgtcacgaaacgagtgtcaccccttcgactctcgcaagccaatcggcatctgagactgggccactgcggtgaggcgatcggaagattggtcctttccagtcgcctagctagggccaatcacggagcgtcccatacttcgcgggcccgcccgtaggccggggagaagcaggaatatcgtcacagcgtggcggtattattacctaaggactcgataggaggtgggacgcgtgttgattgacaggcagatttccctaccgggatttgagaatttggcgcagtgccccgccttagaggtggggccttatttgattgccaagtaatattccccaatggagtactagctcatggtgacgggcaggcagcttgactaatgagtcctcggcgtggccggcgcagctctccaatcgccgggcggcgggccccagtctgagcggcgatggcggcggcggcggcggcggcagcagcagcgggggctgcgggcggtcggggctccgggccggggcggcggcgccatcttgtgcccggggccggtggggaggccggggagggggccccggggggcgcaggggactacgggaacggcctggagtctgaggaactggagcctgaggagctgctgctggagcccgagccggagcccgagcccgaagaggagccgccccggccccgcgcccccccgggagctccgggccctgggcctggttcgggagcccccggcagccaagaggaggaggaggagccgggactggtcgagggtgacccgggggacggcgccattgaggacccggagctggaagctatcaaagctcgagtcagggagatggaggaagaagctgagaagctaaaggagctacagaacgaggtagagaagcagatgaatatgagtccacctccaggcaatgctggcccggtgatcatgtccattgaggagaagatggaggctgatgcccgttccatctatgttggcaatgtggactatggtgcaacagcagaagagctggaagctcactttcatggctgtggttcagtcaaccgtgttaccatactgtgtgacaaatttagtggccatcccaaagggtttgcgtatatagagttctcagacaaagagtcagtgaggacttccttggccttagatgagtccctatttagaggaaggcaaatcaaggtgatcccaaaacgaaccaacagaccaggcatcagcacaacagaccggggttttccacgagcccgctaccgcgcccggaccaccaactacaacagctcccgctctcgattctacagtggttttaacagcaggccccggggtcgcgtctacaggggccgggctagagcgacatcatggtattccccttactaaaaaaagtgtgtattaggaggagagagagga

SEQ ID NO: 373678 - DNA, 520 bp, Homo sapiens
ttatgacatgattacgtatttaacacccctcattataggtaagggggccctgaaggccaagaattcggcagacggtaagtcccctcctgcctgctcctgtccagccaggtctaccacccaccccacccctcttctccggctccctgcccctccagattgcctggtgatctattttgtttccttttgtgtttctttttctgttttgagtgtctttctttgcaggtttctgtagccggaagatctccgttccgctcccagcggctccagtgtaaattccccttccccctggggaaatgcactaccttgttttggggggtttaggggtgtttttgtttttcagttgttttgtttttttgtttttttttttttcctttgccttttttcccttttatttggagggaatgggaggaagtgggaacagggaggtgggaggtggattttgtttatttttttagctcatttccaggggtgggaatttttttttaatatgtgtcatgaataaagttgtttttgaaaataa

SEQ ID NO: 373679 - DNA, 3006 bp, Homo sapiens
  misc_feature (9)..(10): n is a, c, g, or t
  misc_feature (12)..(12): n is a, c, g, or t
  misc_feature (61)..(61): n is a, c, g, or t
  misc_feature (150)..(150): n is a, c, g, or t
  misc_feature (181)..(181): n is a, c, g, or t
aatgaaggnngncacccaaatccccaatcaatgcctgttcaatcaacaaacatctaacagnacattatgtggtagcatattgccaggccgtgagatgcgaatataaataggaaccgcccctcatctgcaggcgctcacaacctagttagnaaacagtaaaacaattaagcgcgccgtgganataggcccacttgtcctgggaaatgaggggaagctggggtttgcagtggtttgattgaagggggactacatgttagaggcacagactgggtgcaggtacacccaaaggaacgagaagagtggaaggaaacaacatccacaaagtaaccacatgctggcgtatcgaaggccgtgatttacggttttgagactttacctcgccagcaaaggggggccagtctgttagcggtgcagattggaggggtgacattggaagctgtccaggaaaaagaaaatggaactggggagcagaaggcctacgcaagagggcgggacagacaggacttgtgactagtagctctggactgaggaatcctccctgctttctggtgcgggagagctagtggatgatggtgccaataacctggatggggaaagtaagctccctcctggaatgcttcattcacaacctccattttcagcaacatcccatctactggtgcttcctggtcgagatacaagtttcctgaaactgctgctctgttttgggcctcacccggccaacagctcactagctggcaagcagtagtatcaagatggcggccccctaggactggctagtcatgtgacctcgggtttcccaagtttgaagcccggcagtcctttcgggggcaaggttcacctgtcacgaaacgagtgtcaccccttcgactctcgcaagccaatcggcatctgagactgggccactgcggtgaggcgatcggaagattggtcctttccagtcgcctagctagggccaatcacggagcgtcccatacttcgcgggcccgcccgtaggccggggagaagcaggaatatcgtcacagcgtggcggtattattacctaaggactcgataggaggtgggacgcgtgttgattgacaggcagatttccctaccgggatttgagaatttggcgcagtgccccgccttagaggtggggccttatttgattgccaagtaatattccccaatggagtactagctcatggtgacgggcaggcagcttgactaatgagtcctcggcgtggccggcgcagctctccaatcgccgggcggcgggccccagtctgagcggcgatggcggcggcggcggcggcggcagcagcagcgggggctgcgggcggtcggggctccgggccggggcggcggcgccatcttgtgcccggggccggtggggaggccggggagggggccccggggggcgcaggggactacgggaacggcctggagtctgaggaactggagcctgaggagctgctgctggagcccgagccggagcccgagcccgaagaggagccgccccggccccgcgcccccccgggagctccgggccctgggcctggttcgggagcccccggcagccaagaggaggaggaggagccgggactggtcgagggtgacccgggggacggcgccattgaggacccggagctggaagctatcaaagctcgagtcagggagatggaggaagaagctgagaagctaaaggagctacagaacgaggtagagaagcagatgaatatgagtccacctccaggcaatgctggcccggtgatcatgtccattgaggagaagatggaggctgatgcccgttccatctatgttggcaatgtggactatggtgcaacagcagaagagctggaagctcactttcatggctgtggttcagtcaaccgtgttaccatactgtgtgacaaatttagtggccatcccaaagggtttgcgtatatagagttctcagacaaagagtcagtgaggacttccttggccttagatgagtccctatttagaggaaggcaaatcaaggtgatcccaaaacgaaccaacagaccaggcatcagcacaacagaccggggttttccacgagcccgctaccgcgcccggaccaccaactacaacagctcccgctctcgattctacagtggttttaacagcaggccccggggtcgcgtctacaggggccgggctagagcgacatcatggtattccccttactaaaaaaagtgtgtattaggaggagagagaggaaaaaaagaggaaagaaggaaaaaaaaaaaagaattaaaaaaaaaaaaaagaaaaacagaagatgaccttgatggaaaaaaaatattttttaaaaaaaagatatactgtggaaggggggagaatcccataactaactgctgaggagggacctgctttggggagtaggggaaggcccagggagtggggcagggggctgcttattcactctggggattcgccatggacacgtctcaactgcgcaagctgctgcccatgtttccctgccccacttcacccccttgggggctgctcaagggtaggtgggcgtgggtggtaggaggttttttttttacccagggctctggaaggacaccaaactgttctgcttgttaccttccctccgtcttctcctcgcctttcactgcccctccagattgcctggtgatctattttgtttccttttgtgtttctttttctgttttgagtgtctttctttgcaggtttctgtagccggaagatctccgttccgctcccagcggctccagtgtaaattccccttccccctggggaaatgcactaccttgttttggggggtttaggggtgtttttgtttttcagttgttttgtttttttgtttttttttttttcctttgccttttttcccttttatttggagggaatgggaggaagtgggaacagggaggtgggaggtggattttgtttatttttttagctcatttccaggggtgggaatttttttttaatatgtgtcatgaataaagttgtttttgaaaataa

SEQ ID NO: 373680 - DNA, 2936 bp, Homo sapiens
  misc_feature (9)..(10): n is a, c, g, or t
  misc_feature (12)..(12): n is a, c, g, or t
  misc_feature (61)..(61): n is a, c, g, or t
  misc_feature (150)..(150): n is a, c, g, or t
  misc_feature (181)..(181): n is a, c, g, or t
aatgaaggnngncacccaaatccccaatcaatgcctgttcaatcaacaaacatctaacagnacattatgtggtagcatattgccaggccgtgagatgcgaatataaataggaaccgcccctcatctgcaggcgctcacaacctagttagnaaacagtaaaacaattaagcgcgccgtgganataggcccacttgtcctgggaaatgaggggaagctggggtttgcagtggtttgattgaagggggactacatgttagaggcacagactgggtgcaggtacacccaaaggaacgagaagagtggaaggaaacaacatccacaaagtaaccacatgctggcgtatcgaaggccgtgatttacggttttgagactttacctcgccagcaaaggggggccagtctgttagcggtgcagattggaggggtgacattggaagctgtccaggaaaaagaaaatggaactggggagcagaaggcctacgcaagagggcgggacagacaggacttgtgactagtagctctggactgaggaatcctccctgctttctggtgcgggagagctagtggatgatggtgccaataacctggatggggaaagtaagctccctcctggaatgcttcattcacaacctccattttcagcaacatcccatctactggtgcttcctggtcgagatacaagtttcctgaaactgctgctctgttttgggcctcacccggccaacagctcactagctggcaagcagtagtatcaagatggcggccccctaggactggctagtcatgtgacctcgggtttcccaagtttgaagcccggcagtcctttcgggggcaaggttcacctgtcacgaaacgagtgtcaccccttcgactctcgcaagccaatcggcatctgagactgggccactgcggtgaggcgatcggaagattggtcctttccagtcgcctagctagggccaatcacggagcgtcccatacttcgcgggcccgcccgtaggccggggagaagcaggaatatcgtcacagcgtggcggtattattacctaaggactcgataggaggtgggacgcgtgttgattgacaggcagatttccctaccgggatttgagaatttggcgcagtgccccgccttagaggtggggccttatttgattgccaagtaatattccccaatggagtactagctcatggtgacgggcaggcagcttgactaatgagtcctcggcgtggccggcgcagctctccaatcgccgggcggcgggccccagtctgagcggcgatggcggcggcggcggcggcggcagcagcagcgggggctgcgggcggtcggggctccgggccggggcggcggcgccatcttgtgcccggggccggtggggaggccggggagggggccccggggggcgcaggggactacgggaacggcctggagtctgaggaactggagcctgaggagctgctgctggagcccgagccggagcccgagcccgaagaggagccgccccggccccgcgcccccccgggagctccgggccctgggcctggttcgggagcccccggcagccaagaggaggaggaggagccgggactggtcgagggtgacccgggggacggcgccattgaggacccggagctggaagctatcaaagctcgagtcagggagatggaggaagaagctgagaagctaaaggagctacagaacgaggtagagaagcagatgaatatgagtccacctccaggcaatgctggcccggtgatcatgtccattgaggagaagatggaggctgatgcccgttccatctatgttggcaatgtggactatggtgcaacagcagaagagctggaagctcactttcatggctgtggttcagtcaaccgtgttaccatactgtgtgacaaatttagtggccatcccaaagggtttgcgtatatagagttctcagacaaagagtcagtgaggacttccttggccttagatgagtccctatttagaggaaggcaaatcaaggtgatcccaaaacgaaccaacagaccaggcatcagcacaacagaccggggttttccacgagcccgctaccgcgcccggaccaccaactacaacagctcccgctctcgattctacagtggttttaacagcaggccccggggtcgcgtctacaggggccgggctagagcgacatcatggtattccccttactaaaaaaagtgtgtattaggaggagagagaggaaaaaaagaggaaagaaggaaaaaaaaaaaagaattaaaaaaaaaaaaaagaaaaacagaagatgaccttgatggaaaaaaaatattttttaaaaaaaagatatactgtggaaggggggagaatcccataactaactgctgaggagggacctgctttggggagtaggggaaggcccagggagtggggcagggggctgcttattcactctggggattcgccatggacacgtctcaactgcgcaagctgctgcccatgtttccctgccccacttcacccccttgggggctgctcaagggtaggtgggcgtgggtggtaggaggttttttttttacccagggctctggaaggacaccaaactgttctgcttgttaccttccctccgtcttctcctcgcctttcacagtcccctcctgcctgctcctgtccagccaggtctaccacccaccccacccctcttctccggctccctgcccctccagattgcctggtgatctattttgtttccttttgtgttttttgtttttcagttgttttgtttttttgtttttttttttttcctttgccttttttcccttttatttggagggaatgggaggaagtgggaacagggaggtgggaggtggattttgtttatttttttagctcatttccaggggtgggaatttttttttaatatgtgtcatgaataaagttgtttttgaaaataa

SEQ ID NO: 373681 - DNA, 2940 bp, Homo sapiens
  misc_feature (9)..(10): n is a, c, g, or t
  misc_feature (12)..(12): n is a, c, g, or t
  misc_feature (61)..(61): n is a, c, g, or t
  misc_feature (150)..(150): n is a, c, g, or t
  misc_feature (181)..(181): n is a, c, g, or t
aatgaaggnngncacccaaatccccaatcaatgcctgttcaatcaacaaacatctaacagnacattatgtggtagcatattgccaggccgtgagatgcgaatataaataggaaccgcccctcatctgcaggcgctcacaacctagttagnaaacagtaaaacaattaagcgcgccgtgganataggcccacttgtcctgggaaatgaggggaagctggggtttgcagtggtttgattgaagggggactacatgttagaggcacagactgggtgcaggtacacccaaaggaacgagaagagtggaaggaaacaacatccacaaagtaaccacatgctggcgtatcgaaggccgtgatttacggttttgagactttacctcgccagcaaaggggggccagtctgttagcggtgcagattggaggggtgacattggaagctgtccaggaaaaagaaaatggaactggggagcagaaggcctacgcaagagggcgggacagacaggacttgtgactagtagctctggactgaggaatcctccctgctttctggtgcgggagagctagtggatgatggtgccaataacctggatggggaaagtaagctccctcctggaatgcttcattcacaacctccattttcagcaacatcccatctactggtgcttcctggtcgagatacaagtttcctgaaactgctgctctgttttgggcctcacccggccaacagctcactagctggcaagcagtagtatcaagatggcggccccctaggactggctagtcatgtgacctcgggtttcccaagtttgaagcccggcagtcctttcgggggcaaggttcacctgtcacgaaacgagtgtcaccccttcgactctcgcaagccaatcggcatctgagactgggccactgcggtgaggcgatcggaagattggtcctttccagtcgcctagctagggccaatcacggagcgtcccatacttcgcgggcccgcccgtaggccggggagaagcaggaatatcgtcacagcgtggcggtattattacctaaggactcgataggaggtgggacgcgtgttgattgacaggcagatttccctaccgggatttgagaatttggcgcagtgccccgccttagaggtggggccttatttgattgccaagtaatattccccaatggagtactagctcatggtgacgggcaggcagcttgactaatgagtcctcggcgtggccggcgcagctctccaatcgccgggcggcgggccccagtctgagcggcgatggcggcggcggcggcggcggcagcagcagcgggggctgcgggcggtcggggctccgggccggggcggcggcgccatcttgtgcccggggccggtggggaggccggggagggggccccggggggcgcaggggactacgggaacggcctggagtctgaggaactggagcctgaggagctgctgctggagcccgagccggagcccgagcccgaagaggagccgccccggccccgcgcccccccgggagctccgggccctgggcctggttcgggagcccccggcagccaagaggaggaggaggagccgggactggtcgagggtgacccgggggacggcgccattgaggacccggagctggaagctatcaaagctcgagtcagggagatggaggaagaagctgagaagctaaaggagctacagaacgaggtagagaagcagatgaatatgagtccacctccaggcaatgctggcccggtgatcatgtccattgaggagaagatggaggctgatgcccgttccatctatgttggcaatgtggactatggtgcaacagcagaagagctggaagctcactttcatggctgtggttcagtcaaccgtgttaccatactgtgtgacaaatttagtggccatcccaaagggtttgcgtatatagagttctcagacaaagagtcagtgaggacttccttggccttagatgagtccctatttagaggaaggcaaatcaaggtgatcccaaaacgaaccaacagaccaggcatcagcacaacagaccggggttttccacgagcccgctaccgcgcccggaccaccaactacaacagctcccgctctcgattctacagtggttttaacagcaggccccggggtcgcgtctacaggggccgggctagagcgacatcatggtattccccttactaaaaaaagtgtgtattaggaggagagagaggaaaaaaagaggaaagaaggaaaaaaaaaaaagaattaaaaaaaaaaaaaagaaaaacagaagatgaccttgatggaaaaaaaatattttttaaaaaaaagatatactgtggaaggggggagaatcccataactaactgctgaggagggacctgctttggggagtaggggaaggcccagggagtggggcagggggctgcttattcactctggggattcgccatggacacgtctcaactgcgcaagctgctgcccatgtttccctgccccacttcacccccttgggggctgctcaagggtaggtgggcgtgggtggtaggaggttttttttttacccagggctctggaaggacaccaaactgttctgcttgttaccttccctccgtcttctcctcgcctttcacctttctttgcaggtttctgtagccggaagatctccgttccgctcccagcggctccagtgtaaattccccttccccctggggaaatgcactaccttgttttggggggtttaggggtgtttttgtttttcagttgttttgtttttttgtttttttttttttcctttgccttttttcccttttatttggagggaatgggaggaagtgggaacagggaggtgggaggtggattttgtttatttttttagctcatttccaggggtgggaatttttttttaatatgtgtcatgaataaagttgtttttgaaaataa

SEQ ID NO: 373682 - DNA, 2772 bp, Homo sapiens
  misc_feature (9)..(10): n is a, c, g, or t
  misc_feature (12)..(12): n is a, c, g, or t
  misc_feature (61)..(61): n is a, c, g, or t
  misc_feature (150)..(150): n is a, c, g, or t
  misc_feature (181)..(181): n is a, c, g, or t
aatgaaggnngncacccaaatccccaatcaatgcctgttcaatcaacaaacatctaacagnacattatgtggtagcatattgccaggccgtgagatgcgaatataaataggaaccgcccctcatctgcaggcgctcacaacctagttagnaaacagtaaaacaattaagcgcgccgtgganataggcccacttgtcctgggaaatgaggggaagctggggtttgcagtggtttgattgaagggggactacatgttagaggcacagactgggtgcaggtacacccaaaggaacgagaagagtggaaggaaacaacatccacaaagtaaccacatgctggcgtatcgaaggccgtgatttacggttttgagactttacctcgccagcaaaggggggccagtctgttagcggtgcagattggaggggtgacattggaagctgtccaggaaaaagaaaatggaactggggagcagaaggcctacgcaagagggcgggacagacaggacttgtgactagtagctctggactgaggaatcctccctgctttctggtgcgggagagctagtggatgatggtgccaataacctggatggggaaagtaagctccctcctggaatgcttcattcacaacctccattttcagcaacatcccatctactggtgcttcctggtcgagatacaagtttcctgaaactgctgctctgttttgggcctcacccggccaacagctcactagctggcaagcagtagtatcaagatggcggccccctaggactggctagtcatgtgacctcgggtttcccaagtttgaagcccggcagtcctttcgggggcaaggttcacctgtcacgaaacgagtgtcaccccttcgactctcgcaagccaatcggcatctgagactgggccactgcggtgaggcgatcggaagattggtcctttccagtcgcctagctagggccaatcacggagcgtcccatacttcgcgggcccgcccgtaggccggggagaagcaggaatatcgtcacagcgtggcggtattattacctaaggactcgataggaggtgggacgcgtgttgattgacaggcagatttccctaccgggatttgagaatttggcgcagtgccccgccttagaggtggggccttatttgattgccaagtaatattccccaatggagtactagctcatggtgacgggcaggcagcttgactaatgagtcctcggcgtggccggcgcagctctccaatcgccgggcggcgggccccagtctgagcggcgatggcggcggcggcggcggcggcagcagcagcgggggctgcgggcggtcggggctccgggccggggcggcggcgccatcttgtgcccggggccggtggggaggccggggagggggccccggggggcgcaggggactacgggaacggcctggagtctgaggaactggagcctgaggagctgctgctggagcccgagccggagcccgagcccgaagaggagccgccccggccccgcgcccccccgggagctccgggccctgggcctggttcgggagcccccggcagccaagaggaggaggaggagccgggactggtcgagggtgacccgggggacggcgccattgaggacccggagctggaagctatcaaagctcgagtcagggagatggaggaagaagctgagaagctaaaggagctacagaacgaggtagagaagcagatgaatatgagtccacctccaggcaatgctggcccggtgatcatgtccattgaggagaagatggaggctgatgcccgttccatctatgttggcaatgtggactatggtgcaacagcagaagagctggaagctcactttcatggctgtggttcagtcaaccgtgttaccatactgtgtgacaaatttagtggccatcccaaagggtttgcgtatatagagttctcagacaaagagtcagtgaggacttccttggccttagatgagtccctatttagaggaaggcaaatcaaggtgatcccaaaacgaaccaacagaccaggcatcagcacaacagaccggggttttccacgagcccgctaccgcgcccggaccaccaactacaacagctcccgctctcgattctacagtggttttaacagcaggccccggggtcgcgtctacaggggccgggctagagcgacatcatggtattccccttactaaaaaaagtgtgtattaggaggagagagaggaaaaaaagaggaaagaaggaaaaaaaaaaaagaattaaaaaaaaaaaaaagaaaaacagaagatgaccttgatggaaaaaaaatattttttaaaaaaaagatatactgtggaaggggggagaatcccataactaactgctgaggagggacctgctttggggagtaggggaaggcccagggagtggggcagggggctgcttattcactctggggattcgccatggacacgtctcaactgcgcaagctgctgcccatgtttccctgccccacttcacccccttgggggctgctcaagggtaggtgggcgtgggtggtaggaggttttttttttacccagggctctggaaggacaccaaactgttctgcttgttaccttccctccgtcttctcctcgcctttcacagtcccctcctgcctgctcctgtccagccaggtctaccacccacacctacctttttgtacgggtggcctggcctgcatatattgctgagagcgaattacatatccaatcgacacttataatgaggtttatgagcgaacattc

SEQ ID NO: 373683 - DNA, 3032 bp, Homo sapiens
  misc_feature (9)..(10): n is a, c, g, or t
  misc_feature (12)..(12): n is a, c, g, or t
  misc_feature (61)..(61): n is a, c, g, or t
  misc_feature (150)..(150): n is a, c, g, or t
  misc_feature (181)..(181): n is a, c, g, or t
aatgaaggnngncacccaaatccccaatcaatgcctgttcaatcaacaaacatctaacagnacattatgtggtagcatattgccaggccgtgagatgcgaatataaataggaaccgcccctcatctgcaggcgctcacaacctagttagnaaacagtaaaacaattaagcgcgccgtgganataggcccacttgtcctgggaaatgaggggaagctggggtttgcagtggtttgattgaagggggactacatgttagaggcacagactgggtgcaggtacacccaaaggaacgagaagagtggaaggaaacaacatccacaaagtaaccacatgctggcgtatcgaaggccgtgatttacggttttgagactttacctcgccagcaaaggggggccagtctgttagcggtgcagattggaggggtgacattggaagctgtccaggaaaaagaaaatggaactggggagcagaaggcctacgcaagagggcgggacagacaggacttgtgactagtagctctggactgaggaatcctccctgctttctggtgcgggagagctagtggatgatggtgccaataacctggatggggaaagtaagctccctcctggaatgcttcattcacaacctccattttcagcaacatcccatctactggtgcttcctggtcgagatacaagtttcctgaaactgctgctctgttttgggcctcacccggccaacagctcactagctggcaagcagtagtatcaagatggcggccccctaggactggctagtcatgtgacctcgggtttcccaagtttgaagcccggcagtcctttcgggggcaaggttcacctgtcacgaaacgagtgtcaccccttcgactctcgcaagccaatcggcatctgagactgggccactgcggtgaggcgatcggaagattggtcctttccagtcgcctagctagggccaatcacggagcgtcccatacttcgcgggcccgcccgtaggccggggagaagcaggaatatcgtcacagcgtggcggtattattacctaaggactcgataggaggtgggacgcgtgttgattgacaggcagatttccctaccgggatttgagaatttggcgcagtgccccgccttagaggtggggccttatttgattgccaagtaatattccccaatggagtactagctcatggtgacgggcaggcagcttgactaatgagtcctcggcgtggccggcgcagctctccaatcgccgggcggcgggccccagtctgagcggcgatggcggcggcggcggcggcggcagcagcagcgggggctgcgggcggtcggggctccgggccggggcggcggcgccatcttgtgcccggggccggtggggaggccggggagggggccccggggggcgcaggggactacgggaacggcctggagtctgaggaactggagcctgaggagctgctgctggagcccgagccggagcccgagcccgggccctgggcctggttcgggagcccccggcagccaagaggaggaggaggagccgggactggtcgagggtgacccgggggacggcgccattgaggacccggagctggaagctatcaaagctcgagtcagggagatggaggaagaagctgagaagctaaaggagctacagaacgaggtagagaagcagatgaatatgagtccacctccaggcaatgctggcccggtgatcatgtccattgaggagaagatggaggctgatgcccgttccatctatgttggcaatgtggactatggtgcaacagcagaagagctggaagctcactttcatggctgtggttcagtcaaccgtgttaccatactgtgtgacaaatttagtggccatcccaaagggtttgcgtatatagagttctcagacaaagagtcagtgaggacttccttggccttagatgagtccctatttagaggaaggcaaatcaaggtgatcccaaaacgaaccaacagaccaggcatcagcacaacagaccggggttttccacgagcccgctaccgcgcccggaccaccaactacaacagctcccgctctcgattctacagtggttttaacagcaggccccggggtcgcgtctacaggggccgggctagagcgacatcatggtattccccttactaaaaaaagtgtgtattaggaggagagagaggaaaaaaagaggaaagaaggaaaaaaaaaaaagaattaaaaaaaaaaaaaagaaaaacagaagatgaccttgatggaaaaaaaatattttttaaaaaaaagatatactgtggaaggggggagaatcccataactaactgctgaggagggacctgctttggggagtaggggaaggcccagggagtggggcagggggctgcttattcactctggggattcgccatggacacgtctcaactgcgcaagctgctgcccatgtttccctgccccacttcacccccttgggggctgctcaagggtaggtgggcgtgggtggtaggaggttttttttttacccagggctctggaaggacaccaaactgttctgcttgttaccttccctccgtcttctcctcgcctttcacagtcccctcctgcctgctcctgtccagccaggtctaccacccaccccacccctcttctccggctccctgcccctccagattgcctggtgatctattttgtttccttttgtgtttctttttctgttttgagtgtctttctttgcaggtttctgtagccggaagatctccgttccgctcccagcggctccagtgtaaattccccttccccctggggaaatgcactaccttgttttggggggtttaggggtgtttttgtttttcagttgttttgtttttttgtttttttttttttcctttgccttttttcccttttatttggagggaatgggaggaagtgggaacagggaggtgggaggtggattttgtttatttttttagctcatttccaggggtgggaatttttttttaatatgtgtcatgaataaagttgtttttgaaaataa

SEQ ID NO: 373684 - DNA, 4035 bp, Homo sapiens
  misc_feature (9)..(10): n is a, c, g, or t
  misc_feature (12)..(12): n is a, c, g, or t
  misc_feature (61)..(61): n is a, c, g, or t
  misc_feature (150)..(150): n is a, c, g, or t
  misc_feature (181)..(181): n is a, c, g, or t
aatgaaggnngncacccaaatccccaatcaatgcctgttcaatcaacaaacatctaacagnacattatgtggtagcatattgccaggccgtgagatgcgaatataaataggaaccgcccctcatctgcaggcgctcacaacctagttagnaaacagtaaaacaattaagcgcgccgtgganataggcccacttgtcctgggaaatgaggggaagctggggtttgcagtggtttgattgaagggggactacatgttagaggcacagactgggtgcaggtacacccaaaggaacgagaagagtggaaggaaacaacatccacaaagtaaccacatgctggcgtatcgaaggccgtgatttacggttttgagactttacctcgccagcaaaggggggccagtctgttagcggtgcagattggaggggtgacattggaagctgtccaggaaaaagaaaatggaactggggagcagaaggcctacgcaagagggcgggacagacaggacttgtgactagtagctctggactgaggaatcctccctgctttctggtgcgggagagctagtggatgatggtgccaataacctggatggggaaagtaagctccctcctggaatgcttcattcacaacctccattttcagcaacatcccatctactggtgcttcctggtcgagatacaagtttcctgaaactgctgctctgttttgggcctcacccggccaacagctcactagctggcaagcagtagtatcaagatggcggccccctaggactggctagtcatgtgacctcgggtttcccaagtttgaagcccggcagtcctttcgggggcaaggttcacctgtcacgaaacgagtgtcaccccttcgactctcgcaagccaatcggcatctgagactgggccactgcggtgaggcgatcggaagattggtcctttccagtcgcctagctagggccaatcacggagcgtcccatacttcgcgggcccgcccgtaggccggggagaagcaggaatatcgtcacagcgtggcggtattattacctaaggactcgataggaggtgggacgcgtgttgattgacaggcagatttccctaccgggatttgagaatttggcgcagtgccccgccttagaggtggggccttatttgattgccaagtaatattccccaatggagtactagctcatggtgacgggcaggcagcttgactaatgagtcctcggcgtggccggcgcagctctccaatcgccgggcggcgggccccagtctgagcggcgatggcggcggcggcggcggcggcagcagcagcgggggctgcgggcggtcggggctccgggccggggcggcggcgccatcttgtgcccggggccggtggggaggccggggagggggccccggggggcgcaggggactacgggaacggcctggagtctgaggaactggagcctgaggagctgctgctggagcccgagccggagcccgagcccgaagaggagccgccccggccccgcgcccccccgggagctccgggccctgggcctggttcgggagcccccggcagccaagaggaggaggaggagccgggactggtcgagggtgacccgggggacggcgccattgaggacccggagctggaagctatcaaagctcgagtcagggagatggaggaagaagctgagaagctaaaggagctacagaacgaggtagagaagcagatgaatatgagtccacctccaggcaatgctggcccggtgatcatgtccattgaggagaagatggaggctgatgcccgttccatctatgttggcaatgtggactatggtgcaacagcagaagagctggaagctcactttcatggctgtggttcagtcaaccgtgttaccatactgtgtgacaaatttagtggccatcccaaagggtttgcgtatatagagttctcagacaaagagtcagtgaggacttccttggccttagatgagtccctatttagaggaaggcaaatcaaggtgatcccaaaacgaaccaacagaccaggcatcagcacaacagaccggggttttccacgagcccgctaccgcgcccggaccaccaactacaacagctcccgctctcgattctacagtggttttaacagcaggccccggggtcgcgtctacagcaggtcaggatagatgggctgctcctctttcccccgcctcccgtgagccccgtatgcttcctcctctctggtctgaggaacctccctccccccacccctccccgtggtcttcaggaactttgtctcctgcctgtgcaggttgaggaaggtagttgcaggccaggccagaaggccagcctcatcatcttttctgcagtagaaattggtgataagggctgcatccctcccttggttcaaagaggcttccacccccagccttttttttcttgggagttggtggcatttgaaggtgtttgcggacaaaactgggaggaacagggcctccaggcagtgaaagcactgcttggacatttgttacttttttcggagttagggagggattgaagactgaacctcccttggaagaataccagaggctagctagttgatcctccccaacagccttgtgggaggattttgagatacttattctttatttgagccagtcttgcaaggttaacttctcactgggcctagtgtggtgcccaggtttttgccttgcttcacttctgtctctacatttaaatagacgggttaggcatataaaccttggcttttcataagctctacctgcctatccccaggagttagggaggatctatttgtgatggcctagggtttaagagctgtggaggactgaaaactggataaaaagggggtccttttccttgcccctgtctctcactcagatgcgcttctttttcgccactgtttggcaaagttttctgttaagcccccctccccctgccccagttctccaggtgcgttactatttctgggatcatggggtcagttttaggacacttgaacacttcttttccccccttcccttcacagtaactggggcaggggcctacggggaggggcttgtactgaactatctagtgatcacgttaacacctaactctccttctttcttccaggggccgggctagagcgacatcatggtattccccttactaaaaaaagtgtgtattaggaggagagagaggaaaaaaagaggaaagaaggaaaaaaaaaaaagaattaaaaaaaaaaaaaagaaaaacagaagatgaccttgatggaaaaaaaatattttttaaaaaaaagatatactgtggaaggggggagaatcccataactaactgctgaggagggacctgctttggggagtaggggaaggcccagggagtggggcagggggctgcttattcactctggggattcgccatggacacgtctcaactgcgcaagctgctgcccatgtttccctgccccacttcacccccttgggggctgctcaagggtaggtgggcgtgggtggtaggaggttttttttttacccagggctctggaaggacaccaaactgttctgcttgttaccttccctccgtcttctcctcgcctttcacagtcccctcctgcctgctcctgtccagccaggtctaccacccaccccacccctcttctccggctccctgcccctccagattgcctggtgatctattttgtttccttttgtgtttctttttctgttttgagtgtctttctttgcaggtttctgtagccggaagatctccgttccgctcccagcggctccagtgtaaattccccttccccctggggaaatgcactaccttgttttggggggtttaggggtgtttttgtttttcagttgttttgtttttttgtttttttttttttcctttgccttttttcccttttatttggagggaatgggaggaagtgggaacagggaggtgggaggtggattttgtttatttttttagctcatttccaggggtgggaatttttttttaatatgtgtcatgaataaagttgtttttgaaaataa

SEQ ID NO: 373685 - DNA, 2952 bp, Homo sapiens
  misc_feature (9)..(10): n is a, c, g, or t
  misc_feature (12)..(12): n is a, c, g, or t
  misc_feature (61)..(61): n is a, c, g, or t
  misc_feature (150)..(150): n is a, c, g, or t
  misc_feature (181)..(181): n is a, c, g, or t
aatgaaggnngncacccaaatccccaatcaatgcctgttcaatcaacaaacatctaacagnacattatgtggtagcatattgccaggccgtgagatgcgaatataaataggaaccgcccctcatctgcaggcgctcacaacctagttagnaaacagtaaaacaattaagcgcgccgtgganataggcccacttgtcctgggaaatgaggggaagctggggtttgcagtggtttgattgaagggggactacatgttagaggcacagactgggtgcaggtacacccaaaggaacgagaagagtggaaggaaacaacatccacaaagtaaccacatgctggcgtatcgaaggccgtgatttacggttttgagactttacctcgccagcaaaggggggccagtctgttagcggtgcagattggaggggtgacattggaagctgtccaggaaaaagaaaatggaactggggagcagaaggcctacgcaagagggcgggacagacaggacttgtgactagtagctctggactgaggaatcctccctgctttctggtgcgggagagctagtggatgatggtgccaataacctggatggggaaagtaagctccctcctggaatgcttcattcacaacctccattttcagcaacatcccatctactggtgcttcctggtcgagatacaagtttcctgaaactgctgctctgttttgggcctcacccggccaacagctcactagctggcaagcagtagtatcaagatggcggccccctaggactggctagtcatgtgacctcgggtttcccaagtttgaagcccggcagtcctttcgggggcaaggttcacctgtcacgaaacgagtgtcaccccttcgactctcgcaagccaatcggcatctgagactgggccactgcggtgaggcgatcggaagattggtcctttccagtcgcctagctagggccaatcacggagcgtcccatacttcgcgggcccgcccgtaggccggggagaagcaggaatatcgtcacagcgtggcggtattattacctaaggactcgataggaggtgggacgcgtgttgattgacaggcagatttccctaccgggatttgagaatttggcgcagtgccccgccttagaggtggggccttatttgattgccaagtaatattccccaatggagtactagctcatggtgacgggcaggcagcttgactaatgagtcctcggcgtggccggcgcagctctccaatcgccgggcggcgggccccagtctgagcggcgatggcggcggcggcggcggcggcagcagcagcgggggctgcgggcggtcggggctccgggccggggcggcggcgccatcttgtgcccggggccggtggggaggccggggagggggccccggggggcgcaggggactacgggaacggcctggagtccccggcagccaagaggaggaggaggagccgggactggtcgagggtgacccgggggacggcgccattgaggacccggagctggaagctatcaaagctcgagtcagggagatggaggaagaagctgagaagctaaaggagctacagaacgaggtagagaagcagatgaatatgagtccacctccaggcaatgctggcccggtgatcatgtccattgaggagaagatggaggctgatgcccgttccatctatgttggcaatgtggactatggtgcaacagcagaagagctggaagctcactttcatggctgtggttcagtcaaccgtgttaccatactgtgtgacaaatttagtggccatcccaaagggtttgcgtatatagagttctcagacaaagagtcagtgaggacttccttggccttagatgagtccctatttagaggaaggcaaatcaaggtgatcccaaaacgaaccaacagaccaggcatcagcacaacagaccggggttttccacgagcccgctaccgcgcccggaccaccaactacaacagctcccgctctcgattctacagtggttttaacagcaggccccggggtcgcgtctacaggggccgggctagagcgacatcatggtattccccttactaaaaaaagtgtgtattaggaggagagagaggaaaaaaagaggaaagaaggaaaaaaaaaaaagaattaaaaaaaaaaaaaagaaaaacagaagatgaccttgatggaaaaaaaatattttttaaaaaaaagatatactgtggaaggggggagaatcccataactaactgctgaggagggacctgctttggggagtaggggaaggcccagggagtggggcagggggctgcttattcactctggggattcgccatggacacgtctcaactgcgcaagctgctgcccatgtttccctgccccacttcacccccttgggggctgctcaagggtaggtgggcgtgggtggtaggaggttttttttttacccagggctctggaaggacaccaaactgttctgcttgttaccttccctccgtcttctcctcgcctttcacagtcccctcctgcctgctcctgtccagccaggtctaccacccaccccacccctcttctccggctccctgcccctccagattgcctggtgatctattttgtttccttttgtgtttctttttctgttttgagtgtctttctttgcaggtttctgtagccggaagatctccgttccgctcccagcggctccagtgtaaattccccttccccctggggaaatgcactaccttgttttggggggtttaggggtgtttttgtttttcagttgttttgtttttttgtttttttttttttcctttgccttttttcccttttatttggagggaatgggaggaagtgggaacagggaggtgggaggtggattttgtttatttttttagctcatttccaggggtgggaatttttttttaatatgtgtcatgaataaagttgtttttgaaaataa

SEQ ID NO: 373686 - DNA, 3981 bp, Homo sapiens
  misc_feature (9)..(10): n is a, c, g, or t
  misc_feature (12)..(12): n is a, c, g, or t
  misc_feature (61)..(61): n is a, c, g, or t
  misc_feature (150)..(150): n is a, c, g, or t
  misc_feature (181)..(181): n is a, c, g, or t
aatgaaggnngncacccaaatccccaatcaatgcctgttcaatcaacaaacatctaacagnacattatgtggtagcatattgccaggccgtgagatgcgaatataaataggaaccgcccctcatctgcaggcgctcacaacctagttagnaaacagtaaaacaattaagcgcgccgtgganataggcccacttgtcctgggaaatgaggggaagctggggtttgcagtggtttgattgaagggggactacatgttagaggcacagactgggtgcaggtacacccaaaggaacgagaagagtggaaggaaacaacatccacaaagtaaccacatgctggcgtatcgaaggccgtgatttacggttttgagactttacctcgccagcaaaggggggccagtctgttagcggtgcagattggaggggtgacattggaagctgtccaggaaaaagaaaatggaactggggagcagaaggcctacgcaagagggcgggacagacaggacttgtgactagtagctctggactgaggaatcctccctgctttctggtgcgggagagctagtggatgatggtgccaataacctggatggggaaagtaagctccctcctggaatgcttcattcacaacctccattttcagcaacatcccatctactggtgcttcctggtcgagatacaagtttcctgaaactgctgctctgttttgggcctcacccggccaacagctcactagctggcaagcagtagtatcaagatggcggccccctaggactggctagtcatgtgacctcgggtttcccaagtttgaagcccggcagtcctttcgggggcaaggttcacctgtcacgaaacgagtgtcaccccttcgactctcgcaagccaatcggcatctgagactgggccactgcggtgaggcgatcggaagattggtcctttccagtcgcctagctagggccaatcacggagcgtcccatacttcgcgggcccgcccgtaggccggggagaagcaggaatatcgtcacagcgtggcggtattattacctaaggactcgataggaggtgggacgcgtgttgattgacaggcagatttccctaccgggatttgagaatttggcgcagtgccccgccttagaggtggggccttatttgattgccaagtaatattccccaatggagtactagctcatggtgacgggcaggcagcttgactaatgagtcctcggcgtggccggcgcagctctccaatcgccgggcggcgggccccagtctgagcggcgatggcggcggcggcggcggcggcagcagcagcgggggctgcgggcggtcggggctccgggccggggcggcggcgccatcttgtgcccggggccggtggggaggccggggagggggccccggggggcgcaggggactacgggaacggcctggagtctgaggaactggagcctgaggagctgctgctggagcccgagccggagcccgagcccgaagaggagccgccccggccccgcgcccccccgggagctccgggccctgggcctggttcgggagcccccggcagccaagaggaggaggaggagccgggactggtcgagggtgacccgggggacggcgccattgaggacccggagctggaagctatcaaagctcgagtcagggagatggaggaagaagctgagaagctaaaggagctacagaacgaggtagagaagcagatgaatatgagtccacctccaggcaatgctggcccggtgatcatgtccattgaggagaagatggaggctgatgcccgttccatctatgttggcaatgtggactatggtgcaacagcagaagagctggaagctcactttcatggctgtggttcagtcaaccgtgttaccatactgtgtgacaaatttagtggccatcccaaagggtttgcgtatatagagttctcagacaaagagtcagtgaggacttccttggccttagatgagtccctatttagaggaaggcaaatcaaggtgatcccaaaacgaaccaacagaccaggcatcagcacaacagaccggggttttccacgagcccgctaccgcgcccggaccaccaactacaacagctcccgctctcgattctacagtggttttaacagcaggccccggggtcgcgtctacagcaggtcaggatagatgggctgctcctctttcccccgcctcccgtgagccccgtatgcttcctcctctctggtctgaggaacctccctccccccacccctccccgtggtcttcaggaactttgtctcctgcctgtgcctgcagtagaaattggtgataagggctgcatccctcccttggttcaaagaggcttccacccccagccttttttttcttgggagttggtggcatttgaaggtgtttgcggacaaaactgggaggaacagggcctccaggcagtgaaagcactgcttggacatttgttacttttttcggagttagggagggattgaagactgaacctcccttggaagaataccagaggctagctagttgatcctccccaacagccttgtgggaggattttgagatacttattctttatttgagccagtcttgcaaggttaacttctcactgggcctagtgtggtgcccaggtttttgccttgcttcacttctgtctctacatttaaatagacgggttaggcatataaaccttggcttttcataagctctacctgcctatccccaggagttagggaggatctatttgtgatggcctagggtttaagagctgtggaggactgaaaactggataaaaagggggtccttttccttgcccctgtctctcactcagatgcgcttctttttcgccactgtttggcaaagttttctgttaagcccccctccccctgccccagttctccaggtgcgttactatttctgggatcatggggtcagttttaggacacttgaacacttcttttccccccttcccttcacagtaactggggcaggggcctacggggaggggcttgtactgaactatctagtgatcacgttaacacctaactctccttctttcttccaggggccgggctagagcgacatcatggtattccccttactaaaaaaagtgtgtattaggaggagagagaggaaaaaaagaggaaagaaggaaaaaaaaaaaagaattaaaaaaaaaaaaaagaaaaacagaagatgaccttgatggaaaaaaaatattttttaaaaaaaagatatactgtggaaggggggagaatcccataactaactgctgaggagggacctgctttggggagtaggggaaggcccagggagtggggcagggggctgcttattcactctggggattcgccatggacacgtctcaactgcgcaagctgctgcccatgtttccctgccccacttcacccccttgggggctgctcaagggtaggtgggcgtgggtggtaggaggttttttttttacccagggctctggaaggacaccaaactgttctgcttgttaccttccctccgtcttctcctcgcctttcacagtcccctcctgcctgctcctgtccagccaggtctaccacccaccccacccctcttctccggctccctgcccctccagattgcctggtgatctattttgtttccttttgtgtttctttttctgttttgagtgtctttctttgcaggtttctgtagccggaagatctccgttccgctcccagcggctccagtgtaaattccccttccccctggggaaatgcactaccttgttttggggggtttaggggtgtttttgtttttcagttgttttgtttttttgtttttttttttttcctttgccttttttcccttttatttggagggaatgggaggaagtgggaacagggaggtgggaggtggattttgtttatttttttagctcatttccaggggtgggaatttttttttaatatgtgtcatgaataaagttgtttttgaaaataa

SEQ ID NO: 373687 - DNA, 3981 bp, Homo sapiens
  misc_feature (9)..(10): n is a, c, g, or t
  misc_feature (12)..(12): n is a, c, g, or t
  misc_feature (61)..(61): n is a, c, g, or t
  misc_feature (150)..(150): n is a, c, g, or t
  misc_feature (181)..(181): n is a, c, g, or t
aatgaaggnngncacccaaatccccaatcaatgcctgttcaatcaacaaacatctaacagnacattatgtggtagcatattgccaggccgtgagatgcgaatataaataggaaccgcccctcatctgcaggcgctcacaacctagttagnaaacagtaaaacaattaagcgcgccgtgganataggcccacttgtcctgggaaatgaggggaagctggggtttgcagtggtttgattgaagggggactacatgttagaggcacagactgggtgcaggtacacccaaaggaacgagaagagtggaaggaaacaacatccacaaagtaaccacatgctggcgtatcgaaggccgtgatttacggttttgagactttacctcgccagcaaaggggggccagtctgttagcggtgcagattggaggggtgacattggaagctgtccaggaaaaagaaaatggaactggggagcagaaggcctacgcaagagggcgggacagacaggacttgtgactagtagctctggactgaggaatcctccctgctttctggtgcgggagagctagtggatgatggtgccaataacctggatggggaaagtaagctccctcctggaatgcttcattcacaacctccattttcagcaacatcccatctactggtgcttcctggtcgagatacaagtttcctgaaactgctgctctgttttgggcctcacccggccaacagctcactagctggcaagcagtagtatcaagatggcggccccctaggactggctagtcatgtgacctcgggtttcccaagtttgaagcccggcagtcctttcgggggcaaggttcacctgtcacgaaacgagtgtcaccccttcgactctcgcaagccaatcggcatctgagactgggccactgcggtgaggcgatcggaagattggtcctttccagtcgcctagctagggccaatcacggagcgtcccatacttcgcgggcccgcccgtaggccggggagaagcaggaatatcgtcacagcgtggcggtattattacctaaggactcgataggaggtgggacgcgtgttgattgacaggcagatttccctaccgggatttgagaatttggcgcagtgccccgccttagaggtggggccttatttgattgccaagtaatattccccaatggagtactagctcatggtgacgggcaggcagcttgactaatgagtcctcggcgtggccggcgcagctctccaatcgccgggcggcgggccccagtctgagcggcgatggcggcggcggcggcggcggcagcagcagcgggggctgcgggcggtcggggctccgggccggggcggcggcgccatcttgtgcccggggccggtggggaggccggggagggggccccggggggcgcaggggactacgggaacggcctggagtctgaggaactggagcctgaggagctgctgctggagcccgagccggagcccgagcccgaagaggagccgccccggccccgcgcccccccgggagctccgggccctgggcctggttcgggagcccccggcagccaagaggaggaggaggagccgggactggtcgagggtgacccgggggacggcgccattgaggacccggagctggaagctatcaaagctcgagtcagggagatggaggaagaagctgagaagctaaaggagctacagaacgaggtagagaagcagatgaatatgagtccacctccaggcaatgctggcccggtgatcatgtccattgaggagaagatggaggctgatgcccgttccatctatgttggcaatgtggactatggtgcaacagcagaagagctggaagctcactttcatggctgtggttcagtcaaccgtgttaccatactgtgtgacaaatttagtggccatcccaaagggtttgcgtatatagagttctcagacaaagagtcagtgaggacttccttggccttagatgagtccctatttagaggaaggcaaatcaaggtgatcccaaaacgaaccaacagaccaggcatcagcacaacagaccggggttttccacgagcccgctaccgcgcccggaccaccaactacaacagctcccgctctcgattctacagtggttttaacagcaggccccggggtcgcgtctacagcaggtcaggatagatgggctgctcctctttcccccgcctcccgtgagccccgtatgcttcctcctctctggtctgaggaacctccctccccccacccctccccgtggtcttcaggaactttgtctcctgcctgtgcaggttgaggaaggtagttgcaggccaggccagaaggccagcctcatcatcttttctgcagtagaaattggtgataagggctgcatccctcccttggttcaaagaggcttccacccccagccttttttttcttgggagttggtggcatttgaaggtgtttgcggactacttttttcggagttagggagggattgaagactgaacctcccttggaagaataccagaggctagctagttgatcctccccaacagccttgtgggaggattttgagatacttattctttatttgagccagtcttgcaaggttaacttctcactgggcctagtgtggtgcccaggtttttgccttgcttcacttctgtctctacatttaaatagacgggttaggcatataaaccttggcttttcataagctctacctgcctatccccaggagttagggaggatctatttgtgatggcctagggtttaagagctgtggaggactgaaaactggataaaaagggggtccttttccttgcccctgtctctcactcagatgcgcttctttttcgccactgtttggcaaagttttctgttaagcccccctccccctgccccagttctccaggtgcgttactatttctgggatcatggggtcagttttaggacacttgaacacttcttttccccccttcccttcacagtaactggggcaggggcctacggggaggggcttgtactgaactatctagtgatcacgttaacacctaactctccttctttcttccaggggccgggctagagcgacatcatggtattccccttactaaaaaaagtgtgtattaggaggagagagaggaaaaaaagaggaaagaaggaaaaaaaaaaaagaattaaaaaaaaaaaaaagaaaaacagaagatgaccttgatggaaaaaaaatattttttaaaaaaaagatatactgtggaaggggggagaatcccataactaactgctgaggagggacctgctttggggagtaggggaaggcccagggagtggggcagggggctgcttattcactctggggattcgccatggacacgtctcaactgcgcaagctgctgcccatgtttccctgccccacttcacccccttgggggctgctcaagggtaggtgggcgtgggtggtaggaggttttttttttacccagggctctggaaggacaccaaactgttctgcttgttaccttccctccgtcttctcctcgcctttcacagtcccctcctgcctgctcctgtccagccaggtctaccacccaccccacccctcttctccggctccctgcccctccagattgcctggtgatctattttgtttccttttgtgtttctttttctgttttgagtgtctttctttgcaggtttctgtagccggaagatctccgttccgctcccagcggctccagtgtaaattccccttccccctggggaaatgcactaccttgttttggggggtttaggggtgtttttgtttttcagttgttttgtttttttgtttttttttttttcctttgccttttttcccttttatttggagggaatgggaggaagtgggaacagggaggtgggaggtggattttgtttatttttttagctcatttccaggggtgggaatttttttttaatatgtgtcatgaataaagttgtttttgaaaataa

SEQ ID NO: 373688 - DNA, 4395 bp, Homo sapiens
  misc_feature (9)..(10): n is a, c, g, or t
  misc_feature (12)..(12): n is a, c, g, or t
  misc_feature (61)..(61): n is a, c, g, or t
  misc_feature (150)..(150): n is a, c, g, or t
  misc_feature (181)..(181): n is a, c, g, or t
aatgaaggnngncacccaaatccccaatcaatgcctgttcaatcaacaaacatctaacagnacattatgtggtagcatattgccaggccgtgagatgcgaatataaataggaaccgcccctcatctgcaggcgctcacaacctagttagnaaacagtaaaacaattaagcgcgccgtgganataggcccacttgtcctgggaaatgaggggaagctggggtttgcagtggtttgattgaagggggactacatgttagaggcacagactgggtgcaggtacacccaaaggaacgagaagagtggaaggaaacaacatccacaaagtaaccacatgctggcgtatcgaaggccgtgatttacggttttgagactttacctcgccagcaaaggggggccagtctgttagcggtgcagattggaggggtgacattggaagctgtccaggaaaaagaaaatggaactggggagcagaaggcctacgcaagagggcgggacagacaggacttgtgactagtagctctggactgaggaatcctccctgctttctggtgcgggagagctagtggatgatggtgccaataacctggatggggaaagtaagctccctcctggaatgcttcattcacaacctccattttcagcaacatcccatctactggtgcttcctggtcgagatacaagtttcctgaaactgctgctctgttttgggcctcacccggccaacagctcactagctggcaagcagtagtatcaagatggcggccccctaggactggctagtcatgtgacctcgggtttcccaagtttgaagcccggcagtcctttcgggggcaaggttcacctgtcacgaaacgagtgtcaccccttcgactctcgcaagccaatcggcatctgagactgggccactgcggtgaggcgatcggaagattggtcctttccagtcgcctagctagggccaatcacggagcgtcccatacttcgcgggcccgcccgtaggccggggagaagcaggaatatcgtcacagcgtggcggtattattacctaaggactcgataggaggtgggacgcgtgttgattgacaggcagatttccctaccgggatttgagaatttggcgcagtgccccgccttagaggtggggccttatttgattgccaagtaatattccccaatggagtactagctcatggtgacgggcaggcagcttgactaatgagtcctcggcgtggccggcgcagctctccaatcgccgggcggcgggccccagtctgagcggcgatggcggcggcggcggcggcggcagcagcagcgggggctgcgggcggtcggggctccgggccggggcggcggcgccatcttgtgcccggggccggtggggaggccggggagggggccccggggggcgcaggggactacgggaacggcctggagtctgaggaactggagcctgaggagctgctgctggagcccgagccggagcccgagcccgaagaggagccgccccggccccgcgcccccccgggagctccgggccctgggcctggttcgggagcccccggcagccaagaggaggaggaggagccgggactggtcgagggtgacccgggggacggcgccattgaggacccggtgagggaaggagggcgagcgagcaggccggcggctggccggccgggtcactggaggcccagagctcgggcgagcgggtggcaggcggggggtggggttgggcggggaataacgtggctggggccgggtcgggccggggatgggtcagcgatcactacaaggggcccgactggcttgattcgggcgtcacgggtgcctagtgttgttctagagagggtagcttttcttttatcacgaccctcgcatggggcgagggaaatggccgagcatggctgaggccgcgctctggccgagagcagggcacagcccctgcgttggttcctcttaagctgtcctccataccctccccacttatattaggagctggaagctatcaaagctcgagtcagggagatggaggaagaagctgagaagctaaaggagctacagaacgaggtagagaagcagatgaatatgagtccacctccaggcaatgctggcccggtgatcatgtccattgaggagaagatggaggctgatgcccgttccatctatgttggcaatgtggactatggtgcaacagcagaagagctggaagctcactttcatggctgtggttcagtcaaccgtgttaccatactgtgtgacaaatttagtggccatcccaaagggtttgcgtatatagagttctcagacaaagagtcagtgaggacttccttggccttagatgagtccctatttagaggaaggcaaatcaaggtgatcccaaaacgaaccaacagaccaggcatcagcacaacagaccggggttttccacgagcccgctaccgcgcccggaccaccaactacaacagctcccgctctcgattctacagtggttttaacagcaggccccggggtcgcgtctacagcaggtcaggatagatgggctgctcctctttcccccgcctcccgtgagccccgtatgcttcctcctctctggtctgaggaacctccctccccccacccctccccgtggtcttcaggaactttgtctcctgcctgtgcaggttgaggaaggtagttgcaggccaggccagaaggccagcctcatcatcttttctgcagtagaaattggtgataagggctgcatccctcccttggttcaaagaggcttccacccccagccttttttttcttgggagttggtggcatttgaaggtgtttgcggacaaaactgggaggaacagggcctccaggcagtgaaagcactgcttggacatttgttacttttttcggagttagggagggattgaagactgaacctcccttggaagaataccagaggctagctagttgatcctccccaacagccttgtgggaggattttgagatacttattctttatttgagccagtcttgcaaggttaacttctcactgggcctagtgtggtgcccaggtttttgccttgcttcacttctgtctctacatttaaatagacgggttaggcatataaaccttggcttttcataagctctacctgcctatccccaggagttagggaggatctatttgtgatggcctagggtttaagagctgtggaggactgaaaactggataaaaagggggtccttttccttgcccctgtctctcactcagatgcgcttctttttcgccactgtttggcaaagttttctgttaagcccccctccccctgccccagttctccaggtgcgttactatttctgggatcatggggtcagttttaggacacttgaacacttcttttccccccttcccttcacagtaactggggcaggggcctacggggaggggcttgtactgaactatctagtgatcacgttaacacctaactctccttctttcttccaggggccgggctagagcgacatcatggtattccccttactaaaaaaagtgtgtattaggaggagagagaggaaaaaaagaggaaagaaggaaaaaaaaaaaagaattaaaaaaaaaaaaaagaaaaacagaagatgaccttgatggaaaaaaaatattttttaaaaaaaagatatactgtggaaggggggagaatcccataactaactgctgaggagggacctgctttggggagtaggggaaggcccagggagtggggcagggggctgcttattcactctggggattcgccatggacacgtctcaactgcgcaagctgctgcccatgtttccctgccccacttcacccccttgggggctgctcaagggtaggtgggcgtgggtggtaggaggttttttttttacccagggctctggaaggacaccaaactgttctgcttgttaccttccctccgtcttctcctcgcctttcacagtcccctcctgcctgctcctgtccagccaggtctaccacccaccccacccctcttctccggctccctgcccctccagattgcctggtgatctattttgtttccttttgtgtttctttttctgttttgagtgtctttctttgcaggtttctgtagccggaagatctccgttccgctcccagcggctccagtgtaaattccccttccccctggggaaatgcactaccttgttttggggggtttaggggtgtttttgtttttcagttgttttgtttttttgtttttttttttttcctttgccttttttcccttttatttggagggaatgggaggaagtgggaacagggaggtgggaggtggattttgtttatttttttagctcatttccaggggtgggaatttttttttaatatgtgtcatgaataaagttgtttttgaaaataa

SEQ ID NO: 373689 - DNA, 4243 bp, Homo sapiens
  misc_feature (9)..(10): n is a, c, g, or t
  misc_feature (12)..(12): n is a, c, g, or t
  misc_feature (61)..(61): n is a, c, g, or t
  misc_feature (150)..(150): n is a, c, g, or t
  misc_feature (181)..(181): n is a, c, g, or t
aatgaaggnngncacccaaatccccaatcaatgcctgttcaatcaacaaacatctaacagnacattatgtggtagcatattgccaggccgtgagatgcgaatataaataggaaccgcccctcatctgcaggcgctcacaacctagttagnaaacagtaaaacaattaagcgcgccgtgganataggcccacttgtcctgggaaatgaggggaagctggggtttgcagtggtttgattgaagggggactacatgttagaggcacagactgggtgcaggtacacccaaaggaacgagaagagtggaaggaaacaacatccacaaagtaaccacatgctggcgtatcgaaggccgtgatttacggttttgagactttacctcgccagcaaaggggggccagtctgttagcggtgcagattggaggggtgacattggaagctgtccaggaaaaagaaaatggaactggggagcagaaggcctacgcaagagggcgggacagacaggacttgtgactagtagctctggactgaggaatcctccctgctttctggtgcgggagagctagtggatgatggtgccaataacctggatggggaaagtaagctccctcctggaatgcttcattcacaacctccattttcagcaacatcccatctactggtgcttcctggtcgagatacaagtttcctgaaactgctgctctgttttgggcctcacccggccaacagctcactagctggcaagcagtagtatcaagatggcggccccctaggactggctagtcatgtgacctcgggtttcccaagtttgaagcccggcagtcctttcgggggcaaggttcacctgtcacgaaacgagtgtcaccccttcgactctcgcaagccaatcggcatctgagactgggccactgcggtgaggcgatcggaagattggtcctttccagtcgcctagctagggccaatcacggagcgtcccatacttcgcgggcccgcccgtaggccggggagaagcaggaatatcgtcacagcgtggcggtattattacctaaggactcgataggaggtgggacgcgtgttgattgacaggcagatttccctaccgggatttgagaatttggcgcagtgccccgccttagaggtggggccttatttgattgccaagtaatattccccaatggagtactagctcatggtgacgggcaggcagcttgactaatgagtcctcggcgtggccggcgcagctctccaatcgccgggcggcgggccccagtctgagcggcgatggcggcggcggcggcggcggcagcagcagcgggggctgcgggcggtcggggctccgggccggggcggcggcgccatcttgtgcccggggccggtggggaggccggggagggggccccggggggcgcaggggactacgggaacggcctggagtctgaggaactggagcctgaggagctgctgctggagcccgagccggagcccgagcccgaagaggagccgccccggccccgcgcccccccgggagctccgggccctgggcctggttcgggagcccccggcagccaagaggaggaggaggagccgggactggtcgagggtgacccgggggacggcgccattgaggacccggagctggaagctatcaaagctcgagtcagggagatggaggaagaagctgagaagctaaaggagctacagaacgaggtagagaagcagatgaatatgagtccacctccaggcaatgctggcccggtgatcatgtccattgaggagaagatggaggctgatgcccgttccatctatgttggcaatgtggactatggtgcaacagcagaagagctggaagctcactttcatggctgtggttcagtcaaccgtgttaccatactgtgtgacaaatttagtggccatcccaaagggtttgcgtatatagagttctcagacaaagagtcagtgaggacttccttggccttagatgagtccctatttagaggaaggcaaatcaaggatcccaaaacgaaccaacagaccaggcatcagcacaacagacgagctggaagctcactttcatggctgtggttcagtcaaccgtgttaccatactgtgtgacaaatttagtggccatcccaaagggtttgcgtatatagagttctcagacaaagagtcagtgaggacttccttggccttagatgagtccctatttagaggaaggcaagtgatcccaaaacgaaccaacagaccaggcatcagcacaacagaccggggttttccacgagcccgctaccgcgcccggaccaccaactacaacagctcccgctctcgattctacagtggttttaacagcaggccccggggtcgcgtctacagcaggtcaggatagatgggctgctcctctttcccccgcctcccgtgagccccgtatgcttcctcctctctggtctgaggaacctccctccccccacccctccccgtggtcttcaggaactttgtctcctgcctgtgcaggttgaggaaggtagttgcaggccaggccagaaggccagcctcatcatcttttctgcagtagaaattggtgataagggctgcatccctcccttggttcaaagaggcttccacccccagccttttttttcttgggagttggtggcatttgaaggtgtttgcggacaaaactgggaggaacagggcctccaggcagtgaaagcactgcttggacatttgttacttttttcggagttagggagggattgaagactgaacctcccttggaagaataccagaggctagctagttgatcctccccaacagccttgtgggaggattttgagatacttattctttatttgagccagtcttgcaaggttaacttctcactgggcctagtgtggtgcccaggtttttgccttgcttcacttctgtctctacatttaaatagacgggttaggcatataaaccttggcttttcataagctctacctgcctatccccaggagttagggaggatctatttgtgatggcctagggtttaagagctgtggaggactgaaaactggataaaaagggggtccttttccttgcccctgtctctcactcagatgcgcttctttttcgccactgtttggcaaagttttctgttaagcccccctccccctgccccagttctccaggtgcgttactatttctgggatcatggggtcagttttaggacacttgaacacttcttttccccccttcccttcacagtaactggggcaggggcctacggggaggggcttgtactgaactatctagtgatcacgttaacacctaactctccttctttcttccaggggccgggctagagcgacatcatggtattccccttactaaaaaaagtgtgtattaggaggagagagaggaaaaaaagaggaaagaaggaaaaaaaaaaaagaattaaaaaaaaaaaaaagaaaaacagaagatgaccttgatggaaaaaaaatattttttaaaaaaaagatatactgtggaaggggggagaatcccataactaactgctgaggagggacctgctttggggagtaggggaaggcccagggagtggggcagggggctgcttattcactctggggattcgccatggacacgtctcaactgcgcaagctgctgcccatgtttccctgccccacttcacccccttgggggctgctcaagggtaggtgggcgtgggtggtaggaggttttttttttacccagggctctggaaggacaccaaactgttctgcttgttaccttccctccgtcttctcctcgcctttcacagtcccctcctgcctgctcctgtccagccaggtctaccacccaccccacccctcttctccggctccctgcccctccagattgcctggtgatctattttgtttccttttgtgtttctttttctgttttgagtgtctttctttgcaggtttctgtagccggaagatctccgttccgctcccagcggctccagtgtaaattccccttccccctggggaaatgcactaccttgttttggggggtttaggggtgtttttgtttttcagttgttttgtttttttgtttttttttttttcctttgccttttttcccttttatttggagggaatgggaggaagtgggaacagggaggtgggaggtggattttgtttatttttttagctcatttccaggggtgggaatttttttttaatatgtgtcatgaataaagttgtttttgaaaataa

SEQ ID NO: 373690 - DNA, 2601 bp, Homo sapiens
ttttggtggtggtagccttgtgcctccctttgtgcctgttataattgtgttgctctttgttcttagtctacgtctatctttctttgtagaggttgcgtgctcgcatttgaccttcaaatctaatagtttttcctccaattggagacgctttaggattctaagagaaagcaagctgcaaggggtttcccctttaatctagaaatgtggagtctcagcccacttaattttgctcactcttaaaagcatttcaaccaaagccattcattagggatttgatttggaggcaggagggattcctatactgttttaactggcccggtgatcatgtccattgaggagaagatggaggctgatgcccgttccatctatgttggcaatgtggactatggtgcaacagcagaagagctggaagctcactttcatggctgtggttcagtcaaccgtgttaccatactgtgtgacaaatttagtggccatcccaaagggtttgcgtatatagagttctcagacaaagagtcagtgaggacttccttggccttagatgagtccctatttagaggaaggcaaatcaaggtgatcccaaaacgaaccaacagaccaggcatcagcacaacagaccggggttttccacgagcccgctaccgcgcccggaccaccaactacaacagctcccgctctcgattctacagtggttttaacagcaggccccggggtcgcgtctacagcaggtcaggatagatgggctgctcctctttcccccgcctcccgtgagccccgtatgcttcctcctctctggtctgaggaacctccctccccccacccctccccgtggtcttcaggaactttgtctcctgcctgtgcaggttgaggaaggtagttgcaggccaggccagaaggccagcctcatcatcttttctgcagtagaaattggtgataagggctgcatccctcccttggttcaaagaggcttccacccccagccttttttttcttgggagttggtggcatttgaaggtgtttgcggacaaaactgggaggaacagggcctccaggcagtgaaagcactgcttggacatttgttacttttttcggagttagggagggattgaagactgaacctcccttggaagaataccagaggctagctagttgatcctccccaacagccttgtgggaggattttgagatacttattctttatttgagccagtcttgcaaggttaacttctcactgggcctagtgtggtgcccaggtttttgccttgcttcacttctgtctctacatttaaatagacgggttaggcatataaaccttggcttttcataagctctacctgcctatccccaggagttagggaggatctatttgtgatggcctagggtttaagagctgtggaggactgaaaactggataaaaagggggtccttttccttgcccctgtctctcactcagatgcgcttctttttcgccactgtttggcaaagttttctgttaagcccccctccccctgccccagttctccaggtgcgttactatttctgggatcatggggtcagttttaggacacttgaacacttcttttccccccttcccttcacagtaactggggcaggggcctacggggaggggcttgtactgaactatctagtgatcacgttaacacctaactctccttctttcttccaggggccgggctagagcgacatcatggtattccccttactaaaaaaagtgtgtattaggaggagagagaggaaaaaaagaggaaagaaggaaaaaaaaaaaagaattaaaaaaaaaaaaaagaaaaacagaagatgaccttgatggaaaaaaaatattttttaaaaaaaagatatactgtggaaggggggagaatcccataactaactgctgaggagggacctgctttggggagtaggggaaggcccagggagtggggcagggggctgcttattcactctggggattcgccatggacacgtctcaactgcgcaagctgctgcccatgtttccctgccccacttcacccccttgggggctgctcaagggtaggtgggcgtgggtggtaggaggttttttttttacccagggctctggaaggacaccaaactgttctgcttgttaccttccctccgtcttctcctcgcctttcacagtcccctcctgcctgctcctgtccagccaggtctaccacccaccccacccctcttctccggctccctgcccctccagattgcctggtgatctattttgtttccttttgtgtttctttttctgttttgagtgtctttctttgcaggtttctgtagccggaagatctccgttccgctcccagcggctccagtgtaaattccccttccccctggggaaatgcactaccttgttttggggggtttaggggtgtttttgtttttcagttgttttgtttttttgtttttttttttttcctttgccttttttcccttttatttggagggaatgggaggaagtgggaacagggaggtgggaggtggattttgtttatttttttagctcatttccaggggtgggaatttttttttaatatgtgtcatgaataaagttgtttttgaaaataa

SEQ ID NO: 373691 - DNA, 2343 bp, Homo sapiens
ttgtgggctgatctagaggatcccagatgaatatgagtcacctccaggcatgctggcccggtgatcatgtccattgaggagaagatggaggctgatgcccgttccatctatgttggcaatgtggactatggtgcaacagcagaagagctggaagctcactttcatggctgtggttcagtcaaccgtgttaccatactgtgtgacaaatttagtggccatcccaaagggtttgcgtatatagagttctcagacaaagagtcagtgaggacttccttggccttagatgagtccctatttagaggaaggcaaatcaaggtgatcccaaaacgaaccaacagaccaggcatcagcacaacagaccggggttttccacgagcccgctaccgcgcccggaccaccaactacaacagctcccgctctcgattctacagtggttttaacagcaggccccggggtcgcgtctacagcaggtcaggatagatgggctgctcctctttcccccgcctcccgtgagccccgtatgcttcctcctctctggtctgaggaacctccctccccccacccctccccgtggtcttcaggaactttgtctcctgcctgtgcaggttgaggaaggtagttgcaggccaggccagaaggccagcctcatcatcttttctgcagtagaaattggtgataagggctgcatccctcccttggttcaaagaggcttccacccccagccttttttttcttgggagttggtggcatttgaaggtgtttgcggacaaaactgggaggaacagggcctccaggcagtgaaagcactgcttggacatttgttacttttttcggagttagggagggattgaagactgaacctcccttggaagaataccagaggctagctagttgatcctccccaacagccttgtgggaggattttgagatacttattctttatttgagccagtcttgcaaggttaacttctcactgggcctagtgtggtgcccaggtttttgccttgcttcacttctgtctctacatttaaatagacgggttaggcatataaaccttggcttttcataagctctacctgcctatccccaggagttagggaggatctatttgtgatggcctagggtttaagagctgtggaggactgaaaactggataaaaagggggtccttttccttgcccctgtctctcactcagatgcgcttctttttcgccactgtttggcaaagttttctgttaagcccccctccccctgccccagttctccaggtgcgttactatttctgggatcatggggtcagttttaggacacttgaacacttcttttccccccttcccttcacagtaactggggcaggggcctacggggaggggcttgtactgaactatctagtgatcacgttaacacctaactctccttctttcttccaggggccgggctagagcgacatcatggtattccccttactaaaaaaagtgtgtattaggaggagagagaggaaaaaaagaggaaagaaggaaaaaaaaaaaagaattaaaaaaaaaaaaaagaaaaacagaagatgaccttgatggaaaaaaaatattttttaaaaaaaagatatactgtggaaggggggagaatcccataactaactgctgaggagggacctgctttggggagtaggggaaggcccagggagtggggcagggggctgcttattcactctggggattcgccatggacacgtctcaactgcgcaagctgctgcccatgtttccctgccccacttcacccccttgggggctgctcaagggtaggtgggcgtgggtggtaggaggttttttttttacccagggctctggaaggacaccaaactgttctgcttgttaccttccctccgtcttctcctcgcctttcacagtcccctcctgcctgctcctgtccagccaggtctaccacccaccccacccctcttctccggctccctgcccctccagattgcctggtgatctattttgtttccttttgtgtttctttttctgttttgagtgtctttctttgcaggtttctgtagccggaagatctccgttccgctcccagcggctccagtgtaaattccccttccccctggggaaatgcactaccttgttttggggggtttaggggtgtttttgtttttcagttgttttgtttttttgtttttttttttttcctttgccttttttcccttttatttggagggaatgggaggaagtgggaacagggaggtgggaggtggattttgtttatttttttagctcatttccaggggtgggaatttttttttaatatgtgtcatgaataaagttgtttttgaaaataa

SEQ ID NO: 373692 - DNA, 1946 bp, Homo sapiens
  misc_feature (1)..(1): n is a, c, g, or t
ngctgtgtgctgtctgataaaaggccacaggacagctgtgaggtagagctggtgaaggcacttttgagtgcaggtcaggatagatgggctgctcctctttcccccgcctcccgtgagccccgtatgcttcctcctctctggtctgaggaacctccctccccccacccctccccgtggtcttcaggaactttgtctcctgcctgtgcaggttgaggaaggtagttgcaggccaggccagaaggccagcctcatcatcttttctgcagtagaaattggtgataagggctgcatccctcccttggttcaaagaggcttccacccccagccttttttttcttgggagttggtggcatttgaaggtgtttgcggacaaaactgggaggaacagggcctccaggcagtgaaagcactgcttggacatttgttacttttttcggagttagggagggattgaagactgaacctcccttggaagaataccagaggctagctagttgatcctccccaacagccttgtgggaggattttgagatacttattctttatttgagccagtcttgcaaggttaacttctcactgggcctagtgtggtgcccaggtttttgccttgcttcacttctgtctctacatttaaatagacgggttaggcatataaaccttggcttttcataagctctacctgcctatccccaggagttagggaggatctatttgtgatggcctagggtttaagagctgtggaggactgaaaactggataaaaagggggtccttttccttgcccctgtctctcactcagatgcgcttctttttcgccactgtttggcaaagttttctgttaagcccccctccccctgccccagttctccaggtgcgttactatttctgggatcatggggtcagttttaggacacttgaacacttcttttccccccttcccttcacagtaactggggcaggggcctacggggaggggcttgtactgaactatctagtgatcacgttaacacctaactctccttctttcttccaggggccgggctagagcgacatcatggtattccccttactaaaaaaagtgtgtattaggaggagagagaggaaaaaaagaggaaagaaggaaaaaaaaaaaagaattaaaaaaaaaaaaaagaaaaacagaagatgaccttgatggaaaaaaaatattttttaaaaaaaagatatactgtggaaggggggagaatcccataactaactgctgaggagggacctgctttggggagtaggggaaggcccagggagtggggcagggggctgcttattcactctggggattcgccatggacacgtctcaactgcgcaagctgctgcccatgtttccctgccccacttcacccccttgggggctgctcaagggtaggtgggcgtgggtggtaggaggttttttttttacccagggctctggaaggacaccaaactgttctgcttgttaccttccctccgtcttctcctcgcctttcacagtcccctcctgcctgctcctgtccagccaggtctaccacccaccccacccctcttctccggctccctgcccctccagattgcctggtgatctattttgtttccttttgtgtttctttttctgttttgagtgtctttctttgcaggtttctgtagccggaagatctccgttccgctcccagcggctccagtgtaaattccccttccccctggggaaatgcactaccttgttttggggggtttaggggtgtttttgtttttcagttgttttgtttttttgtttttttttttttcctttgccttttttcccttttatttggagggaatgggaggaagtgggaacagggaggtgggaggtggattttgtttatttttttagctcatttccaggggtgggaatttttttttaatatgtgtcatgaataaagttgtttttgaaaataa

SEQ ID NO: 373693 - DNA, 2589 bp, Homo sapiens
  misc_feature (9)..(10): n is a, c, g, or t
  misc_feature (12)..(12): n is a, c, g, or t
  misc_feature (61)..(61): n is a, c, g, or t
  misc_feature (150)..(150): n is a, c, g, or t
  misc_feature (181)..(181): n is a, c, g, or t
aatgaaggnngncacccaaatccccaatcaatgcctgttcaatcaacaaacatctaacagnacattatgtggtagcatattgccaggccgtgagatgcgaatataaataggaaccgcccctcatctgcaggcgctcacaacctagttagnaaacagtaaaacaattaagcgcgccgtgganataggcccacttgtcctgggaaatgaggggaagctggggtttgcagtggtttgattgaagggggactacatgttagaggcacagactgggtgcaggtacacccaaaggaacgagaagagtggaaggaaacaacatccacaaagtaaccacatgctggcgtatcgaaggccgtgatttacggttttgagactttacctcgccagcaaaggggggccagtctgttagcggtgcagattggaggggtgacattggaagctgtccaggaaaaagaaaatggaactggggagcagaaggcctacgcaagagggcgggacagacaggacttgtgactagtagctctggactgaggaatcctccctgctttctggtgcgggagagctagtggatgatggtgccaataacctggatggggaaagtaagctccctcctggaatgcttcattcacaacctccattttcagcaacatcccatctactggtgcttcctggtcgagatacaagtttcctgaaactgctgctctgttttgggcctcacccggccaacagctcactagctggcaagcagtagtatcaagatggcggccccctaggactggctagtcatgtgacctcgggtttcccaagtttgaagcccggcagtcctttcgggggcaaggttcacctgtcacgaaacgagtgtcaccccttcgactctcgcaagccaatcggcatctgagactgggccactgcggtgaggcgatcggaagattggtcctttccagtcgcctagctagggccaatcacggagcgtcccatacttcgcgggcccgcccgtaggccggggagaagcaggaatatcgtcacagcgtggcggtattattacctaaggactcgataggaggtgggacgcgtgttgattgacaggcagatttccctaccgggatttgagaatttggcgcagtgccccgccttagaggtggggccttatttgattgccaagtaatattccccaatggagtactagctcatggtgacgggcaggcagcttgactaatgagtcctcggcgtggccggcgcagctctccaatcgccgggcggcgggccccagtctgagcggcgatggcggcggcggcggcggcggcagcagcagcgggggctgcgggcggtcggggctccgggccggggcggcggcgccatcttgtgcccggggccggtggggaggccggggagggggccccggggggcgcaggggactacgggaacggcctggagtctgaggaactggagcctgaggagctgctgctggagcccgagccggagcccgagcccgaagaggagccgccccggccccgcgcccccccgggagctccgggccctgggcctggttcgggagcccccggcagccaagaggaggaggaggagccgggactggtcgagggtgacccgggggacggcgccattgaggacccggtgagggaaggagggcgagcgagcaggccggcggctggccggccgggtcactggaggcccagagctcgggcgagcgggtggcaggcggggggtggggttgggcggggaataacgtggctggggccgggtcgggccggggatgggtcagcgatcactacaaggggcccgactggcttgattcgggcgtcacgggtgcctagtgttgttctagagagggtagcttttcttttatcacgaccctcgcatggggcgagggaaatggccgagcatggctgaggccgcgctctggccgagagcagggcacagcccctgcgttggttcctcttaagctgtcctccataccctccccacttatattaggagctggaagctatcaaagctcgagtcagggagatggaggaagaagctgagaagctaaaggagctacagaacgaggtagagaagcagatgaatatgagtccacctccaggcaatgctggcccggtgatcatgtccattgaggagaagatggaggctgatgcccgttccatctatgttggcaatgtggactatggtgcaacagcagaagagctggaagctcactttcatggctgtggttcagtcaaccgtgttaccatactgtgtgacaaatttagtggccatcccaaagggtttgcgtatatagagttctcagacaaagagtcagtgaggacttccttggccttagatgagtccctatttagaggaaggcaaatcaaggtgatcccaaaacgaaccaacagaccaggcatcagcacaacagaccggggttttccacgagcccgctaccgcgcccggaccaccaactacaacagctcccgctctcgattctacagtggttttaacagcaggccccggggtcgcgtctacaggggccgggctagagcgacatcatggtattccccttactaaaaaaagtgtgtattaggaggagagagagga

SEQ ID NO: 373694 - DNA, 444 bp, Homo sapiens
gtccttctccaggcgaggctactgcccaggcgaggtactgccaggcgaggctacctgccctggcgaggtgcccctccagattgcctggtgatctattttgtttccttttgtgtttctttttctgttttgagtgtctttctttgcaggtttctgtagccggaagatctccgttccgctcccagcggctccagtgtaaattccccttccccctggggaaatgcactaccttgttttggggggtttaggggtgtttttgtttttcagttgttttgtttttttgtttttttttttttcctttgccttttttcccttttatttggagggaatgggaggaagtgggaacagggaggtgggaggtggattttgtttatttttttagctcatttccaggggtgggaatttttttttaatatgtgtcatgaataaagttgtttttgaaaataa

SEQ ID NO: 373695 - DNA, 310 bp, Homo sapiens
gtaagcctatgtccattgctgttctagttgtgtataaactctccaggttgcctttaaggctatcatttgttcatctctgactcagtgatcccaaaacgaaccaacagaccaggcatcagcacaacagaccggggttttccacgagcccgctaccgcgcccggaccaccaactacaacagctcccgctctcgattctacagtggttttaacagcaggccccggggtcgcgtctacagcaggtcaggatagatgggctgctcctctttcccccgcctcccgtgagccccgtatgcttcctcctctctggtct

SEQ ID NO: 373696 - DNA, 3107 bp, Homo sapiens
  misc_feature (9)..(10): n is a, c, g, or t
  misc_feature (12)..(12): n is a, c, g, or t
  misc_feature (61)..(61): n is a, c, g, or t
  misc_feature (150)..(150): n is a, c, g, or t
  misc_feature (181)..(181): n is a, c, g, or t
aatgaaggnngncacccaaatccccaatcaatgcctgttcaatcaacaaacatctaacagnacattatgtggtagcatattgccaggccgtgagatgcgaatataaataggaaccgcccctcatctgcaggcgctcacaacctagttagnaaacagtaaaacaattaagcgcgccgtgganataggcccacttgtcctgggaaatgaggggaagctggggtttgcagtggtttgattgaagggggactacatgttagaggcacagactgggtgcaggtacacccaaaggaacgagaagagtggaaggaaacaacatccacaaagtaaccacatgctggcgtatcgaaggccgtgatttacggttttgagactttacctcgccagcaaaggggggccagtctgttagcggtgcagattggaggggtgacattggaagctgtccaggaaaaagaaaatggaactggggagcagaaggcctacgcaagagggcgggacagacaggacttgtgactagtagctctggactgaggaatcctccctgctttctggtgcgggagagctagtggatgatggtgccaataacctggatggggaaagtaagctccctcctggaatgcttcattcacaacctccattttcagcaacatcccatctactggtgcttcctggtcgagatacaagtttcctgaaactgctgctctgttttgggcctcacccggccaacagctcactagctggcaagcagtagtatcaagatggcggccccctaggactggctagtcatgtgacctcgggtttcccaagtttgaagcccggcagtcctttcgggggcaaggttcacctgtcacgaaacgagtgtcaccccttcgactctcgcaagccaatcggcatctgagactgggccactgcggtgaggcgatcggaagattggtcctttccagtcgcctagctagggccaatcacggagcgtcccatacttcgcgggcccgcccgtaggccggggagaagcaggaatatcgtcacagcgtggcggtattattacctaaggactcgataggaggtgggacgcgtgttgattgacaggcagatttccctaccgggatttgagaatttggcgcagtgccccgccttagaggtggggccttatttgattgccaagtaatattccccaatggagtactagctcatggtgacgggcaggcagcttgactaatgagtcctcggcgtggccggcgcagctctccaatcgccgggcggcgggccccagtctgagcggcgatggcggcggcggcggcggcggcagcagcagcgggggctgcgggcggtcggggctccgggccggggcggcggcgccatcttgtgcccggggccggtggggaggccggggagggggccccggggggcgcaggggactacgggaacggcctggagtctgaggaactggagcctgaggagctgctgctggagcccgagccggagcccgagcccgaagaggagccgccccggccccgcgcccccccgggagctccgggccctgggcctggttcgggagcccccggcagccaagaggaggaggaggagccgggactggtcgagggtgacccgggggacggcgccattgaggacccggagctggaagctatcaaagctcgagtcagggagatggaggaagaagctgagaagctaaaggagctacagaacgaggtagagaagcagatgaatatgagtccacctccaggcaatgctggcccggtgatcatgtccattgaggagaagatggaggctgatgcccgttccatctatgttggcaatgtggactatggtgcaacagcagaagagctggaagctcactttcatggctgtggttcagtcaaccgtgttaccatactgtgtgacaaatttagtggccatcccaaagggtttgcgtatatagagttctcagacaaagagtcagtgaggacttccttggccttagatgagtccctatttagaggaaggcaaatcaaggtgatcccaaaacgaaccaacagaccaggcatcagcacaacagaccggggttttccacgagcccgctaccgcgcccggaccaccaactacaacagctcccgctctcgattctacagtggttttaacagcaggccccggggtcgcgtctacaggggccgggctagagcgacatcatggtattccccttactaaaaaaagtgtgtattaggaggagagagaggaaaaaaagaggaaagaaggaaaaaaaaaaaagaattaaaaaaaaaaaaaagaaaaacagaagatgaccttgatggaaaaaaaatattttttaaaaaaaagatatactgtggaaggggggagaatcccataactaactgctgaggagggacctgctttggggagtaggggaaggcccagggagtggggcagggggctgcttattcactctggggattcgccatggacacgtctcaactgcgcaagctgctgcccatgtttccctgccccacttcacccccttgggggctgctcaagggtaggtgggcgtgggtggtaggaggttttttttttacccagggctctggaaggacaccaaactgttctgcttgttaccttccctccgtcttctcctcgcctttcacagtcccctcctgcctgctcctgtccagccaggtctaccacccaccccacccctcttctccggctccctgcccctccagattgcctggtgatctattttgtttccttttgtgtttctttttctgttttgagtgtctttctttgcaggtttctgtagccggaagatctccgttccgctcccagcggctccagtgtaaattccccttccccctggggaaatgcactaccttgttttggggggtttaggggtgtttttgtttttcagttgttttgtttttttgtttttttttttttcctttgccttttttcccttttatttggagggaatgggaggaagtgggaacagggaggtgggaggtggattttgtttatttttttagctcatttccaggggtgggaatttttttttaatatgtgtcatgaataaagttgtttttgaaaataaaaattgtttggccttttgggtgtaaaaaaaaaaa

SEQ ID NO: 373697 - DNA, 3033 bp, Homo sapiens
  misc_feature (9)..(10): n is a, c, g, or t
  misc_feature (12)..(12): n is a, c, g, or t
  misc_feature (61)..(61): n is a, c, g, or t
  misc_feature (150)..(150): n is a, c, g, or t
  misc_feature (181)..(181): n is a, c, g, or t
aatgaaggnngncacccaaatccccaatcaatgcctgttcaatcaacaaacatctaacagnacattatgtggtagcatattgccaggccgtgagatgcgaatataaataggaaccgcccctcatctgcaggcgctcacaacctagttagnaaacagtaaaacaattaagcgcgccgtgganataggcccacttgtcctgggaaatgaggggaagctggggtttgcagtggtttgattgaagggggactacatgttagaggcacagactgggtgcaggtacacccaaaggaacgagaagagtggaaggaaacaacatccacaaagtaaccacatgctggcgtatcgaaggccgtgatttacggttttgagactttacctcgccagcaaaggggggccagtctgttagcggtgcagattggaggggtgacattggaagctgtccaggaaaaagaaaatggaactggggagcagaaggcctacgcaagagggcgggacagacaggacttgtgactagtagctctggactgaggaatcctccctgctttctggtgcgggagagctagtggatgatggtgccaataacctggatggggaaagtaagctccctcctggaatgcttcattcacaacctccattttcagcaacatcccatctactggtgcttcctggtcgagatacaagtttcctgaaactgctgctctgttttgggcctcacccggccaacagctcactagctggcaagcagtagtatcaagatggcggccccctaggactggctagtcatgtgacctcgggtttcccaagtttgaagcccggcagtcctttcgggggcaaggttcacctgtcacgaaacgagtgtcaccccttcgactctcgcaagccaatcggcatctgagactgggccactgcggtgaggcgatcggaagattggtcctttccagtcgcctagctagggccaatcacggagcgtcccatacttcgcgggcccgcccgtaggccggggagaagcaggaatatcgtcacagcgtggcggtattattacctaaggactcgataggaggtgggacgcgtgttgattgacaggcagatttccctaccgggatttgagaatttggcgcagtgccccgccttagaggtggggccttatttgattgccaagtaatattccccaatggagtactagctcatggtgacgggcaggcagcttgactaatgagtcctcggcgtggccggcgcagctctccaatcgccgggcggcgggccccagtctgagcggcgatggcggcggcggcggcggcggcagcagcagcgggggctgcgggcggtcggggctccgggccggggcggcggcgccatcttgtgcccggggccggtggggaggccggggagggggccccggggggcgcaggggactacgggaacggcctggagtctgaggaactggagcctgaggagctgctgctggagcccgagccggagcccgagcccgaagaggagccgccccggccccgcgcccccccgggagctccgggccctgggcctggttcgggagcccccggcagccaagaggaggaggaggagccgggactggtcgagggtgacccgggggacggcgccattgaggacccggagctggaagctatcaaagctcgagtcagggagatggaggaagaagctgagaagctaaaggagctacagaacgaggtagagaagcagatgaatatgagtccacctccaggcaatgctggcccggtgatcatgtccattgaggagaagatggaggctgatgcccgttccatctatgttggcaatgtggactatggtgcaacagcagaagagctggaagctcactttcatggctgtggttcagtcaaccgtgttaccatactgtgtgacaaatttagtggccatcccaaagggtttgcgtatatagagttctcagacaaagagtcagtgaggacttccttggccttagatgagtccctatttagaggaaggcaaatcaaggtgatcccaaaacgaaccaacagaccaggcatcagcacaacagaccggggttttccacgagcccgctaccgcgcccggaccaccaactacaacagctcccgctctcgattctacagtggttttaacagcaggccccggggtcgcgtctacaggggccgggctagagcgacatcatggtattccccttactaaaaaaagtgtgtattaggaggagagagaggaaaaaaagaggaaagaaggaaaaaaaaaaaagaattaaaaaaaaaaaaaagaaaaacagaagatgaccttgatggaaaaaaaatattttttaaaaaaaagatatactgtggaaggggggagaatcccataactaactgctgaggagggacctgctttggggagtaggggaaggcccagggagtggggcagggggctgcttattcactctggggattcgccatggacacgtctcaactgcgcaagctgctgcccatgtttccctgccccacttcacccccttgggggctgctcaagggtaggtgggcgtgggtggtaggaggttttttttttacccagggctctggaaggacaccaaactgttagtcccctcctgcctgctcctgtccagccaggtctaccacccaccccacccctcttctccggctccctgcccctccagattgcctggtgatctattttgtttccttttgtgtttctttttctgttttgagtgtctttctttgcaggtttctgtagccggaagatctccgttccgctcccagcggctccagtgtaaattccccttccccctggggaaatgcactaccttgttttggggggtttaggggtgtttttgtttttcagttgttttgtttttttgtttttttttttttcctttgccttttttcccttttatttggagggaatgggaggaagtgggaacagggaggtgggaggtggattttgtttatttttttagctcatttccaggggtgggaatttttttttaatatgtgtcatgaataaagttgtttttgaaaataa

SEQ ID NO: 373698 - DNA, 1693 bp, Homo sapiens
tcactttatttattcattctcctccaacattagcataattaaagcctggagtctgaggaactggagcctgaggagctgctgctggagcccgagccggagcccgagcccgaagaggagccgccccggccccgcgcccccccgggagctccgggccctgggcctggttcgggagcccccggcagccaagaggaggaggaggagccgggactggtcgagggtgacccgggggacggcgccattgaggacccggagctggaagctatcaaagctcgagtcagggagatggaggaagaagctgagaagctaaaggagctacagaacgaggtagagaagcagatgaatatgagtccacctccaggcaatgctggcccggtgatcatgtccattgaggagaagatggaggctgatgcccgttccatctatgttggcaatgtggactatggtgcaacagcagaagagctggaagctcactttcatggctgtggttcagtcaaccgtgttaccatactgtgtgacaaatttagtggccatcccaaagggtttgcgtatatagagttctcagacaaagagtcagtgaggacttccttggccttagatgagtccctatttagaggaaggcaaatcaaggtgatcccaaaacgaaccaacagaccaggcatcagcacaacagaccggggttttccacgagcccgctaccgcgcccggaccaccaactacaacagctcccgctctcgattctacagtggttttaacagcaggccccggggtcgcgtctacaggggccgggctagagcgacatcatggtattccccttactaaaaaaagtgtgtattaggaggagagagaggaaaaaaagaggaaagaaggaaaaaaaaaaaagaattaaaaaaaaaaaaaagaaaaacagaagatgaccttgatggaaaaaaaatattttttaaaaaaaagatatactgtggaaggggggagaatcccataactaactgctgaggagggacctgctttggggagtaggggaaggcccagggagtggggcagggggctgcttattcactctggggattcgccatggacacgtctcaactgcgcaagctgctgcccatgtttccctgccccacttcacccccttgggggctgctcaagggtaggtgggcgtgggtggtaggaggttttttttttacccagggctctggaaggacaccaaactgttctgcttgttaccttccctccgtcttctcctcgcctttcacagtcccctcctgcctgctcctgtccagccaggtctaccacccaccccacccctcttctccggctccctgcccctccagattgcctggtgatctattttgtttccttttgtgtttctttttctgttttgagtgtctttctttgcaggtttctgtagccggaagatctccgttccgctcccagcggctccagtgtaaattccccttccccctggggaaatgcactaccttgttttggggggtttaggggtgtttttgtttttcagttgttttgtttttttgtttttttttttttcctttgccttttttcccttttatttggagggaatgggaggaagtgggaacagggaggtgggaggtggattttgtttatttttttagctcatttccaggggtgggaatttttttttaatatgtgtcatgaataaagttgtttttgaaaataa

SEQ ID NO: 373699 - DNA, 3102 bp, Homo sapiens
  misc_feature (9)..(10): n is a, c, g, or t
  misc_feature (12)..(12): n is a, c, g, or t
  misc_feature (61)..(61): n is a, c, g, or t
  misc_feature (150)..(150): n is a, c, g, or t
  misc_feature (181)..(181): n is a, c, g, or t
aatgaaggnngncacccaaatccccaatcaatgcctgttcaatcaacaaacatctaacagnacattatgtggtagcatattgccaggccgtgagatgcgaatataaataggaaccgcccctcatctgcaggcgctcacaacctagttagnaaacagtaaaacaattaagcgcgccgtgganataggcccacttgtcctgggaaatgaggggaagctggggtttgcagtggtttgattgaagggggactacatgttagaggcacagactgggtgcaggtacacccaaaggaacgagaagagtggaaggaaacaacatccacaaagtaaccacatgctggcgtatcgaaggccgtgatttacggttttgagactttacctcgccagcaaaggggggccagtctgttagcggtgcagattggaggggtgacattggaagctgtccaggaaaaagaaaatggaactggggagcagaaggcctacgcaagagggcgggacagacaggacttgtgactagtagctctggactgaggaatcctccctgctttctggtgcgggagagctagtggatgatggtgccaataacctggatggggaaagtaagctccctcctggaatgcttcattcacaacctccattttcagcaacatcccatctactggtgcttcctggtcgagatacaagtttcctgaaactgctgctctgttttgggcctcacccggccaacagctcactagctggcaagcagtagtatcaagatggcggccccctaggactggctagtcatgtgacctcgggtttcccaagtttgaagcccggcagtcctttcgggggcaaggttcacctgtcacgaaacgagtgtcaccccttcgactctcgcaagccaatcggcatctgagactgggccactgcggtgaggcgatcggaagattggtcctttccagtcgcctagctagggccaatcacggagcgtcccatacttcgcgggcccgcccgtaggccggggagaagcaggaatatcgtcacagcgtggcggtattattacctaaggactcgataggaggtgggacgcgtgttgattgacaggcagatttccctaccgggatttgagaatttggcgcagtgccccgccttagaggtggggccttatttgattgccaagtaatattccccaatggagtactagctcatggtgacgggcaggcagcttgactaatgagtcctcggcgtggccggcgcagctctccaatcgccgggcggcgggccccagtctgagcggcgatggcggcggcggcggcggcggcagcagcagcgggggctgcgggcggtcggggctccgggccggggcggcggcgccatcttgtgcccggggccggtggggaggccggggagggggccccggggggcgcaggggactacgggaacggcctggagtctgaggaactggagcctgaggagctgctgctggagcccgagccggagcccgagcccgaagaggagccgccccggccccgcgcccccccgggagctccgggccctgggcctggttcgggagcccccggcagccaagaggaggaggaggagccgggactggtcgagggtgacccgggggacggcgccattgaggacccggagctggaagctatcaaagctcgagtcagggagatggaggaagaagctgagaagctaaaggagctacagaacgaggtagagaagcagatgaatatgagtccacctccaggcaatgctggcccggtgatcatgtccattgaggagaagatggaggctgatgcccgttccatctatgttggcaatgtggactatggtgcaacagcagaagagctggaagctcactttcatggctgtggttcagtcaaccgtgttaccatactgtgtgacaaatttagtggccatcccaaagggtttgcgtatatagagttctcagacaaagagtcagtgaggacttccttggccttagatgagtccctatttagaggaaggcaaatcaaggtgatcccaaaacgaaccaacagaccaggcatcagcacaacagaccggggttttccacgagcccgctaccgcgcccggaccaccaactacaacagctcccgctctcgattctacagtggttttaacagcaggccccggggtcgcgtctacaggggccgggctagagcgacatcatggtattccccttactaaaaaaagtgtgtattaggaggagagagaggaaaaaaagaggaaagaaggaaaaaaaaaaaagaattaaaaaaaaaaaaaagaaaaacagaagatgaccttgatggaaaaaaaatattttttaaaaaaaagatatactgtggaaggggggagaatcccataactaactgctgaggagggacctgctttggggagtaggggaaggcccagggagtggggcagggggctgcttattcactctggggattcgccatggacacgtctcaactgcgcaagctgctgcccatgtttccctgccccacttcacccccttgggggctgctcaagggtaggtgggcgtgggtggtaggaggttttttttttacccagggctctggaaggacaccaaactgttctgcttgttaccttccctccgtcttctcctcgcctttcactgcccctccagattgcctggtgatctattttgtttccttttgtgtttctttttctgttttgagtgtctttctttgcaggtttctgtagccggaagatctccgttccgctcccagcggctccagtgtaaattccccttccccctggggaaatgcactaccttgttttggggggtttaggggtgtttttgtttttcagttgttttgtttttttgtttttttttttttcctttgccttttttcccttttatttggagggaatgggaggaagtgggaacagggaggtgggaggtggattttgtttatttttttagctcatttccaggggtgggaatttttttttaatatgtgtcatgaataaagttgtttttgaaaataacaacccaggtccacacaaccttctgtcgagcccccaaatcggaaccttctgggtttcgtaaggataccctgtccctcatgctggcttagctgtgtt

SEQ ID NO: 373700 - DNA, 2628 bp, Homo sapiens
  misc_feature (9)..(10): n is a, c, g, or t
  misc_feature (12)..(12): n is a, c, g, or t
  misc_feature (61)..(61): n is a, c, g, or t
  misc_feature (150)..(150): n is a, c, g, or t
  misc_feature (181)..(181): n is a, c, g, or t
aatgaaggnngncacccaaatccccaatcaatgcctgttcaatcaacaaacatctaacagnacattatgtggtagcatattgccaggccgtgagatgcgaatataaataggaaccgcccctcatctgcaggcgctcacaacctagttagnaaacagtaaaacaattaagcgcgccgtgganataggcccacttgtcctgggaaatgaggggaagctggggtttgcagtggtttgattgaagggggactacatgttagaggcacagactgggtgcaggtacacccaaaggaacgagaagagtggaaggaaacaacatccacaaagtaaccacatgctggcgtatcgaaggccgtgatttacggttttgagactttacctcgccagcaaaggggggccagtctgttagcggtgcagattggaggggtgacattggaagctgtccaggaaaaagaaaatggaactggggagcagaaggcctacgcaagagggcgggacagacaggacttgtgactagtagctctggactgaggaatcctccctgctttctggtgcgggagagctagtggatgatggtgccaataacctggatggggaaagtaagctccctcctggaatgcttcattcacaacctccattttcagcaacatcccatctactggtgcttcctggtcgagatacaagtttcctgaaactgctgctctgttttgggcctcacccggccaacagctcactagctggcaagcagtagtatcaagatggcggccccctaggactggctagtcatgtgacctcgggtttcccaagtttgaagcccggcagtcctttcgggggcaaggttcacctgtcacgaaacgagtgtcaccccttcgactctcgcaagccaatcggcatctgagactgggccactgcggtgaggcgatcggaagattggtcctttccagtcgcctagctagggccaatcacggagcgtcccatacttcgcgggcccgcccgtaggccggggagaagcaggaatatcgtcacagcgtggcggtattattacctaaggactcgataggaggtgggacgcgtgttgattgacaggcagatttccctaccgggatttgagaatttggcgcagtgccccgccttagaggtggggccttatttgattgccaagtaatattccccaatggagtactagctcatggtgacgggcaggcagcttgactaatgagtcctcggcgtggccggcgcagctctccaatcgccgggcggcgggccccagtctgagcggcgatggcggcggcggcggcggcggcagcagcagcgggggctgcgggcggtcggggctccgggccggggcggcggcgccatcttgtgcccggggccggtggggaggccggggagggggccccggggggcgcaggggactacgggaacggcctggagtctgaggaactggagcctgaggagctgctgctggagcccgagccggagcccgagcccgaagaggagccgccccggccccgcgcccccccgggagctccgggccctgggcctggttcgggagcccccggcagccaagaggaggaggaggagccgggactggtcgagggtgacccgggggacggcgccattgaggacccggagctggaagctatcaaagctcgagtcagggagatggaggaagaagctgagaagctaaaggagctacagaacgaggtagagaagcagatgaatatgagtccacctccaggcaatgctggcccggtgatcatgtccattgaggagaagatggaggctgatgcccgttccatctatgttggcaatgtggactatggtgcaacagcagaagagctggaagctcactttcatggctgtggttcagtcaaccgtgttaccatactgtgtgacaaatttagtggccatcccaaagggtttgcgtatatagagttctcagacaaagagtcagtgaggacttccttggccttagatgagtccctatttagaggaaggcaaatcaaggtgatcccaaaacgaaccaacagaccaggcatcagcacaacagaccggggttttccacgagcccgctaccgcgcccggaccaccaactacaacagctcccgctctcgattctacagtggttttaacagcaggccccggggtcgcgtctacaggggccgggctagagcgacatcatggtattccccttactaaaaaaagtgtgtattaggaggagagagaggaaaaaaagaggaaagaaggaaaaaaaaaaaagaattaaaaaaaaaaaaaacacactttgtccggccgcgcgcctgtgggccctctggaaaaacgtttctctaaacccaatccggtggggcgcccggggccccattgggatacggtagcacctggggcccaaaagcgcgggtcccccaaaggagaaaccccggggccaggagcacaagggcgctgggggctctctccaccacaattaaaaaaagcgcgccgcgcggggggacacacgcgaggcgcgttttcgtgaaacaaatctctccaggagaggggagattcccggggggggcccacatacaggggaatctcttatctaacgcggggatctcaagagggaagcctgcgaaatttctcaattttagcccg

SEQ ID NO: 373701 - DNA, 2286 bp, Homo sapiens
  misc_feature (9)..(10): n is a, c, g, or t
  misc_feature (12)..(12): n is a, c, g, or t
  misc_feature (61)..(61): n is a, c, g, or t
  misc_feature (150)..(150): n is a, c, g, or t
  misc_feature (181)..(181): n is a, c, g, or t
  misc_feature (2270)..(2271): n is a, c, g, or t
aatgaaggnngncacccaaatccccaatcaatgcctgttcaatcaacaaacatctaacagnacattatgtggtagcatattgccaggccgtgagatgcgaatataaataggaaccgcccctcatctgcaggcgctcacaacctagttagnaaacagtaaaacaattaagcgcgccgtgganataggcccacttgtcctgggaaatgaggggaagctggggtttgcagtggtttgattgaagggggactacatgttagaggcacagactgggtgcaggtacacccaaaggaacgagaagagtggaaggaaacaacatccacaaagtaaccacatgctggcgtatcgaaggccgtgatttacggttttgagactttacctcgccagcaaaggggggccagtctgttagcggtgcagattggaggggtgacattggaagctgtccaggaaaaagaaaatggaactggggagcagaaggcctacgcaagagggcgggacagacaggacttgtgactagtagctctggactgaggaatcctccctgctttctggtgcgggagagctagtggatgatggtgccaataacctggatggggaaagtaagctccctcctggaatgcttcattcacaacctccattttcagcaacatcccatctactggtgcttcctggtcgagatacaagtttcctgaaactgctgctctgttttgggcctcacccggccaacagctcactagctggcaagcagtagtatcaagatggcggccccctaggactggctagtcatgtgacctcgggtttcccaagtttgaagcccggcagtcctttcgggggcaaggttcacctgtcacgaaacgagtgtcaccccttcgactctcgcaagccaatcggcatctgagactgggccactgcggtgaggcgatcggaagattggtcctttccagtcgcctagctagggccaatcacggagcgtcccatacttcgcgggcccgcccgtaggccggggagaagcaggaatatcgtcacagcgtggcggtattattacctaaggactcgataggaggtgggacgcgtgttgattgacaggcagatttccctaccgggatttgagaatttggcgcagtgccccgccttagaggtggggccttatttgattgccaagtaatattccccaatggagtactagctcatggtgacgggcaggcagcttgactaatgagtcctcggcgtggccggcgcagctctccaatcgccgggcggcgggccccagtctgagcggcgatggcggcggcggcggcggcggcagcagcagcgggggctgcgggcggtcggggctccgggccggggcggcggcgccatcttgtgcccggggccggtggggaggccggggagggggccccggggggcgcaggggactacgggaacggcctggagtctgaggaactggagcctgaggagctgctgctggagcccgagccggagcccgagcccgaagaggagccgccccggccccgcgcccccccgggagctccgggccctgggcctggttcgggagcccccggcagccaagaggaggaggaggagccgggactggtcgagggtgacccgggggacggcgccattgaggacccggagctggaagctatcaaagctcgagtcagggagatggaggaagaagctgagaagctaaaggagctacagaacgaggtagagaagcagatgaatatgagtccacctccaggcaatgctggcccggtgatcatgtccattgaggagaagatggaggctgatgcccgttccatctatgttggcaatgtggactatggtgcaacagcagaagagctggaagctcactttcatggctgtggttcagtcaaccgtgttaccatactgtgtgacaaatttagtggccatcccaaagggtttgcgtatatagagttctcagacaaagagtcagtgaggacttccttggccttagatgagtccctatttagaggaaggcaaatcaaggtgatcccaaaacgaaccaacagaccaggcatcagcacaacagaccggggttttccacgagcccgctaccgcgcccggaccaccaactacaacagctcccgctctcgattctacagtggttttaacagcaggccccggggtcgcgtctacaggggccgggctagagcgacatcatggtattccccttactaaaaaaagtgtgtattaggaggagagagaggaaaaaaagaggaaagaaggaaaaaaaaagtcgacgcggccgnnaatttagtagtagta

SEQ ID NO: 373702 - DNA, 3433 bp, Homo sapiens
  misc_feature (9)..(10): n is a, c, g, or t
  misc_feature (12)..(12): n is a, c, g, or t
  misc_feature (61)..(61): n is a, c, g, or t
  misc_feature (150)..(150): n is a, c, g, or t
  misc_feature (181)..(181): n is a, c, g, or t
aatgaaggnngncacccaaatccccaatcaatgcctgttcaatcaacaaacatctaacagnacattatgtggtagcatattgccaggccgtgagatgcgaatataaataggaaccgcccctcatctgcaggcgctcacaacctagttagnaaacagtaaaacaattaagcgcgccgtgganataggcccacttgtcctgggaaatgaggggaagctggggtttgcagtggtttgattgaagggggactacatgttagaggcacagactgggtgcaggtacacccaaaggaacgagaagagtggaaggaaacaacatccacaaagtaaccacatgctggcgtatcgaaggccgtgatttacggttttgagactttacctcgccagcaaaggggggccagtctgttagcggtgcagattggaggggtgacattggaagctgtccaggaaaaagaaaatggaactggggagcagaaggcctacgcaagagggcgggacagacaggacttgtgactagtagctctggactgaggaatcctccctgctttctggtgcgggagagctagtggatgatggtgccaataacctggatggggaaagtaagctccctcctggaatgcttcattcacaacctccattttcagcaacatcccatctactggtgcttcctggtcgagatacaagtttcctgaaactgctgctctgttttgggcctcacccggccaacagctcactagctggcaagcagtagtatcaagatggcggccccctaggactggctagtcatgtgacctcgggtttcccaagtttgaagcccggcagtcctttcgggggcaaggttcacctgtcacgaaacgagtgtcaccccttcgactctcgcaagccaatcggcatctgagactgggccactgcggtgaggcgatcggaagattggtcctttccagtcgcctagctagggccaatcacggagcgtcccatacttcgcgggcccgcccgtaggccggggagaagcaggaatatcgtcacagcgtggcggtattattacctaaggactcgataggaggtgggacgcgtgttgattgacaggcagatttccctaccgggatttgagaatttggcgcagtgccccgccttagaggtggggccttatttgattgccaagtaatattccccaatggagtactagctcatggtgacgggcaggcagcttgactaatgagtcctcggcgtggccggcgcagctctccaatcgccgggcggcgggccccagtctgagcggcgatggcggcggcggcggcggcggcagcagcagcgggggctgcgggcggtcggggctccgggccggggcggcggcgccatcttgtgcccggggccggtggggaggccggggagggggccccggggggcgcaggggactacgggaacggcctggagtctgaggaactggagcctgaggagctgctgctggagcccgagccggagcccgagcccgaagaggagccgccccggccccgcgcccccccgggagctccgggccctgggcctggttcgggagcccccggcagccaagaggaggaggaggagccgggactggtcgagggtgacccgggggacggcgccattgaggacccggtgagggaaggagggcgagcgagcaggccggcggctggccggccgggtcactggaggcccagagctcgggcgagcgggtggcaggcggggggtggggttgggcggggaataacgtggctggggccgggtcgggccggggatgggtcagcgatcactacaaggggcccgactggcttgattcgggcgtcacgggtgcctagtgttgttctagagagggtagcttttcttttatcacgaccctcgcatggggcgagggaaatggccgagcatggctgaggccgcgctctggccgagagcagggcacagcccctgcgttggttcctcttaagctgtcctccataccctccccacttatattaggagctggaagctatcaaagctcgagtcagggagatggaggaagaagctgagaagctaaaggagctacagaacgaggtagagaagcagatgaatatgagtccacctccaggcaatgctggcccggtgatcatgtccattgaggagaagatggaggctgatgcccgttccatctatgttggcaatgtggactatggtgcaacagcagaagagctggaagctcactttcatggctgtggttcagtcaaccgtgttaccatactgtgtgacaaatttagtggccatcccaaagggtttgcgtatatagagttctcagacaaagagtcagtgaggacttccttggccttagatgagtccctatttagaggaaggcaaatcaaggtgatcccaaaacgaaccaacagaccaggcatcagcacaacagaccggggttttccacgagcccgctaccgcgcccggaccaccaactacaacagctcccgctctcgattctacagtggttttaacagcaggccccggggtcgcgtctacaggggccgggctagagcgacatcatggtattccccttactaaaaaaagtgtgtattaggaggagagagaggaaaaaaagaggaaagaaggaaaaaaaaaaaagaattaaaaaaaaaaaaaagaaaaacagaagatgaccttgatggaaaaaaaatattttttaaaaaaaagatatactgtggaaggggggagaatcccataactaactgctgaggagggacctgctttggggagtaggggaaggcccagggagtggggcagggggctgcttattcactctggggattcgccatggacacgtctcaactgcgcaagctgctgcccatgtttccctgccccacttcacccccttgggggctgctcaagggtaggtgggcgtgggtggtaggaggttttttttttacccagggctctggaaggacaccaaactgttctgcttgttaccttccctccgtcttctcctcgcctttcacagtcccctcctgcctgctcctgtccagccaggtctaccacccaccccacccctcttctccggctccctgcccctccagattgcctggtgatctattttgtttccttttgtgtttctttttctgttttgagtgtctttctttgcaggtttctgtagccggaagatctccgttccgctcccagcggctccagtgtaaattccccttccccctggggaaatgcactaccttgttttggggggtttaggggtgtttttgtttttcagttgttttgtttttttgtttttttttttttcctttgccttttttcccttttatttggagggaatgggaggaagtgggaacagggaggtgggaggtggattttgtttatttttttagctcatttccaggggtgggaatttttttttaatatgtgtcatgaataaagttgtttttgaaaataa

SEQ ID NO: 373703 - DNA, 1541 bp, Homo sapiens
aatgtagagttggtacttgtgacttataaaaatgctttaaagaaggatagggagagcttagaagataatttctagtcaagggaaatcaagaagtcttgcttagaaaaagagacattagaatgtcagtaagttggaggaagaagctgagaagctaaaggagctacagaacgaggtagagaagcagatgaatatgagtccacctccaggcaatgctggcccggtgatcatgtccattgaggagaagatggaggctgatgcccgttccatctatgttggcaatgtggactatggtgcaacagcagaagagctggaagctcactttcatggctgtggttcagtcaaccgtgttaccatactgtgtgacaaatttagtggccatcccaaagggtttgcgtatatagagttctcagacaaagagtcagtgaggacttccttggccttagatgagtccctatttagaggaaggcaaatcaaggtgatcccaaaacgaaccaacagaccaggcatcagcacaacagaccggggttttccacgagcccgctaccgcgcccggaccaccaactacaacagctcccgctctcgattctacagtggttttaacagcaggccccggggtcgcgtctacaggggccgggctagagcgacatcatggtattccccttactaaaaaaagtgtgtattaggaggagagagaggaaaaaaagaggaaagaaggaaaaaaaaaaaagaattaaaaaaaaaaaaaagaaaaacagaagatgaccttgatggaaaaaaaatattttttaaaaaaaagatatactgtggaaggggggagaatcccataactaactgctgaggagggacctgctttggggagtaggggaaggcccagggagtggggcagggggctgcttattcactctggggattcgccatggacacgtctcaactgcgcaagctgctgcccatgtttccctgccccacttcacccccttgggggctgctcaagggtaggtgggcgtgggtggtaggaggttttttttttacccagggctctggaaggacaccaaactgttctgcttgttaccttccctccgtcttctcctcgcctttcacagtcccctcctgcctgctcctgtccagccaggtctaccacccaccccacccctcttctccggctccctgcccctccagattgcctggtgatctattttgtttccttttgtgtttctttttctgttttgagtgtctttctttgcaggtttctgtagccggaagatctccgttccgctcccagcggctccagtgtaaattccccttccccctggggaaatgcactaccttgttttggggggtttaggggtgtttttgtttttcagttgttttgtttttttgtttttttttttttcctttgccttttttcccttttatttggagggaatgggaggaagtgggaacagggaggtgggaggtggattttgtttatttttttagctcatttccaggggtgggaatttttttttaatatgtgtcatgaataaagttgtttttgaaaataa

SEQ ID NO: 373704 - DNA, 2815 bp, Homo sapiens
ttttggtggtggtagccttgtgcctccctttgtgcctgttataattgtgttgctctttgttcttagtctacgtctatctttctttgtagaggttgcgtgctcgcatttgaccttcaaatctaatagtttttcctccaattggagacgctttaggattctaagagaaagcaagctgcaaggggtttcccctttaatctagaaatgtggagtctcagcccacttaattttgctcactcttaaaagcatttcaaccaaagccattcattagggatttgatttggaggcaggagggattcctatactgttttaagtgtgtattaattctttcaatttattgaatatttagtgagtacctgctatgcactaggcactattctcggttgtgggtacagcagggaacagcacagaccaaaatctttgccttcactgagcttatgggatagtgctggtggtggaagtgcaacatattggtcaagtagaaaacaagtgtgtggtttttgtaaaaaattattttttcctgatagctggcccggtgatcatgtccattgaggagaagatggaggctgatgcccgttccatctatgttggcaatgtggactatggtgcaacagcagaagagctggaagctcactttcatggctgtggttcagtcaaccgtgttaccatactgtgtgacaaatttagtggccatcccaaagggtttgcgtatatagagttctcagacaaagagtcagtgaggacttccttggccttagatgagtccctatttagaggaaggcaaatcaaggtgatcccaaaacgaaccaacagaccaggcatcagcacaacagaccggggttttccacgagcccgctaccgcgcccggaccaccaactacaacagctcccgctctcgattctacagtggttttaacagcaggccccggggtcgcgtctacagcaggtcaggatagatgggctgctcctctttcccccgcctcccgtgagccccgtatgcttcctcctctctggtctgaggaacctccctccccccacccctccccgtggtcttcaggaactttgtctcctgcctgtgcaggttgaggaaggtagttgcaggccaggccagaaggccagcctcatcatcttttctgcagtagaaattggtgataagggctgcatccctcccttggttcaaagaggcttccacccccagccttttttttcttgggagttggtggcatttgaaggtgtttgcggacaaaactgggaggaacagggcctccaggcagtgaaagcactgcttggacatttgttacttttttcggagttagggagggattgaagactgaacctcccttggaagaataccagaggctagctagttgatcctccccaacagccttgtgggaggattttgagatacttattctttatttgagccagtcttgcaaggttaacttctcactgggcctagtgtggtgcccaggtttttgccttgcttcacttctgtctctacatttaaatagacgggttaggcatataaaccttggcttttcataagctctacctgcctatccccaggagttagggaggatctatttgtgatggcctagggtttaagagctgtggaggactgaaaactggataaaaagggggtccttttccttgcccctgtctctcactcagatgcgcttctttttcgccactgtttggcaaagttttctgttaagcccccctccccctgccccagttctccaggtgcgttactatttctgggatcatggggtcagttttaggacacttgaacacttcttttccccccttcccttcacagtaactggggcaggggcctacggggaggggcttgtactgaactatctagtgatcacgttaacacctaactctccttctttcttccaggggccgggctagagcgacatcatggtattccccttactaaaaaaagtgtgtattaggaggagagagaggaaaaaaagaggaaagaaggaaaaaaaaaaaagaattaaaaaaaaaaaaaagaaaaacagaagatgaccttgatggaaaaaaaatattttttaaaaaaaagatatactgtggaaggggggagaatcccataactaactgctgaggagggacctgctttggggagtaggggaaggcccagggagtggggcagggggctgcttattcactctggggattcgccatggacacgtctcaactgcgcaagctgctgcccatgtttccctgccccacttcacccccttgggggctgctcaagggtaggtgggcgtgggtggtaggaggttttttttttacccagggctctggaaggacaccaaactgttctgcttgttaccttccctccgtcttctcctcgcctttcacagtcccctcctgcctgctcctgtccagccaggtctaccacccaccccacccctcttctccggctccctgcccctccagattgcctggtgatctattttgtttccttttgtgtttctttttctgttttgagtgtctttctttgcaggtttctgtagccggaagatctccgttccgctcccagcggctccagtgtaaattccccttccccctggggaaatgcactaccttgttttggggggtttaggggtgtttttgtttttcagttgttttgtttttttgtttttttttttttcctttgccttttttcccttttatttggagggaatgggaggaagtgggaacagggaggtgggaggtggattttgtttatttttttagctcatttccaggggtgggaatttttttttaatatgtgtcatgaataaagttgtttttgaaaataa

SEQ ID NO: 373705 - DNA, 2295 bp, Homo sapiens
agtagtcgatctaaggatccccttccaaagcggagatgcgaggctgatgcccgttccatctatgttggcaatgtggactatggtgcaacagcagaagagctggaagctcactttcatggctgtggttcagtcaaccgtgttaccatactgtgtgacaaatttagtggccatcccaaagggtttgcgtatatagagttctcagacaaagagtcagtgaggacttccttggccttagatgagtccctatttagaggaaggcaaatcaaggtgatcccaaaacgaaccaacagaccaggcatcagcacaacagaccggggttttccacgagcccgctaccgcgcccggaccaccaactacaacagctcccgctctcgattctacagtggttttaacagcaggccccggggtcgcgtctacagcaggtcaggatagatgggctgctcctctttcccccgcctcccgtgagccccgtatgcttcctcctctctggtctgaggaacctccctccccccacccctccccgtggtcttcaggaactttgtctcctgcctgtgcaggttgaggaaggtagttgcaggccaggccagaaggccagcctcatcatcttttctgcagtagaaattggtgataagggctgcatccctcccttggttcaaagaggcttccacccccagccttttttttcttgggagttggtggcatttgaaggtgtttgcggacaaaactgggaggaacagggcctccaggcagtgaaagcactgcttggacatttgttacttttttcggagttagggagggattgaagactgaacctcccttggaagaataccagaggctagctagttgatcctccccaacagccttgtgggaggattttgagatacttattctttatttgagccagtcttgcaaggttaacttctcactgggcctagtgtggtgcccaggtttttgccttgcttcacttctgtctctacatttaaatagacgggttaggcatataaaccttggcttttcataagctctacctgcctatccccaggagttagggaggatctatttgtgatggcctagggtttaagagctgtggaggactgaaaactggataaaaagggggtccttttccttgcccctgtctctcactcagatgcgcttctttttcgccactgtttggcaaagttttctgttaagcccccctccccctgccccagttctccaggtgcgttactatttctgggatcatggggtcagttttaggacacttgaacacttcttttccccccttcccttcacagtaactggggcaggggcctacggggaggggcttgtactgaactatctagtgatcacgttaacacctaactctccttctttcttccaggggccgggctagagcgacatcatggtattccccttactaaaaaaagtgtgtattaggaggagagagaggaaaaaaagaggaaagaaggaaaaaaaaaaaagaattaaaaaaaaaaaaaagaaaaacagaagatgaccttgatggaaaaaaaatattttttaaaaaaaagatatactgtggaaggggggagaatcccataactaactgctgaggagggacctgctttggggagtaggggaaggcccagggagtggggcagggggctgcttattcactctggggattcgccatggacacgtctcaactgcgcaagctgctgcccatgtttccctgccccacttcacccccttgggggctgctcaagggtaggtgggcgtgggtggtaggaggttttttttttacccagggctctggaaggacaccaaactgttctgcttgttaccttccctccgtcttctcctcgcctttcacagtcccctcctgcctgctcctgtccagccaggtctaccacccaccccacccctcttctccggctccctgcccctccagattgcctggtgatctattttgtttccttttgtgtttctttttctgttttgagtgtctttctttgcaggtttctgtagccggaagatctccgttccgctcccagcggctccagtgtaaattccccttccccctggggaaatgcactaccttgttttggggggtttaggggtgtttttgtttttcagttgttttgtttttttgtttttttttttttcctttgccttttttcccttttatttggagggaatgggaggaagtgggaacagggaggtgggaggtggattttgtttatttttttagctcatttccaggggtgggaatttttttttaatatgtgtcatgaataaagttgtttttgaaaataa

SEQ ID NO: 373706 - DNA, 2493 bp, Homo sapiens
attttgagatcgtatgcctcatttcggagccttataagtcagtttttgacagtcacttagtcaacaagtttgaatgaacatgccttctgaatccttcccagcagtccccacaacttcatgtacctatcagcactctccccagcagtaccattgagcacgtcaacccacacaagcaaccaaagcagcctgtccaacagtcattggcagtggcctcaacaccacaggcagtaattcggttgcacaggtctcactgtctcacccccagatgcacacacagccatctccacatccgtccccatcgaccgcatggtttaccgcagcatccgcagcgttcccccaaccgcatcacccgttcaatttagtggccatcccaaagggtttgcgtatatagagttctcagacaaagagtcagtgaggacttccttggccttagatgagtccctatttagaggaaggcaaatcaaggtgatcccaaaacgaaccaacagaccaggcatcagcacaacagaccggggttttccacgagcccgctaccgcgcccggaccaccaactacaacagctcccgctctcgattctacagtggttttaacagcaggccccggggtcgcgtctacagcaggtcaggatagatgggctgctcctctttcccccgcctcccgtgagccccgtatgcttcctcctctctggtctgaggaacctccctccccccacccctccccgtggtcttcaggaactttgtctcctgcctgtgcaggttgaggaaggtagttgcaggccaggccagaaggccagcctcatcatcttttctgcagtagaaattggtgataagggctgcatccctcccttggttcaaagaggcttccacccccagccttttttttcttgggagttggtggcatttgaaggtgtttgcggacaaaactgggaggaacagggcctccaggcagtgaaagcactgcttggacatttgttacttttttcggagttagggagggattgaagactgaacctcccttggaagaataccagaggctagctagttgatcctccccaacagccttgtgggaggattttgagatacttattctttatttgagccagtcttgcaaggttaacttctcactgggcctagtgtggtgcccaggtttttgccttgcttcacttctgtctctacatttaaatagacgggttaggcatataaaccttggcttttcataagctctacctgcctatccccaggagttagggaggatctatttgtgatggcctagggtttaagagctgtggaggactgaaaactggataaaaagggggtccttttccttgcccctgtctctcactcagatgcgcttctttttcgccactgtttggcaaagttttctgttaagcccccctccccctgccccagttctccaggtgcgttactatttctgggatcatggggtcagttttaggacacttgaacacttcttttccccccttcccttcacagtaactggggcaggggcctacggggaggggcttgtactgaactatctagtgatcacgttaacacctaactctccttctttcttccaggggccgggctagagcgacatcatggtattccccttactaaaaaaagtgtgtattaggaggagagagaggaaaaaaagaggaaagaaggaaaaaaaaaaaagaattaaaaaaaaaaaaaagaaaaacagaagatgaccttgatggaaaaaaaatattttttaaaaaaaagatatactgtggaaggggggagaatcccataactaactgctgaggagggacctgctttggggagtaggggaaggcccagggagtggggcagggggctgcttattcactctggggattcgccatggacacgtctcaactgcgcaagctgctgcccatgtttccctgccccacttcacccccttgggggctgctcaagggtaggtgggcgtgggtggtaggaggttttttttttacccagggctctggaaggacaccaaactgttctgcttgttaccttccctccgtcttctcctcgcctttcacagtcccctcctgcctgctcctgtccagccaggtctaccacccaccccacccctcttctccggctccctgcccctccagattgcctggtgatctattttgtttccttttgtgtttctttttctgttttgagtgtctttctttgcaggtttctgtagccggaagatctccgttccgctcccagcggctccagtgtaaattccccttccccctggggaaatgcactaccttgttttggggggtttaggggtgtttttgtttttcagttgttttgtttttttgtttttttttttttcctttgccttttttcccttttatttggagggaatgggaggaagtgggaacagggaggtgggaggtggattttgtttatttttttagctcatttccaggggtgggaatttttttttaatatgtgtcatgaataaagttgtttttgaaaataa

SEQ ID NO: 373707 - DNA, 3191 bp, Homo sapiens
  misc_feature (9)..(10): n is a, c, g, or t
  misc_feature (12)..(12): n is a, c, g, or t
  misc_feature (61)..(61): n is a, c, g, or t
  misc_feature (150)..(150): n is a, c, g, or t
  misc_feature (181)..(181): n is a, c, g, or t
aatgaaggnngncacccaaatccccaatcaatgcctgttcaatcaacaaacatctaacagnacattatgtggtagcatattgccaggccgtgagatgcgaatataaataggaaccgcccctcatctgcaggcgctcacaacctagttagnaaacagtaaaacaattaagcgcgccgtgganataggcccacttgtcctgggaaatgaggggaagctggggtttgcagtggtttgattgaagggggactacatgttagaggcacagactgggtgcaggtacacccaaaggaacgagaagagtggaaggaaacaacatccacaaagtaaccacatgctggcgtatcgaaggccgtgatttacggttttgagactttacctcgccagcaaaggggggccagtctgttagcggtgcagattggaggggtgacattggaagctgtccaggaaaaagaaaatggaactggggagcagaaggcctacgcaagagggcgggacagacaggacttgtgactagtagctctggactgaggaatcctccctgctttctggtgcgggagagctagtggatgatggtgccaataacctggatggggaaagtaagctccctcctggaatgcttcattcacaacctccattttcagcaacatcccatctactggtgcttcctggtcgagatacaagtttcctgaaactgctgctctgttttgggcctcacccggccaacagctcactagctggcaagcagtagtatcaagatggcggccccctaggactggctagtcatgtgacctcgggtttcccaagtttgaagcccggcagtcctttcgggggcaaggttcacctgtcacgaaacgagtgtcaccccttcgactctcgcaagccaatcggcatctgagactgggccactgcggtgaggcgatcggaagattggtcctttccagtcgcctagctagggccaatcacggagcgtcccatacttcgcgggcccgcccgtaggccggggagaagcaggaatatcgtcacagcgtggcggtattattacctaaggactcgataggaggtgggacgcgtgttgattgacaggcagatttccctaccgggatttgagaatttggcgcagtgccccgccttagaggtggggccttatttgattgccaagtaatattccccaatggagtactagctcatggtgacgggcaggcagcttgactaatgagtcctcggcgtggccggcgcagctctccaatcgccgggcggcgggccccagtctgagcggcgatggcggcggcggcggcggcggcagcagcagcgggggctgcgggcggtcggggctccgggccggggcggcggcgccatcttgtgcccggggccggtggggaggccggggagggggccccggggggcgcaggggactacgggaacggcctggagtctgaggaactggagcctgaggagctgctgctggagcccgagccggagcccgagcccgaagaggagccgccccggccccgcgcccccccgggagctccgggccctgggcctggttcgggagcccccggcagccaagaggaggaggaggagccgggactggtcgagggtgacccgggggacggcgccattgaggacccggagctggaagctatcaaagctcgagtcagggagatggaggaagaagctgagaagctaaaggagctacagaacgaggtagagaagcagatgaatatgagtccacctccaggcaatgctggcccggtgatcatgtccattgaggagaagatggaggctgatgcccgttccatctatgttggcaatgtggactatggtgcaacagcagaagagctggaagctcactttcatggctgtggttcagtcaaccgtgttaccatactgtgtgacaaatttagtggccatcccaaagggtttgcgtatatagagttctcagacaaagagtcagtgaggacttccttggccttagatgagtccctatttagaggaaggcaaatcaaggtgatcccaaaacgaaccaacagaccaggcatcagcacaacagaccggggttttccacgagcccgctaccgcgcccggaccaccaactacaacagctcccgctctcgattctacagtggttttaacagcaggccccggggtcgcgtctacagcaggtcaggatagatgggctgctcctctttcccccgcctcccgtgagccccgtatgcttcctcctctctggtctgaggaacctccctccccccacccctccccgtggtcttcaggaactttgtctcctgcctgtgcaggttgaggaaggtagttgcaggccaggccagaaggccagcctcatcatcttttctgcagtagaaattggtgataagggctgcatccctcccttggttcaaagaggcttccacccccagccttttttttcttgggagttggtggcatttgaaggtgtttgcggacaaaactgggaggaacagggcctccaggcagtgaaagcactgcttggacatttgttacttttttcggagttagggagggattgaagactgaacctcccttggaagaataccagaggctagctagttgatcctccccaacagccttgtgggaggattttgagatacttattctttatttgagccagtcttgcaaggttaacttctcactgggcctagtgtggtgcccaggtttttgccttgcttcacttctgtctctacatttaaatagacgggttaggcatataaaccttggcttttcataagctctacctgcctatccccaggagttagggaggatctatttgtgatggcctagggtttaagagctgtggaggactgaaaactggataaaaagggggtccttttccttgcccctgtctctcactcagatgcgcttctttttcgccactgtttggcaaagttttctgttaagcccccctccccctgccccagttctccaggtgcgttactatttctgggatcatggggtcagttttaggacacttgaacacttcttttccccccttcccttcacagtaactggggcaggggcctacggggaggggcttgtactgaactatctagtgatcacgttaacacctaactctccttctttcttccaggggccgggctagagcgacatcatggtattccccttactaaaaaaagtgtgtattaggaggagagagagga

SEQ ID NO: 373708 - DNA, 2958 bp, Homo sapiens
  misc_feature (9)..(10): n is a, c, g, or t
  misc_feature (12)..(12): n is a, c, g, or t
  misc_feature (61)..(61): n is a, c, g, or t
  misc_feature (150)..(150): n is a, c, g, or t
  misc_feature (181)..(181): n is a, c, g, or t
aatgaaggnngncacccaaatccccaatcaatgcctgttcaatcaacaaacatctaacagnacattatgtggtagcatattgccaggccgtgagatgcgaatataaataggaaccgcccctcatctgcaggcgctcacaacctagttagnaaacagtaaaacaattaagcgcgccgtgganataggcccacttgtcctgggaaatgaggggaagctggggtttgcagtggtttgattgaagggggactacatgttagaggcacagactgggtgcaggtacacccaaaggaacgagaagagtggaaggaaacaacatccacaaagtaaccacatgctggcgtatcgaaggccgtgatttacggttttgagactttacctcgccagcaaaggggggccagtctgttagcggtgcagattggaggggtgacattggaagctgtccaggaaaaagaaaatggaactggggagcagaaggcctacgcaagagggcgggacagacaggacttgtgactagtagctctggactgaggaatcctccctgctttctggtgcgggagagctagtggatgatggtgccaataacctggatggggaaagtaagctccctcctggaatgcttcattcacaacctccattttcagcaacatcccatctactggtgcttcctggtcgagatacaagtttcctgaaactgctgctctgttttgggcctcacccggccaacagctcactagctggcaagcagtagtatcaagatggcggccccctaggactggctagtcatgtgacctcgggtttcccaagtttgaagcccggcagtcctttcgggggcaaggttcacctgtcacgaaacgagtgtcaccccttcgactctcgcaagccaatcggcatctgagactgggccactgcggtgaggcgatcggaagattggtcctttccagtcgcctagctagggccaatcacggagcgtcccatacttcgcgggcccgcccgtaggccggggagaagcaggaatatcgtcacagcgtggcggtattattacctaaggactcgataggaggtgggacgcgtgttgattgacaggcagatttccctaccgggatttgagaatttggcgcagtgccccgccttagaggtggggccttatttgattgccaagtaatattccccaatggagtactagctcatggtgacgggcaggcagcttgactaatgagtcctcggcgtggccggcgcagctctccaatcgccgggcggcgggccccagtctgagcggcgatggcggcggcggcggcggcggcagcagcagcgggggctgcgggcggtcggggctccgggccggggcggcggcgccatcttgtgcccggggccggtggggaggccggggagggggccccggggggcgcaggggactacgggaacggcctggagtctgaggaactggagcctgaggagctgctgctggagcccgagccggagcccgagcccgaagaggagccgccccggccccgcgcccccccgggagctccgggccctgggcctggttcgggagcccccggcagccaagaggaggaggaggagccgggactggtcgagggtgacccgggggacggcgccattgaggacccggagctggaagctatcaaagctcgagtcagggagatggaggaagaagctgagaagctaaaggagctacagaacgaggtagagaagcagatgaatatgagtccacctccaggcaatgctggcccggtgatcatgtccattgaggagaagatggaggctgatgcccgttccatctatgttggcaatgtggactatggtgcaacagcagaagagctggaagctcactttcatggctgtggttcagtcaaccgtgttaccatactgtgtgacaaatttagtggccatcccaaagggtttgcgtatatagagttctcagacaaagagtcagtgaggacttccttggccttagatgagtccctatttagaggaaggcaaatcaaggtgatcccaaaacgaaccaacagaccaggcatcagcagggccgggctagagcgacatcatggtattccccttactaaaaaaagtgtgtattaggaggagagagaggaaaaaaagaggaaagaaggaaaaaaaaaaaagaattaaaaaaaaaaaaaagaaaaacagaagatgaccttgatggaaaaaaaatattttttaaaaaaaagatatactgtggaaggggggagaatcccataactaactgctgaggagggacctgctttggggagtaggggaaggcccagggagtggggcagggggctgcttattcactctggggattcgccatggacacgtctcaactgcgcaagctgctgcccatgtttccctgccccacttcacccccttgggggctgctcaagggtaggtgggcgtgggtggtaggaggttttttttttacccagggctctggaaggacaccaaactgttctgcttgttaccttccctccgtcttctcctcgcctttcacagtcccctcctgcctgctcctgtccagccaggtctaccacccaccccacccctcttctccggctccctgcccctccagattgcctggtgatctattttgtttccttttgtgtttctttttctgttttgagtgtctttctttgcaggtttctgtagccggaagatctccgttccgctcccagcggctccagtgtaaattccccttccccctggggaaatgcactaccttgttttggggggtttaggggtgtttttgtttttcagttgttttgtttttttgtttttttttttttcctttgccttttttcccttttatttggagggaatgggaggaagtgggaacagggaggtgggaggtggattttgtttatttttttagctcatttccaggggtgggaatttttttttaatatgtgtcatgaataaagttgtttttgaaaataa

SEQ ID NO: 373709 - DNA, 2135 bp, Homo sapiens
  misc_feature (9)..(10): n is a, c, g, or t
  misc_feature (12)..(12): n is a, c, g, or t
  misc_feature (61)..(61): n is a, c, g, or t
  misc_feature (150)..(150): n is a, c, g, or t
  misc_feature (181)..(181): n is a, c, g, or t
aatgaaggnngncacccaaatccccaatcaatgcctgttcaatcaacaaacatctaacagnacattatgtggtagcatattgccaggccgtgagatgcgaatataaataggaaccgcccctcatctgcaggcgctcacaacctagttagnaaacagtaaaacaattaagcgcgccgtgganataggcccacttgtcctgggaaatgaggggaagctggggtttgcagtggtttgattgaagggggactacatgttagaggcacagactgggtgcaggtacacccaaaggaacgagaagagtggaaggaaacaacatccacaaagtaaccacatgctggcgtatcgaaggccgtgatttacggttttgagactttacctcgccagcaaaggggggccagtctgttagcggtgcagattggaggggtgacattggaagctgtccaggaaaaagaaaatggaactggggagcagaaggcctacgcaagagggcgggacagacaggacttgtgactagtagctctggactgaggaatcctccctgctttctggtgcgggagagctagtggatgatggtgccaataacctggatggggaaagtaagctccctcctggaatgcttcattcacaacctccattttcagcaacatcccatctactggtgcttcctggtcgagatacaagtttcctgaaactgctgctctgttttgggcctcacccggccaacagctcactagctggcaagcagtagtatcaagatggcggccccctaggactggctagtcatgtgacctcgggtttcccaagtttgaagcccggcagtcctttcgggggcaaggttcacctgtcacgaaacgagtgtcaccccttcgactctcgcaagccaatcggcatctgagactgggccactgcggtgaggcgatcggaagattggtcctttccagtcgcctagctagggccaatcacggagcgtcccatacttcgcgggcccgcccgtaggccggggagaagcaggaatatcgtcacagcgtggcggtattattacctaaggactcgataggaggtgggacgcgtgttgattgacaggcagatttccctaccgggatttgagaatttggcgcagtgccccgccttagaggtggggccttatttgattgccaagtaatattccccaatggagtactagctcatggtgacgggcaggcagcttgactaatgagtcctcggcgtggccggcgcagctctccaatcgccgggcggcgggccccagtctgagcggcgatggcggcggcggcggcggcggcagcagcagcgggggctgcgggcggtcggggctccgggccggggcggcggcgccatcttgtgcccggggccggtggggaggccggggagggggccccggggggcgcaggggactacgggaacggcctggagtctgaggaactggagcctgaggagctgctgctggagcccgagccggagcccgagcccgaagaggagccgccccggccccgcgcccccccgggagctccgggccctgggcctggttcgggagcccccggcagccaagaggaggaggaggagccgggactggtcgagggtgacccgggggacggcgccattgaggacccggagctggaagctatcaaagctcgagtcagggagatggaggaagaagctgagaagctaaaggagctacagaacgaggtagagaagcagatgaatatgagtccacctccaggcaatgctggcccggtgatcatgtccattgaggagaagatggaggctgatgcccgttccatctatgttggcaatgtggactatggtgcaacagcagaagagctggaagctcactttcatggctgtggttcagtcaaccgtgttaccatactgtgtgacaaatttagtggccatcccaaagggtttgcgtatatagagttctcagacaaagagtcagtgaggacttccttggccttagatgagtccctatttagaggaaggcaaatcaaggatcccaaaacgaaccaacagaccaggcatcagcctccatcttctcctcaatggacatgatcaccgggccagcattgcctggaggtggactcatattcatctgcttctctacctcgttctgtagctcc

SEQ ID NO: 373710 - DNA, 1396 bp, Homo sapiens
tttttttttaactgaaaaacaaacacccttgagtttttcagttcaccttttgttaaggagcagagcctgcatatatatgtaaatgtctcaatgataaaaaaaaaaatgtaaacatggattggcattaatttgcaagcagaatcttaatagcctgatgggttttttgtttgtttttttcttctagatgaagttaaacgttcgttttcaccttacgatgggaacaactgtagtgcaggcggctctgcctctatttgccactcttggccctcttgctattaagggaaaggctttgaagagcacagcactgacagggctgtaaagatggaaggagctggtatttttaccatgcgtagattcccaagagaacttgtactaaaaagcagaaagttacaaggaagcagaattaggccaacatttccagcaattaaaacaatgatgggaaactccaatccatgaggaggctggtcagtcacctcaaggatactggcctaaagaagtctgaagtggctgatgtccataacttctgagtctgtttccaaaagaaagactcttgttaatgctgttaccagagagtagagatttgaccagcctctccctaaaatgtaagcttctcaacaacagtacaggaagaagtgcaagagtagactagaacctttaaggaatttggggctggaacggagctatgttgcatctgttgttatacaggtagattataagttctacatgcaccagccaaaacttaggacaggatgtccccaaattaagatactacagattaccaaatcagaaataaccagctggatttaggccagctcacatttatttggaaattaccctccctgattaacaggcttctgagttgtacgtggaggactaatgagacttgtacaagacaccacggggcttggggtccaggtcccagttggatatcggaacagacacagataagtgtgtttcctcattaaggtggtgagagtgtgccttttggcattcagaaaagggtttagccaccctaagagttggaaataaagattcccaactggaaatgttgcagaatccctacaagtgtctcaataaaagccattttaaaagaatattgttgctactgtttgcttttcaaataatctggagatcgttggctatggcaacgtgctgccacctaattagagaatgcctgtaaatgtaggctgaacacttctaacatgagaaaacctaagtatcctacagaggtttggtgtgttttgtttttgtgggtgtcgggggaagggggtggggaggcgtgtttttggccctgcaggttttctcgtgggaatgagttcactcagacaagctaggactgtggcttctttccctgttcatcacatagagcattttctcatcctatctttggttcctt

SEQ ID NO: 373711 - DNA, 1088 bp, Homo sapiens
tttttttttaactgaaaaacaaacacccttgagtttttcagttcaccttttgttaaggagcagagcctgcatatatatgtaaatgtctcaatgataaaaaaaaaaatgtaaacatggattggcattaatttgcaagcagaatcttaatagcctgatgggttttttgtttgtttttttcttctagatgaagttaaacgttcgttttcaccttacgatgggaacaactgtagtgcaggcggctctgcctctatttgccactcttggccctcttgctattaagggaaaggctttgaagagcacagcactgacagggctgtaaagatggaaggagctggtatttttaccatgcgtagattcccaagagaacttgtactaaaaagcagaaagttacaaggaagcagaattaggccaacatttccagcaattaaaacaatgatgggaaactccaatccatgaggaggctggtcagtcacctcaaggatactggcctaaagaagtctgaagtggctgatgtccataacttctgagtctgtttccaaaagaaagactcttgttaatgctgttaccagagagtagagatttgaccagcctctccctaaaatgtaagcttctcaacaacagtacaggaagaagtgcaagagtagactagaacctttaaggaatttggggctggaacggagctatgttgcatctgttgttatacaggtagattataagttctacatgcaccagccaaaacttaggacaggatgtccccaaattaagatactacagattaccaaatcagaaataaccagctggatttaggccagctcacatttatttggaaattaccctccctgattaacaggcttctgagttgtacgtggaggactaatgagacttgtacaagacaccacggggcttggggtccaggtcccagttggatatcggaacagacacagataagtgtgtttcctcattaaggtggtgagagtgtgccttttggcattcagaaaagggtttagccaccctaagagttggaaataaagattcccaactggaaatgttgcagaatccctacaagtgtctcaataaaagccatttta

SEQ ID NO: 373712 - DNA, 891 bp, Homo sapiens
aaagccttgagagagcgttttcaaggatcaggagagggcttagaaagaaaaggactctgagtggggctgcatgaaaagggggtaagtgaggactcttggggagggtctgaaaaaaacaagtagtttggcaaggagagcagaaaaataaaattccactgtgtaggcatttggagatttagcaagagcaacctagagtctgcccccagagacactgcacgttgtttctgacacagaggatgcactaattctatttcctgtgccacctgaaaaaatcataatttgagaagagaaactgttaggccatttctagtgaactatttttccaaaccctcacggaaccctgaacagggtgtgaatgagatcacaactactgctgctgctggttcagcctctctgtccactaataaaggcaaacccttcagcatggtcatatcctgccagccgttttcccccaaaagattaaattatgttcatcttggctcatctaacgccacatcttgagttcttaaggtatcacagccaactcagtcataccttactttatgcactgagtacgcattaaactctatttaggaaggaagagggaagcaaaggaagccagggatggttttgtcatgacctctctttgctttctgacctcccggaatccactctttggaagatgtgcagaaaacaatgtgacttccatttaccctgcctcagatctcccctccttcagactggctcccacccctggttaatggggtaacctgggtacgcctatttgttaaaggaatttgtgggaagtgaggggcaaaattgttggagcagagggaatagatttatgggagctttgttacccagtgactatcccagcattaatacttcagagtagccctgacgcttgtggaa

SEQ ID NO: 373713 - DNA, 351 bp, Homo sapiens
atattactgacagcatgtgacagagatatggagcatttagagaaaattaaccacaagatacacagaaagccagacaactaaaaaatgaggtctgttgggattactatcttaatgaatttctggatagctggttcaagacggcgtaatttcactttttcttcatcttcagacatcctaaaaaaatgttgtatgacctccctggtaacagctgtcttctccactcatatagaaaaacctaaaagaaaaatatttctttaagaatgttttcaaatctgtttccactatttttaaaagccaacgattagttttacaatttattctaaatcaataaatagaatatttctaatgctg

SEQ ID NO: 373714 - DNA, 332 bp, Homo sapiens
agtagggtgagggaaatggttaagatgggagggttcccgggcccgcagctctagtactggccgggcatacgtctgttgggattactatcttaatgaatttctggatagctggttcaagacggcgtaatttcactttttcttcatcttcagacatcctaaaaaaatgttgtatgacctccctggtaacagctgtcttctccactcatatagaaaaacctaaaagaaaaatatttctttaagaatgttttcaaatctgtttccactatttttaaaagccaacgattagttttacaatttattctaaatcaataaatagaatatttctaatgctg

SEQ ID NO: 373715 - DNA, 326 bp, Homo sapiens
  misc_feature (60)..(60): n is a, c, g, or t
taaggtgttgttagattataaatattctaaaacaacaaaaaaccctagtgctgaacgggnatacgtctgttgggattactatcttaatgaatttctggatagctggttcaagacggcgtaatttcactttttcttcatcttcagacatcctaaaaaaatgttgtatgacctccctggtaacagctgtcttctccactcatatagaaaaacctaaaagaaaaatatttctttaagaatgttttcaaatctgtttccactatttttaaaagccaacgattagttttacaatttattctaaatcaataaatagaatatttctaatgctg

SEQ ID NO: 373716 - DNA, 324 bp, Homo sapiens
gatatttgcccgaaataaaggtggagaatatacctgctttaagtaaactgaagattttaaagtatagattcatatacttgacttctttaagatttttcaagaagatttagcagttcctctaatacatttaaaatatgatttgactacagaaattttgttaatattttgacatatcttttagccttctatgtgtaatcatacacaaacatgttatttacaaaaatggtattatgtagtatatgctgttttgaaaccttacacatatatctttatatttattgtggttgttattctatatcaataaaatctactttccccttaaaa

SEQ ID NO: 373717 - DNA, 1118 bp, Homo sapiens
tccagttttatggagggtggaagcctcacttccttggctataataaagagttctgatgcatcttcatacaacaagaggaagagtctgcacgcagaagcaccaccttctagggataaataaagggtcaagctaaggaagggcagaacaaacttcagacactcacttctttgcctcaacttcagcctgctctcacaacctcactatgtcttgccccaactactgctcgggaaactccaactcaggatctctcagaacctcccgccatattcctctcacctccatcgacctctgccctaccagcgtgagctgtggagatgtcctctacttacccactagctctcaagaccatacctgggtcacagacaactgccaagagacctgcggtgaaccaaccagctgccagccggtccactgtgagaccggcaatcttgaaacctcttgcggttcttccactgcttactacgtgcccaggccttgccaaggaagcagttttcttcctgcttctttcttctccagttcctgccttccagtatcctgtagaccacagaggtatgtgtccagcggctgtcgtccactgaggccgctgctcaatagttaccagcccataggagactgtgtgcccaatgcctatcgcccccaattctgcttgtccaagagttgccagccccaaaacctcctcacttctggatgccaaccctcgagttgcttggcctatcgtcctcaaagtcttcacgttgtgtccagcagcctcagacctctggggcctctgttcagtggttgccaacctctgacccatgtgttcagcacgtgtcgtccatcttgctctggactgtgaaaccagcagcttctttgttccagtgaataatcactctgagcatccacaacaaaaattcaaactccatggacttttgcttctttgctagtagcaactgatgtttcttagttttactgtgcctgatctaatgcaagctgcttctctcgcatgttttatcttgttttcatctttccttgacatcaaaaaaattagtttacaatgctattcaatgttgctctggtctgggaagaatgtatttgttttgcactataataaatgcgattaagtccaaataagaatctgg

SEQ ID NO: 373718 - DNA, 540 bp, Homo sapiens
gcctgtgcttaccacgttaaccactcattgtgtttctgaagtttattaagaacaggcacaaagtcagaatcaatctgcaaatttacttctcattcctcattattaaaatataaaatgagtttctattaatttttcttagtttctttatagatactgatataattcataataataccattcttatcttaaaaccttgtcacacacaatgaaactttgctgttcactgtcagttataacttacatgaggtgacccatttccattcaagggttttagaagcacatcaaggacattctaaggatgattgacttacacaatgatctctgaacatgcctcctgccttctcctcactcttgagtatttgcttaggggagcagaaaaaatactggtagcattactgtaacattttaattctgctttatttaaaaaagacatagctggcatatagttaagtactgaaaaatgttagctactcagttatgtataatgctagtattttgttttgaataaagttgacattaatgatcatattattaattgta

SEQ ID NO: 373719 - DNA, 259 bp, Homo sapiens
taatttccaaggagcagcattaggggtgtgaatggtacttaaagtgtgtggatttaaagtagacagaagaatcaatatattctcctcagcagtgccagtcccagctcccacactgatctgctgtaaggatgttgcctctatcccaagccccattttagtgcaacaatttggaaactgacgggaatgtggggggccaataggaaccgtgtcttgattagacatgtgctggcctgagagacaacattctcttctgccagga

SEQ ID NO: 373720 - DNA, 437 bp, Homo sapiens
ctcgaaggcccaaaccagcagcctcttgtttgtaacgactgggatgagcatggaatctgactgcagacgttatctctggacctcatctggcagagagatgaagctcagtaggcagaactgaatgaggaaatcacccaaacaagccatagatgtaagaagcggccagttggcaaggaagagtggtctggcaggtgcggtggctcacacctataatctcagcactctgggaggccgaggaggatcacttgaggccaggagttcgagaccagcctggccaacatggcaaaccctgtccctattaaaaaatataaaaattaggcagatgtggtgatgcatgcctgtaatcccagctacctgagaggctgaggcatgagactcacttgaacccaggaggtagaggttgcagtggcccgagatcacaccactgcactccagcc

SEQ ID NO: 373721 - DNA, 328 bp, Homo sapiens
agacggagtctcactctgtcgtctaggctggagtgcagtggcgcgatctcggctcactgcaagctccgcctcccgggttcacaccattttcctgcctcagcctccccagcatctgggactacaggcttccgccaccacgcccagctaattttttgtatttttagtagagactgggtttcattgtgttagccaggatggtctcgatctcctgacctcatgatccgcccacctcggcctcccaaagtgctgggattacaggcgtgagcgaccgtgaccggccactatcttctcgcttaatagcataattagaagataaaatttgttataa

SEQ ID NO: 373722 - DNA, 483 bp, Homo sapiens
catggccatctgctttttctaatgattaagacagaaagataatgatgcaatgaagtaaatgcatgctcatctgctcctcatattagctaggcagaggtgtgatctccactttatggttggaaaaaaactgatgttcggagaagttaaataatttacaagactcgtagttcgttattcttattccaagtccactgctcatgttcccaagctgccctaggccagagcctgcttcacatttagcagactaagggtcctttttcaagtgccattttggtcaaggttaaataaatatggttttctccaatgcggatagggaattgataatgaggatgatttgtaacaaatgattaaacgggctattcacttggggagtctcctccctcttcccctttcatgtggctttcaaaagttaaaaggtgctggttgaaggtgggagcgacatcactttccttgaagagaaagaagctttatctccacacccct

SEQ ID NO: 373723 - DNA, 718 bp, Homo sapiens
ctctgcgccacgctccatggaggcgccaaggagaaggcctgggaagggaagagtgaaccttccctggtggagggcccactcctcaggcagtggggagaccgccttttgcatgcgacaggacttaccagttactattggcaccggaaccaccatctgagatacaggagaagacagaaatggaagcaaaggaagatggaaaaatagaaaacagagacccccaagaggttgaacagcttgccgagaatcatgaccagttgggaggccagttctgacaccagaggtcctgacggccaggccagcactgttttctgtagacatggtatcttctaaaaggcatttatcattttttttcctttcagaattaaatgaagactaaactcctgtacacgtgtttgttggtagaggccatcacagaatatggccaccatactgtgatctgccaacccaattaagatactggccatggcttctaatttgtgttttacactgttcagacataaatatttaaaatttgttgcattgcaatctgtttggttgtaaagatttgacctatgaagcaagaagtgttcatgaatgaggtttaaggatgtcaggggtgactcagaaggaaacgcgctagaacagcaaggatcagggaagcagcgcttttctctttgcaagtcataaaatacaatgcctgaaagagctaataagccttgttatctaatcatgtctaata

SEQ ID NO: 373724 - DNA, 378 bp, Homo sapiens
attttgtcatgaggctgtttttccccctggtaatttacaacctaattctgaaaatagtaatttggtctctaccagttcactctaaggaggaattgccctgtttctccccaccgctcatctcggactctgacgtcctctgcttccagcactgtctctttcccggagtctctactggggcgctccgggtgtgcagaagtattggacaaatggtcagtggagcaatagtgacgaaataaccctgctcctggctttgcggccaaggagaaaagctcagccgggaagggcacgggcagggaagccgggctctcctggcccggccggccccgccctggctcggcctgccttgggcgtccccctcccaggggacaggtgcggccg

SEQ ID NO: 373725 - DNA, 3725 bp, Homo sapiens
  misc_feature (3718)..(3724): n is a, c, g, or t
gacccacagcctggcacccttcggcgagcgctgtttgtttagggctcggtgagtccaatcaggagcccaggctgcagttttccggcagagcagtaagaggcgcctcctctctcctttttattcaccagcagcgcggcgcagaccccggactcgcgctcgcccgctggcgccctcggcttctctccgcgcctgggagcaccctccgccgcggccgttctccatgcgcagcgcccgcccgaggagctagacgtcagcttggagcggcgccggaccgtggatggccttgactgacggcggctggtgcttgccgaagcgcttcggggccgcgggtgcggacgccagcgactccagagcctttccagcgcgggagccctccacgccgccttcccccatctcttcctcgtcctcctcctgctcccggggcggagagcggggccccggcggcgccagcaactgcgggacgcctcagctcgacacggaggcggcggccggacccccggcccgctcgctgctgctcagttcctacgcttcgcatcccttcggggctccccacggaccttcggcgcctggggtcgcgggccccgggggcaacctgtcgagctgggaggacttgctgctgttcactgacctcgaccaagccgcgaccgccagcaagctgctgtggtccagccgcggcgccaagctgagccccttcgcacccgagcagccggaggagatgtaccagaccctcgccgctctctccagccagggtccggccgcctacgacggcgcgcccggcggcttcgtgcactctgcggccgcggcggcagcagccgcggcggcggccagctccccggtctacgtgcccaccacccgcgtgggttccatgctgcccggcctaccgtaccacctgcaggggtcgggcagtgggccagccaaccacgcgggcggcgcgggcgcgcaccccggctggcctcaggcctcggccgacagccctccatacggcagcggaggcggcgcggctggcggcggggccgcggggcctggcggcgctggctcagccgcggcgcacgtctcggcgcgcttcccctactctcccagcccgcccatggccaacggcgccgcgcgggagccgggaggctacgcggcggcgggcagtgggggcgcgggaggcgtgagcggcggcggcagtagcctggcggccatgggcggccgcgagccccagtacagctcgctgtcggccgcgcggccgctgaacgggacgtaccaccaccaccaccaccaccaccaccaccatccgagcccctactcgccctacgtgggggcgccactgacgcctgcctggcccgccggacccttcgagaccccggtgctgcacagcctgcagagccgcgccggagccccgctcccggtgccccggggtcccagtgcagacctgctggaggacctgtccgagagccgcgagtgcgtgaactgcggctccatccagacgccgctgtggcggcgggacggcaccggccactacctgtgcaacgcctgcgggctctacagcaagatgaacggcctcagccggcccctcatcaagccgcagaagcgcgtgccttcatcacggcggcttggattgtcctgtgccaactgtcacaccacaactaccaccttatggcgcagaaacgccgagggtgaacccgtgtgcaatgcttgtggactctacatgaaactccatggggtgcccagaccacttgctatgaaaaaagagggaattcaaaccaggaaacgaaaacctaagaacataaataaatcaaagacttgctctggtaatagcaataattccattcccatgactccaacttccacctcttctaactcagatgattgcagcaaaaatacttcccccacaacacaacctacagcctcaggggcgggtgccccggtgatgactggtgcgggagagagcaccaatcccgagaacagcgagctcaagtattcgggtcaagatgggctctacataggcgtcagtctcgcctcgccggccgaagtcacgtcctccgtgcgaccggattcctggtgcgccctggccctggcctgagcccacgccgccaggaggcagggagggctccgccgcgggcctcactccactcgtgtctgcttttgtgcagcagtccagacagtggcgactgcgctgacagaacgtgattctcgtgcctttattttgaaagagatgtttttcccaagaggcttgctgaaagagtgagagaagatggaagggaagggccagtgcaactgggcgcttgggccactccagccagcccgcctccggggcggaccctgctccacttccagaagccaggactaggacctgggccttgcctgctatggaatattgagagagattttttaaaaaagattttgcattttgtccttttccacatccagatttcatgtgcgttcatggagaagatcacttgaggccatttggtacacatctctggaggctgagtcggttcatgaggtctcttatcaaaaatattactcagtttgcaagactgcattgtaactttaacatacactgtgactgacgtttctcaaagttcatattgtgtggctgatctgaagtcagtcggaatttgtaaacagggtagcaaacaagatatttttcttccatgtatacaataatttttttaaaaagtgcaatttgcgttgcagcaatcagtgttaaatcatttgcataagatttaacagcattttttataatgaatgtaaacattttaacttaatggtacttaaaataatttaaaagaaaaatgttaacttagacattcttatgcttcttttacaactacatcccattttatatttccaattgttaaagaaaaatatttcaagaacaaatcttctctcaggaaaattgcctttctctatttgttaagaatttttatacaagaacaccaatataccccctttattttactgtggaatatgtgctggaaaaattgcaacaacactttactacctaacggatagcatttgtaaatactctaggtatctgtaaacactctgatgaagtctgtatagtgtgactaacccacaggcaggttggtttacattaatttttttttttgaatgggatgtcctatggaaacctatttcaccagagttttaaaaataaaaagggtattgttttgtcttctgtacagtgagttccttcccttttcaaagctttctttttatgctgtatgtgactatagatattcatataaaacaagtgcacgtgaagtttgcaaaatgctttaaggccttcctttcaaagcatagtccttttggagccgttttgtaccttttataccttggcttatttgaagttgacacatggggttagttactactctccatgtgcattggggacagtttttataagtgggaaggactcagtattattatatttgagatgataagcattttgtttgggaacaatgcttaaaaatattccagaaagttcagattttttttctttgtgaatgaaatatattctggcccacgaacagggcgatttcctttcagttttttccttttgcaacgtgccttgaagtctcaaagctcacctgaggttgcagacgttacccccaacagaagataggtagaaatgattccagtggcctctttgtattttcttcattgttgagtagatttcaggaaatcaggaggtgtttcacaatacagaatgatggcctttaactgtgannnnnnna

SEQ ID NO: 373726 - DNA, 1440 bp, Homo sapiens
  misc_feature (1433)..(1439): n is a, c, g, or t
gtgggtgatctagaggatcccaatcagtttacacaaaaaaaagattttgcattttgtccaaaatcatgtgcttcttctgatcaattttggttgttccagaatttcttcataccttttccacatccagatttcatgtgcgttcatggagaagatcacttgaggccatttggtacacatctctggaggctgagtcggttcatgaggtctcttatcaaaaatattactcagtttgcaagactgcattgtaactttaacatacactgtgactgacgtttctcaaagttcatattgtgtggctgatctgaagtcagtcggaatttgtaaacagggtagcaaacaagatatttttcttccatgtatacaataatttttttaaaaagtgcaatttgcgttgcagcaatcagtgttaaatcatttgcataagatttaacagcattttttataatgaatgtaaacattttaacttaatggtacttaaaataatttaaaagaaaaatgttaacttagacattcttatgcttcttttacaactacatcccattttatatttccaattgttaaagaaaaatatttcaagaacaaatcttctctcaggaaaattgcctttctctatttgttaagaatttttatacaagaacaccaatataccccctttattttactgtggaatatgtgctggaaaaattgcaacaacactttactacctaacggatagcatttgtaaatactctaggtatctgtaaacactctgatgaagtctgtatagtgtgactaacccacaggcaggttggtttacattaatttttttttttgaatgggatgtcctatggaaacctatttcaccagagttttaaaaataaaaagggtattgttttgtcttctgtacagtgagttccttcccttttcaaagctttctttttatgctgtatgtgactatagatattcatataaaacaagtgcacgtgaagtttgcaaaatgctttaaggccttcctttcaaagcatagtccttttggagccgttttgtaccttttataccttggcttatttgaagttgacacatggggttagttactactctccatgtgcattggggacagtttttataagtgggaaggactcagtattattatatttgagatgataagcattttgtttgggaacaatgcttaaaaatattccagaaagttcagattttttttctttgtgaatgaaatatattctggcccacgaacagggcgatttcctttcagttttttccttttgcaacgtgccttgaagtctcaaagctcacctgaggttgcagacgttacccccaacagaagataggtagaaatgattccagtggcctctttgtattttcttcattgttgagtagatttcaggaaatcaggaggtgtttcacaatacagaatgatggcctttaactgtgannnnnnna

SEQ ID NO: 373727 - DNA, 495 bp, Homo sapiens
gtgcagaagtattggacaaatggtcagtggagcaatagtgacgaaataaccctgctcctggctttgcggccaaggagaaaagctcagccgggaagggcacgggcagggaagccgggcaccggggctgggggccggggtccccggggtgacgcggggagggacgggtccggcgcgcccactcccgccctcacgcaccgctgtcgccgcagacctgctggaggacctgtccgagagccgcgagtgcgtgaactgcggctccatccagacgccgctgtggcggcgggacggcaccggccactacctgtgcaacgcctgcgggctctacagcaagatgaacggcctcagccggcccctcatcaagccgcagaagcgcgtggtgagtgtgacccgccctgcccctggctcgcggccggccccgggctctcctggcccggccggccccgccctggctcggcctgccttgggcgtccccctcccaggggacaggtgcggccg

SEQ ID NO: 373728 - DNA, 3779 bp, Homo sapiens
  misc_feature (3772)..(3778): n is a, c, g, or t
gacccacagcctggcacccttcggcgagcgctgtttgtttagggctcggtgagtccaatcaggagcccaggctgcagttttccggcagagcagtaagaggcgcctcctctctcctttttattcaccagcagcgcggcgcagaccccggactcgcgctcgcccgctggcgccctcggcttctctccgcgcctgggagcaccctccgccgcggccgttctccatgcgcagcgcccgcccgaggagctagacgtcagcttggagcggcgccggaccgtggatggccttgactgacggcggctggtgcttgccgaagcgcttcggggccgcgggtgcggacgccagcgactccagagcctttccagcgcgggagccctccacgccgccttcccccatctcttcctcgtcctcctcctgctcccggggcggagagcggggccccggcggcgccagcaactgcgggacgcctcagctcgacacggaggcggcggccggacccccggcccgctcgctgctgctcagttcctacgcttcgcatcccttcggggctccccacggaccttcggcgcctggggtcgcgggccccgggggcaacctgtcgagctgggaggacttgctgctgttcactgacctcgaccaagccgcgaccgccagcaagctgctgtggtccagccgcggcgccaagctgagccccttcgcacccgagcagccggaggagatgtaccagaccctcgccgctctctccagccagggtccggccgcctacgacggcgcgcccggcggcttcgtgcactctgcggccgcggcggcagcagccgcggcggcggccagctccccggtctacgtgcccaccacccgcgtgggttccatgctgcccggcctaccgtaccacctgcaggggtcgggcagtgggccagccaaccacgcgggcggcgcgggcgcgcaccccggctggcctcaggcctcggccgacagccctccatacggcagcggaggcggcgcggctggcggcggggccgcggggcctggcggcgctggctcagccgcggcgcacgtctcggcgcgcttcccctactctcccagcccgcccatggccaacggcgccgcgcgggagccgggaggctacgcggcggcgggcagtgggggcgcgggaggcgtgagcggcggcggcagtagcctggcggccatgggcggccgcgagccccagtacagctcgctgtcggccgcgcggccgctgaacgggacgtaccaccaccaccaccaccaccaccaccaccatccgagcccctactcgccctacgtgggggcgccactgacgcctgcctggcccgccggacccttcgagaccccggtgctgcacagcctgcagagccgcgccggagccccgctcccggtgccccggggtcccagtgcagacctgctggaggacctgtccgagagccgcgagtgcgtgaactgcggctccatccagacgccgctgtggcggcgggacggcaccggccactacctgtgcaacgcctgcgggctctacagcaagatgaacggcctcagccggcccctcatcaagccgcagaagcgcgtgccttcatcacggcggcttggattgtcctgtgccaactgtcacaccacaactaccaccttatggcgcagaaacgccgagggtgaacccgtgtgcaatgcttgtggactctacatgaaactccatggggtgcccagaccacttgctatgaaaaaagagggaattcaaaccaggaaacgaaaacctaagaacataaataaatcaaagacttgctctggtaatagcaataattccattcccatgactccaacttccacctcttctaactcagatgattgcagcaaaaatacttcccccacaacacaacctacagcctcaggggcgggtgccccggtgatgactggtgcgggagagagcaccaatcccgagaacagcgagctcaagtattcgggtcaagatgggctctacataggcgtcagtctcgcctcgccggccgaagtcacgtcctccgtgcgaccggattcctggtgcgccctggccctggcctgagcccacgccgccaggaggcagggagggctccgccgcgggcctcactccactcgtgtctgcttttgtgcagcagtccagacagtggcgactgcgctgacagaacgtgattctcgtgcctttattttgaaagagatgtttttcccaagaggcttgctgaaagagtgagagaagatggaagggaagggccagtgcaactgggcgcttgggccactccagccagcccgcctccggggcggaccctgctccacttccagaagccaggactaggacctgggccttgcctgctatggaatattgagagagattttttaaaaaagattttgcattttgtccaaaatcatgtgcttcttctgatcaattttggttgttccagaatttcttcataccttttccacatccagatttcatgtgcgttcatggagaagatcacttgaggccatttggtacacatctctggaggctgagtcggttcatgaggtctcttatcaaaaatattactcagtttgcaagactgcattgtaactttaacatacactgtgactgacgtttctcaaagttcatattgtgtggctgatctgaagtcagtcggaatttgtaaacagggtagcaaacaagatatttttcttccatgtatacaataatttttttaaaaagtgcaatttgcgttgcagcaatcagtgttaaatcatttgcataagatttaacagcattttttataatgaatgtaaacattttaacttaatggtacttaaaataatttaaaagaaaaatgttaacttagacattcttatgcttcttttacaactacatcccattttatatttccaattgttaaagaaaaatatttcaagaacaaatcttctctcaggaaaattgcctttctctatttgttaagaatttttatacaagaacaccaatataccccctttattttactgtggaatatgtgctggaaaaattgcaacaacactttactacctaacggatagcatttgtaaatactctaggtatctgtaaacactctgatgaagtctgtatagtgtgactaacccacaggcaggttggtttacattaatttttttttttgaatgggatgtcctatggaaacctatttcaccagagttttaaaaataaaaagggtattgttttgtcttctgtacagtgagttccttcccttttcaaagctttctttttatgctgtatgtgactatagatattcatataaaacaagtgcacgtgaagtttgcaaaatgctttaaggccttcctttcaaagcatagtccttttggagccgttttgtaccttttataccttggcttatttgaagttgacacatggggttagttactactctccatgtgcattggggacagtttttataagtgggaaggactcagtattattatatttgagatgataagcattttgtttgggaacaatgcttaaaaatattccagaaagttcagattttttttctttgtgaatgaaatatattctggcccacgaacagggcgatttcctttcagttttttccttttgcaacgtgccttgaagtctcaaagctcacctgaggttgcagacgttacccccaacagaagataggtagaaatgattccagtggcctctttgtattttcttcattgttgagtagatttcaggaaatcaggaggtgtttcacaatacagaatgatggcctttaactgtgannnnnnna

SEQ ID NO: 373729 - DNA, 3223 bp, Homo sapiens
gacccacagcctggcacccttcggcgagcgctgtttgtttagggctcggtgagtccaatcaggagcccaggctgcagttttccggcagagcagtaagaggcgcctcctctctcctttttattcaccagcagcgcggcgcagaccccggactcgcgctcgcccgctggcgccctcggcttctctccgcgcctgggagcaccctccgccgcggccgttctccatgcgcagcgcccgcccgaggagctagacgtcagcttggagcggcgccggaccgtggatggccttgactgacggcggctggtgcttgccgaagcgcttcggggccgcgggtgcggacgccagcgactccagagcctttccagcgcgggagccctccacgccgccttcccccatctcttcctcgtcctcctcctgctcccggggcggagagcggggccccggcggcgccagcaactgcgggacgcctcagctcgacacggaggcggcggccggacccccggcccgctcgctgctgctcagttcctacgcttcgcatcccttcggggctccccacggaccttcggcgcctggggtcgcgggccccgggggcaacctgtcgagctgggaggacttgctgctgttcactgacctcgaccaagccgcgaccgccagcaagctgctgtggtccagccgcggcgccaagctgagccccttcgcacccgagcagccggaggagatgtaccagaccctcgccgctctctccagccagggtccggccgcctacgacggcgcgcccggcggcttcgtgcactctgcggccgcggcggcagcagccgcggcggcggccagctccccggtctacgtgcccaccacccgcgtgggttccatgctgcccggcctaccgtaccacctgcaggggtcgggcagtgggccagccaaccacgcgggcggcgcgggcgcgcaccccggctggcctcaggcctcggccgacagccctccatacggcagcggaggcggcgcggctggcggcggggccgcggggcctggcggcgctggctcagccgcggcgcacgtctcggcgcgcttcccctactctcccagcccgcccatggccaacggcgccgcgcgggagccgggaggctacgcggcggcgggcagtgggggcgcgggaggcgtgagcggcggcggcagtagcctggcggccatgggcggccgcgagccccagtacagctcgctgtcggccgcgcggccgctgaacgggacgtaccaccaccaccaccaccaccaccaccaccatccgagcccctactcgccctacgtgggggcgccactgacgcctgcctggcccgccggacccttcgagaccccggtgctgcacagcctgcagagccgcgccggagccccgctcccggtgccccggggtcccagtgcagacctgctggaggacctgtccgagagccgcgagtgcgtgaactgcggctccatccagacgccgctgtggcggcgggacggcaccggccactacctgtgcaacgcctgcgggctctacagcaagatgaacggcctcagccggcccctcatcaagccgcagaagcgcgtgccttcatcacggcggcttggattgtcctgtgccaactgtcacaccacaactaccaccttatggcgcagaaacgccgagggtgaacccgtgtgcaatgcttgtggactctacatgaaactccatggggtgcccagaccacttgctatgaaaaaagagggaattcaaaccaggaaacgaaaacctaagaacataaataaatcaaagacttgctctggtaatagcaataattccattcccatgactccaacttccacctcttctaactcagatgattgcagcaaaaatacttcccccacaacacaacctacagcctcaggggcgggtgccccggtgatgactggtgcgggagagagcaccaatcccgagaacagcgagctcaagtattcgggtcaagatgggctctacataggcgtcagtctcgcctcgccggccgaagtcacgtcctccgtgcgaccggattcctggtgcgccctggccctggcctgagcccacgccgccaggaggcagggagggctccgccgcgggcctcactccactcgtgtctgcttttgtgcagcagtccagacagtggcgactgcgctgacagaacgtgattctcgtgcctttattttgaaagagatgtttttcccaagaggcttgctgaaagagtgagagaagatggaagggaagggccagtgcaactgggcgcttgggccactccagccagcccgcctccggggcggaccctgctccacttccagaagccaggactaggacctgggccttgcctgctatggaatattgagagagattttttaaaaaagattttgcattttgtccaaaatcatgtgcttcttctgatcaattttggttgttccagaatttcttcataccttttccacatccagatttcatgtgcgttcatggagaagatcacttgaggccatttggtacacatctctggaggctgagtcggttcatgaggtctcttatcaaaaatattactcagtttgcaagactgcattgtaactttaacatacactgtgactgacgtttctcaaagttcatattgtgtggctgatctgaagtcagtcggaatttgtaaacagggtagcaaacaagatatttttcttccatgtatacaataatttttttaaaaagtgcaatttgcgttgcagcaatcagtgttaaatcatttgcataagatttaacagcattttttataatgaatgtaaacattttaacttaatggtacttaaaataatttaaaagaaaaatgttaacttagacattcttatgcttcttttacaactacatcccattttatatttccaattgttaaagaaaaatatttcaagaacaaatcttctctcaggaaaattgcctttctctatttgttaagaatttttatacaagaacaccaatataccccctttattttactgtggaatatgtgctggaaaaattgcaacaacactttactacctaacggatagcatttgtaaatactctaggtatctgtaaacactctgatgaagtctgtatagtgtgactaacccacaggcaggttggtttacattaatttttttttttgaatgggatgtcctatggaaacctatttcaccagagttttaaaaataaaaagggtattgttttgtcttctgt

SEQ ID NO: 373730 - DNA, 454 bp, Homo sapiens
gcggccgctgaacgggacgtaccaccaccaccaccaccaccaccaccaccatccgagcccctactcgccctacgtgggggcgccactgacgcctgcctggcccgccggacccttcgagaccccggtgctgcacagcctgcagagccgcgccggagccccgctcccggtgccccggggtcccagtgcaggtaagggtcgcgcctcaggttcggggtgcgggtccaaagcgctggggcgcacgggggacgtggagcagctgctccactcgggccctgttttcaggactttctcgtccgggtgcgcggaggtcggcctggtcccaggaaggatttgcaggcctgtggctgggtaacccagagtccggtagcgctgaggcgagttgtgccaagacttgagtctgttgtgccaagttcctttccacggatgagactaaatgcacatctgtaccttcgtg

SEQ ID NO: 373731 - DNA, 435 bp, Homo sapiens
gtgtgcagaagtattggacaaatggtcagtggagcaatagtgacgaaataaccctgctcctggctttgcggccaaggagaaaagctcagccgggaagggcacgggcagggaagccgggcaccggggctgggggccggggtccccggggtgacgcggggagggacgggtccggcgcgcccactcccgccctcacgcaccgctgtcgccgcagacctgctggaggacctgtccgagagccgcgagtgcgtgaactgcggctccatccagacgccgctgtggcggcgggacggcaccggccactacctgtgcaacgcctgcgggctctacagcaagatgaacggcctcagccggcccctcatcaagccgcagaagcgcgtggtgagtgtgacccgccctgcccctggctcgcggccggccccgggctctcctggcccg

SEQ ID NO: 373732 - DNA, 1899 bp, Homo sapiens
acaggtgtgctggcgtggccctctacctgccccgccgcggcggcctgcggccaggagaagtaggctggcgacatctggcgggccgcgggccgagggaggggaggcggggcggggcggtgtctccctcacgtgaccccaacagcgcccagcgcgtcgcgctgcgccccaacctcggggtcggtcacagtctgcgcctgcgcgggccccggctcgctagccgtcctgcgggacgccggcgctgatgggaaatccagttatcaaaattgactcaagaagagagaacctaacagaacaataacaatggaagaaattgggaacattatcacaaagctatcatcctgccaaactccaggctcagatgtcacaggttaaaaaaagtccttcatgaaaaagaaagatcttaagcagcatgatggattcagaagctcatgaaaagaggccaccaatactaacatcttcaaaacaagatatatcacctcatattacaaatgttggtgagatgaagcattacttgtgtggctgctgtgcagccttcaacaatgtcgcaatcacatttcccattcagaaggtcctctttcgacaacagctgtatggcatcaaaacccgggatgcaatacttcagttgagaagggatggatttcgaaatttgtatcgtggaatccttcccccattgatgcagaagacaactacgcttgcacttatgtttggtctgtatgaggatttatcctgccttctccacaagcatgtcagtgctccagagtttgcaaccagtggcgtggcggcagtgcttgcagggacaacagaagcaattttcactccactggaaagagttcagacattgcttcaagaccacaagcatcatgacaaatttaccaacacttaccaggctttcaaggcactgaaatgtcatggaattggagagtattatcgaggcttggtgcccattcttttccggaatggactcagcaatgtcttgtttttcggccttcgaggtcccattaaggagcatctgcctaccgcaacgactcacagtgctcatctggtcaatgattttatctgtggaggtctattgggtgccatgttgggattcttgttttttccaattaatgttgtaaaaactcgcatacagtctcagattggtggggaatttcagtctttccccaaggttttccaaaaaatctggctggaacgggacagaaaactgataaatcttttcagaggtgcccatctgaattaccatcggtccctcatctcttggggcataatcaatgcaacttatgagttcttgttaaaggttatatgaaaaaaccatcagttaagtgccatttatcaactgaatagaccttctaagaagaatgcagtttggcctcttttttttttttttttaaaggaaatcccaatcttattatggaaagccatcaactgggtgtggggagtaggtcagagggttagtgaaagtccaggggatttctcctccaagtcctaccacacaaaggaaagtctcaagcctctattcaccccttctcaatcctcacaaaatagggggttgttcaatattgtcttcaatgataaaaactttgtggttaaaagtttctccttaggactagtgacaaagttaggcttatacttttttttttttttgaggcagagtcttgctctgttgcccaggctggagtgcagtggcgcgatcttggctcactgcaacctccgcctccagggttcgggcaattctcctgccttagcctcctgtagtcctagctgctcgggaggctgaggcaggagaatctctttcttaattggccaaatataagttggtgtcgtaactccaggccacagtgagttatgggcaaagcttttttccttaagcatcaacaaaataggataaaaggttccaatagg

SEQ ID NO: 373733 - DNA, 1830 bp, Homo sapiens
acaggtgtgctggcgtggccctctacctgccccgccgcggcggcctgcggccaggagaagtaggctggcgacatctggcgggccgcgggccgagggaggggaggcggggcggggcggtgtctccctcacgtgaccccaacagcgcccagcgcgtcgcgctgcgccccaacctcggggtcggtcacagtctgcgcctgcgcgggccccggctcgctagccgtcctgcgggacgccggcgctgatgggaaatccagttatcaaaattgactcaagaagagagaacctaacagaacaataacaatggaagaaattgggaacattatcacaaagctatcatcctgccaaactccaggctcagatgtcacagggtttctattgcctgggctggagtgtagtggcatgatcatggctcactatagccttgacttcctgggctcaagcgatccttccgcctcagcctcctgagtagctgggactacagagacggggtttcgctcttgtgaccaggctggaatgcaatggcgtgatctcggctcaccgcaacctccgacctctgggttcaagtgattctcctgcctccgcctcccaagtagctgggattacaggcatgcgccaccacgcctggctaattttgtatttttagtagagatggggtttctccatgttggtcaggctggtctcaaactcctaacctcaggtgatctgcccacctcggcctcccaaagtgctgggattataggcgtgagccaccgcgccggctgccttaaatctatttatctgacgttcccaactaggaaattttttgtccaaatgagtatatgtgattttaaagtagaaatcgaaggtaaaataggatttatctcagttcctatctcccttcaatctattcttcatattgtcaataatttttttttttttttttgagacgtggtctctgtcgccaggctggagtgcagtggtgaaatcttggctcactgcaccctctgcctcctgtgttcaggcgactctcctgcctcagcctccggagtagctgggattgcaggcatccgccatcacacccggctaaatttcgtattttttcagtagagacagttttgcgccaggctggtctcaaactcctgaccttaagtgatccacctgcctcagcctcccaaagtgctgggattacaggcgtgagccgccgtgcccggccatcagtaattttttaaaatgtcacttcaataaatgcttttcctctgccataaagaccaaacatcttgctgtggcctacaggagacaggatgatccagcccttgcctcccttactctcatctctagctaaaactgcgctgctgtctctgcactccagccactggcacttcctgattacttggggcacgctgtactcatcttgctcccagcctctgcccatgcaggtgccctctgccctcagcactgcctttctctacttcatttatagactgctgtccttcagatctcggttgaagtgtcacttccttggggaagctggcttacactctcaggactcggttaggttcccccgtcaggctcttctatgtcaccatgtttctatttttcacagcacttaacctgttttaattacgttgcaaatagtttttgtttgggtctagagaagcatgtattcactagtacattttatttgtgttctctaattattttttctgcagctaaattagaaatttgtagttttccccctaaaaatgcaatgatgttttctctgattttcttgtcacctttcttccaaaaaatccatgtgttcaaagtgcttgcttgcagtttgccccataataaatggttgtttaatccaaa

SEQ ID NO: 373734 - DNA, 2392 bp, Homo sapiens
cctcttcccctacacaattcaaaggctcttctcttctctcctttcagttgtggcctctaggaccagtgagatccttggaagactcttgcctttccagagtgatgagaatcataaagtcatttaacacctttccccctagtcatcagtatagtcccttcctttcccagagtttcccctggtttttaaaaaaaagaaaattatgatactcaattggcttagtaaaatctcacatttagccagcttagctgaaacatttcagacctatgtttattatacaaggggtttttgtttgtttgtttgtttgtttgtttagggtgagatgaaagaggcaagatttaagaagctgggcaaaaactgagctgatgctggcctttaaagtacctcccaccttgctcaaccccagcaggagaggaataagaagagtttggaagggataatgataccatatgaagcaagagaggacagaaacaggagagtcgagaagcaggatctctagcagtatgcccttgaaggcagagactgcagtcagcgatcggcctaagctctgcacacacggcaatggcaatttgtccaatgagccctgttgaaggtggagtgctgctgcctgtacctcctcatcatcactgttgcttgagcaccgaagaagagtggcccagccttttgggtgcagctgtaaggacgtgatgcagtttccgtggtcactctcaccaagaacttcaggggttacgacttcaagactatttcgtggtgaaactcctgagatataagaaaatgaggatgtgggatttgtattatcaaaaaactaaggcagttcatcaaagctttttatttctggcagccacctcccatgccgtcattccttagtctgccccttatgctaccatatgttaaagagcgtggtactccccaatgtatggtgtgtgagttttggcggggtgaaggtgtggggaaagggtataaatagaacaaaagatccaagttcccacagcagtaattgtcactgacctaaggctaaggcatagaagctgactaggggttcttttatttggatcttacatctcagaaagctctttatttaagtaagaaccaaagttatgtgacatgaaaggactctagaaaggtaaaaggtaacaattctcctctcattggtcctggtgctttctggtccagagaaggaaatacttggaagccatgaggattgccttttaagcaaataaaaagatcaggacttaagcacctgcaataacaacactataaacaaaaaataaaatgttggaggtaagaaaggacacctcacataaaggcatgtcaaaacaagggatgggagacattgccaatcatagactctactatgcctcatcatttccttctacctaactcccaatgaaaatgactgctggagtaaggcactgttaataataggaatatgttatatccttcaggtgcgtgaaaaaccactttcatagacactgtaaggaagcaacttagaaatttaatagcaagagaaatatttcaacacttctctgactgtggaaggagttattttgaaggtattgagctccctctgtcagatcctttgtgaattgcttgtcaagcagatgtgttaccttctttctaaagattcccttcagattactacatcattaacagaaacctgtgaagctctaaattacactgctataacaaaactatactgaaataactatttcacatatgattgaactttaacaattttagagaaaaatatactcttattttaagaattaatttggaaaacctataacaaaaccagacaagaaatgcattctaagtaggtggtttgctaactgtgctcctttggggttcctcaggagatggcaaaagtggggaaccacgtgtgggctgaggtgtagatggagtggggaaggctggagggtcaagagcctccctaatttttcttgaaccagagctactttgattttatttgtgctacatctctaagaatccacagcagatttcatgtcaaaaatagagttctaatgctgaaatgcatttgaaagcctctgctctatacagctattatatctgccaaaggatagtgttaacatactctgacatctgaagatccaggatttccaacatttagagcaacttcacctataagccccaccttctcccatgttttccctctcttttcaccctctcattttcctcttcttcccagcctcctcatatatcatctcttccctcattcttaactctctgtggcatagaactgctgtatatttgtgtttgtgtgtttaccactggtcaataacaagcaagcatgttaactattcttcttaaattaagtttctttttcttgtggatggtgtagtcaatcaataaagatttttctcaatgattattagaa

SEQ ID NO: 373735 - DNA, 1518 bp, Homo sapiens
  misc_feature (10)..(10): n is a, c, g, or t
  misc_feature (44)..(44): n is a, c, g, or t
  misc_feature (169)..(169): n is a, c, g, or t
caaagaaagngagggcaggagagggaaagagaaagagagtgagnaaggaaggaacgtgccaagagctcccatgcaaaatgcccagaagaactggagcagtggcacagatcagcaggagcagaggaatgctgcaaaagatgatgctgcatagagtctaacttggagatgnagacggggtttcgctcttgtgaccaggctggaatgcaatggcgtgatctcggctcaccgcaacctccgacctctgggttcaagtgattctcctgcctccgcctcccaagtagctgggattacaggcatgcgccaccacgcctggctaattttgtatttttagtagagatggggtttctccatgttggtcaggctggtctcaaactcctaacctcaggtgatctgcccacctcggcctcccaaagtgctgggattataggcgtgagccaccgcgccggctgccttaaatctatttatctgacgttcccaactaggaaattttttgtccaaatgagtatatgtgattttaaagtagaaatcgaaggtaaaataggatttatctcagttcctatctcccttcaatctattcttcatattgtcaataatttttttttttttttttgagacgtggtctctgtcgccaggctggagtgcagtggtgaaatcttggctcactgcaccctctgcctcctgtgttcaggcgactctcctgcctcagcctccggagtagctgggattgcaggcatccgccatcacacccggctaaatttcgtattttttcagtagagacagttttgcgccaggctggtctcaaactcctgaccttaagtgatccacctgcctcagcctcccaaagtgctgggattacaggcgtgagccgccgtgcccggccatcagtaattttttaaaatgtcacttcaataaatgcttttcctctgccataaagaccaaacatcttgctgtggcctacaggagacaggatgatccagcccttgcctcccttactctcatctctagctaaaactgcgctgctgtctctgcactccagccactggcacttcctgattacttggggcacgctgtactcatcttgctcccagcctctgcccatgcaggtgccctctgccctcagcactgcctttctctacttcatttatagactgctgtccttcagatctcggttgaagtgtcacttccttggggaagctggcttacactctcaggactcggttaggttcccccgtcaggctcttctatgtcaccatgtttctatttttcacagcacttaacctgttttaattacgttgcaaatagtttttgtttgggtctagagaagcatgtattcactagtacattttatttgtgttctctaattattttttctgcagctaaattagaaatttgtagttttccccctaaaaatgcaatgatgttttctctgattttcttgtcacctttcttccaaaaaatccatgtgttcaaagtgcttgcttgcagtttgccccataataaatggttgtttaatccaaa

SEQ ID NO: 373736 - DNA, 752 bp, Homo sapiens
acaggtgtgctggcgtggccctctacctgccccgccgcggcggcctgcggccaggagaagtaggctggcgacatctggcgggccgcgggccgagggaggggaggcggggcggggcggtgtctccctcacgtgaccccaacagcgcccagcgcgtcgcgctgcgccccaacctcggggtcggtcacagtctgcgcctgcgcgggccccggctcgctagccgtcctgcgggacgccggcgctgatgggaaatccagttatcaaaattgactcaagaagagagaacctaacagaacaataacaatggaagaaattgggaacattatcacaaagctatcatcctgccaaactccaggctcagatgtcacagaaatggggtctcattatgttccccaggctggtctcaaactcccgggctcaagcgatcctcctgcctcggcttcccaaagtgctgggattacaggtgtgagctactgcacccagcctacatggaatctttctaagtatgggacactatgtaactgcacatgtacaacctctttaagccagccctgaatctaaatctctttcaactacagctatggaataccaagacgatagttatctttgtcccttgagttcccagtactaaactaggcatataatagggattcaaatgttcgttgaatgaaaaactgagtcttaacttgcagttttccaagtcaatgagaaatgtttgcttgcttatggtcagaacagatcttaccctgatgaat

SEQ ID NO: 373737 - DNA, 558 bp, Homo sapiens
tttttgaggcaatctcactctgttgcccaggctggagtgcagtggtgtgctctcagcttactgcagtctcaacttcttgggctcaggtgatcctcccacctcagtttcccgagtagctgggactataggtgtatgccgccatgcctggctaattgtgttttcattttttgtagaaatggggtctcattatgttccccaggctggtctcaaactcccgggctcaagcgatcctcctgcctcggcttcccaaagtgctgggattacaggtgtgagctactgcacccagcctacatggaatctttctaagtatgggacactatgtaactgcacatgtacaacctctttaagccagccctgaatctaaatctctttcaactacagctatggaataccaagacgatagttatctttgtcccttgagttcccagtactaaactaggcatataatagggattcaaatgttcgttgaatgaaaaactgagtcttaacttgcagttttccaagtcaatgagaaatgtttgcttgcttatggtcagaacagatcttaccctgatgaat

SEQ ID NO: 373738 - DNA, 397 bp, Homo sapiens
acaggtgtgctggcgtggccctctacctgccccgccgcggcggcctgcggccaggagaagtaggctggcgacatctggcgggccgcgggccgagggaggggaggcggggcggggcggtgtctccctcacgtgaccccaacagcgcccagcgcgtcgcgctgcgccccaacctcggggtcggtcacagtctgcgcctgcgcgggccccggctcgctagccgtcctgcgggacgccggcgctgatgggaaatccagttatcaaaattgactcaagaagagagaacctaacagaacaataacaatggaagaaattgggaacattatcacaaagctatcatcctgccaaactccaggctcagatgtcacaggtgaatgcaattaaacttcaaggaacacat

SEQ ID NO: 373739 - DNA, 1771 bp, Homo sapiens
agagagagggggcgcccccccgcgcgcggtgtgatgaggggccgcgtgtgtggagagaaaaataaaaatggccccttttttttttttgtaaaaaaaaaaaaaaaaaaaaaaaaaaaaaaaaaaaaaaaaaaaaaaaaaaaaaaaaaaaggctatataaattaaaccagaatttttttttttttaaggaaatccagttatcaaaattgactcaagaagagagaacctaacagaacaataacaatggaagaaattgggaacattatcacaaagctatcatcctgccaaactccaggctcagatgtcacagggtttctattgcctgggctggagtgtagtggcatgatcatggctcactatagccttgacttcctgggctcaagcgatccttccgcctcagcctcctgagtagctgggactacagagacggggtttcgctcttgtgaccaggctggaatgcaatggcgtgatctcggctcaccgcaacctccgacctctgggttcaagtgattctcctgcctccgcctcccaagtagctgggattacaggcatgcgccaccacgcctggctaattttgtatttttagtagagatggggtttctccatgttggtcaggctggtctcaaactcctaacctcaggtgatctgcccacctcggcctcccaaagtgctgggattataggcgtgagccaccgcgccggctgccttaaatctatttatctgacgttcccaactaggaaattttttgtccaaatgagtatatgtgattttaaagtagaaatcgaaggtaaaataggatttatctcagttcctatctcccttcaatctattcttcatattgtcaataatttttttttttttttttgagacgtggtctctgtcgccaggctggagtgcagtggtgaaatcttggctcactgcaccctctgcctcctgtgttcaggcgactctcctgcctcagcctccggagtagctgggattgcaggcatccgccatcacacccggctaaatttcgtattttttcagtagagacagttttgcgccaggctggtctcaaactcctgaccttaagtgatccacctgcctcagcctcccaaagtgctgggattacaggcgtgagccgccgtgcccggccatcagtaattttttaaaatgtcacttcaataaatgcttttcctctgccataaagaccaaacatcttgctgtggcctacaggagacaggatgatccagcccttgcctcccttactctcatctctagctaaaactgcgctgctgtctctgcactccagccactggcacttcctgattacttggggcacgctgtactcatcttgctcccagcctctgcccatgcaggtgccctctgccctcagcactgcctttctctacttcatttatagactgctgtccttcagatctcggttgaagtgtcacttccttggggaagctggcttacactctcaggactcggttaggttcccccgtcaggctcttctatgtcaccatgtttctatttttcacagcacttaacctgttttaattacgttgcaaatagtttttgtttgggtctagagaagcatgtattcactagtacattttatttgtgttctctaattattttttctgcagctaaattagaaatttgtagttttccccctaaaaatgcaatgatgttttctctgattttcttgtcacctttcttccaaaaaatccatgtgttcaaagtgcttgcttgcagtttgccccataataaatggttgtttaatccaaa

SEQ ID NO: 373740 - DNA, 2337 bp, Homo sapiens
cctcttcccctacacaattcaaaggctcttctcttctctcctttcagttgtggcctctaggaccagtgagatccttggaagactcttgcctttccagagtgatgagaatcataaagtcatttaacacctttccccctagtcatcagtatagtcccttcctttcccagagtttcccctggtttttaaaaaaaagaaaattatgatactcaattggcttagtaaaatctcacatttagccagcttagctgaaacatttcagacctatgtttattatacaaggggtttttgtttgtttgtttgtttgtttgtttagggtgagatgaaagaggcaagatttaagaagctgggcaaaaactgagctgatgctggcctttaaagtacctcccaccttgctcaaccccagcaggagaggaataagaagagtttggaagggataatgataccatatgaagcaagagaggacagaaacaggagagtcgagaagcaggatctctagcagtatgcccttgaaggcagagactgcagtcagcgatcggcctaagctctgcacacacggcaatggcaatttgtccaatgagccctgttgaaggtggagtgctgctgcctgtacctcctcatcatcactgttgcttgagcaccgaagaagagtggcccagccttttgggtgcagctgtaaggacgtgatgcagtttccgtggtcactctcaccaagaacttcaggggttacgacttcaagactatttcgtggtgaaactcctgagatataagaaaaatttctggcagccacctcccatgccgtcattccttagtctgccccttatgctaccatatgttaaagagcgtggtactccccaatgtatggtgtgtgagttttggcggggtgaaggtgtggggaaagggtataaatagaacaaaagatccaagttcccacagcagtaattgtcactgacctaaggctaaggcatagaagctgactaggggttcttttatttggatcttacatctcagaaagctctttatttaagtaagaaccaaagttatgtgacatgaaaggactctagaaaggtaaaaggtaacaattctcctctcattggtcctggtgctttctggtccagagaaggaaatacttggaagccatgaggattgccttttaagcaaataaaaagatcaggacttaagcacctgcaataacaacactataaacaaaaaataaaatgttggaggtaagaaaggacacctcacataaaggcatgtcaaaacaagggatgggagacattgccaatcatagactctactatgcctcatcatttccttctacctaactcccaatgaaaatgactgctggagtaaggcactgttaataataggaatatgttatatccttcaggtgcgtgaaaaaccactttcatagacactgtaaggaagcaacttagaaatttaatagcaagagaaatatttcaacacttctctgactgtggaaggagttattttgaaggtattgagctccctctgtcagatcctttgtgaattgcttgtcaagcagatgtgttaccttctttctaaagattcccttcagattactacatcattaacagaaacctgtgaagctctaaattacactgctataacaaaactatactgaaataactatttcacatatgattgaactttaacaattttagagaaaaatatactcttattttaagaattaatttggaaaacctataacaaaaccagacaagaaatgcattctaagtaggtggtttgctaactgtgctcctttggggttcctcaggagatggcaaaagtggggaaccacgtgtgggctgaggtgtagatggagtggggaaggctggagggtcaagagcctccctaatttttcttgaaccagagctactttgattttatttgtgctacatctctaagaatccacagcagatttcatgtcaaaaatagagttctaatgctgaaatgcatttgaaagcctctgctctatacagctattatatctgccaaaggatagtgttaacatactctgacatctgaagatccaggatttccaacatttagagcaacttcacctataagccccaccttctcccatgttttccctctcttttcaccctctcattttcctcttcttcccagcctcctcatatatcatctcttccctcattcttaactctctgtggcatagaactgctgtatatttgtgtttgtgtgtttaccactggtcaataacaagcaagcatgttaactattcttcttaaattaagtttctttttcttgtggatggtgtagtcaatcaataaagatttttctcaatgattattagaa

SEQ ID NO: 373741 - DNA, 2446 bp, Homo sapiens
acaggtgtgctggcgtggccctctacctgccccgccgcggcggcctgcggccaggagaagtaggctggcgacatctggcgggccgcgggccgagggaggggaggcggggcggggcggtgtctccctcacgtgaccccaacagcgcccagcgcgtcgcgctgcgccccaacctcggggtcggtcacagtctgcgcctgcgcgggccccggctcgctagccgtcctgcgggacgccggcgctgatgggaaatccagttatcaaaattgactcaagaagagagaacctaacagaacaataacaatggaagaaattgggaacattatcacaaagctatcatcctgccaaactccaggctcagatgtcacagggtgagatgaaagaggcaagatttaagaagctgggcaaaaactgagctgatgctggcctttaaagtacctcccaccttgctcaaccccagcaggagaggaataagaagagtttggaagggataatgataccatatgaagcaagagaggacagaaacaggagagtcgagaagcaggatctctagcagtatgcccttgaaggcagagactgcagtcagcgatcggcctaagctctgcacacacggcaatggcaatttgtccaatgagccctgttgaaggtggagtgctgctgcctgtacctcctcatcatcactgttgcttgagcaccgaagaagagtggcccagccttttgggtgcagctgtaaggacgtgatgcagtttccgtggtcactctcaccaagaacttcaggggttacgacttcaagactatttcgtggtgaaactcctgagatataagaaaatgaggatgtgggatttgtattatcaaaaaactaaggcagttcatcaaagctttttatttctggcagccacctcccatgccgtcattccttagtctgccccttatgctaccatatgttaaagagcgtggtactccccaatgtatggtgtgtgagttttggcggggtgaaggtgtggggaaagggtataaatagaacaaaagatccaagttcccacagcagtaattgtcactgacctaaggctaaggcatagaagctgactaggggttcttttatttggatcttacatctcagaaagctctttatttaagtaagaaccaaagttatgtgacatgaaaggactctagaaaggtaaaaggtaacaattctcctctcattggtcctggtgctttctggtccagagaaggaaatacttggaagccatgaggattgccttttaagcaaataaaaagatcaggacttaagcacctgcaataacaacactataaacaaaaaataaaatgttggaggtaagaaaggacacctcacataaaggcatgtcaaaacaagggatgggagacattgccaatcatagactctactatgcctcatcatttccttctacctaactcccaatgaaaatgactgctggagtaaggcactgttaataataggaatatgttatatccttcaggtgcgtgaaaaaccactttcatagacactgtaaggaagcaacttagaaatttaatagcaagagaaatatttcaacacttctctgactgtggaaggagttattttgaaggtattgagctccctctgtcagatcctttgtgaattgcttgtcaagcagatgtgttaccttctttctaaagattcccttcagattactacatcattaacagaaacctgtgaagctctaaattacactgctataacaaaactatactgaaataactatttcacatatgattgaactttaacaattttagagaaaaatatactcttattttaagaattaatttggaaaacctataacaaaaccagacaagaaatgcattctaagtaggtggtttgctaactgtgctcctttggggttcctcaggagatggcaaaagtggggaaccacgtgtgggctgaggtgtagatggagtggggaaggctggagggtcaagagcctccctaatttttcttgaaccagagctactttgattttatttgtgctacatctctaagaatccacagcagatttcatgtcaaaaatagagttctaatgctgaaatgcatttgaaagcctctgctctatacagctattatatctgccaaaggatagtgttaacatactctgacatctgaagatccaggatttccaacatttagagcaacttcacctataagccccaccttctcccatgttttccctctcttttcaccctctcattttcctcttcttcccagcctcctcatatatcatctcttccctcattcttaactctctgtggcatagaactgctgtatatttgtgtttgtgtgtttaccactggtcaataacaagcaagcatgttaactattcttcttaaattaagtttctttttcttgtggatggtgtagtcaatcaataaagatttttctcaatgattattagaa

SEQ ID NO: 373742 - DNA, 1587 bp, Homo sapiens
tggcctggccgcggttgcgagggcgccgaggcaggcgcgcggcgggcaggcctgggagggggcgggtccgcgcgggcttcggaggagcccgccctgccagaggagagggaggtcacggcgtaaaggtgcagctgccgccaccgccgcttctgcaaggtctcagggacgggctgcagccatgtcctattgccggcaggaaggctttgcccaggatggttccttctggaatgtctattcccctccttccctccctgaagctctttgtcagggacaaaggtaggatccctccccttccgtcttctccactggatgcctgtgtcgtattcatctgtgaccaccaggtactaccacagagctggagctgaggaagggaaggatcgaatcatatttgtaaccaaagaagatcatgaaactccaagcagtgcagaattggtggctgatgaccccaacgatccatacgaggagcatggattgatactgccaaatggaaacattaactggaactgcccatgccttgggggaatggccagcggtccctgtggagaacagtttaagtcagccttttcctgcttccactatagcacggaggagatcaaggggtcagactgtgtagaccagttccgggccatgcaggaatgcatgcagaaatacccagacctctatccccaagaggatgaggatgaggaagaggaaagagagaagaagccagcagaacaagcagaagaaacagctcccattgaggccactgcaaccaaagaagaggagggatcaagttaatgaaggccacaaggcactgggcaccagtccttttggagtggaccttttgcaaaaggccttgtcatcaccttccaagaaagtttccttctgttgtcctgtgcattataatatacaaaataacttattttgatgatcagaggtcttgaggtcttgacatcttgacatatacactgaaaaaaatgggggttgtatgtatgtgtgtcctacccaaacctgtggccgccacttttgaattctcagattgccctgaattttgccacttttaaataatgtgctgaataagctcagcaactaaaaaccattacccaagaacgtttcttgtgagtgagctgatttattctgattcattatattccttttggtagattttataccccttggggaaataatacaacaaaaacatctcttaaaaatgctgggatggggccatatctactagcagaggccagatggtcagatatgatttctgcaaacccatcttgaccttgagtatgtgaaggggtactgtactttattcctgatacattttggtttccatgtaggtgttgagctcctggttttctgtgtttggatgatgaagatttggacccttccattcataatccctttctaagtgaagggagaggctggcttggctgttccttgttattccgaaagccctggtttggggcccatgttcacactggctctcagtctagtcaggtgcaatgttcttgagaggtggggacctaattattaccagagtagcagcaagagaggaaacgttgtgaattaagtattcaattaaaaggaaacatgatttctacctga

SEQ ID NO: 373743 - DNA, 1417 bp, Homo sapiens
tggcctggccgcggttgcgagggcgccgaggcaggcgcgcggcgggcaggcctgggagggggcgggtccgcgcgggcttcggaggagcccgccctgccagaggagagggaggtcacggcgtaaaggtgcagctgccgccaccgccgcttctgcaaggtctcagggacgggctgcagccatgtcctattgccggcaggaagggaaggatcgaatcatatttgtaaccaaagaagatcatgaaactccaagcagtgcagaattggtggctgatgaccccaacgatccatacgaggagcatggattgatactgccaaatggaaacattaactggaactgcccatgccttgggggaatggccagcggtccctgtggagaacagtttaagtcagccttttcctgcttccactatagcacggaggagatcaaggggtcagactgtgtagaccagttccgggccatgcaggaatgcatgcagaaatacccagacctctatccccaagaggatgaggatgaggaagaggaaagagagaagaagccagcagaacaagcagaagaaacagctcccattgaggccactgcaaccaaagaagaggagggatcaagttaatgaaggccacaaggcactgggcaccagtccttttggagtggaccttttgcaaaaggccttgtcatcaccttccaagaaagtttccttctgttgtcctgtgcattataatatacaaaataacttattttgatgatcagaggtcttgaggtcttgacatcttgacatatacactgaaaaaaatgggggttgtatgtatgtgtgtcctacccaaacctgtggccgccacttttgaattctcagattgccctgaattttgccacttttaaataatgtgctgaataagctcagcaactaaaaaccattacccaagaacgtttcttgtgagtgagctgatttattctgattcattatattccttttggtagattttataccccttggggaaataatacaacaaaaacatctcttaaaaatgctgggatggggccatatctactagcagaggccagatggtcagatatgatttctgcaaacccatcttgaccttgagtatgtgaaggggtactgtactttattcctgatacattttggtttccatgtaggtgttgagctcctggttttctgtgtttggatgatgaagatttggacccttccattcataatccctttctaagtgaagggagaggctggcttggctgttccttgttattccgaaagccctggtttggggcccatgttcacactggctctcagtctagtcaggtgcaatgttcttgagaggtggggacctaattattaccagagtagcagcaagagaggaaacgttgtgaattaagtattcaattaaaaggaaacatgatttctacctga

SEQ ID NO: 373744 - DNA, 621 bp, Homo sapiens
tggcctggccgcggttgcgagggcgccgaggcaggcgcgcggcgggcaggcctgggagggggcgggtccgcgcgggcttcggaggagcccgccctgccagaggagagggaggtcacggcgtaaaggtgcagctgccgccaccgccgcttctgcaaggtctcagggacgggctgcagccatgtcctattgccggcaggaagggaaggatcgaatcatatttgtaaccaaagaagatcatgaaactccaagcagtgcagaattggtggctgatgaccccaacgatccatacgaggagcatggattgatactgccaaatggaaacattaactggaactgcccatgccttgggggaatggccagcggtccctgtggagaacagtttaagtcagccttttcctgccttccattcataatccctttctaagtgaagggagaggctggcttggctgttccttgttattccgaaagccctggtttggggcccatgttcacactggctctcagtctagtcaggtgcaatgttcttgagaggtggggacctaattattaccagagtagcagcaagagaggaaacgttgtgaattaagtattcaattaaaaggaaacatgatttctacctga

SEQ ID NO: 373745 - DNA, 1312 bp, Homo sapiens
tggcctggccgcggttgcgagggcgccgaggcaggcgcgcggcgggcaggcctgggagggggcgggtccgcgcgggcttcggaggagcccgccctgccagaggagagggaggtcacggcgtaaaggtgcagctgccgccaccgccgcttctgcaaggtctcagggacgggctgcagccatgtcctattgccggcaggaagggaaggatcgaatcatatttgtaaccaaagaagatcatgaaactccaagcagtgcagaattggtggctgatgaccccaacgatccatacgaggagcatggattgatactgccaaatggaaacattaactggaactgcccatgccttgggggaatggccagcggtccctgtggagaacagtttaagtcagccttttcctgcttccactatagcacggaggagatcaaggggtcagactgtgtagaccagttccgggccatgcaggaatgcatgcagaaatacccagacctctatccccaagaggatgaggatgaggaagaggaaagagagaagaagccagcagaacaagcagaagaaacagctcccattgaggccactgcaaccaaagaagaggagggatcaagttaatgaaggccacaaggcactgggcaccagtccttttggagtggaccttttgcaaaaggccttgtcatcaccttccaagaaagtttccttctgttgtcctgtgcattataatatacaaaataacttattttgatgatcagaggtcttgaggtcttgacatcttgacatatacactgaaaaaaatgggggttgtatgtatgtgtgtcctacccaaacctgtggccgccacttttgaattctcagattgccctgaattttgccacttttaaataatgtgctgaataagctcagcaactaaaaaccattacccaagaacgtttcttgtgagtgagctgatttattctgattcattatattccttttggtagattttataccccttggggaaataatacaacaaaaacatctcttaaaaatgctgggatggggccatatctactagcagaggccagatggtcagatatgatttctgcaaacccatcttgaccttgagtatgtgaaggggtactgtactttattcctgatacattttggtttccattgttattccgaaagccctggtttggggcccatgttcacactggctctcagtctagtcaggtgcaatgttcttgagaggtggggacctaattattaccagagtagcagcaagagaggaaacgttgtgaattaagtattcaattaaaaggaaacatgatttctacctga

SEQ ID NO: 373746 - DNA, 3251 bp, Homo sapiens
  misc_feature (1670)..(1670): n is a, c, g, or t
ggccgttcggagaccagccccagcgtgccaggaccgtttccggggcctggccggggcgttgccgcggggtcggggaccagcacgagtgctgagtcacgccccgcccgggagcgcctcgggtcagtaactcgggaagacgaccaagcgggagcgggagcgggagcgggagccggagcgagagcgcgcgggcgcggccgacagtgcctgatttgagatggggtcccaggtctcggtggaatcgggagctctgcacgtggtgattgtgggtgggggctttggcgggatcgcagcagccagccagctgcaggccctgaacgtccccttcatgctggtggacatgaaggactccttccaccacaatgtggctgctctccgagcctccgtggagacagggttcgccaaaaagacattcatttcttactcggtgactttcaaggacaacttccggcaggggctagtagtggggatagacctgaagaaccagatggtgctgctgcagggtggcgaggccctgcccttctctcatcttatcctggccacgggcagcactgggcccttcccgggcaagtttaatgaggtttccagccagcaggccgctatccaggcctatgaggacatggtgaggcaggtccagcgctcacggttcatcgtggtggtgggaggaggctcggctggagtggagatggcagcagagattaaaacagaatatcctgagaaagaggtcactctcattcactcccaagtggccctggctgacaaggagctcctgccctccgtccggcaggaagtgaaggagatcctcctccggaagggcgtgcagctgctgctgagtgagcgggtgagcaatctggaggagctgcctctcaatgagtatcgagagtacatcaaagtgcagacggacaaaggcacagaggtggccaccaacctggtgattctctgcaccggcatcaagatcaacagctccgcctaccgcaaagcatttgagagcagactagccagcagtggtgctctgagagtgaacgagcacctccaggtggagggccacagcaacgtctacgccattggtgactgtgccgacgtgaggacgcccaagatggcctatcttgccggcctccacgccaacatcgccgtggccaacatcgtcaactctgtgaagcagcggcctctccaggcctacaagccgggtgcactgacgttcctcctgtccatggggagaaatgacggtgtgggccaaatcagtggcttctatgtgggccggctcatggttcggctgaccaagagccgggacctgttcgtctctacgagctggaaaaccatgaggcagtctccaccttgatggagaggccaggcgggagaactaccgcagcaggtgggcgtacggactgcttggcgcatggcacccgcctggcaagtgctagaactaatgctattcttctggaataagatgccaatgatgtggtggctagaaatgcaacttgtataaaacaaaaatgggagagagagaggtattaaacaaataccccccttagaggatactttctgggtttggaaggtgtgcttgctgtggtactgggtgagcggctcatgtgtgctggctgcatggtgctggggaggccacagccagcccttcctctgcacctgcctcctctgggatgtgcatgtgtgtgtangtgcttgtggtcatgacgcgtgccatttagagctctcagagcagggcagattgctgggctctggtggccagtgtctgtctgtgagggcaggaaggagagctgcacattgagaacaaaggagggacctgaggtggagagaggcccagcaccccaaatctctgccatcacacggtcggggagcccatacattctgcaacaaccagggacttcacaggagccttgttttcaatttgctaacaggtgcataatccctgtgctccttaagcctcatggccttcctacatttccactttatttgtttgtttgtttatttatttttgagacagtctcgccctgtcacccaggctggagtgcagtggcacgatctcagctcactgcaacctacgccttctgggttcacgtgattctcttgccttagcctcccaagtagctgggactacaggcacgtgccaccatgcctggctaatttttgtattttttaaatagagacggggtttcactgtgttggccaggctggtctcgaacacctgacctcaggtgatccattcgtcttggcctctcgaagtgctgggattccaggcgtgagccactgcggccagcacatttccacttttagatcctactccataccacaggtttcatttaagaagaaagagctagataaatgtgctcttctggttaccccaccctgacagagtgcatttttacacggctagcaggggttgagactgcagcctggcctgccagccattggaggtgtttaaggaagggcagataatgtgactctttgcggggtgccatctgcttacccattagcgagcagagggggtttctgcgggtgacccccagcatatttctaggttacttatgggcagatttgtaagtgacaaaactccagctgatgctgggaatggggagagggcccttgagggactttgtggttttgtgcttctggtttcctggccaaccccagggtcacttgtctggaggcccagctgggcactaatgtctgccaccgactatgttacagtgtataaatgattcctctatttgggagagatcttccaatccagaggagcccctcttggactgcctgggttaaatctgcatagcagaagtggttgatgagttcatctgaagaaattcaggccccacctccccaccctgcccctccctgctcccttttgatggtggcctctgggtactcgggcagagtccttgggacaccagcctctctggggttctcaggccatcccgttggggctgtcgcccaggcctaagtgagtcgtgtgcctctattggaggatggctgttcccctggtggttgcatccaagtatctgtctttctttatggaccacgaagggaagcccaccttcctggaggcaggaccttcggcctaagaaacacaggccctggtgctatctgacctggggtccagcgaggtgggaatcccagtgtgtgagcgacaggccttcttctattgacttacaatattctagaaggacctacgtgtggggacacagttttccaaactgaggaaaatgttgcaataaaagaatatgttgtaagaaaaaaaaaaa

SEQ ID NO: 373747 - DNA, 2107 bp, Homo sapiens
  misc_feature (2107)..(2107): n is a, c, g, or t
ggccgttcggagaccagccccagcgtgccaggaccgtttccggggcctggccggggcgttgccgcggggtcggggaccagcacgagtgctgagtcacgccccgcccgggagcgcctcgggtcagtaactcgggaagacgaccaagcgggagcgggagcgggagcgggagccggagcgagagcgcgcgggcgcggccgacagtgcctgatttgagatggggtcccaggtctcggtggaatcgggagctctgcacgtggtgattgtgggtgggggctttggcgggatcgcagcagccagccagctgcaggccctgaacgtccccttcatgctggtggacatgaaggactccttccaccacaatgtggctgctctccgagcctccgtggagacagggttcgccaaaaagacattcatttcttactcggtgactttcaaggacaacttccggcaggggctagtagtggggatagacctgaagaaccagatggtgctgctgcagggtggcgaggccctgcccttctctcatcttatcctggccacgggcagcactgggcccttcccgggcaagtttaatgaggtttccagccagcaggccgctatccaggcctatgaggacatggtgaggcaggtccagcgctcacggttcatcgtggtggtgggaggaggctcggctggagtggagatggcagcagagattaaaacagaatatcctgagaaagaggtcactctcattcactcccaagtggccctggctgacaaggagctcctgccctccgtccggcaggaagtgaaggagatcctcctccggaagggcgtgcagctgctgctgagtgagcgggtgagcaatctggaggagctgcctctcaatgagtatcgagagtacatcaaagtgcagacggacaaaggcacagaggtggccaccaacctggtgattctctgcaccggcatcaagatcaacagctccgcctaccgcaaagcatttgagagcagactagccagcagtggtgctctgagagtgaacgagcacctccaggtggagggccacagcaacgtctacgccattggtgactgtgccgacgtgaggacgcccaagatggcctatcttgccggcctccacgccaacatcgccgtggccaacatcgtcaactctgtgaagcagcggcctctccaggcctacaagccgggtgcactgacgttcctcctgtccatggggagaaatgacggtgtgggccaaatcagtggcttctatgtgggccggctcatggttcggctgaccaagagccgggacctgttcgtctctacgagctggaaaaccatgaggcagtctccaccttgatggagaggccaggcgggagaactaccgcagcaggtgggcgtacggactgcttggcgcatggcacccgcctggcaagtgctagaactaatgctattcttctggaataagatgccaatgatgtggtggctagaaatgcaacttgtataaaacaaaaatgggagagagagaggtattaaacaaataccccccttaaaaaaaaaaaaaaaaaaaaaaaaaaaaaaaaaaaaacaaaaaaacacaaaaaaaaaaaaaaaaaaaaaaaaaaaaaaaaaaaaaaaaaaaacaagaaaaaaacaacaacaaaaaaagcggcgggggggggcggggcaacatgaaataactcacccgcacgagcgggagcgcgcccgaaaaccgagcaccccgatcgcagcgctagtcgagacgtggcgcggagagagagcagcagccactgatgtggaggcgcggcccccaaacacaacccagggacgcaccggcggtgcgccacccaaaataacgacccgctcggcggcacgaccggaagcaagacgacccgcgcggccgtgctactaccgaggacacagcgaacccacaatgggagcggggcagcacaactaatggcgccacacccccacaacgaacacaagattacagcgcgcggcggaacccaacaaactcgcaggccagagtcagctgtcgggccacacgaacagccgacgtgggtgcggacccgcagcattgcagcccgcgaggagaactaggaaaatatcacaggggacggaaaaaagaagn

SEQ ID NO: 373748 - DNA, 2647 bp, Homo sapiens
  misc_feature (1066)..(1066): n is a, c, g, or t
tgtttcacatgtcctcttctccaggtccagcgctcacggttcatcgtggtggtgggaggaggctcggctggagtggagatggcagcagagattaaaacagaatatcctgagaaagaggtcactctcattcactcccaagtggccctggctgacaaggagctcctgccctccgtccggcaggaagtgaaggagatcctcctccggaagggcgtgcagctgctgctgagtgagcgggtgagcaatctggaggagctgcctctcaatgagtatcgagagtacatcaaagtgcagacggacaaaggcacagaggtggccaccaacctggtgattctctgcaccggcatcaagatcaacagctccgcctaccgcaaagcatttgagagcagactagccagcagtggtgctctgagagtgaacgagcacctccaggtggagggccacagcaacgtctacgccattggtgactgtgccgacgtgaggacgcccaagatggcctatcttgccggcctccacgccaacatcgccgtggccaacatcgtcaactctgtgaagcagcggcctctccaggcctacaagccgggtgcactgacgttcctcctgtccatggggagaaatgacggtgtgggccaaatcagtggcttctatgtgggccggctcatggttcggctgaccaagagccgggacctgttcgtctctacgagctggaaaaccatgaggcagtctccaccttgatggagaggccaggcgggagaactaccgcagcaggtgggcgtacggactgcttggcgcatggcacccgcctggcaagtgctagaactaatgctattcttctggaataagatgccaatgatgtggtggctagaaatgcaacttgtataaaacaaaaatgggagagagagaggtattaaacaaataccccccttagaggatactttctgggtttggaaggtgtgcttgctgtggtactgggtgagcggctcatgtgtgctggctgcatggtgctggggaggccacagccagcccttcctctgcacctgcctcctctgggatgtgcatgtgtgtgtangtgcttgtggtcatgacgcgtgccatttagagctctcagagcagggcagattgctgggctctggtggccagtgtctgtctgtgagggcaggaaggagagctgcacattgagaacaaaggagggacctgaggtggagagaggcccagcaccccaaatctctgccatcacacggtcggggagcccatacattctgcaacaaccagggacttcacaggagccttgttttcaatttgctaacaggtgcataatccctgtgctccttaagcctcatggccttcctacatttccactttatttgtttgtttgtttatttatttttgagacagtctcgccctgtcacccaggctggagtgcagtggcacgatctcagctcactgcaacctacgccttctgggttcacgtgattctcttgccttagcctcccaagtagctgggactacaggcacgtgccaccatgcctggctaatttttgtattttttaaatagagacggggtttcactgtgttggccaggctggtctcgaacacctgacctcaggtgatccattcgtcttggcctctcgaagtgctgggattccaggcgtgagccactgcggccagcacatttccacttttagatcctactccataccacaggtttcatttaagaagaaagagctagataaatgtgctcttctggttaccccaccctgacagagtgcatttttacacggctagcaggggttgagactgcagcctggcctgccagccattggaggtgtttaaggaagggcagataatgtgactctttgcggggtgccatctgcttacccattagcgagcagagggggtttctgcgggtgacccccagcatatttctaggttacttatgggcagatttgtaagtgacaaaactccagctgatgctgggaatggggagagggcccttgagggactttgtggttttgtgcttctggtttcctggccaaccccagggtcacttgtctggaggcccagctgggcactaatgtctgccaccgactatgttacagtgtataaatgattcctctatttgggagagatcttccaatccagaggagcccctcttggactgcctgggttaaatctgcatagcagaagtggttgatgagttcatctgaagaaattcaggccccacctccccaccctgcccctccctgctcccttttgatggtggcctctgggtactcgggcagagtccttgggacaccagcctctctggggttctcaggccatcccgttggggctgtcgcccaggcctaagtgagtcgtgtgcctctattggaggatggctgttcccctggtggttgcatccaagtatctgtctttctttatggaccacgaagggaagcccaccttcctggaggcaggaccttcggcctaagaaacacaggccctggtgctatctgacctggggtccagcgaggtgggaatcccagtgtgtgagcgacaggccttcttctattgacttacaatattctagaaggacctacgtgtggggacacagttttccaaactgaggaaaatgttgcaataaaagaatatgttgtaagaaaaaaaaaaa

SEQ ID NO: 373749 - DNA, 3386 bp, Homo sapiens
  misc_feature (1805)..(1805): n is a, c, g, or t
ccaaggagttaggagctctatgtcagaccctcccatcactcaggacattacaaagatctcaggagctctgtatcaagaaccggcaatgaggaccaaatattagaacaaatgattcttagtaccccaatttacaagggttttaagagctctgcatcaggaactgggggcagagaccaatatatacttttcttcttatttcacaggggtcagaccagtctgaagtagtaaaaaagttcaagtaactcagtaaaatatccacatgtttaggatttgtagacagtaagggtagtagcagccaccctttattaaggacttaatatgtgctgagttacatgctttgtacgtatttttttgctcatcattacaaaattcctatgagtggggctattgtgcccatgttaatgagcctttgggaggtgtccaagtgagtatcagagatgggatttcaacccaggcaatttgataccaaagcccaggctttgaacatgattgcaacatgaggtgcccgggacgcttccctgtgttgtcccagacagcaagtagacatgcctggaagcactaattttaaacaagctttaatgttgacatcagtctgattgactgttggaatgcccatggcttgtataattataagtgcccaaggatgcttgaagataattttccaggtggccctaggtgaggtgtaggttgtgacatgttggcatattggtagtcctctggcctgggtgtggcaggagggtactgaaagagtcctagtctagaacatgtgggcttaagcccagctcaccactaattggtcctggcattggacagattacttctctggagcttcagtttcctcatctgtaacctggaggtcactctcattcactcccaagtggccctggctgacaaggagctcctgccctccgtccggcaggaagtgaaggagatcctcctccggaagggcgtgcagctgctgctgagtgagcgggtgagcaatctggaggagctgcctctcaatgagtatcgagagtacatcaaagtgcagacggacaaaggcacagaggtggccaccaacctggtgattctctgcaccggcatcaagatcaacagctccgcctaccgcaaagcatttgagagcagactagccagcagtggtgctctgagagtgaacgagcacctccaggtggagggccacagcaacgtctacgccattggtgactgtgccgacgtgaggacgcccaagatggcctatcttgccggcctccacgccaacatcgccgtggccaacatcgtcaactctgtgaagcagcggcctctccaggcctacaagccgggtgcactgacgttcctcctgtccatggggagaaatgacggtgtgggccaaatcagtggcttctatgtgggccggctcatggttcggctgaccaagagccgggacctgttcgtctctacgagctggaaaaccatgaggcagtctccaccttgatggagaggccaggcgggagaactaccgcagcaggtgggcgtacggactgcttggcgcatggcacccgcctggcaagtgctagaactaatgctattcttctggaataagatgccaatgatgtggtggctagaaatgcaacttgtataaaacaaaaatgggagagagagaggtattaaacaaataccccccttagaggatactttctgggtttggaaggtgtgcttgctgtggtactgggtgagcggctcatgtgtgctggctgcatggtgctggggaggccacagccagcccttcctctgcacctgcctcctctgggatgtgcatgtgtgtgtangtgcttgtggtcatgacgcgtgccatttagagctctcagagcagggcagattgctgggctctggtggccagtgtctgtctgtgagggcaggaaggagagctgcacattgagaacaaaggagggacctgaggtggagagaggcccagcaccccaaatctctgccatcacacggtcggggagcccatacattctgcaacaaccagggacttcacaggagccttgttttcaatttgctaacaggtgcataatccctgtgctccttaagcctcatggccttcctacatttccactttatttgtttgtttgtttatttatttttgagacagtctcgccctgtcacccaggctggagtgcagtggcacgatctcagctcactgcaacctacgccttctgggttcacgtgattctcttgccttagcctcccaagtagctgggactacaggcacgtgccaccatgcctggctaatttttgtattttttaaatagagacggggtttcactgtgttggccaggctggtctcgaacacctgacctcaggtgatccattcgtcttggcctctcgaagtgctgggattccaggcgtgagccactgcggccagcacatttccacttttagatcctactccataccacaggtttcatttaagaagaaagagctagataaatgtgctcttctggttaccccaccctgacagagtgcatttttacacggctagcaggggttgagactgcagcctggcctgccagccattggaggtgtttaaggaagggcagataatgtgactctttgcggggtgccatctgcttacccattagcgagcagagggggtttctgcgggtgacccccagcatatttctaggttacttatgggcagatttgtaagtgacaaaactccagctgatgctgggaatggggagagggcccttgagggactttgtggttttgtgcttctggtttcctggccaaccccagggtcacttgtctggaggcccagctgggcactaatgtctgccaccgactatgttacagtgtataaatgattcctctatttgggagagatcttccaatccagaggagcccctcttggactgcctgggttaaatctgcatagcagaagtggttgatgagttcatctgaagaaattcaggccccacctccccaccctgcccctccctgctcccttttgatggtggcctctgggtactcgggcagagtccttgggacaccagcctctctggggttctcaggccatcccgttggggctgtcgcccaggcctaagtgagtcgtgtgcctctattggaggatggctgttcccctggtggttgcatccaagtatctgtctttctttatggaccacgaagggaagcccaccttcctggaggcaggaccttcggcctaagaaacacaggccctggtgctatctgacctggggtccagcgaggtgggaatcccagtgtgtgagcgacaggccttcttctattgacttacaatattctagaaggacctacgtgtggggacacagttttccaaactgaggaaaatgttgcaataaaagaatatgttgtaagaaaaaaaaaaa

SEQ ID NO: 373750 - DNA, 3197 bp, Homo sapiens
  misc_feature (1616)..(1616): n is a, c, g, or t
ggccgttcggagaccagccccagcgtgccaggaccgtttccggggcctggccggggcgttgccgcggggtcggggaccagcacgagtgctgagtcacgccccgcccgggagcgcctcgggtcagtaactcgggaagacgaccaagcgggagcgggagcgggagcgggagccggagcgagagcgcgcgggcgcggccgacagtgcctgatttgagatggggtcccaggtctcggtggaatcgggagctctgcacgtggtgattgtgggtgggggctttggcgggatcgcagcagccagccagctgcaggccctgaacgtccccttcatgctggtggacatgaaggactccttccaccacaatgtggctgctctccgagcctccgtggagacagggttcgccaaaaagacattcatttcttactcggtgactttcaaggacaacttccggcaggggctagtagtggggatagacctgaagaaccagatggtgctgctgcagggtggcgaggccctgcccttctctcatcttatcctggccacgggcagcactgggcccttcccgggcaagtttaatgaggtttccagccagcaggccgctatccaggcctatgaggacatggtgaggcaggtccagcgctcacggttcatcgtggtggtgggaggaggctcggctggagtggagatggcagcagagattgctgacaaggagctcctgccctccgtccggcaggaagtgaaggagatcctcctccggaagggcgtgcagctgctgctgagtgagcgggtgagcaatctggaggagctgcctctcaatgagtatcgagagtacatcaaagtgcagacggacaaaggcacagaggtggccaccaacctggtgattctctgcaccggcatcaagatcaacagctccgcctaccgcaaagcatttgagagcagactagccagcagtggtgctctgagagtgaacgagcacctccaggtggagggccacagcaacgtctacgccattggtgactgtgccgacgtgaggacgcccaagatggcctatcttgccggcctccacgccaacatcgccgtggccaacatcgtcaactctgtgaagcagcggcctctccaggcctacaagccgggtgcactgacgttcctcctgtccatggggagaaatgacggtgtgggccaaatcagtggcttctatgtgggccggctcatggttcggctgaccaagagccgggacctgttcgtctctacgagctggaaaaccatgaggcagtctccaccttgatggagaggccaggcgggagaactaccgcagcaggtgggcgtacggactgcttggcgcatggcacccgcctggcaagtgctagaactaatgctattcttctggaataagatgccaatgatgtggtggctagaaatgcaacttgtataaaacaaaaatgggagagagagaggtattaaacaaataccccccttagaggatactttctgggtttggaaggtgtgcttgctgtggtactgggtgagcggctcatgtgtgctggctgcatggtgctggggaggccacagccagcccttcctctgcacctgcctcctctgggatgtgcatgtgtgtgtangtgcttgtggtcatgacgcgtgccatttagagctctcagagcagggcagattgctgggctctggtggccagtgtctgtctgtgagggcaggaaggagagctgcacattgagaacaaaggagggacctgaggtggagagaggcccagcaccccaaatctctgccatcacacggtcggggagcccatacattctgcaacaaccagggacttcacaggagccttgttttcaatttgctaacaggtgcataatccctgtgctccttaagcctcatggccttcctacatttccactttatttgtttgtttgtttatttatttttgagacagtctcgccctgtcacccaggctggagtgcagtggcacgatctcagctcactgcaacctacgccttctgggttcacgtgattctcttgccttagcctcccaagtagctgggactacaggcacgtgccaccatgcctggctaatttttgtattttttaaatagagacggggtttcactgtgttggccaggctggtctcgaacacctgacctcaggtgatccattcgtcttggcctctcgaagtgctgggattccaggcgtgagccactgcggccagcacatttccacttttagatcctactccataccacaggtttcatttaagaagaaagagctagataaatgtgctcttctggttaccccaccctgacagagtgcatttttacacggctagcaggggttgagactgcagcctggcctgccagccattggaggtgtttaaggaagggcagataatgtgactctttgcggggtgccatctgcttacccattagcgagcagagggggtttctgcgggtgacccccagcatatttctaggttacttatgggcagatttgtaagtgacaaaactccagctgatgctgggaatggggagagggcccttgagggactttgtggttttgtgcttctggtttcctggccaaccccagggtcacttgtctggaggcccagctgggcactaatgtctgccaccgactatgttacagtgtataaatgattcctctatttgggagagatcttccaatccagaggagcccctcttggactgcctgggttaaatctgcatagcagaagtggttgatgagttcatctgaagaaattcaggccccacctccccaccctgcccctccctgctcccttttgatggtggcctctgggtactcgggcagagtccttgggacaccagcctctctggggttctcaggccatcccgttggggctgtcgcccaggcctaagtgagtcgtgtgcctctattggaggatggctgttcccctggtggttgcatccaagtatctgtctttctttatggaccacgaagggaagcccaccttcctggaggcaggaccttcggcctaagaaacacaggccctggtgctatctgacctggggtccagcgaggtgggaatcccagtgtgtgagcgacaggccttcttctattgacttacaatattctagaaggacctacgtgtggggacacagttttccaaactgaggaaaatgttgcaataaaagaatatgttgtaagaaaaaaaaaaa

SEQ ID NO: 373751 - DNA, 1346 bp, Homo sapiens
ggccgttcggagaccagccccagcgtgccaggaccgtttccggggcctggccggggcgttgccgcggggtcggggaccagcacgagtgctgagtcacgccccgcccgggagcgcctcgggtcagtaactcgggaagacgaccaagcgggagcgggagcgggagcgggagccggagcgagagcgcgcgggcgcggccgacagtgcctgatttgagatggggtcccaggtctcggtggaatcgggagctctgcacgtggtgattgtgggtgggggctttggcgggatcgcagcagccagccagctgcaggccctgaacgtccccttcatgctggtggacatgaaggactccttccaccacaatgtggctgctctccgagcctccgtggagacagggttcgccaaaaagacattcatttcttactcggtgactttcaaggacaacttccggcaggggctagtagtggggatagacctgaagaaccagatggtgctgctgcagggtggcgaggccctgcccttctctcatcttatcctggccacgggcagcactgggcccttcccgggcaagtttaatgaggtttccagccagcaggccgctatccaggcctatgaggacatggtgaggcaggtccagcgctcacggttcatcgtggtggtgggaggaggctcggctggagtggagatggcagcagagattaaaacagaatatcctgagaaagaggtcactctcattcactcccaagtggccctggctgacaaggagctcctgccctccgtccggcaggaagtgaaggagatcctcctccggaagggcgtgcagctgctgctgagtgagcgggtgagcaatctggaggagctgcctctcaatgagtatcgagagtacatcaaagtgcagacggacaaaggcacagaggtggccaccaacctggtgattctctgcaccggcatcaagatcaacagctccgcctaccgcaaagcatttgagagcagactagccagcagtggtgctctgagagtgaacgagcacctccaggtggagggccacagcaacgtctacgccattggtgactgtgccgacgtgaggacgcccaagatggcctatcttgccggcctccacgccaacatcgccgtggccaacatcgtcaactctgtgaagcagcggcctctccaggcctacaagccgggtaagagaggccccatgtgctttgcagttttaatagagtttggggttaaacatggggaagcctttttgggctatcccatacctggccactagaacaaactctccaagctggtgatggaaacatccccttagagctctttaaaaataggctgggcgcggtggc

SEQ ID NO: 373752 - DNA, 3131 bp, Homo sapiens
  misc_feature (1550)..(1550): n is a, c, g, or t
ggccgttcggagaccagccccagcgtgccaggaccgtttccggggcctggccggggcgttgccgcggggtcggggaccagcacgagtgctgagtcacgccccgcccgggagcgcctcgggtcagtaactcgggaagacgaccaagcgggagcgggagcgggagcgggagccggagcgagagcgcgcgggcgcggccgacagtgcctgatttgagatggggtcccaggtctcggtggaatcgggagctctgcacgtggtgattgtgggtgggggctttggcgggatcgcagcagccagccagctgcaggccctgaacgtccccttcatgctggtggacatgaaggactccttccaccacaatgtggctgctctccgagcctccgtggagacagggttcgccaaaaagacattcatttcttactcggtgactttcaaggacaacttccggcaggggctagtagtggggatagacctgaagaaccagatggtgctgctgcagggtggcgaggtccagcgctcacggttcatcgtggtggtgggaggaggctcggctggagtggagatggcagcagagattaaaacagaatatcctgagaaagaggtcactctcattcactcccaagtggccctggctgacaaggagctcctgccctccgtccggcaggaagtgaaggagatcctcctccggaagggcgtgcagctgctgctgagtgagcgggtgagcaatctggaggagctgcctctcaatgagtatcgagagtacatcaaagtgcagacggacaaaggcacagaggtggccaccaacctggtgattctctgcaccggcatcaagatcaacagctccgcctaccgcaaagcatttgagagcagactagccagcagtggtgctctgagagtgaacgagcacctccaggtggagggccacagcaacgtctacgccattggtgactgtgccgacgtgaggacgcccaagatggcctatcttgccggcctccacgccaacatcgccgtggccaacatcgtcaactctgtgaagcagcggcctctccaggcctacaagccgggtgcactgacgttcctcctgtccatggggagaaatgacggtgtgggccaaatcagtggcttctatgtgggccggctcatggttcggctgaccaagagccgggacctgttcgtctctacgagctggaaaaccatgaggcagtctccaccttgatggagaggccaggcgggagaactaccgcagcaggtgggcgtacggactgcttggcgcatggcacccgcctggcaagtgctagaactaatgctattcttctggaataagatgccaatgatgtggtggctagaaatgcaacttgtataaaacaaaaatgggagagagagaggtattaaacaaataccccccttagaggatactttctgggtttggaaggtgtgcttgctgtggtactgggtgagcggctcatgtgtgctggctgcatggtgctggggaggccacagccagcccttcctctgcacctgcctcctctgggatgtgcatgtgtgtgtangtgcttgtggtcatgacgcgtgccatttagagctctcagagcagggcagattgctgggctctggtggccagtgtctgtctgtgagggcaggaaggagagctgcacattgagaacaaaggagggacctgaggtggagagaggcccagcaccccaaatctctgccatcacacggtcggggagcccatacattctgcaacaaccagggacttcacaggagccttgttttcaatttgctaacaggtgcataatccctgtgctccttaagcctcatggccttcctacatttccactttatttgtttgtttgtttatttatttttgagacagtctcgccctgtcacccaggctggagtgcagtggcacgatctcagctcactgcaacctacgccttctgggttcacgtgattctcttgccttagcctcccaagtagctgggactacaggcacgtgccaccatgcctggctaatttttgtattttttaaatagagacggggtttcactgtgttggccaggctggtctcgaacacctgacctcaggtgatccattcgtcttggcctctcgaagtgctgggattccaggcgtgagccactgcggccagcacatttccacttttagatcctactccataccacaggtttcatttaagaagaaagagctagataaatgtgctcttctggttaccccaccctgacagagtgcatttttacacggctagcaggggttgagactgcagcctggcctgccagccattggaggtgtttaaggaagggcagataatgtgactctttgcggggtgccatctgcttacccattagcgagcagagggggtttctgcgggtgacccccagcatatttctaggttacttatgggcagatttgtaagtgacaaaactccagctgatgctgggaatggggagagggcccttgagggactttgtggttttgtgcttctggtttcctggccaaccccagggtcacttgtctggaggcccagctgggcactaatgtctgccaccgactatgttacagtgtataaatgattcctctatttgggagagatcttccaatccagaggagcccctcttggactgcctgggttaaatctgcatagcagaagtggttgatgagttcatctgaagaaattcaggccccacctccccaccctgcccctccctgctcccttttgatggtggcctctgggtactcgggcagagtccttgggacaccagcctctctggggttctcaggccatcccgttggggctgtcgcccaggcctaagtgagtcgtgtgcctctattggaggatggctgttcccctggtggttgcatccaagtatctgtctttctttatggaccacgaagggaagcccaccttcctggaggcaggaccttcggcctaagaaacacaggccctggtgctatctgacctggggtccagcgaggtgggaatcccagtgtgtgagcgacaggccttcttctattgacttacaatattctagaaggacctacgtgtggggacacagttttccaaactgaggaaaatgttgcaataaaagaatatgttgtaagaaaaaaaaaaa

SEQ ID NO: 373753 - DNA, 2467 bp, Homo sapiens
  misc_feature (886)..(886): n is a, c, g, or t
ggccgttcggagaccagccccagcgtgccaggaccgtttccggggcctggccggggcgttgccgcggggtcggggaccagcacgagtgctgagtcacgccccgcccgggagcgcctcgggtcagtaactcgggaagacgaccaagcgggagcgggagcgggagcgggagccggagcgagagcgcgcgggcgcggccgacagtgcctgatttgagatggggtcccaggtctcggtggaatcgggagctctgcacgtggtgattgtgggtgggggctttggcgggatcgcagcagccagccagctgcaggccctgaacgtccccttcatgctggtggacatgaaggactccttccaccacaatgtggctgctctccgagcctccgtggagacagggttcgccaaaaagacattcatttcttactcggtgactttcaaggacaacttccggcaggggctagtagtggggatagacctgaagaaccagatggtgctgctgcagggtggcgaggccctgcccttctctcatcttatcctggccacgggcagcactgggcccttcccgggcaagtttaatgaggtttccagccagcaggccgctatccaggcctatgaggacatggtgaggcaggtccagcgctcacggttcatcgtggtggtgggaggaggctcggctggagtggagatggcagcagagattaaaacagaatatcctgagaaagaggtattaaacaaataccccccttagaggatactttctgggtttggaaggtgtgcttgctgtggtactgggtgagcggctcatgtgtgctggctgcatggtgctggggaggccacagccagcccttcctctgcacctgcctcctctgggatgtgcatgtgtgtgtangtgcttgtggtcatgacgcgtgccatttagagctctcagagcagggcagattgctgggctctggtggccagtgtctgtctgtgagggcaggaaggagagctgcacattgagaacaaaggagggacctgaggtggagagaggcccagcaccccaaatctctgccatcacacggtcggggagcccatacattctgcaacaaccagggacttcacaggagccttgttttcaatttgctaacaggtgcataatccctgtgctccttaagcctcatggccttcctacatttccactttatttgtttgtttgtttatttatttttgagacagtctcgccctgtcacccaggctggagtgcagtggcacgatctcagctcactgcaacctacgccttctgggttcacgtgattctcttgccttagcctcccaagtagctgggactacaggcacgtgccaccatgcctggctaatttttgtattttttaaatagagacggggtttcactgtgttggccaggctggtctcgaacacctgacctcaggtgatccattcgtcttggcctctcgaagtgctgggattccaggcgtgagccactgcggccagcacatttccacttttagatcctactccataccacaggtttcatttaagaagaaagagctagataaatgtgctcttctggttaccccaccctgacagagtgcatttttacacggctagcaggggttgagactgcagcctggcctgccagccattggaggtgtttaaggaagggcagataatgtgactctttgcggggtgccatctgcttacccattagcgagcagagggggtttctgcgggtgacccccagcatatttctaggttacttatgggcagatttgtaagtgacaaaactccagctgatgctgggaatggggagagggcccttgagggactttgtggttttgtgcttctggtttcctggccaaccccagggtcacttgtctggaggcccagctgggcactaatgtctgccaccgactatgttacagtgtataaatgattcctctatttgggagagatcttccaatccagaggagcccctcttggactgcctgggttaaatctgcatagcagaagtggttgatgagttcatctgaagaaattcaggccccacctccccaccctgcccctccctgctcccttttgatggtggcctctgggtactcgggcagagtccttgggacaccagcctctctggggttctcaggccatcccgttggggctgtcgcccaggcctaagtgagtcgtgtgcctctattggaggatggctgttcccctggtggttgcatccaagtatctgtctttctttatggaccacgaagggaagcccaccttcctggaggcaggaccttcggcctaagaaacacaggccctggtgctatctgacctggggtccagcgaggtgggaatcccagtgtgtgagcgacaggccttcttctattgacttacaatattctagaaggacctacgtgtggggacacagttttccaaactgaggaaaatgttgcaataaaagaatatgttgtaagaaaaaaaaaaa

SEQ ID NO: 373754 - DNA, 6589 bp, Homo sapiens
ctggtctcgaactcgttgcctcaagtgattcgccttccttggtctcccaaagtgctgggtttacaagtgtgagctaccatgcccggccggatgtttttcaatgaaagttttatggctttcacttttttaaaggcttctacttaaagaatctgtcttagtgaagccttcctttattatgccatttaaaaactacagaaccacccaccacccctttctggtgccttatttttgtatacaactcttatcaccaggtaatatagaatgcattttaaactttttgtttattttctgaattccccagctagaatgtgccatgagagcagatacatttctctctcttcttcattgttattttttcagttcctggtaacagctcagattgcatgtttaataaatacttgccttacgaatgaatgaattcatttctgtcttttcccatctccttgtgtagtgcccggaaggcagtggatgaggaagaggaagcagttgaagaacgtcgcaatatgcgaactatctgggtgactggcagaaaaggtttaactgaaagggaagcagcagcccttatagtggaagaagccagaatgattctgcagcaggacttagttgaaatgggagtgcaatggaatccatgtgccctgttacattctagtacatgctcattgactcatagtgagtccgaagtaaaggaacacacatttatatcccaaactaagagttcttataaaaaattaacatcaaagaacaaaagtaacacaatatttagtgattcttatattaagcattcaccaaatatagtgcaagacttaaataaaagtagagagcatacaagttcctttaattgtaatttccagaatgggaatcaagaacatcagacatgttccattttcagagcaagaaaacgggcctctttagatataaataaagagaagccaggagcctctcagaatgaggggaaaacaagtgataagaaagttgttcagactttttcacagaaaacaaaaaaggcacctttgaatttcaattcagaaaagatgagcagaagttttcgatcttggaaacgtagaaagcatctaaagcgatctagggacagcagccccctgaaagactctggagcgtgtagaatccatttacaaggacagactctgtctaatcctagtctttgtgaagacccgtttaccttagatgagaagaaaacggaatttagaaattcagggccatttgctaaaaatgtatctttgagtggtaaggaaaaagataataaaacatcattcccattacaaataaagcaaaattgttcatggaacataacactaactaatgataattttgtggagcatattgtcacaggatctcagagtaaaaatgtgacttgtcaggccactagtgtggttagtgaaaagggcagaggagtagctgttgaggcagaaaaaataaatgaagtgctgatacaaaatggttcaaaaaaccagaatgtttatatgaaacaccatgacatccatccaattaaccagtacctgcgaaagcaatctcatgaacagacaagcactattaccaaacagaaaaatataatagagagacaaatgccctgtgaagcagtcagtagttacataaatagagactcaaatgttactatcaattgtgaaaggataaagcttaatacagaggaaaataaaccaagtcattttcaggcattaggagatgatataagcagaactgtgatacccagtgaagtacttccatcagctggagcatttagcaaatcagaaggccagcatgagaattttctaaatatttctagactacaagaaaaaacaggtacttatacaacaaacaaaactaaaaataatcatgtttctgacttaggtttagtcctctgtgattttgaagatagtttctatctggatactcagtcagagaaaataatacaacagatggcaactgaaaatgccaaactaggagcaaaggacaccaacctggcagcagggataatgcagaagagcttagtccaacagaactcaatgaactcttttcagaaggagtgtcacattccttttcctgctgaacagcaccctctaggagcgactaagatagatcatttggaccttaagactgtaggtactatgaaacaaagcagtgattcacatggggttgatatcctgactccagaaagcccgattttccattctccaatactattggaggaaaatggtctttttttaaaaaagaatgaagtttctgttactgattcacaattaaatagttttcttcaaggttatcaaacacaagaaactgtgaaaccagttatacttctgattcctcaaaagagaactcccactggtgtagaaggagaatgtcttccagttcctgaaacaagtttgaatatgagtgatagtttactatttgatagcttcagtgatgactatctagtaaaagaacaattacctgatatgcaaatgaaagaaccccttccttcagaagtaacatcaaaccattttagtgattctctgtgtctacaagaagacctaattaaaaaatcaaatgtaaatgagaatcaagatacccaccagcagttgacttgttccaatgatgaatctattatattttcagaaatggattctgttcagatggttgaagctttggacaatgtggatatatttcctgtccaagagaagaatcatactgtagtatctcctagagcattagaactaagtgatccagtacttgatgagcaccaccaaggtgatcaagatggaggagatcaagatgaaagggctgaaaaatcaaaattaactgggaccaggcaaaatcattcattcatatggtcaggggcatcatttgatctaagtccaggactgcaaaggattttagataaagtatccagtcctctagaaaatgaaaagctaaaatcaatgactataaacttttccagtttgaatagaaaaaatacagagttaaatgaagaacaagaagttatttcaaacttggagacaaaacaagtgcagggaatttcattttcttctaataatgaagtaaaaagcaagattgagatgctagaaaacaatgccaatcatgatgaaacctcatccctcttacctcgtaaagaaagtaatatagttgatgataatggtctcattcctcctacacccattccaacatctgcttctaagctgacatttccagggattcttgaaacacctgtaaacccttggaaaactaataatgttttacaacctggtgaaagttatttatttggctcaccttcagatattaaaaaccacgatttaagtccagggagtagaaatgggttcaaagacaacagccctattagtgacacaagcttttcacttcagttatcacaggatggattacagttaactccagcctcaagcagttcagaaagtttgtccataattgatgtagcaagtgaccaaaatcttttccaaacattcattaaggagtggcggtgcaaaaagcgattttccatctcactggcttgtgaaaagattagaagtttgacatcttctaaaactgctactattggcagtaggtttaagcaagctagctcacctcaggaaattcctattagagatgatggatttcccattaaaggttgtgatgacaccttggtggttggactggcagtatgctggggtggaagggatgcctattatttttcactgcagaaggaacaaaagcattctgaaattagtgccagtttggttccaccttctttagatccaagcctgactttgaaagacaggatgtggtaccttcaatcttgcttgcgaaaggaatctgataaagaatgttctgttgtcatctatgacttcatccagagctataaaattcttcttctttcttgtggcatctccttggagcaaagttatgaagatcctaaggtggcatgctggttactagatccagattctcaggagccgactcttcatagcatagttaccagttttcttcctcatgagcttccactcctagaagggatggagaccagccaagggattcaaagcctggggctaaatgctggcagtgagcattctgggcgatacagagcatctgtggagtccattctcatcttcaactctatgaatcagctcaactctttgttgcagaaggaaaaccttcaagatgttttccgtaaggtggaaatgccctctcagtactgcttggccttgctagaactaaatggaattggctttagtactgcagaatgtgaaagtcagaaacatataatgcaagccaagctggatgcaattgagacccaggcctatcaactagctggccacagtttttctttcaccagttcagatgacatcgctgaggttttatttttggaattgaagttgcccccaaatagagagatgaaaaaccaaggcagcaagaaaactctgggttctaccagaagagggattgacaatggacgcaagctaaggctgggaagacagttcagcactagtaaggacgttttaaataaattaaaggcattacatcctttaccaggcttgatattagaatggagaagaatcactaatgctattaccaaagtggtctttccccttcagcgggaaaagtgtcttaatccttttcttggaatggaaagaatctatcctgtatcacagtcgcacactgctacaggacgaataacctttacagaaccaaatattcagaatgtgccaagagattttgaaatcaaaatgccaacactagtaggagaaagcccaccttctcaagctgtaggcaaaggcctacttcccatgggcagaggaaaatataagaagggtttcagcgtgaatcctagatgccaggcacagatggaggagagagctgtagacagaggaatgccattttcaattagcatgcgacatgcctttgtgcctttcccaggtggttcaatactggctgctgactactctcagcttgaactgaggatcttggctcatttatcccatgatcgtcgtctcattcaagtgttaaacactggagctgatgttttcaggagcattgcagcagagtggaagatgattgagccagagtctgttggggatgatctgaggcagcaggcaaaacagatttgctatgggatcatttatggaatgggagctaaatctttgggagagcagatgggcattaaagaaaatgatgctgcatgctatattgactccttcaaatccagatacacagggattaatcaattcatgacagagacagtgaagaattgtaaaagagacggatttgttcagaccattttgggaaggcgtagatatttgccaggaatcaaagacaacaacccttatcgtaaagctcacgctgagcgtcaagctatcaacacaatagtccaaggatcagcagctgatattgtcaaaatagccacagttaacattcagaagcaattagagaccttccactcaaccttcaaatcccatggtcatcgagagggtatgctccaaagtgaccgaacaggattgtcacgaaagagaaaactgcaagggatgttctgcccaatcagaggaggcttcttcatccttcaactccatgatgaactcctatatgaagtggtagaagaagatgttgttcaggtagctcagattgtcaagaatgaaatggaaagtgctgtaaaactgtctgtgaaattgaaagtgaaagtgaaaataggcgccagctggggagagctaaaggactttgatgtgtaactgtgctgttgatgaagtcctcccagggaagcctgtgcagatgcagtcacctggaaagaacagagattaccctttcacctacctcagcaaaacaaactttcaagtcttgatagacttagcctagtaattttatagtgagagtttcaaactatatatcagtgtctatagcatcaaaaacttctgggggcgtgggggaagtagaataccaagtataatagttacattcactttcaaagagcatctatgaatttgccttttgtaacttactgtggctttaaacatattcagaacagatgcttgaaatatgcacttagcactttggttccacatctgtctgggtaaaccatgaagaaaatgaagctgctgcctcaatcgacccagacagcagccataggcagataaagatttggtttcaccctggtggtggtaggcatcgtgtgtgactttttttcctctaatatcaattttacagtacggaaatagtattttaaaatagtattggctaataaattatgaattctataaagtagtaagacttggtatggttggagtgtaggaatgaatattcatgaaatgtttcttattgcttttccttccctaattcatacaatgaatgtatttggaatacttacatattataaaataaactatacctcttcaagaggtatcctgttctgtaagatcagatgtttttattgcaggtcaatataatactgccagagacagaaaatacccccttatcagtcccttagtgcctctttctgtttgtggcatggtgagaaaacccatgctgaaaagattgtactttgtgatcccaatcagagggatggagctaatctttttgctgttgaaataaaatgaatttatgagaaactttaaaaaaaaaa

SEQ ID NO: 373755 - DNA, 2294 bp, Homo sapiens
taattaatctgatagtgtctaattagagtatggatagactacctgacatataaattttgattgccatcatttattaaatatggtaattccaaattatccacagaaacattatttcaatccatgttgaactgtagagattgttttctgaaataacttaaaatattttctgaatgataatccttgcaagtttcattcttgactaaagagacattaatttcttgcaggttttatttttggaattgaagttgcccccaaatagagagatgaaaaaccaaggcagcaagaaaactctgggttctaccagaagagggattgacaatggacgcaagctaaggctgggaagacagttcagcactagtaaggacgttttaaataaattaaaggcattacatcctttaccaggcttgatattagaatggagaagaatcactaatgctattaccaaagtggtctttccccttcagcgggaaaagtgtcttaatccttttcttggaatggaaagaatctatcctgtatcacagtcgcacactgctacaggacgaataacctttacagaaccaaatattcagaatgtgccaagagattttgaaatcaaaatgccaacactagtaggagaaagcccaccttctcaagctgtaggcaaaggcctacttcccatgggcagaggaaaatataagaagggtttcagcgtgaatcctagatgccaggcacagatggaggagagagctgtagacagaggaatgccattttcaattagcatgcgacatgcctttgtgcctttcccagatttgctatgggatcatttatggaatgggagctaaatctttgggagagcagatgggcattaaagaaaatgatgctgcatgctatattgactccttcaaatccagatacacagggattaatcaattcatgacagagacagtgaagaattgtaaaagagacggatttgttcagaccattttgggaaggcgtagatatttgccaggaatcaaagacaacaacccttatcgtaaagctcacgctgagcgtcaagctatcaacacaatagtccaaggatcagcagctgatattgtcaaaatagccacagttaacattcagaagcaattagagaccttccactcaaccttcaaatcccatggtcatcgagagggtatgctccaaagtgaccgaacaggattgtcacgaaagagaaaactgcaagggatgttctgcccaatcagaggaggcttcttcatccttcaactccatgatgaactcctatatgaagtggtagaagaagatgttgttcaggtagctcagattgtcaagaatgaaatggaaagtgctgtaaaactgtctgtgaaattgaaagtgaaagtgaaaataggcgccagctggggagagctaaaggactttgatgtgtaactgtgctgttgatgaagtcctcccagggaagcctgtgcagatgcagtcacctggaaagaacagagattaccctttcacctacctcagcaaaacaaactttcaagtcttgatagacttagcctagtaattttatagtgagagtttcaaactatatatcagtgtctatagcatcaaaaacttctgggggcgtgggggaagtagaataccaagtataatagttacattcactttcaaagagcatctatgaatttgccttttgtaacttactgtggctttaaacatattcagaacagatgcttgaaatatgcacttagcactttggttccacatctgtctgggtaaaccatgaagaaaatgaagctgctgcctcaatcgacccagacagcagccataggcagataaagatttggtttcaccctggtggtggtaggcatcgtgtgtgactttttttcctctaatatcaattttacagtacggaaatagtattttaaaatagtattggctaataaattatgaattctataaagtagtaagacttggtatggttggagtgtaggaatgaatattcatgaaatgtttcttattgcttttccttccctaattcatacaatgaatgtatttggaatacttacatattataaaataaactatacctcttcaagaggtatcctgttctgtaagatcagatgtttttattgcaggtcaatataatactgccagagacagaaaatacccccttatcagtcccttagtgcctctttctgtttgtggcatggtgagaaaacccatgctgaaaagattgtactttgtgatcccaatcagagggatggagctaatctttttgctgttgaaataaaatgaatttatgagaaactttaaaaaaaaaa

SEQ ID NO: 373756 - DNA, 306 bp, Homo sapiens
caacaaatattctatgaatgttctagggatgattacagtattttccaaccgtctgggctggcacaacatggaactactactttcccaatttcagaagcgtcttacgtttggcatccagagggagctgtgtgacctggttcgggtatccttactaaatgctcagagagccagggttctctatgcttctggctttcatactgtggcagaccttgctagagcaaatattgtggaggtggaggtgattctgaaaaatgctgtgcctttcaaaaggtaagaaaatacctttacctacatgggcttatgaaa

SEQ ID NO: 373757 - DNA, 9062 bp, Homo sapiens
  misc_feature (291)..(291): n is a, c, g, or t
  misc_feature (298)..(298): n is a, c, g, or t
  misc_feature (1512)..(1512): n is a, c, g, or t
  misc_feature (1842)..(1842): n is a, c, g, or t
atgaatggtcaccgttttacgttcagaactcgttcgcttctacctttacaaaagggacaacacagatgcattactaagctcttggctcataacgatccctggggtatattcagagccccttcctcgcggcgttcatatagtgtctcaggggtctgtcagccagcaatccccaattcctcattacatattcctcacaatgcatgctggctaaaatggaaattgtgttcagaaatagccctgccctaccatcatatactaggagaaaggaggaaattatgctctattagaaantttgaanactggcgggaagatgtccgcagctgttgccaggccagggttctcccgagagggaggacgctgggactgtggcttgccctgatcggccgagaagagtttgccatgaatcttctgcgtcggagtgggaaacggcggcgttcagaatcaggctcagattcgttctcgggaagcggcggtgacagcagtgccagcccccagttcctctccgggtccgtgctgagcccgccgcccggccttggtcgctgcctgaaggccgcagctgcaggagaatgcaagcctacagttcctgactacgaaatagacaagctactattggcaaactggggacttcctaaagcagttctggaaaaataccacagttttggtgtaaaaaagatgtttgaatggcaggcagagtgccttttgcttggacaagtcctggaaggaaagaatttagtttattcagctcctacaagtgctgggaagactcttgtggcagaattacttattttgaagcgggttttggaaatgcggaagaaagctttgtttattcttccctttgtttctgtggctaaagagaagaaatactacctccagagtctgtttcaggaagtaggaataaaagtagacggttatatgggcagcacctctccatcaaggcatttctcttcattggatattgcagtctgcacaattgagagagccaatggtctgatcaatcgcctcatagaggaaaataagatggatctgttaggaatggtggttgtggatgaattacatatgctgggagactctcaccgagggtatctgctggaacttttgctgaccaagatttgctatattactcggaaatcagcatcttgtcaggcagatctagccagttctctgtctaatgctgtgcaaatcgttggcatgagtgctacccttcctaatttggagcttgtggcttcctggttgaatgctgaactctaccataccgactttcgccctgtaccgcttttggagtcagtaaaagttggaaattccatatatgactcttcaatgaaacttgtgagggaatttgagcccatgctacaagtgaagggagatgaggaccatgttgttagtttatgttatgagacgatttgtgataaccattcagtattacttttttgtccatcaaagaaatggtgtgagaagctggcagatatcattgctcgagagttttataatctacatcatcaagctgagggtganggattggtgaaaccctctgaatgcccaccagtaattctggaacaaaaagaactcctggaagtgatggatcagttaagacgtttgccttcaggactggactctgtattacagaaaactgtaccatggggagtagcatttcatcatgcaggtcttacttttgaggagagggatatcattgaaggagcctttcgtcaaggtctcattcgggtcttggcggcaacttctactctttcttctggggtgaatttacctgcacgtcgtgtgattattcgaacccctatttttggtggtcgacctctagatattcttacttataagcagatggttggncgtgctggcaggaaaggagtggacacagtagggagtatcttaatttgtaagaactctgagaaatcaaaaggcatagctctccttcagggttctctaaagcctgttcgcagctgtctgcaaagacgagaaggagaagaagtaactggcagcatgatacgagctattctggagataatagttggtggagtggcaagtacatcacaagatatgcatacttatgctgcctgcacatttttggctgcaagtatgaaagaagggaagcaaggaattcagagaaatcaagagtctgttcagcttggagtgattgaggcctgtgtgatgtggctactagaaaatgaattcatccagagtacagaagccagtgatggaacagaaggaaaggtgtatcatccaacacatcttggttcggccactctttcttcttcactttctccagctgatactttagatatttttgctgacctgcaaagagcaatgaagggctttgttttagagaatgatcttcatattctctatctggttacacctatgtttgaggattggactactattgattggtatcgatttttctgtttatgggagaagttgccaacttcaatgaaaagggtggcagagctagtgggagttgaagaggggttcttggcccgttgtgtgaaaggaaaagtagtagccagaactgagagacagcatcgacaaatggccatccataaaaggtttttcaccagtcttgtgctattagatttaatcagtgaagttcccttaagggaaataaatcagaaatatggatgcaatcgtgggcagattcaatctttgcaacagtcagctgctgtttatgcagggatgattacagtattttccaaccgtctgggctggcacaacatggaactactactttcccaatttcagaagcgtcttacgtttggcatccagagggagctgtgtgacctggttcgggtatccttactaaatgctcagagagccagggttctctatgcttctggctttcatactgtggcagaccttgctagagcaaatattgtggaggtggaggtgattctgaaaaatgctgtgcctttcaaaagtgcccggaaggcagtggatgaggaagaggaagcagttgaagaacgtcgcaatatgcgaactatctgggtgactggcagaaaaggtttaactgaaagggaagcagcagcccttatagtggaagaagccagaatgattctgcagcaggacttagttgaaatgggagtgcaatggaatccatgtgccctgttacattctagtacatgctcattgactcatagtgagtccgaagtaaaggaacacacatttatatcccaaactaagagttcttataaaaaattaacatcaaagaacaaaagtaacacaatatttagtgattcttatattaagcattcaccaaatatagtgcaagacttaaataaaagtagagagcatacaagttcctttaattgtaatttccagaatgggaatcaagaacatcagacatgttccattttcagagcaagaaaacgggcctctttagatataaataaagagaagccaggagcctctcagaatgaggggaaaacaagtgataagaaagttgttcagactttttcacagaaaacaaaaaaggcacctttgaatttcaattcagaaaagatgagcagaagttttcgatcttggaaacgtagaaagcatctaaagcgatctagggacagcagccccctgaaagactctggagcgtgtagaatccatttacaaggacagactctgtctaatcctagtctttgtgaagacccgtttaccttagatgagaagaaaacggaatttagaaattcagggccatttgctaaaaatgtatctttgagtggtaaggaaaaagataataaaacatcattcccattacaaataaagcaaaattgttcatggaacataacactaactaatgataattttgtggagcatattgtcacaggatctcagagtaaaaatgtgacttgtcaggccactagtgtggttagtgaaaagggcagaggagtagctgttgaggcagaaaaaataaatgaagtgctgatacaaaatggttcaaaaaaccagaatgtttatatgaaacaccatgacatccatccaattaaccagtacctgcgaaagcaatctcatgaacagacaagcactattaccaaacagaaaaatataatagagagacaaatgccctgtgaagcagtcagtagttacataaatagagactcaaatgttactatcaattgtgaaaggataaagcttaatacagaggaaaataaaccaagtcattttcaggcattaggagatgatataagcagaactgtgatacccagtgaagtacttccatcagctggagcatttagcaaatcagaaggccagcatgagaattttctaaatatttctagactacaagaaaaaacaggtacttatacaacaaacaaaactaaaaataatcatgtttctgacttaggtttagtcctctgtgattttgaagatagtttctatctggatactcagtcagagaaaataatacaacagatggcaactgaaaatgccaaactaggagcaaaggacaccaacctggcagcagggataatgcagaagagcttagtccaacagaactcaatgaactcttttcagaaggagtgtcacattccttttcctgctgaacagcaccctctaggagcgactaagatagatcatttggaccttaagactgtaggtactatgaaacaaagcagtgattcacatggggttgatatcctgactccagaaagcccgattttccattctccaatactattggaggaaaatggtctttttttaaaaaagaatgaagtttctgttactgattcacaattaaatagttttcttcaaggttatcaaacacaagaaactgtgaaaccagttatacttctgattcctcaaaagagaactcccactggtgtagaaggagaatgtcttccagttcctgaaacaagtttgaatatgagtgatagtttactatttgatagcttcagtgatgactatctagtaaaagaacaattacctgatatgcaaatgaaagaaccccttccttcagaagtaacatcaaaccattttagtgattctctgtgtctacaagaagacctaattaaaaaatcaaatgtaaatgagaatcaagatacccaccagcagttgacttgttccaatgatgaatctattatattttcagaaatggattctgttcagatggttgaagctttggacaatgtggatatatttcctgtccaagagaagaatcatactgtagtatctcctagagcattagaactaagtgatccagtacttgatgagcaccaccaaggtgatcaagatggaggagatcaagatgaaagggctgaaaaatcaaaattaactgggaccaggcaaaatcattcattcatatggtcaggggcatcatttgatctaagtccaggactgcaaaggattttagataaagtatccagtcctctagaaaatgaaaagctaaaatcaatgactataaacttttccagtttgaatagaaaaaatacagagttaaatgaagaacaagaagttatttcaaacttggagacaaaacaagtgcagggaatttcattttcttctaataatgaagtaaaaagcaagattgagatgctagaaaacaatgccaatcatgatgaaacctcatccctcttacctcgtaaagaaagtaatatagttgatgataatggtctcattcctcctacacccattccaacatctgcttctaagctgacatttccagggattcttgaaacacctgtaaacccttggaaaactaataatgttttacaacctggtgaaagttatttatttggctcaccttcagatattaaaaaccacgatttaagtccagggagtagaaatgggttcaaagacaacagccctattagtgacacaagcttttcacttcagttatcacaggatggattacagttaactccagcctcaagcagttcagaaagtttgtccataattgatgtagcaagtgaccaaaatcttttccaaacattcattaaggagtggcggtgcaaaaagcgattttccatctcactggcttgtgaaaagattagaagtttgacatcttctaaaactgctactattggcagtaggtttaagcaagctagctcacctcaggaaattcctattagagatgatggatttcccattaaaggttgtgatgacaccttggtggttggactggcagtatgctggggtggaagggatgcctattatttttcactgcagaaggaacaaaagcattctgaaattagtgccagtttggttccaccttctttagatccaagcctgactttgaaagacaggatgtggtaccttcaatcttgcttgcgaaaggaatctgataaagaatgttctgttgtcatctatgacttcatccagagctataaaattcttcttctttcttgtggcatctccttggagcaaagttatgaagatcctaaggtggcatgctggttactagatccagattctcaggagccgactcttcatagcatagttaccagttttcttcctcatgagcttccactcctagaagggatggagaccagccaagggattcaaagcctggggctaaatgctggcagtgagcattctgggcgatacagagcatctgtggagtccattctcatcttcaactctatgaatcagctcaactctttgttgcagaaggaaaaccttcaagatgttttccgtaaggtggaaatgccctctcagtactgcttggccttgctagaactaaatggaattggctttagtactgcagaatgtgaaagtcagaaacatataatgcaagccaagctggatgcaattgagacccaggcctatcaactagctggccacagtttttctttcaccagttcagatgacatcgctgaggttttatttttggaattgaagttgcccccaaatagagagatgaaaaaccaaggcagcaagaaaactctgggttctaccagaagagggattgacaatggacgcaagctaaggctgggaagacagttcagcactagtaaggacgttttaaataaattaaaggcattacatcctttaccaggcttgatattagaatggagaagaatcactaatgctattaccaaagtggtctttccccttcagcgggaaaagtgtcttaatccttttcttggaatggaaagaatctatcctgtatcacagtcgcacactgctacaggacgaataacctttacagaaccaaatattcagaatgtgccaagagattttgaaatcaaaatgccaacactagtaggagaaagcccaccttctcaagctgtaggcaaaggcctacttcccatgggcagaggaaaatataagaagggtttcagcgtgaatcctagatgccaggcacagatggaggagagagctgtagacagaggaatgccattttcaattagcatgcgacatgcctttgtgcctttcccaggtggttcaatactggctgctgactactctcagcttgaactgaggatcttggctcatttatcccatgatcgtcgtctcattcaagtgttaaacactggagctgatgttttcaggagcattgcagcagagtggaagatgattgagccagagtctgttggggatgatctgaggcagcaggcaaaacagatttgctatgggatcatttatggaatgggagctaaatctttgggagagcagatgggcattaaagaaaatgatgctgcatgctatattgactccttcaaatccagatacacagggattaatcaattcatgacagagacagtgaagaattgtaaaagagacggatttgttcagaccattttgggaaggcgtagatatttgccaggaatcaaagacaacaacccttatcgtaaagctcacgctgagcgtcaagctatcaacacaatagtccaaggatcagcagctgatattgtcaaaatagccacagttaacattcagaagcaattagagaccttccactcaaccttcaaatcccatggtcatcgagagggtatgctccaaagtgaccgaacaggattgtcacgaaagagaaaactgcaagggatgttctgcccaatcagaggaggcttcttcatccttcaactccatgatgaactcctatatgaagtggtagaagaagatgttgttcaggtagctcagattgtcaagaatgaaatggaaagtgctgtaaaactgtctgtgaaattgaaagtgaaagtgaaaataggcgccagctggggagagctaaaggactttgatgtgtaactgtgctgttgatgaagtcctcccagggaagcctgtgcagatgcagtcacctggaaagaacagagattaccctttcacctacctcagcaaaacaaactttcaagtcttgatagacttagcctagtaattttatagtgagagtttcaaactatatatcagtgtctatagcatcaaaaacttctgggggcgtgggggaagtagaataccaagtataatagttacattcactttcaaagagcatctatgaatttgccttttgtaacttactgtggctttaaacatattcagaacagatgcttgaaatatgcacttagcactttggttccacatctgtctgggtaaaccatgaagaaaatgaagctgctgcctcaatcgacccagacagcagccataggcagataaagatttggtttcaccctggtggtggtaggcatcgtgtgtgactttttttcctctaatatcaattttacagtacggaaatagtattttaaaatagtattggctaataaattatgaattctataaagtagtaagacttggtatggttggagtgtaggaatgaatattcatgaaatgtttcttattgcttttccttccctaattcatacaatgaatgtatttggaatacttacatattataaaataaactatacctcttcaagaggtatcctgttctgtaagatcagatgtttttattgcaggtcaatataatactgccagagacagaaaatacccccttatcagtcccttagtgcctctttctgtttgtggcatggtgagaaaacccatgctgaaaagattgtactttgtgatcccaatcagagggatggagctaatctttttgctgttgaaataaaatgaatttatgagaaactttaaaaaaaaaa

SEQ ID NO: 373758 - DNA, 2013 bp, Homo sapiens
  misc_feature (26)..(26): n is a, c, g, or t
catgagctgttctagaggatccctgntgtctgacaatttgttgcagaaggaaaaccttcaagatgttttccgtaaggtggaaatgccctctcagtactgcttggccttgctagaactaaatggaattggctttagtactgcagaatgtgaaagtcagaaacatataatgcaagccaagctggatgcaattgagacccaggcctatcaactagctggccacagtttttctttcaccagttcagatgacatcgctgaggacgaataacctttacagaaccaaatattcagaatgtgccaagagattttgaaatcaaaatgccaacactagtaggagaaagcccaccttctcaagctgtaggcaaaggcctacttcccatgggcagaggaaaatataagaagggtttcagcgtgaatcctagatgccaggcacagatggaggagagagctgtagacagaggaatgccattttcaattagcatgcgacatgcctttgtgcctttcccagatttgctatgggatcatttatggaatgggagctaaatctttgggagagcagatgggcattaaagaaaatgatgctgcatgctatattgactccttcaaatccagatacacagggattaatcaattcatgacagagacagtgaagaattgtaaaagagacggatttgttcagaccattttgggaaggcgtagatatttgccaggaatcaaagacaacaacccttatcgtaaagctcacgctgagcgtcaagctatcaacacaatagtccaaggatcagcagctgatattgtcaaaatagccacagttaacattcagaagcaattagagaccttccactcaaccttcaaatcccatggtcatcgagagggtatgctccaaagtgaccgaacaggattgtcacgaaagagaaaactgcaagggatgttctgcccaatcagaggaggcttcttcatccttcaactccatgatgaactcctatatgaagtggtagaagaagatgttgttcaggtagctcagattgtcaagaatgaaatggaaagtgctgtaaaactgtctgtgaaattgaaagtgaaagtgaaaataggcgccagctggggagagctaaaggactttgatgtgtaactgtgctgttgatgaagtcctcccagggaagcctgtgcagatgcagtcacctggaaagaacagagattaccctttcacctacctcagcaaaacaaactttcaagtcttgatagacttagcctagtaattttatagtgagagtttcaaactatatatcagtgtctatagcatcaaaaacttctgggggcgtgggggaagtagaataccaagtataatagttacattcactttcaaagagcatctatgaatttgccttttgtaacttactgtggctttaaacatattcagaacagatgcttgaaatatgcacttagcactttggttccacatctgtctgggtaaaccatgaagaaaatgaagctgctgcctcaatcgacccagacagcagccataggcagataaagatttggtttcaccctggtggtggtaggcatcgtgtgtgactttttttcctctaatatcaattttacagtacggaaatagtattttaaaatagtattggctaataaattatgaattctataaagtagtaagacttggtatggttggagtgtaggaatgaatattcatgaaatgtttcttattgcttttccttccctaattcatacaatgaatgtatttggaatacttacatattataaaataaactatacctcttcaagaggtatcctgttctgtaagatcagatgtttttattgcaggtcaatataatactgccagagacagaaaatacccccttatcagtcccttagtgcctctttctgtttgtggcatggtgagaaaacccatgctgaaaagattgtactttgtgatcccaatcagagggatggagctaatctttttgctgttgaaataaaatgaatttatgagaaactttaaaaaaaaaa

SEQ ID NO: 373759 - DNA, 7692 bp, Homo sapiens
  misc_feature (291)..(291): n is a, c, g, or t
  misc_feature (298)..(298): n is a, c, g, or t
  misc_feature (1512)..(1512): n is a, c, g, or t
  misc_feature (1842)..(1842): n is a, c, g, or t
atgaatggtcaccgttttacgttcagaactcgttcgcttctacctttacaaaagggacaacacagatgcattactaagctcttggctcataacgatccctggggtatattcagagccccttcctcgcggcgttcatatagtgtctcaggggtctgtcagccagcaatccccaattcctcattacatattcctcacaatgcatgctggctaaaatggaaattgtgttcagaaatagccctgccctaccatcatatactaggagaaaggaggaaattatgctctattagaaantttgaanactggcgggaagatgtccgcagctgttgccaggccagggttctcccgagagggaggacgctgggactgtggcttgccctgatcggccgagaagagtttgccatgaatcttctgcgtcggagtgggaaacggcggcgttcagaatcaggctcagattcgttctcgggaagcggcggtgacagcagtgccagcccccagttcctctccgggtccgtgctgagcccgccgcccggccttggtcgctgcctgaaggccgcagctgcaggagaatgcaagcctacagttcctgactacgaaatagacaagctactattggcaaactggggacttcctaaagcagttctggaaaaataccacagttttggtgtaaaaaagatgtttgaatggcaggcagagtgccttttgcttggacaagtcctggaaggaaagaatttagtttattcagctcctacaagtgctgggaagactcttgtggcagaattacttattttgaagcgggttttggaaatgcggaagaaagctttgtttattcttccctttgtttctgtggctaaagagaagaaatactacctccagagtctgtttcaggaagtaggaataaaagtagacggttatatgggcagcacctctccatcaaggcatttctcttcattggatattgcagtctgcacaattgagagagccaatggtctgatcaatcgcctcatagaggaaaataagatggatctgttaggaatggtggttgtggatgaattacatatgctgggagactctcaccgagggtatctgctggaacttttgctgaccaagatttgctatattactcggaaatcagcatcttgtcaggcagatctagccagttctctgtctaatgctgtgcaaatcgttggcatgagtgctacccttcctaatttggagcttgtggcttcctggttgaatgctgaactctaccataccgactttcgccctgtaccgcttttggagtcagtaaaagttggaaattccatatatgactcttcaatgaaacttgtgagggaatttgagcccatgctacaagtgaagggagatgaggaccatgttgttagtttatgttatgagacgatttgtgataaccattcagtattacttttttgtccatcaaagaaatggtgtgagaagctggcagatatcattgctcgagagttttataatctacatcatcaagctgagggtganggattggtgaaaccctctgaatgcccaccagtaattctggaacaaaaagaactcctggaagtgatggatcagttaagacgtttgccttcaggactggactctgtattacagaaaactgtaccatggggagtagcatttcatcatgcaggtcttacttttgaggagagggatatcattgaaggagcctttcgtcaaggtctcattcgggtcttggcggcaacttctactctttcttctggggtgaatttacctgcacgtcgtgtgattattcgaacccctatttttggtggtcgacctctagatattcttacttataagcagatggttggncgtgctggcaggaaaggagtggacacagtagggagtatcttaatttgtaagaactctgagaaatcaaaaggcatagctctccttcagggttctctaaagcctgttcgcagctgtctgcaaagacgagaaggagaagaagtaactggcagcatgatacgagctattctggagataatagttggtggagtggcaagtacatcacaagatatgcatacttatgctgcctgcacatttttggctgcaagtatgaaagaagggaagcaaggaattcagagaaatcaagagtctgttcagcttggagtgattgaggcctgtgtgatgtggctactagaaaatgaattcatccagagtacagaagccagtgatggaacagaaggaaaggtgtatcatccaacacatcttggttcggccactctttcttcttcactttctccagctgatactttagatatttttgctgacctgcaaagagcaatgaagggctttgttttagagaatgatcttcatattctctatctggttacacctatgtttgaggattggactactattgattggtatcgatttttctgtttatgggagaagttgccaacttcaatgaaaagggtggcagagctagtgggagttgaagaggggttcttggcccgttgtgtgaaaggaaaagtagtagccagaactgagagacagcatcgacaaatggccatccataaaaggtttttcaccagtcttgtgctattagatttaatcagtgaagttcccttaagggaaataaatcagaaatatggatgcaatcgtgggcagattcaatctttgcaacagtcagctgctgtttatgcagggatgattacagtattttccaaccgtctgggctggcacaacatggaactactactttcccaatttcagaagcgtcttacgtttggcatccagagggagctgtgtgacctggttcgggtatccttactaaatgctcagagagccagggttctctatgcttctggctttcatactgtggcagaccttgctagagcaaatattgtggaggtggaggtgattctgaaaaatgctgtgcctttcaaaagtgcccggaaggcagtggatgaggaagaggaagcagttgaagaacgtcgcaatatgcgaactatctgggtgactggcagaaaaggtttaactgaaagggaagcagcagcccttatagtggaagaagccagaatgattctgcagcaggacttagttgaaatgggagtgcaatggaatccatgtgccctgttacattctagtacatgctcattgactcatagtgagtccgaagtaaaggaacacacatttatatcccaaactaagagttcttataaaaaattaacatcaaagaacaaaagtaacacaatatttagtgattcttatattaagcattcaccaaatatagtgcaagacttaaataaaagtagagagcatacaagttcctttaattgtaatttccagaatgggaatcaagaacatcagacatgttccattttcagagcaagaaaacgggcctctttagatataaataaagagaagccaggagcctctcagaatgaggggaaaacaagtgataagaaagttgttcagactttttcacagaaaacaaaaaaggcacctttgaatttcaattcagaaaagatgagcagaagttttcgatcttggaaacgtagaaagcatctaaagcgatctagggacagcagccccctgaaagactctggagcgtgtagaatccatttacaaggacagactctgtctaatcctagtctttgtgaagacccgtttaccttagatgagaagaaaacggaatttagaaattcagggccatttgctaaaaatgtatctttgagtggtaaggaaaaagataataaaacatcattcccattacaaataaagcaaaattgttcatggaacataacactaactaatgataattttgtggagcatattgtcacaggatctcagagtaaaaatgtgacttgtcaggccactagtgtggttagtgaaaagggcagaggagtagctgttgaggcagaaaaaataaatgaagtgctgatacaaaatggttcaaaaaaccagaatgtttatatgaaacaccatgacatccatccaattaaccagtacctgcgaaagcaatctcatgaacagacaagcactattaccaaacagaaaaatataatagagagacaaatgccctgtgaagcagtcagtagttacataaatagagactcaaatgttactatcaattgtgaaaggataaagcttaatacagaggaaaataaaccaagtcattttcaggcattaggagatgatataagcagaactgtgatacccagtgaagtacttccatcagctggagcatttagcaaatcagaaggccagcatgagaattttctaaatatttctagactacaagaaaaaacaggtacttatacaacaaacaaaactaaaaataatcatgtttctgacttaggtttagtcctctgtgattttgaagatagtttctatctggatactcagtcagagaaaataatacaacagatggcaactgaaaatgccaaactaggagcaaaggacaccaacctggcagcagggataatgcagaagagcttagtccaacagaactcaatgaactcttttcagaaggagtgtcacattccttttcctgctgaacagcaccctctaggagcgactaagatagatcatttggaccttaagactgtaggtactatgaaacaaagcagtgattcacatggggttgatatcctgactccagaaagcccgattttccattctccaatactattggaggaaaatggtctttttttaaaaaagaatgaagtttctgttactgattcacaattaaatagttttcttcaaggttatcaaacacaagaaactgtgaaaccagttatacttctgattcctcaaaagagaactcccactggtgtagaaggagaatgtcttccagttcctgaaacaagtttgaatatgagtgatagtttactatttgatagcttcagtgatgactatctagtaaaagaacaattacctgatatgcaaatgaaagaaccccttccttcagaagtaacatcaaaccattttagtgattctctgtgtctacaagaagacctaattaaaaaatcaaatgtaaatgagaatcaagatacccaccagcagttgacttgttccaatgatgaatctattatattttcagaaatggattctgttcagatggttgaagctttggacaatgtggatatatttcctgtccaagagaagaatcatactgtagtatctcctagagcattagaactaagtgatccagtacttgatgagcaccaccaaggtgatcaagatggaggagatcaagatgaaagggctgaaaaatcaaaattaactgggaccaggcaaaatcattcattcatatggtcaggggcatcatttgatctaagtccaggactgcaaaggattttagataaagtatccagtcctctagaaaatgaaaagctaaaatcaatgactataaacttttccagtttgaatagaaaaaatacagagttaaatgaagaacaagaagttatttcaaacttggagacaaaacaagtgcagggaatttcattttcttctaataatgaagtaaaaagcaagattgagatgctagaaaacaatgccaatcatgatgaaacctcatccctcttacctcgtaaagaaagtaatatagttgatgataatggtctcattcctcctacacccattccaacatctgcttctaagctgacatttccagggattcttgaaacacctgtaaacccttggaaaactaataatgttttacaacctggtgaaagttatttatttggctcaccttcagatattaaaaaccacgatttaagtccagggagtagaaatgggttcaaagacaacagccctattagtgacacaagcttttcacttcagttatcacaggatggattacagttaactccagcctcaagcagttcagaaagtttgtccataattgatgtagcaagtgaccaaaatcttttccaaacattcattaaggagtggcggtgcaaaaagcgattttccatctcactggcttgtgaaaagattagaagtttgacatcttctaaaactgctactattggcagtaggtttaagcaagctagctcacctcaggaaattcctattagagatgatggatttcccattaaaggttgtgatgacaccttggtggttggactggcagtatgctggggtggaagggatgcctattatttttcactgcagaaggaacaaaagcattctgaaattagtgccagtttggttccaccttctttagatccaagcctgactttgaaagacaggatgtggtaccttcaatcttgcttgcgaaaggaatctgataaagaatgttctgttgtcatctatgacttcatccagagctataaaattcttcttctttcttgtggcatctccttggagcaaagttatgaagatcctaaggtggcatgctggttactagatccagattctcaggagccgactcttcatagcatagttaccagttttcttcctcatgagcttccactcctagaagggatggagaccagccaagggattcaaagcctggggctaaatgctggcagtgagcattctgggcgatacagagcatctgtggagtccattctcatcttcaactctatgaatcagctcaactctttgttgcagaaggaaaaccttcaagatgttttccgtaaggtggaaatgccctctcagtactgcttggccttgctagaactaaatggaattggctttagtactgcagaatgtgaaagtcagaaacatataatgcaagccaagctggatgcaattgagacccaggcctatcaactagctggccacagtttttctttcaccagttcagatgacatcgctgaggttttatttttggaattgaagttgcccccaaatagagagatgaaaaaccaaggcagcaagaaaactctgggttctaccagaagagggattgacaatggacgcaagctaaggctgggaagacagttcagcactagtaaggacgttttaaataaattaaaggcattacatcctttaccaggcttgatattagaatggagaagaatcactaatgctattaccaaagtggtctttccccttcagcgggaaaagtgtcttaatccttttcttggaatggaaagaatctatcctgtatcacagtcgcacactgctacaggacgaataacctttacagaaccaaatattcagaatgtgccaagagattttgaaatcaaaatgccaacactagtaggagaaagcccaccttctcaagctgtaggcaaaggcctacttcccatgggcagaggaaaatataagaagggtttcagcgtgaatcctagatgccaggcacagatggaggagagagctgtagacagaggaatgccattttcaattagcatgcgacatgcctttgtgcctttcccaggtggttcaatactggctgctgactactctcagcttgaactgaggatcttggctcatttatcccatgatcgtcgtctcattcaagtgttaaacactggagctgatgttttcaggagcattgcagcagagtggaagatgattgagccagagtctgttggggatgatctgaggcagcaggcaaaacagatttgctatgggatcatttatggaatgggagctaaatctttgggagagcagatgggcattaaagaaaatgatgctgcatgctatattgactccttcaaatccagatacacaggtaatttatcttctagatagtattct

SEQ ID NO: 373760 - DNA, 285 bp, Homo sapiens
gtttatctgaatttggtatgtgtatttttaaagtcatcactttagagtaatatatcacagtgtgttaagatggctaataaaaagaaaattatacttggatttacttttccatgtaaaactgaaggactgagatgtaagataccaatttggtgaaataaggatttagctcaacattgtatgtttttgagcttggccattatttaagacaacatttgagagttttgattacttgacatcctaatgtgctaaggtatcaacaactaaaaaataaagtatcatgaaaat

SEQ ID NO: 373761 - DNA, 2528 bp, Homo sapiens
acgccaaggttgcgggtcatggagtcccgaaccctcctcctgctgttctcgggagccgtggccctgatccagacctgggcagattacaattacaatcaaggcagaaatgatctcatttttacattacaactctggaaaaggcaatagactgagatgcaagtgtgcccccaagtgatgggcagaaggagagaaggtgttttggatgcattctagaacacaggtaatctaaggagagttgatcaaggccgtggaagagtcctccagccactattggccatcaaaggagtcctctgtgtcccaggaatggtcctgctttggtgtccctggtgtgacccatcacccgctgggaacagcctgagagaagtagggcctctgcaccaatgctgctgaggatgtcagagcacaggaacgaggccttgggaaattacctggaaatgcgactgaaatcttccttcctgaggggtctgggctcttggaaatcaaaccctctcaggttgggtggctggacgattctcctcacacttacaatgggacaaggggaaccaggaggcccccaaggggatccctgggttccacacgaactcctcctaccctcattgtgtgacagcagccatgcctcctcctggggatcaggatctattacctgtgcctggagaggaggggactcctcttctcacccgctggtctctggacacatactgtccaattcccctgtggcagctgtaatgtgtagttcaatgggcactcatttgtccccttttaagggtaccctcctttagaatccaggaccttctaccctgcagagtgtggtttgggagagaagtgcaaaatcccacgacaggtgagttgaaggaatgggatatggagccacatccacttccaccccttggtatctggacccacgtgttcttcctactgagattacagaactgtagagatgtctttgatttttaaaatgcaccatgtcctgaaagatggcaccctcccacccgcagagtgcttcctgcaagctggcgttgagctgtgcctatagaagctcttttcaacattctttatggccagcagcccttggttggtgcagatggtgataggaccagtgggtcccacagcatggccacactgcacctccttcgctgtcaagtgggtcccccacgaagatactgcacggagagcagtgccaagcctgtggatcaggaatatcaacagcccccagagagtggtgctggctgagggtctgagagcaggacaggaaaacccacctatggaataggtgcctatccctgtgaagatgaacctctggcccttccaggatggaaggagtgcaatgtagtcaactcctcacttagggtctggttggtcacctaaagaaatagagccctaccagggaagatcattgggttcaaatgctgatgagtaggacatttagaggtggcagtgtctggatctaccttggtaggagggagtcagtactgttggacccataggtagcctcatccctgccactgtgtttgctccatttatgtacccatcctacccggcctgggctgaaccatggggaaggctggctaatttcagtgcttctgcttggttgttcagggccatttcaggtttgggtgttttctggggatgttaacatgggattcaggctcaactcacaagaaacttttccatctcatgatggatgctgttgggcatgtccaatgtatgacttcatgagttacacagatgctaattcgtaggggcacttggaatcacatggttgttttgtgtcccatggtcaagcattctatcttatcagggcctacagtaacatgccaaaagttgcttccaacatatttctctgctttggatggggcatatttctgtgctgtggatgacatggccttactccagaatcccaggccctccactgtgactctcctactggtgcttggttcagctccaccccaaatcttaccccaccactggcactttcagcaccagggggtctgaaggatggtgactgcgccatggcctggatctgctgcagtgtcctttcctgtggaggctccactcaaagctggcatcctcctatgtcacctagagtgtgggtcaaagcaatacacctacatgtagaatgtgatgtcagaactcaaacaggctcaccaggcagtgtgcttccttccttgcatgaggatgcaagatgcaacagtttgtctttcacattggaagggacacccctggatgcccctaaccactagacctgtaaaacttcactgcagtggccacttctgaatctctgtaaggtttatttatcttcaccctctggagagaagatgttttaccaaagcctctagtgtaccttcctcctcttactcatccatcccagtcaacatgatgttgtcaatgaaataaaggaatttaatattctatagtatatccaggttctccagatctcttaagactgtactatagaggcctggggaattataatagccctgaggcaaactatgaattaaagtgttgtggatcccacatgaaaaaaaaaa

SEQ ID NO: 373762 - DNA, 2416 bp, Homo sapiens
acgccaaggttgcgggtcatggagtcccgaaccctcctcctgctgttctcgggagccgtggccctgatccagacctgggcagattacaattacaatcaaggcagaaatgatctcatttttacattacaactctggaaaaggcaatagactgagatgcaagtgtgcccccaagtgatgggcagaaggagagaaggtgttttggatgcattctagaacacaggtaatctaaggagagttgatcaaggccgtggaagagtcctccagccactattggccatcaaaggagtcctctgtgtcccaggaatggtcctgctttggtgtccctggtgtgacccatcacccgctgggaacagcctgagagaagtagggcctctgcaccaatgctgctgaggatgtcagagcacaggaacgaggccttgggaaattacctggaaatgcgactgaaatcttccttcctgaggggtctgggctcttggaaatcaaaccctctcaggttgggtggctggacgattctcctcacacttacaatgggacaaggggaaccaggaggcccccaaggggatccctgggttccacacgaactcctcctaccctcattgtgtgacagcagccatgcctcctcctggggatcaggatctattacctgtgcctggagaggaggggactcctcttctcacccgctggtctctggacacatactgtccaattcccctgtggcagctgtaatgtgtagttcaatgggcactcatttgtccccttttaagggtaccctcctttagaatccaggaccttctaccctgcagagtgtggtttgggagagaagtgcaaaatcccacgacaggtgagttgaaggaatgggatatggagccacatccacttccaccccttggtatctggacccacgtgttcttcctactgagattacagaactgtagagatgtctttgatttttaaaatgcaccatgtcctgaaagatggcaccctcccacccgcagagtgcttcctgcaagctggcgttgagctgtgcctatagaagctcttttcaacattctttatggccagcagcccttggttggtgcagatggtgataggaccagtgggtcccacagcatggccacactgcacctccttcgctgtcaagtgggtcccccacgaagatactgcacggagagcagtgccaagcctgtggatcaggaatatcaacagcccccagagagtggtgctggctgagggtctgagagcaggacaggaaaacccacctatggaataggtgcctatccctgtgaagatgaacctctggcccttccaggatggaaggagtgcaatgtagtcaactcctcacttagggtctggttggtcacctaaagaaatagagccctaccagggaagatcattgggttcaaatgctgatgagtaggacatttagaggtggcagtgtctggatctaccttggtaggagggagtcagtactgttggacccataggtagcctcatccctgccactgtgtttgctccatttatgtacccatcctacccggcctgggctgaaccatggggaaggctggctaatttcagtgcttctgcttggttgttcagggccatttcaggtttgggtgttttctggggatgttaacatgggattcaggctcaactcacaagaaacttttccatctcatgatggatgctgttgggcatgtccaatgtatgacttcatgagttacacagatgctaattcgtaggggcacttggaatcacatggttgttttgtgtcccatggtcaagcattctatcttatcagggcctacagtaacatgccaaaagttgcttccaacatatttctctgctttggatggggcatatttctgtgctgtggatgacatggccttactccagaatcccaggccctccactgtgactctcctactggtgcttggttcagctccaccccaaatcttaccccaccactggcactttcagcaccagggggtctgaaggatggtgactgcgccatggcctggatctgctgcagtgtcctttcctgtggaggctccactcaaagctggcatcctcctatgtcacctagagtgtgggtcaaagcaatacacctacatgtagaatgtgatgtcagaactcaaacaggctcaccaggcagtgtgcttccttccttgcatgaggatgcaagatgcaacagtttgtctttcacattggaagggacacccctggatgcccctaaccactagacctgtaaaacttcactgcagtggccacttctgaatctctgtaaggtttatttatcttcaccctctggagagaagatgttttaccaaagcctctagtgtaccttcctcctcttactcatccatcccagtcaacatgatgttgtcaatgaaataaaggaatttaatattctatagta

SEQ ID NO: 373763 - DNA, 1065 bp, Homo sapiens
acgccaaggttgcgggtcatggagtcccgaaccctcctcctgctgttctcgggagccgtggccctgatccagacctgggcagattacaattacaatcaaggcagaaatgatctcatttttacattacaactctggaaaaggcaatagactgagatgcaagtgtgcccccaagtgatgggcagaaggagagaaggtgttttggatgcattctagaacacaggtaatctaaggagagttgatcaaggccgtggaagagtcctccagccactattggccatcaaaggagtcctctgtgtcccaggaatggtcctgctttggtgtccctggtgtgacccatcacccgctgggaacagcctgagagaagtagggcctctgcaccaatgctgctgaggatgtcagagcacaggaacgaggccttgggaaattacctggaaatgcgactgaaatcttccttcctgaggggtctgggctcttggaaatcaaaccctctcaggttgggtggctggacgattctcctcacacttacaatgggacaaggggaaccaggaggcccccaaggggatccctgggttccacacgaactcctcctaccctcattgtgtgacagcagccatgcctcctcctggggatcaggatctattacctgtgcctggagaggaggggactcctcttctcacccgctggtctctggacacatactgtccaattcccctgtggcagctgtaatgtgtagttcaatgggcactcatttgtccccttttaagggtaccctcctttagaatccaggaccttctaccctgcagagtgtggtttgggagagaagtgcaaaatcccacgacaggaccctgactgtcccacagaagaagtgacaagaatttatttatgacatgacaataacacatgtattcatggtgttaattcgatttgtttcatagagacagcgtcttgctatgttgcccaggctggtcttcaactcctggcctcaagcaatccccctgacttggccttccaaagtgctagcattacaggtgtgagccattgtgcccagcccttaacttgaaaatc

SEQ ID NO: 373764 - DNA, 2507 bp, Homo sapiens
acgccaaggttgcgggtcatggagtcccgaaccctcctcctgctgttctcgggagccgtggccctgatccagacctgggcaggtgagtgcggggtcgggagggaaaaggcctctgcgggaaggagcgaggggcccgcccggaggagtaaatctgcacatatatttaattacagattacaattacaatcaaggcagaaatgatctcatttttacattacaactctggaaaaggcaatagactgagatgcaagtgtgcccccaagtgatgggcagaaggagagaaggtgttttggatgcattctagaacacaggtaatctaaggagagttgatcaaggccgtggaagagtcctccagccactattggccatcaaaggagtcctctgtgtcccaggaatggtcctgctttggtgtccctggtgtgacccatcacccgctgggaacagcctgagagaagtagggcctctgcaccaatgctgctgaggatgtcagagcacaggaacgaggccttgggaaattacctggaaatgcgactgaaatcttccttcctgaggggtctgggctcttggaaatcaaaccctctcaggttgggtggctggacgattctcctcacacttacaatgggacaaggggaaccaggaggcccccaaggggatccctgggttccacacgaactcctcctaccctcattgtgtgacagcagccatgcctcctcctggggatcaggatctattacctgtgcctggagaggaggggactcctcttctcacccgctggtctctggacacatactgtccaattcccctgtggcagctgtaatgtgtagttcaatgggcactcatttgtccccttttaagggtaccctcctttagaatccaggaccttctaccctgcagagtgtggtttgggagagaagtgcaaaatcccacgacaggtgagttgaaggaatgggatatggagccacatccacttccaccccttggtatctggacccacgtgttcttcctactgagattacagaactgtagagatgtctttgatttttaaaatgcaccatgtcctgaaagatggcaccctcccacccgcagagtgcttcctgcaagctggcgttgagctgtgcctatagaagctcttttcaacattctttatggccagcagcccttggttggtgcagatggtgataggaccagtgggtcccacagcatggccacactgcacctccttcgctgtcaagtgggtcccccacgaagatactgcacggagagcagtgccaagcctgtggatcaggaatatcaacagcccccagagagtggtgctggctgagggtctgagagcaggacaggaaaacccacctatggaataggtgcctatccctgtgaagatgaacctctggcccttccaggatggaaggagtgcaatgtagtcaactcctcacttagggtctggttggtcacctaaagaaatagagccctaccagggaagatcattgggttcaaatgctgatgagtaggacatttagaggtggcagtgtctggatctaccttggtaggagggagtcagtactgttggacccataggtagcctcatccctgccactgtgtttgctccatttatgtacccatcctacccggcctgggctgaaccatggggaaggctggctaatttcagtgcttctgcttggttgttcagggccatttcaggtttgggtgttttctggggatgttaacatgggattcaggctcaactcacaagaaacttttccatctcatgatggatgctgttgggcatgtccaatgtatgacttcatgagttacacagatgctaattcgtaggggcacttggaatcacatggttgttttgtgtcccatggtcaagcattctatcttatcagggcctacagtaacatgccaaaagttgcttccaacatatttctctgctttggatggggcatatttctgtgctgtggatgacatggccttactccagaatcccaggccctccactgtgactctcctactggtgcttggttcagctccaccccaaatcttaccccaccactggcactttcagcaccagggggtctgaaggatggtgactgcgccatggcctggatctgctgcagtgtcctttcctgtggaggctccactcaaagctggcatcctcctatgtcacctagagtgtgggtcaaagcaatacacctacatgtagaatgtgatgtcagaactcaaacaggctcaccaggcagtgtgcttccttccttgcatgaggatgcaagatgcaacagtttgtctttcacattggaagggacacccctggatgcccctaaccactagacctgtaaaacttcactgcagtggccacttctgaatctctgtaaggtttatttatcttcaccctctggagagaagatgttttaccaaagcctctagtgtaccttcctcctcttactcatccatcccagtcaacatgatgttgtcaatgaaataaaggaatttaatattctatagta

SEQ ID NO: 373765 - DNA, 355 bp, Homo sapiens
ttaagtggactctctgctgagaatatcacaagcctacagtcaagctgttgactgggttttattctcatctgaaactcagagtcatcttccaagcttgaacttgtgggcagaattctgtgttttgcagctataggactgatgacttcaactcctagaggacacccctctccataggaagttcaagatgtagttttttgcttcttcaaggccagcaggagatcatttctaacttcagggaagtcctggaccctctttgaacgggctaaactgattaggtcagcctcacccagggtaatctccctttacattgactcaaagtcaacttattaagaacattaattatttctgtaaaatt

SEQ ID NO: 373766 - DNA, 491 bp, Homo sapiens
gcttcaggatgggccccactctgaggcctttgggacagaccaggccatgtgtgagaacagagagggctttggggaggaggcacgtaaacacagccacgtcagtaggattcctgtggccctttccaagctaacacactgttcttcctcccactcatgagccagcctgggcagcaagcacccacctcctactgttgttggagggggcagggagtgctgggcacagctgggactattattacctggatagttatgtcatcatcagtgaccttggactagtgttttgttttgtttttaactaagcattaaatattttattacaattgataactttaaaattaaatattgaatgactaactgattacatttaaataattaaatagactgtcaacagagactattataggagaatgtgtcctgaaacatctctattcacatgcacgtgtgtatcccgtataagcagtatccaatatatgtatatatgactattttcc

SEQ ID NO: 373767 - DNA, 345 bp, Homo sapiens
ctcttatacacacactgccatgtaattgatatagatatcaacttgataaattaaaaaaatacagctgggcacggtggttcacacctgtaatcccagcactttgggaggctgaggtgggcggatcacgaggtcaagagattgagaccatcctggccaacatggtgaaaccccgtctctactaaaaatacaaaaattagctgggcatggtggcgcgcacctgtagtcccagctacttgggaggctgaggtggaagaatcgcttgaatccgggagctggaggttgcagtgagccgagattatgccactgcactccagcctggcgacagagccagactccatctcaccg

SEQ ID NO: 373768 - DNA, 1954 bp, Homo sapiens
  misc_feature (1949)..(1949): n is a, c, g, or t
caccgccagccaaagcagtcccttccatttcaggcaccggcctgggcccgggagacaccgcaaggctatttaagatggtgtggtttgcccatctacgttgatcgtcccaagaaaggggcaccgtctgcagaacttgccaggaaagtcatcctgggcggcgcgggccacgccagggtctccccgcgcggcttcctcccccggcgccttctctcgggcgcgcgtgcgccccctgcaggcggcccccgggagagcctcgcgggggagccgggagcctggtttccccgccaacccccatcccgcccgccccggcggccaccctgggggcgaggcagcccggcgcgtgggaggggacggcgcgccattggcttgtgcgcggaaccgagaggagggaccagcgcgggccgccagactcgcccttctgcagaggccgggctggaggagaagatggcggccaagcagcccccgcctctgatgaagaagcacagccagacggacctcgtgagccgcctgaagacccgcaagatcctcggcgtgggcggggaggatgacgacggggaggtgcatcgctccaagatcagccaggtcttaggcaatgaaatcaagtttaccattcgggagcctttggggctcagggtctggcagttcgtctctgctgtgctcttctccggcattgccatcatggcgcttgccttccctgaccagctctatgatgcggtctttgatggagcccaggtgaccagcaagacccccatccgcctctacggcggtgccctcctcaaggtggaaactgagtcagacagaggcgaggtgacttgtctgaggtcacagctagtgagtggtgaagccaagattggaacccaggcaatccagcttggaaggacaaaggatggggtctctgaaacatctccagcctcagccctgctcctggccttctctctcatccagacatggctgcagcctctgggctgggactggcctccctacctccccttcaatccagtgcttccctgctgccagaaggagctttccagaaagcacatgtcaccacagccctctcttgctggaacccaacctctacaggagaccaagctgcctcctacagaccacaggacctccaagactcaccatcgccacctcttgttattcctgccctgactttcctatcaccaccatcaaaggagagtcccccagagattacatctcatggcccgggcttgcggagtgctgggctcccagacaaatgcaatcaaaggagacatgtctcctgggaagagcctcccacaacctcaaagccccgaaagccctccgtgtttatgttcttgcttgatccccacaaccgtccagcaaagccagcacagcagagatgattctatttccccaggagtggtgcccagagaagttaagcagtttgcctgagatgacacagccgtgttggagccgtgcttgcttgggatgaactaagtggcgcgcatttgattttactgctgatttcacagctccttcagctaccccaagctgccatcaatgtcccatcaatttcactttgtctgctcctctctgcaatgagctttctcagctctcagcctgtgttcagtaaagagacgttgctggtcttgtgtcacgtctcctcctgcctgaataatgctcgtgtgcagcatgaaggagaggtctctcagaactcaagggcctgaagctcccagaagcttccagatccagaggcaacaggtgtcttccggtcccagggagggcaagtttcctgaacctcgaaggcaggcagacagtggaggcctcccttccttctcacagcatcctccagctccaaggcaggcttcccccaacccccagggcccaggaactgtcatcagagcagaaatcaagcccagtcccaggcctcaccccacagggcatctgccccattgatatttgcttggtaataaatactggagacngaggg

SEQ ID NO: 373769 - DNA, 398 bp, Homo sapiens
tgttttcgtttcacagatgaggaccccggagctcagagaggaaaagtaacttgctctaatcagtggctagcagatcagcgccccctcccccggccaaggctgggagctctttcaggatagggggcctgtcccaccacccatgtaccttgctcacagtagacctcactaagtgcggattcctcaggcaaatgtgcaggtgttttgctgagtgctctgagcttttctttttgccccgggctccctaggaagtgggaatgatggctccatttcacagatgaggaaaccgagactcagagcacaaggccacacagcaggaagaggtaaggcaggactgagggaggcagcacgtctggcctgggagaggggttaaccagccaggaggagctcgtagaagggct

SEQ ID NO: 373770 - DNA, 345 bp, Homo sapiens
ctactactactaaattcgcggccgcgtcgacctctgctgtgctcttctccggcattgccatcatggcgcttgccttccctgaccagctctatgatgcggtctttgatggagcccaggtgaccagcaagacccccatccgcctctacggcggtgccctcctcagcatctccctgatcatgtggaacgctctctacacggctgagaaggtcatcattcgatggaccctgctcaccgaagcttgctatttcggggtccagttcttggtggtcactgccacgctagctgagacgggcctcatgtccctggggatcctgctgaccaggagcagtcgacgcggccgcgaat

SEQ ID NO: 373771 - DNA, 6072 bp, Homo sapiens
agcggagtctttgcccccgcagggccgcggacggaggtggtggcggagttcccgctgcccacaagtctggcccgaccttctggggtgggggcctgggggcaggggccctgggccggagaacccggggccgcctaacggctcggagctcaccgccgggggacaccggcgctgaggcctgggtctcagaaagtgggaagtgggaatgatggctccatttcacagatgaggaaaccgagactcagagcacaaggccacacagcaggaagagagaaatgaaaacttacggtcccacagaaacgcgggtttgtagcagctctattcataatcatcaacaactggaaacaacccacatggccttcagtgaccgaatggataaacaagctgttacacgtaccccagggaatactgctctccaataaaaaggagcggactcttgatacacacagtgacttggaggaatctcaaaggcattctgctcaatgacaggagccagcctcaaaagatttggctgactgaggacgcgacaggtactcagcttctttctgcatctcagtcgcccagcacaggggctggcacgcacccttctgcagaggccgggctggaggagaagatggcggccaagcagcccccgcctctgatgaagaagcacagccagacggacctcgtgagccgcctgaagacccgcaagatcctcggcgtgggcggggaggatgacgacggggaggtgcatcgctccaagatcagccaggtcttaggcaatgaaatcaagtttaccattcgggagcctttggggctcagggtctggcagttcgtctctgctgtgctcttctccggcattgccatcatggcgcttgccttccctgaccagctctatgatgcggtctttgatggagcccaggtgaccagcaagacccccatccgcctctacggcggtgccctcctcagcatctccctgatcatgtggaacgctctctacacggctgagaaggtcatcattcgatggaccctgctcaccgaagcttgctatttcggggtccagttcttggtggtcactgccacgctagctgagacgggcctcatgtccctggggatcctgctgctcctggtcagccgcctcctttttgtcgtcatcagcatttactactattaccaagtcggccgaagacccaagaaggcctagttgcccgctgggcctggggccctgcccatgcctgggccagagtggcgctggggcctcggcttccctttggctcctggaaggcaggagggtcccctgccctgccccagtcctgccccagggaggcagggggtggggggccttcctttcctcctgggcaccccgtgtgctgtgatctcctgggctttcaggcttgacatgctggtctggggagagacagggcctctgctgccctgttcttcaccctcacagtgatacctcctttccttgggtctcttggcctccagaccccctcaatagacactgactaaagtcaagctggagtcatgagggtagtgggctaagtcgagggtccagcctcttctgccaggaagcccttcttgcttttgagagaggctgtgaccaccccccatccttctccctacactcccagccaacctagtgcccaagcagctaaacttggcttccttctaatcctggaaaaccctgtacccctcctcctcaatctggccctctccacatgcacaccctgaaaacacacacagacacacaacacacacacatacacacccctgaacacacacacagacacacatacacccatgatgtgagcaaacacacacacgtgcgccttcatagcccagccaagggcatgcaggcagggtgtgctgcctgagatggcacctccctttcagccattcttcaagaatgggccacacacagctagaagtcctctcccagctagaagtcctgtccccactctcctggcctgacaagatgagctctcctgggaccttgctctagggcactctgcctctaccctaggacactggaatgccctgggagccccctccctgcaaccagcctgagttcagccccacggacaaagggacacacagcccccaatggagaccattgtaagtggtggggctgggagaggaggaacagaaggaaagccatagcgctctcttgccccttggcatgtaccccaaggcctgatggccactgggctcagcctgtcccccactcctgcctgcttcccggtgagctgccccccacacgtgcagcccgggctgcctccagggtctggctgagtgggatcaggtggccctccaactcagcacaggaaataagtagaaacatttcagcaggccacctcccctcatcttccccgccctgtccagcgccctggcaaaggctgacaactggctgtcttggggccgaacagcccctgccctgcctctgagggcccaccagcctgtgctgcatacccaccgcccagcttctccctgagggcccaccagcctgtgctgcatacccaccgcccagcttctccctgagggcccaccagcctgtgctgtacaccccgttagtccctgatcccaaccttctccctcctgccagcacaccgatgcacacaccggaagtggcgagcccaagccctggggacaggtgtagggagaaaagcagccccaggcctcagactcgcttcccatcctggcatagagtgggggatggctggagggtgtctataggtacagcccgctctggctgctgccaggtgggcccctgccaggggtcctcacccctgtccaccctgtgcctggctgtccctgcacccagatacagcaacatggcctgtacccagcagagtggtggcaccaccatggttacagcggatgccccgagactctgcttggtaaacgtggcagagcagaatgggaggctggaccctgaggaagggcccctctcctggcatctgtctcttgctacctaagcctgtgcctctccctaaagagctgcctccctgctgccgagccctggtctggccacgagccactactgcctcccacaggcaccactgcctcccgctgctgcccacaggtggtgccgccaatgggcagtgccctcaggccgaagcctcaatcccccatctgagccaggcctaatcctctaatagtgatggttggtttgtcctcccataactgcaggtggattccacctggggaatgaggctgcgtgtcgggcgtctgctggccctgagacatccagtcttccacactcaactgtgggatgggagggtggcgtggccttaccccatgaggctgtccaggctctggcacacagctgtgctcacaaaatactgggtggcttggttagagctaattgtagtggagcctgcaggtgagggtgagggagggggctgcaggtcaggtaagatctggaagacagacgtacagcttggagggcagggggactctaaggcaaggagatttacagttgggaaggaggcagtggcagaggggtgagggacaggggcccttaagtccagcgaggaaagctcggtgtgggcccgctctacgctccgtttggggtgacctggaacgcctcttctcccagctccctccagccatcagcagcctcttgtcaagcttctgcctcgccccagtctatccccaaccccaaatcaagaccacctttcttcacggtcactatttattctttgttcctttttctttttgtaagaaacattcacaaaaaccagtgcaaaaccatcagtgtgggcgtcctgttttatattacaaaacttcctctggatatatcatataaaaggggggtctcacaggagagaaacgtgataaattagctctgcaatctacggcaaggaacatagtttttaaaatagactttcaacatatgacccatgggggaaggaggagggggcttctggggagacggcgggtgctggggcctcggctggtttgggaaatcctgtccgggccccttaagcatggatagagacatagacaagggaggctgtggacaggcctgagcaccaaggccagaaattaacagggaccctggggaggggccctcacccccagcccataaagagctattccctttctctaagaggcagtagcttcagagcaggaaagtggctttcgatacaggcagggtttgtgatgagcggtgtagtcttcttgttccttgccctgttagtggggtccgaggaagtctctgttatgggctgttgtatttcggggtgaaaagaaacaaagaggtatccctgcccacccctcccccacaaccccagccaccaccagaacctgctgtgggttgtatctggaccaagccagctaaaccctgtttctccctgtgctctggagggaggctcaagcctgatttgggctgagctttctttgccttgcctccaaggaatggcctcaggcagtcttgcaaatagctaccagcctgagcgaatgccaacaggagcagaaactgcctgtcttccctttccagcctaagagggtggccagtggctggctggcgagctgaatcagggctgattgagggttccttggcacatttgtagaaagctgctgaggggcagtcttgtgtctgcccttgaacccaccttagccagatttcccttcatgaccagccctttctcttgggtcctccctctgacttctgtgggccccagaagcctgggatgcccctggattagagccataaagctgtgcaatttgcctcagtcctgcccagcatgggttttttgttttttgtttttgtttttgtgtgtcatcctcagaccagccatttgcctcttccaaaaagctggggctaagcatgtgggtggttcaagaggggcagcccccaggccccaggctgggccgcggtaccagtggcaggtccccctgggtctcaggagcttagcttctacggagctcaggtgtcatttatggggttgccagagcaagctgttaaagggcgaatttggtaagactgagctcagagacctggtgggagggcaaggactggcgggcacagcaggaggagattagaggagggtccacctgaatctttgcagcaggcacagagcttctggctgcatctcagaagggggcagacgcacaggccagggaacacggggctctaggctgtggctccgagtgtccctggtgactggaaagcctgaggggaggctggaagctgatacaggatgccggtggcttgtgagacagaatgagctctttcttcctgaagagggacagaggggagagaagagagcagacatcacactgctccttccatccctgcccgtggcagacatcactaatcaaacttacggtgcctggcagacatcactcatcaggattgcactgccatctcccactgagcccagaccaaacctcagatccccagcacagcctccagcagccacccctgatctatcagggtaggagcatcttgcaatccagttgccaacactcgtctagagtttgagaactgaatacttgtgggtgtgcatctgcgagtctccctgcccaagcctggagggaatactaagaaatgtgcggacagtgaagagacaggaaaccttgttgcagcagaaatggcctcgatgccttcgggattctttagcctggagagaagagggctcaggggagtcaatgtgtgacctcaacactccaggaaggagagtgggcaagtgggatgccatggacagagccacagaaaaacagaaacctcttctgtgtattaagctgatgctaaagtcagagcagtccaaaggcaggaggctgccttgggaggtagtaagctctctgtccctggaggtatgcaagagggtggagaagtcttggcaaggatgttgaagaagatatccaagcctcagttctgggtgtggagagggagacccagatgatcttggggatttcttccactcttggagctggggagttggggaaggacagggaagggggtggcatgtgggagaggcgggcagtgtggacaagggaatgtgatgtgcacctctgtgtgttcctggggactgagagagaggtgtggggaggtaggagcgagggcgcggtgggaagtcatggaatggt

SEQ ID NO: 373772 - DNA, 5878 bp, Homo sapiens
caccgccagccaaagcagtcccttccatttcaggcaccggcctgggcccgggagacaccgcaaggctatttaagatggtgtggtttgcccatctacgttgatcgtcccaagaaaggggcaccgtctgcagaacttgccaggaaagtcatcctgggcggcgcgggccacgccagggtctccccgcgcggcttcctcccccggcgccttctctcgggcgcgcgtgcgccccctgcaggcggcccccgggagagcctcgcgggggagccgggagcctggtttccccgccaacccccatcccgcccgccccggcggccaccctgggggcgaggcagcccggcgcgtgggaggggacggcgcgccattggcttgtgcgcggaaccgagaggagggaccagcgcgggccgccagactcggtaagccccggccgcgcagggcgccgcgcgcagtccagccggcccggccctgccctgccctgtcctgccctgccctgccctgccctgccctgcactgcccggcccggcacgggcggcgcgatgtgaggcgtccgagcccggagcctccgcctggcatcagctccacgtagcccagcgccggcacgcgcgaggccccccttctgcagaggccgggctggaggagaagatggcggccaagcagcccccgcctctgatgaagaagcacagccagacggacctcgtgagccgcctgaagacccgcaagatcctcggcgtgggcggggaggatgacgacggggaggtgcatcgctccaagatcagccaggtcttaggcaatgaaatcaagtttaccattcgggagcctttggggctcagggtctggcagttcgtctctgctgtgctcttctccggcattgccatcatggcgcttgccttccctgaccagctctatgatgcggtctttgatggagcccaggtgaccagcaagacccccatccgcctctacggcggtgccctcctcagcatctccctgatcatgtggaacgctctctacacggctgagaaggtcatcattcgatggaccctgctcaccgaagcttgctatttcggggtccagttcttggtggtcactgccacgctagctgagacgggcctcatgtccctggggatcctgctgctcctggtcagccgcctcctttttgtcgtcatcagcatttactactattaccaagtcggccgaagacccaagaaggcctagttgcccgctgggcctggggccctgcccatgcctgggccagagtggcgctggggcctcggcttccctttggctcctggaaggcaggagggtcccctgccctgccccagtcctgccccagggaggcagggggtggggggccttcctttcctcctgggcaccccgtgtgctgtgatctcctgggctttcaggcttgacatgctggtctggggagagacagggcctctgctgccctgttcttcaccctcacagtgatacctcctttccttgggtctcttggcctccagaccccctcaatagacactgactaaagtcaagctggagtcatgagggtagtgggctaagtcgagggtccagcctcttctgccaggaagcccttcttgcttttgagagaggctgtgaccaccccccatccttctccctacactcccagccaacctagtgcccaagcagctaaacttggcttccttctaatcctggaaaaccctgtacccctcctcctcaatctggccctctccacatgcacaccctgaaaacacacacagacacacaacacacacacatacacacccctgaacacacacacagacacacatacacccatgatgtgagcaaacacacacacgtgcgccttcatagcccagccaagggcatgcaggcagggtgtgctgcctgagatggcacctccctttcagccattcttcaagaatgggccacacacagctagaagtcctctcccagctagaagtcctgtccccactctcctggcctgacaagatgagctctcctgggaccttgctctagggcactctgcctctaccctaggacactggaatgccctgggagccccctccctgcaaccagcctgagttcagccccacggacaaagggacacacagcccccaatggagaccattgtaagtggtggggctgggagaggaggaacagaaggaaagccatagcgctctcttgccccttggcatgtaccccaaggcctgatggccactgggctcagcctgtcccccactcctgcctgcttcccggtgagctgccccccacacgtgcagcccgggctgcctccagggtctggctgagtgggatcaggtggccctccaactcagcacaggaaataagtagaaacatttcagcaggccacctcccctcatcttccccgccctgtccagcgccctggcaaaggctgacaactggctgtcttggggccgaacagcccctgccctgcctctgagggcccaccagcctgtgctgcatacccaccgcccagcttctccctgagggcccaccagcctgtgctgcatacccaccgcccagcttctccctgagggcccaccagcctgtgctgtacaccccgttagtccctgatcccaaccttctccctcctgccagcacaccgatgcacacaccggaagtggcgagcccaagccctggggacaggtgtagggagaaaagcagccccaggcctcagactcgcttcccatcctggcatagagtgggggatggctggagggtgtctataggtacagcccgctctggctgctgccaggtgggcccctgccaggggtcctcacccctgtccaccctgtgcctggctgtccctgcacccagatacagcaacatggcctgtacccagcagagtggtggcaccaccatggttacagcggatgccccgagactctgcttggtaaacgtggcagagcagaatgggaggctggaccctgaggaagggcccctctcctggcatctgtctcttgctacctaagcctgtgcctctccctaaagagctgcctccctgctgccgagccctggtctggccacgagccactactgcctcccacaggcaccactgcctcccgctgctgcccacaggtggtgccgccaatgggcagtgccctcaggccgaagcctcaatcccccatctgagccaggcctaatcctctaatagtgatggttggtttgtcctcccataactgcaggtggattccacctggggaatgaggctgcgtgtcgggcgtctgctggccctgagacatccagtcttccacactcaactgtgggatgggagggtggcgtggccttaccccatgaggctgtccaggctctggcacacagctgtgctcacaaaatactgggtggcttggttagagctaattgtagtggagcctgcaggtgagggtgagggagggggctgcaggtcaggtaagatctggaagacagacgtacagcttggagggcagggggactctaaggcaaggagatttacagttgggaaggaggcagtggcagaggggtgagggacaggggcccttaagtccagcgaggaaagctcggtgtgggcccgctctacgctccgtttggggtgacctggaacgcctcttctcccagctccctccagccatcagcagcctcttgtcaagcttctgcctcgccccagtctatccccaaccccaaatcaagaccacctttcttcacggtcactatttattctttgttcctttttctttttgtaagaaacattcacaaaaaccagtgcaaaaccatcagtgtgggcgtcctgttttatattacaaaacttcctctggatatatcatataaaaggggggtctcacaggagagaaacgtgataaattagctctgcaatctacggcaaggaacatagtttttaaaatagactttcaacatatgacccatgggggaaggaggactttcgatacaggcagggtttgtgatgagcggtgtagtcttcttgttccttgccctgttagtggggtccgaggaagtctctgttatgggctgttgtatttcggggtgaaaagaaacaaagaggtatccctgcccacccctcccccacaaccccagccaccaccagaacctgctgtgggttgtatctggaccaagccagctaaaccctgtttctccctgtgctctggagggaggctcaagcctgatttgggctgagctttctttgccttgcctccaaggaatggcctcaggcagtcttgcaaatagctaccagcctgagcgaatgccaacaggagcagaaactgcctgtcttccctttccagcctaagagggtggccagtggctggctggcgagctgaatcagggctgattgagggttccttggcacatttgtagaaagctgctgaggggcagtcttgtgtctgcccttgaacccaccttagccagatttcccttcatgaccagccctttctcttgggtcctccctctgacttctgtgggccccagaagcctgggatgcccctggattagagccataaagctgtgcaatttgcctcagtcctgcccagcatgggttttttgttttttgtttttgtttttgtgtgtcatcctcagaccagccatttgcctcttccaaaaagctggggctaagcatgtgggtggttcaagaggggcagcccccaggccccaggctgggccgcggtaccagtggcaggtccccctgggtctcaggagcttagcttctacggagctcaggtgtcatttatggggttgccagagcaagctgttaaagggcgaatttggtaagactgagctcagagacctggtgggagggcaaggactggcgggcacagcaggaggagattagaggagggtccacctgaatctttgcagcaggcacagagcttctggctgcatctcagaagggggcagacgcacaggccagggaacacggggctctaggctgtggctccgagtgtccctggtgactggaaagcctgaggggaggctggaagctgatacaggatgccggtggcttgtgagacagaatgagctctttcttcctgaagagggacagaggggagagaagagagcagacatcacactgctccttccatccctgcccgtggcagacatcactaatcaaacttacggtgcctggcagacatcactcatcaggattgcactgccatctcccactgagcccagaccaaacctcagatccccagcacagcctccagcagccacccctgatctatcagggtaggagcatcttgcaatccagttgccaacactcgtctagagtttgagaactgaatacttgtgggtgtgcatctgcgagtctccctgcccaagcctggagggaatactaagaaatgtgcggacagtgaagagacaggaaaccttgttgcagcagaaatggcctcgatgccttcgggattctttagcctggagagaagagggctcaggggagtcaatgtgtgacctcaacactccaggaaggagagtgggcaagtgggatgccatggacagagccacagaaaaacagaaacctcttctgtgtattaagctgatgctaaagtcagagcagtccaaaggcaggaggctgccttgggaggtagtaagctctctgtccctggaggtatgcaagagggtggagaagtcttggcaaggatgttgaagaagatatccaagcctcagttctgggtgtggagagggagacccagatgatcttggggatttcttccactcttggagctggggagttggggaaggacagggaagggggtggcatgtgggagaggcgggcagtgtggacaagggaatgtgatgtgcacctctgtgtgttcctggggactgagagagaggtgtggggaggtaggagcgagggcgcggtgggaagtcatggaatggt

SEQ ID NO: 373773 - DNA, 5846 bp, Homo sapiens
caccgccagccaaagcagtcccttccatttcaggcaccggcctgggcccgggagacaccgcaaggctatttaagatggtgtggtttgcccatctacgttgatcgtcccaagaaaggggcaccgtctgcagaacttgccaggaaagtcatcctgggcggcgcgggccacgccagggtctccccgcgcggcttcctcccccggcgccttctctcgggcgcgcgtgcgccccctgcaggcggcccccgggagagcctcgcgggggagccgggagcctggtttccccgccaacccccatcccgcccgccccggcggccaccctgggggcgaggcagcccggcgcgtgggaggggacggcgcgccattggcttgtgcgcggaaccgagaggagggaccagcgcgggccgccagactcggtaagccccggccgcgcagggcgccgcgcgcagtccagccggcccggccctgccctgccctgtcctgccctgccctgccctgccctgccctgcactgcccggcccggcacgggcggcgcgatgtgaggcgtccgagcccggagcctccgcctggcatcagctccacgtagcccagcgccggcacgcgcgaggccccccttctgcagaggccgggctggaggagaagatggcggccaagcagcccccgcctctgatgaagaagcacagccagacggacctcgtgagccgcctgaagacccgcaagatcctcggcgtgggcggggaggatgacgacggggaggtgcatcgctccaagatcagccaggtcttaggcaatgaaatcaagtttaccattcgggagcctttggggctcagggtctggcagttcgtctctgctgtgctcttctccggcattgccatcatggcgcttgccttccctgaccagctctatgatgcggtctttgatggagcccaggtgaccagcaagacccccatccgcctctacggcggtgccctcctcagcatctccctgatcatgtggaacgctctctacacggctgagaaggtcatcattcgatggaccctgctcaccgaagcttgctatttcggggtccagttcttggtggtcactgccacgctagctgagacgggcctcatgtccctggggatcctgctgctcctggtcagccgcctcctttttgtcgtcatcagcatttactactattaccaagtcggccgaagacccaagaaggcctagttgcccgctgggcctggggccctgcccatgcctgggccagagtggcgctggggcctcggcttccctttggctcctggaaggcaggagggtcccctgccctgccccagtcctgccccagggaggcagggggtggggggccttcctttcctcctgggcaccccgtgtgctgtgatctcctgggctttcaggcttgacatgctggtctggggagagacagggcctctgctgccctgttcttcaccctcacagtgatacctcctttccttgggtctcttggcctccagaccccctcaatagacactgactaaagtcaagctggagtcatgagggtagtgggctaagtcgagggtccagcctcttctgccaggaagcccttcttgcttttgagagaggctgtgaccaccccccatccttctccctacactcccagccaacctagtgcccaagcagctaaacttggcttccttctaatcctggaaaaccctgtacccctcctcctcaatctggccctctccacatgcacaccctgaaaacacacacagacacacaacacacacacatacacacccctgaacacacacacagacacacatacacccatgatgtgagcaaacacacacacgtgcgccttcatagcccagccaagggcatgcaggcagggtgtgctgcctgagatggcacctccctttcagccattcttcaagaatgggccacacacagctagaagtcctctcccagctagaagtcctgtccccactctcctggcctgacaagatgagctctcctgggaccttgctctagggcactctgcctctaccctaggacactggaatgccctgggagccccctccctgcaaccagcctgagttcagccccacggacaaagggacacacagcccccaatggagaccattgtaagtggtggggctgggagaggaggaacagaaggaaagccatagcgctctcttgccccttggcatgtaccccaaggcctgatggccactgggctcagcctgtcccccactcctgcctgcttcccggtgagctgccccccacacgtgcagcccgggctgcctccagggtctggctgagtgggatcaggtggccctccaactcagcacaggaaataagtagaaacatttcagcaggccacctcccctcatcttccccgccctgtccagcgccctggcaaaggctgacaactggctgtcttggggccgaacagcccctgccctgcctctgagggcccaccagcctgtgctgcatacccaccgcccagcttctccctgagggcccaccagcctgtgctgcatacccaccgcccagcttctccctgagggcccaccagcctgtgctgtacaccccgttagtccctgatcccaaccttctccctcctgccagcacaccgatgcacacaccggaagtggcgagcccaagccctggggacaggtgtagggagaaaagcagccccaggcctcagactcgcttcccatcctggcatagagtgggggatggctggagggtgtctataggtacagcccgctctggctgctgccaggtgggcccctgccaggggtcctcacccctgtccaccctgtgcctggctgtccctgcacccagatacagcaacatggcctgtacccagcagagtggtggcaccaccatggttacagcggatgccccgagactctgcttggtaaacgtggcagagcagaatgggaggctggaccctgaggaagggcccctctcctggcatctgtctcttgctacctaagcctgtgcctctccctaaagagctgcctccctgctgccgagccctggtctggccacgagccactactgcctcccacaggcaccactgcctcccgctgctgcccacaggtggtgccgccaatgggcagtgccctcaggccgaagcctcaatcccccatctgagccaggcctaatcctctaatagtgatggttggtttgtcctcccataactgcaggtggattccacctggggaatgaggctgcgtgtcgggcgtctgctggccctgagacatccagtcttccacactcaactgtgggatgggagggtggcgtggccttaccccatgaggctgtccaggctctggcacacagctgtgctcacaaaatactgggtggcttggttagagctaattgtagtggagcctgcaggtgagggtgagggagggggctgcaggtcaggtaagatctggaagacagacgtacagcttggagggcagggggactctaaggcaaggagatttacagttgggaaggaggcagtggcagaggggtgagggacaggggcccttaagtccagcgaggaaagctcggtgtgggcccgctctacgctccgtttggggtgacctggaacgcctcttctcccagctccctccagccatcagcagcctcttgtcaagcttctgcctcgccccagtctatccccaaccccaaatcaagaccacctttcttcacggtcactatttattctttgttcctttttctttttgtaagaaacattcacaaaaaccagtgcaaaaccatcagtgtgggcgtcctgttttatattacaaaacttcctctggatatatcatataaaaggggggtctcacaggagagaaacgtgataaattagctctgcaatctacggcaaggaacatagtttttaaaatagactttcgatacaggcagggtttgtgatgagcggtgtagtcttcttgttccttgccctgttagtggggtccgaggaagtctctgttatgggctgttgtatttcggggtgaaaagaaacaaagaggtatccctgcccacccctcccccacaaccccagccaccaccagaacctgctgtgggttgtatctggaccaagccagctaaaccctgtttctccctgtgctctggagggaggctcaagcctgatttgggctgagctttctttgccttgcctccaaggaatggcctcaggcagtcttgcaaatagctaccagcctgagcgaatgccaacaggagcagaaactgcctgtcttccctttccagcctaagagggtggccagtggctggctggcgagctgaatcagggctgattgagggttccttggcacatttgtagaaagctgctgaggggcagtcttgtgtctgcccttgaacccaccttagccagatttcccttcatgaccagccctttctcttgggtcctccctctgacttctgtgggccccagaagcctgggatgcccctggattagagccataaagctgtgcaatttgcctcagtcctgcccagcatgggttttttgttttttgtttttgtttttgtgtgtcatcctcagaccagccatttgcctcttccaaaaagctggggctaagcatgtgggtggttcaagaggggcagcccccaggccccaggctgggccgcggtaccagtggcaggtccccctgggtctcaggagcttagcttctacggagctcaggtgtcatttatggggttgccagagcaagctgttaaagggcgaatttggtaagactgagctcagagacctggtgggagggcaaggactggcgggcacagcaggaggagattagaggagggtccacctgaatctttgcagcaggcacagagcttctggctgcatctcagaagggggcagacgcacaggccagggaacacggggctctaggctgtggctccgagtgtccctggtgactggaaagcctgaggggaggctggaagctgatacaggatgccggtggcttgtgagacagaatgagctctttcttcctgaagagggacagaggggagagaagagagcagacatcacactgctccttccatccctgcccgtggcagacatcactaatcaaacttacggtgcctggcagacatcactcatcaggattgcactgccatctcccactgagcccagaccaaacctcagatccccagcacagcctccagcagccacccctgatctatcagggtaggagcatcttgcaatccagttgccaacactcgtctagagtttgagaactgaatacttgtgggtgtgcatctgcgagtctccctgcccaagcctggagggaatactaagaaatgtgcggacagtgaagagacaggaaaccttgttgcagcagaaatggcctcgatgccttcgggattctttagcctggagagaagagggctcaggggagtcaatgtgtgacctcaacactccaggaaggagagtgggcaagtgggatgccatggacagagccacagaaaaacagaaacctcttctgtgtattaagctgatgctaaagtcagagcagtccaaaggcaggaggctgccttgggaggtagtaagctctctgtccctggaggtatgcaagagggtggagaagtcttggcaaggatgttgaagaagatatccaagcctcagttctgggtgtggagagggagacccagatgatcttggggatttcttccactcttggagctggggagttggggaaggacagggaagggggtggcatgtgggagaggcgggcagtgtggacaagggaatgtgatgtgcacctctgtgtgttcctggggactgagagagaggtgtggggaggtaggagcgagggcgcggtgggaagtcatggaatggt

SEQ ID NO: 373774 - DNA, 6066 bp, Homo sapiens
caccgccagccaaagcagtcccttccatttcaggcaccggcctgggcccgggagacaccgcaaggctatttaagatggtgtggtttgcccatctacgttgatcgtcccaagaaaggggcaccgtctgcagaacttgccaggaaagtcatcctgggcggcgcgggccacgccagggtctccccgcgcggcttcctcccccggcgccttctctcgggcgcgcgtgcgccccctgcaggcggcccccgggagagcctcgcgggggagccgggagcctggtttccccgccaacccccatcccgcccgccccggcggccaccctgggggcgaggcagcccggcgcgtgggaggggacggcgcgccattggcttgtgcgcggaaccgagaggagggaccagcgcgggccgccagactcggtaagccccggccgcgcagggcgccgcgcgcagtccagccggcccggccctgccctgccctgtcctgccctgccctgccctgccctgccctgcactgcccggcccggcacgggcggcgcgatgtgaggcgtccgagcccggagcctccgcctggcatcagctccacgtagcccagcgccggcacgcgcgaggccccccttctgcagaggccgggctggaggagaagatggcggccaagcagcccccgcctctgatgaagaagcacagccagacggacctcgtgagccgcctgaagacccgcaagatcctcggcgtgggcggggaggatgacgacggggaggtgcatcgctccaagatcagccaggtcttaggcaatgaaatcaagtttaccattcgggagcctttggggctcagggtctggcagttcgtctctgctgtgctcttctccggcattgccatcatggcgcttgccttccctgaccagctctatgatgcggtctttgatggagcccaggtgaccagcaagacccccatccgcctctacggcggtgccctcctcagcatctccctgatcatgtggaacgctctctacacggctgagaaggtcatcattcgatggaccctgctcaccgaagcttgctatttcggggtccagttcttggtggtcactgccacgctagctgagacgggcctcatgtccctggggatcctgctgctcctggtcagccgcctcctttttgtcgtcatcagcatttactactattaccaagtcggccgaagacccaagaaggcctagttgcccgctgggcctggggccctgcccatgcctgggccagagtggcgctggggcctcggcttccctttggctcctggaaggcaggagggtcccctgccctgccccagtcctgccccagggaggcagggggtggggggccttcctttcctcctgggcaccccgtgtgctgtgatctcctgggctttcaggcttgacatgctggtctggggagagacagggcctctgctgccctgttcttcaccctcacagtgatacctcctttccttgggtctcttggcctccagaccccctcaatagacactgactaaagtcaagctggagtcatgagggtagtgggctaagtcgagggtccagcctcttctgccaggaagcccttcttgcttttgagagaggctgtgaccaccccccatccttctccctacactcccagccaacctagtgcccaagcagctaaacttggcttccttctaatcctggaaaaccctgtacccctcctcctcaatctggccctctccacatgcacaccctgaaaacacacacagacacacaacacacacacatacacacccctgaacacacacacagacacacatacacccatgatgtgagcaaacacacacacgtgcgccttcatagcccagccaagggcatgcaggcagggtgtgctgcctgagatggcacctccctttcagccattcttcaagaatgggccacacacagctagaagtcctctcccagctagaagtcctgtccccactctcctggcctgacaagatgagctctcctgggaccttgctctagggcactctgcctctaccctaggacactggaatgccctgggagccccctccctgcaaccagcctgagttcagccccacggacaaagggacacacagcccccaatggagaccattgtaagtggtggggctgggagaggaggaacagaaggaaagccatagcgctctcttgccccttggcatgtaccccaaggcctgatggccactgggctcagcctgtcccccactcctgcctgcttcccggtgagctgccccccacacgtgcagcccgggctgcctccagggtctggctgagtgggatcaggtggccctccaactcagcacaggaaataagtagaaacatttcagcaggccacctcccctcatcttccccgccctgtccagcgccctggcaaaggctgacaactggctgtcttggggccgaacagcccctgccctgcctctgagggcccaccagcctgtgctgcatacccaccgcccagcttctccctgagggcccaccagcctgtgctgcatacccaccgcccagcttctccctgagggcccaccagcctgtgctgtacaccccgttagtccctgatcccaaccttctccctcctgccagcacaccgatgcacacaccggaagtggcgagcccaagccctggggacaggtgtagggagaaaagcagccccaggcctcagactcgcttcccatcctggcatagagtgggggatggctggagggtgtctataggtacagcccgctctggctgctgccaggtgggcccctgccaggggtcctcacccctgtccaccctgtgcctggctgtccctgcacccagatacagcaacatggcctgtacccagcagagtggtggcaccaccatggttacagcggatgccccgagactctgcttggtaaacgtggcagagcagaatgggaggctggaccctgaggaagggcccctctcctggcatctgtctcttgctacctaagcctgtgcctctccctaaagagctgcctccctgctgccgagccctggtctggccacgagccactactgcctcccacaggcaccactgcctcccgctgctgcccacaggtggtgccgccaatgggcagtgccctcaggccgaagcctcaatcccccatctgagccaggcctaatctgcaggtggattccacctggggaatgaggctgcgtgtcgggcgtctgctggccctgagacatccagtcttccacactcaactgtgggatgggagggtggcgtggccttaccccatgaggctgtccaggctctggcacacagctgtgctcacaaaatactgggtggcttggttagagctaattgtagtggagcctgcaggtgagggtgagggagggggctgcaggtcaggtaagatctggaagacagacgtacagcttggagggcagggggactctaaggcaaggagatttacagttgggaaggaggcagtggcagaggggtgagggacaggggcccttaagtccagcgaggaaagctcggtgtgggcccgctctacgctccgtttggggtgacctggaacgcctcttctcccagctccctccagccatcagcagcctcttgtcaagcttctgcctcgccccagtctatccccaaccccaaatcaagaccacctttcttcacggtcactatttattctttgttcctttttctttttgtaagaaacattcacaaaaaccagtgcaaaaccatcagtgtgggcgtcctgttttatattacaaaacttcctctggatatatcatataaaaggggggtctcacaggagagaaacgtgataaattagctctgcaatctacggcaaggaacatagtttttaaaatagactttcaacatatgacccatgggggaaggaggagggggcttctggggagacggcgggtgctggggcctcggctggtttgggaaatcctgtccgggccccttaagcatggatagagacatagacaagggaggctgtggacaggcctgagcaccaaggccagaaattaacagggaccctggggaggggccctcacccccagcccataaagagctattccctttctctaagaggcagtagcttcagagcaggaaagtggctttcgatacaggcagggtttgtgatgagcggtgtagtcttcttgttccttgccctgttagtggggtccgaggaagtctctgttatgggctgttgtatttcggggtgaaaagaaacaaagaggtatccctgcccacccctcccccacaaccccagccaccaccagaacctgctgtgggttgtatctggaccaagccagctaaaccctgtttctccctgtgctctggagggaggctcaagcctgatttgggctgagctttctttgccttgcctccaaggaatggcctcaggcagtcttgcaaatagctaccagcctgagcgaatgccaacaggagcagaaactgcctgtcttccctttccagcctaagagggtggccagtggctggctggcgagctgaatcagggctgattgagggttccttggcacatttgtagaaagctgctgaggggcagtcttgtgtctgcccttgaacccaccttagccagatttcccttcatgaccagccctttctcttgggtcctccctctgacttctgtgggccccagaagcctgggatgcccctggattagagccataaagctgtgcaatttgcctcagtcctgcccagcatgggttttttgttttttgtttttgtttttgtgtgtcatcctcagaccagccatttgcctcttccaaaaagctggggctaagcatgtgggtggttcaagaggggcagcccccaggccccaggctgggccgcggtaccagtggcaggtccccctgggtctcaggagcttagcttctacggagctcaggtgtcatttatggggttgccagagcaagctgttaaagggcgaatttggtaagactgagctcagagacctggtgggagggcaaggactggcgggcacagcaggaggagattagaggagggtccacctgaatctttgcagcaggcacagagcttctggctgcatctcagaagggggcagacgcacaggccagggaacacggggctctaggctgtggctccgagtgtccctggtgactggaaagcctgaggggaggctggaagctgatacaggatgccggtggcttgtgagacagaatgagctctttcttcctgaagagggacagaggggagagaagagagcagacatcacactgctccttccatccctgcccgtggcagacatcactaatcaaacttacggtgcctggcagacatcactcatcaggattgcactgccatctcccactgagcccagaccaaacctcagatccccagcacagcctccagcagccacccctgatctatcagggtaggagcatcttgcaatccagttgccaacactcgtctagagtttgagaactgaatacttgtgggtgtgcatctgcgagtctccctgcccaagcctggagggaatactaagaaatgtgcggacagtgaagagacaggaaaccttgttgcagcagaaatggcctcgatgccttcgggattctttagcctggagagaagagggctcaggggagtcaatgtgtgacctcaacactccaggaaggagagtgggcaagtgggatgccatggacagagccacagaaaaacagaaacctcttctgtgtattaagctgatgctaaagtcagagcagtccaaaggcaggaggctgccttgggaggtagtaagctctctgtccctggaggtatgcaagagggtggagaagtcttggcaaggatgttgaagaagatatccaagcctcagttctgggtgtggagagggagacccagatgatcttggggatttcttccactcttggagctggggagttggggaaggacagggaagggggtggcatgtgggagaggcgggcagtgtggacaagggaatgtgatgtgcacctctgtgtgttcctggggactgagagagaggtgtggggaggtaggagcgagggcgcggtgggaagtcatggaatggt

SEQ ID NO: 373775 - DNA, 6028 bp, Homo sapiens
caccgccagccaaagcagtcccttccatttcaggcaccggcctgggcccgggagacaccgcaaggctatttaagatggtgtggtttgcccatctacgttgatcgtcccaagaaaggggcaccgtctgcagaacttgccaggaaagtcatcctgggcggcgcgggccacgccagggtctccccgcgcggcttcctcccccggcgccttctctcgggcgcgcgtgcgccccctgcaggcggcccccgggagagcctcgcgggggagccgggagcctggtttccccgccaacccccatcccgcccgccccggcggccaccctgggggcgaggcagcccggcgcgtgggaggggacggcgcgccattggcttgtgcgcggaaccgagaggagggaccagcgcgggccgccagactcggtaagccccggccgcgcagggcgccgcgcgcagtccagccggcccggccctgccctgccctgtcctgccctgccctgccctgccctgccctgcactgcccggcccggcacgggcggcgcgatgtgaggcgtccgagcccggagcctccgcctggcatcagctccacgtagcccagcgccggcacgcgcgaggccccccttctgcagaggccgggctggaggagaagatggcggccaagcagcccccgcctctgatgaagaagcacagccagacggacctcgtgagccgcctgaagacccgcaagatcctcggcgtgggcggggaggatgacgacggggaggtgcatcgctccaagatcagccaggtcttaggcaatgaaatcaagtttaccattcgggagcctttggggctcagggtctggcagttcgtctctgctgtgctcttctccggcattgccatcatggcgcttgccttccctgaccagctctatgatgcggtctttgatggagcccaggtgaccagcaagacccccatccgcctctacggcggtgccctcctcagcatctccctgatcatgtggaacgctctctacacggctgagaaggtcatcattcgatggaccctgctcaccgaagcttgctatttcggggtccagttcttggtggtcactgccacgctagctgagacgggcctcatgtccctggggatcctgctgctcctggtcagccgcctcctttttgtcgtcatcagcatttactactattaccaagtcggccgaagacccaagaaggcctagttgcccgctgggcctggggccctgcccatgcctgggccagagtggcgctggggcctcggcttccctttggctcctggaaggcaggagggtcccctgccctgccccagtcctgccccagggaggcagggggtggggggccttcctttcctcctgggcaccccgtgtgctgtgatctcctgggctttcaggcttgacatgctggtctggggagagacagggcctctgctgccctgttcttcaccctcacagtgatacctcctttccttgggtctcttggcctccagaccccctcaatagacactgactaaagtcaagctggagtcatgagggtagtgggctaagtcgagggtccagcctcttctgccaggaagcccttcttgcttttgagagaggctgtgaccaccccccatccttctccctacactcccagccaacctagtgcccaagcagctaaacttggcttccttctaatcctggaaaaccctgtacccctcctcctcaatctggccctctccacatgcacaccctgaaaacacacacagacacacaacacacacacatacacacccctgaacacacacacagacacacatacacccatgatgtgagcaaacacacacacgtgcgccttcatagcccagccaagggcatgcaggcagggtgtgctgcctgagatggcacctccctttcagccattcttcaagaatgggccacacacagctagaagtcctctcccagctagaagtcctgtccccactctcctggcctgacaagatgagctctcctgggaccttgctctagggcactctgcctctaccctaggacactggaatgccctgggagccccctccctgcaaccagcctgagttcagccccacggacaaagggacacacagcccccaatggagaccattgtaagtggtggggctgggagaggaggaacagaaggaaagccatagcgctctcttgccccttggcatgtaccccaaggcctgatggccactgggctcagcctgtcccccactcctgcctgcttcccggtgagctgccccccacacgtgcagcccgggctgcctccagggtctggctgagtgggatcaggtggccctccaactcagcacaggaaataagtagaaacatttcagcaggccacctcccctcatcttccccgccctgtccagcgccctggcaaaggctgacaactggctgtcttggggccgaacagcccctgccctgcctctgagggcccaccagcctgtgctgcatacccaccgcccagcttctccctgagggcccaccagcctgtgctgcatacccaccgcccagcttctccctgagggcccaccagcctgtgctgtacaccccgttagtccctgatcccaaccttctccctcctgccagcacaccgatgcacacaccggaagtggcgagcccaagccctggggacaggtgtagggagaaaagcagccccaggcctcagactcgcttcccatcctggcatagagtgggggatggctggagggtgtctataggtacagcccgctctggctgctgccaggtgggcccctgccaggggtcctcacccctgtccaccctgtgcctggctgtccctgcacccagatacagcaacatggcctgtacccagcagagtggtggcaccaccatggttacagcggatgccccgagactctgcttggtaaacgtggcagagcagaatgggaggctggaccctgaggaagggcccctctcctggcatctgtctcttgctacctaagcctgtgcctctccctaaagagctgcctccctgctgccgagccctggtctggccacgagccactactgcctcccacaggcaccactgcctcccgctgctgcccacaggtggtgccgccaatgggcagtgccctcaggccgaagcctcaatcccccatctgagccaggcctaatcctctaatagtgatggttggtttgtcctcccataactgcaggtggattccacctggggaatgaggctgcgtgtcgggcgtctgctggccctgagacatccagtcttccacactcaactgtgggatgggagggtggcgtggccttaccccatgaggctgtccaggctctggcacacagctgtgctcacaaaatactgggtggcttggttagagctaattgtagtggagcctgcaggtgagggtgagggagggggctgcaggtcaggtaagatctggaagacagacgtacagcaggggcccttaagtccagcgaggaaagctcggtgtgggcccgctctacgctccgtttggggtgacctggaacgcctcttctcccagctccctccagccatcagcagcctcttgtcaagcttctgcctcgccccagtctatccccaaccccaaatcaagaccacctttcttcacggtcactatttattctttgttcctttttctttttgtaagaaacattcacaaaaaccagtgcaaaaccatcagtgtgggcgtcctgttttatattacaaaacttcctctggatatatcatataaaaggggggtctcacaggagagaaacgtgataaattagctctgcaatctacggcaaggaacatagtttttaaaatagactttcaacatatgacccatgggggaaggaggagggggcttctggggagacggcgggtgctggggcctcggctggtttgggaaatcctgtccgggccccttaagcatggatagagacatagacaagggaggctgtggacaggcctgagcaccaaggccagaaattaacagggaccctggggaggggccctcacccccagcccataaagagctattccctttctctaagaggcagtagcttcagagcaggaaagtggctttcgatacaggcagggtttgtgatgagcggtgtagtcttcttgttccttgccctgttagtggggtccgaggaagtctctgttatgggctgttgtatttcggggtgaaaagaaacaaagaggtatccctgcccacccctcccccacaaccccagccaccaccagaacctgctgtgggttgtatctggaccaagccagctaaaccctgtttctccctgtgctctggagggaggctcaagcctgatttgggctgagctttctttgccttgcctccaaggaatggcctcaggcagtcttgcaaatagctaccagcctgagcgaatgccaacaggagcagaaactgcctgtcttccctttccagcctaagagggtggccagtggctggctggcgagctgaatcagggctgattgagggttccttggcacatttgtagaaagctgctgaggggcagtcttgtgtctgcccttgaacccaccttagccagatttcccttcatgaccagccctttctcttgggtcctccctctgacttctgtgggccccagaagcctgggatgcccctggattagagccataaagctgtgcaatttgcctcagtcctgcccagcatgggttttttgttttttgtttttgtttttgtgtgtcatcctcagaccagccatttgcctcttccaaaaagctggggctaagcatgtgggtggttcaagaggggcagcccccaggccccaggctgggccgcggtaccagtggcaggtccccctgggtctcaggagcttagcttctacggagctcaggtgtcatttatggggttgccagagcaagctgttaaagggcgaatttggtaagactgagctcagagacctggtgggagggcaaggactggcgggcacagcaggaggagattagaggagggtccacctgaatctttgcagcaggcacagagcttctggctgcatctcagaagggggcagacgcacaggccagggaacacggggctctaggctgtggctccgagtgtccctggtgactggaaagcctgaggggaggctggaagctgatacaggatgccggtggcttgtgagacagaatgagctctttcttcctgaagagggacagaggggagagaagagagcagacatcacactgctccttccatccctgcccgtggcagacatcactaatcaaacttacggtgcctggcagacatcactcatcaggattgcactgccatctcccactgagcccagaccaaacctcagatccccagcacagcctccagcagccacccctgatctatcagggtaggagcatcttgcaatccagttgccaacactcgtctagagtttgagaactgaatacttgtgggtgtgcatctgcgagtctccctgcccaagcctggagggaatactaagaaatgtgcggacagtgaagagacaggaaaccttgttgcagcagaaatggcctcgatgccttcgggattctttagcctggagagaagagggctcaggggagtcaatgtgtgacctcaacactccaggaaggagagtgggcaagtgggatgccatggacagagccacagaaaaacagaaacctcttctgtgtattaagctgatgctaaagtcagagcagtccaaaggcaggaggctgccttgggaggtagtaagctctctgtccctggaggtatgcaagagggtggagaagtcttggcaaggatgttgaagaagatatccaagcctcagttctgggtgtggagagggagacccagatgatcttggggatttcttccactcttggagctggggagttggggaaggacagggaagggggtggcatgtgggagaggcgggcagtgtggacaagggaatgtgatgtgcacctctgtgtgttcctggggactgagagagaggtgtggggaggtaggagcgagggcgcggtgggaagtcatggaatggt

SEQ ID NO: 373776 - DNA, 5961 bp, Homo sapiens
caccgccagccaaagcagtcccttccatttcaggcaccggcctgggcccgggagacaccgcaaggctatttaagatggtgtggtttgcccatctacgttgatcgtcccaagaaaggggcaccgtctgcagaacttgccaggaaagtcatcctgggcggcgcgggccacgccagggtctccccgcgcggcttcctcccccggcgccttctctcgggcgcgcgtgcgccccctgcaggcggcccccgggagagcctcgcgggggagccgggagcctggtttccccgccaacccccatcccgcccgccccggcggccaccctgggggcgaggcagcccggcgcgtgggaggggacggcgcgccattggcttgtgcgcggaaccgagaggagggaccagcgcgggccgccagactcggtaagccccggccgcgcagggcgccgcgcgcagtccagccggcccggccctgccctgccctgtcctgccctgccctgccctgccctgccctgcactgcccggcccggcacgggcggcgcgatgtgaggcgtccgagcccggagcctccgcctggcatcagctccacgtagcccagcgccggcacgcgcgaggccccccttctgcagaggccgggctggaggagaagatggcggccaagcagcccccgcctctgatgaagaagcacagccagacggacctcgtgagccgcctgaagacccgcaagatcctcggcgtgggcggggaggatgacgacggggaggtgcatcgctccaagatcagccaggtcttaggcaatgaaatcaagtttaccattcgggagcctttggggctcagggtctggcagttcgtctctgctgtgctcttctccggcattgccatcatggcgcttgccttccctgaccagctctatgatgcggtctttgatggagcccaggtgaccagcaagacccccatccgcctctacggcggtgccctcctcagcatctccctgatcatgtggaacgctctctacacggctgagaaggtcatcattcgatggaccctgctcaccgaagcttgctatttcggggtccagttcttggtggtcactgccacgctagctgagacgggcctcatgtccctggggatcctgctgctcctggtcagccgcctcctttttgtcgtcatcagcatttactactattaccaagtcggccgaagacccaagaaggcctagttgcccgctgggcctggggccctgcccatgcctgggccagagtggcgctggggcctcggcttccctttggctcctggaaggcaggagggtcccctgccctgccccagtcctgccccagggaggcagggggtggggggccttcctttcctcctgggcaccccgtgtgctgtgatctcctgggctttcaggcttgacatgctggtctggggagagacagggcctctgctgccctgttcttcaccctcacagtgatacctcctttccttgggtctcttggcctccagaccccctcaatagacactgactaaagtcaagctggagtcatgagggtagtgggctaagtcgagggtccagcctcttctgccaggaagcccttcttgcttttgagagaggctgtgaccaccccccatccttctccctacactcccagccaacctagtgcccaagcagctaaacttggcttccttctaatcctggaaaaccctgtacccctcctcctcaatctggccctctccacatgcacaccctgaaaacacacacagacacacaacacacacacatacacacccctgaacacacacacagacacacatacacccatgatgtgagcaaacacacacacgtgcgccttcatagcccagccaagggcatgcaggcagggtgtgctgcctgagatggcacctccctttcagccattcttcaagaatgggccacacacagctagaagtcctctcccagctagaagtcctgtccccactctcctggcctgacaagatgagctctcctgggaccttgctctagggcactctgcctctaccctaggacactggaatgccctgggagccccctccctgcaaccagcctgagttcagccccacggacaaagggacacacagcccccaatggagaccattgtaagtggtggggctgggagaggaggaacagaaggaaagccatagcgctctcttgccccttggcatgtaccccaaggcctgatggccactgggctcagcctgtcccccactcctgcctgcttcccggtgagctgccccccacacgtgcagcccgggctgcctccagggtctggctgagtgggatcaggtggccctccaactcagcacaggaaataagtagaaacatttcagcaggccacctcccctcatcttccccgccctgtccagcgccctggcaaaggctgacaactggctgtcttggggccgaacagcccctgccctgcctctgagggcccaccagcctgtgctgcatacccaccgcccagcttctccctgagggcccaccagcctgtgctgcatacccaccgcccagcttctccctgagggcccaccagcctgtgctgtacaccccgttagtccctgatcccaaccttctccctcctgccagcacaccgatgcacacaccggaagtggcgagcccaagccctggggacaggtgtagggagaaaagcagccccaggcctcagactcgcttcccatcctggcatagagtgggggatggctggagggtgtctataggtacagcccgctctggctgctgccaggtgggcccctgccaggggtcctcacccctgtccaccctgtgcctggctgtccctgcacccagatacagcaacatggcctgtacccagcagagtggtggcaccaccatggttacagcggatgccccgagactctgcttggtaaacgtggcagagcagaatgggaggctggaccctgaggaagggcccctctcctggcatctgtctcttgctacctaagcctgtgcctctccctaaagagctgcctccctgctgccgagccctggtctggccacgagccactactgcctcccacaggcaccactgcctcccgctgctgcccacaggtggtgccgccaatgggcagtgccctcaggccgaagcctcaatcccccatctgagccaggcctaatcctctaatagtgatggttggtttgtcctcccataactgcaggtggattccacctggggaatgaggctgcgtgtcgggcgtctgctggccctgagacatccagtcttccacactcaactgtgggatgggagggtggcgtggccttaccccatgaggctgtccaggctctggcacacagctgtgctcacaaaatactgggtggcttggttagagctaattgtagtcaggggcccttaagtccagcgaggaaagctcggtgtgggcccgctctacgctccgtttggggtgacctggaacgcctcttctcccagctccctccagccatcagcagcctcttgtcaagcttctgcctcgccccagtctatccccaaccccaaatcaagaccacctttcttcacggtcactatttattctttgttcctttttctttttgtaagaaacattcacaaaaaccagtgcaaaaccatcagtgtgggcgtcctgttttatattacaaaacttcctctggatatatcatataaaaggggggtctcacaggagagaaacgtgataaattagctctgcaatctacggcaaggaacatagtttttaaaatagactttcaacatatgacccatgggggaaggaggagggggcttctggggagacggcgggtgctggggcctcggctggtttgggaaatcctgtccgggccccttaagcatggatagagacatagacaagggaggctgtggacaggcctgagcaccaaggccagaaattaacagggaccctggggaggggccctcacccccagcccataaagagctattccctttctctaagaggcagtagcttcagagcaggaaagtggctttcgatacaggcagggtttgtgatgagcggtgtagtcttcttgttccttgccctgttagtggggtccgaggaagtctctgttatgggctgttgtatttcggggtgaaaagaaacaaagaggtatccctgcccacccctcccccacaaccccagccaccaccagaacctgctgtgggttgtatctggaccaagccagctaaaccctgtttctccctgtgctctggagggaggctcaagcctgatttgggctgagctttctttgccttgcctccaaggaatggcctcaggcagtcttgcaaatagctaccagcctgagcgaatgccaacaggagcagaaactgcctgtcttccctttccagcctaagagggtggccagtggctggctggcgagctgaatcagggctgattgagggttccttggcacatttgtagaaagctgctgaggggcagtcttgtgtctgcccttgaacccaccttagccagatttcccttcatgaccagccctttctcttgggtcctccctctgacttctgtgggccccagaagcctgggatgcccctggattagagccataaagctgtgcaatttgcctcagtcctgcccagcatgggttttttgttttttgtttttgtttttgtgtgtcatcctcagaccagccatttgcctcttccaaaaagctggggctaagcatgtgggtggttcaagaggggcagcccccaggccccaggctgggccgcggtaccagtggcaggtccccctgggtctcaggagcttagcttctacggagctcaggtgtcatttatggggttgccagagcaagctgttaaagggcgaatttggtaagactgagctcagagacctggtgggagggcaaggactggcgggcacagcaggaggagattagaggagggtccacctgaatctttgcagcaggcacagagcttctggctgcatctcagaagggggcagacgcacaggccagggaacacggggctctaggctgtggctccgagtgtccctggtgactggaaagcctgaggggaggctggaagctgatacaggatgccggtggcttgtgagacagaatgagctctttcttcctgaagagggacagaggggagagaagagagcagacatcacactgctccttccatccctgcccgtggcagacatcactaatcaaacttacggtgcctggcagacatcactcatcaggattgcactgccatctcccactgagcccagaccaaacctcagatccccagcacagcctccagcagccacccctgatctatcagggtaggagcatcttgcaatccagttgccaacactcgtctagagtttgagaactgaatacttgtgggtgtgcatctgcgagtctccctgcccaagcctggagggaatactaagaaatgtgcggacagtgaagagacaggaaaccttgttgcagcagaaatggcctcgatgccttcgggattctttagcctggagagaagagggctcaggggagtcaatgtgtgacctcaacactccaggaaggagagtgggcaagtgggatgccatggacagagccacagaaaaacagaaacctcttctgtgtattaagctgatgctaaagtcagagcagtccaaaggcaggaggctgccttgggaggtagtaagctctctgtccctggaggtatgcaagagggtggagaagtcttggcaaggatgttgaagaagatatccaagcctcagttctgggtgtggagagggagacccagatgatcttggggatttcttccactcttggagctggggagttggggaaggacagggaagggggtggcatgtgggagaggcgggcagtgtggacaagggaatgtgatgtgcacctctgtgtgttcctggggactgagagagaggtgtggggaggtaggagcgagggcgcggtgggaagtcatggaatggt

SEQ ID NO: 373777 - DNA, 2778 bp, Homo sapiens
tagaggcagtgaatcgagctcggtacctgggtggcttggttagagctaattgtagtggagcctgcaggtgagggtgagggagggggctgcaggtcaggtaagatctggaagacagacgtacagcttggagggcagggggactctaaggcaaggagatttacagttgggaaggaggcagtggcagaggggtgagggacaggggcccttaagtccagcgaggaaagctcggtgtgggcccgctctacgctccgtttggggtgacctggaacgcctcttctcccagctccctccagccatcagcagcctcttgtcaagcttctgcctcgccccagtctatccccaaccccaaatcaagaccacctttcttcacggtcactatttattctttgttcctttttctttttgtaagaaacattcacaaaaaccagtgcaaaaccatcagtgtgggcgtcctgttttatattacaaaacttcctctggatatatcatataaaaggggggtctcacaggagagaaacgtgataaattagctctgcaatctacggcaaggaacatagtttttaaaatagactttcaacatatgacccatgggggaaggaggagggggcttctggggagacggcgggtgctggggcctcggctggtttgggaaatcctgtccgggccccttaagcatggatagagacatagacaagggaggctgtggacaggcctgagcaccaaggccagaaattaacagggaccctggggaggggccctcacccccagcccataaagagctattccctttctctaagaggcagtagcttcagagcaggaaagtggctttcgatacaggcagggtttgtgatgagcggtgtagtcttcttgttccttgccctgttagtggggtccgaggaagtctctgttatgggctgttgtatttcggggtgaaaagaaacaaagaggtatccctgcccacccctcccccacaaccccagccaccaccagaacctgctgtgggttgtatctggaccaagccagctaaaccctgtttctccctgtgctctggagggaggctcaagcctgatttgggctgagctttctttgccttgcctccaaggaatggcctcaggcagtcttgcaaatagctaccagcctgagcgaatgccaacaggagcagaaactgcctgtcttccctttccagcctaagagggtggccagtggctggctggcgagctgaatcagggctgattgagggttccttggcacatttgtagaaagctgctgaggggcagtcttgtgtctgcccttgaacccaccttagccagatttcccttcatgaccagccctttctcttgggtcctccctctgacttctgtgggccccagaagcctgggatgcccctggattagagccataaagctgtgcaatttgcctcagtcctgcccagcatgggttttttgttttttgtttttgtttttgtgtgtcatcctcagaccagccatttgcctcttccaaaaagctggggctaagcatgtgggtggttcaagaggggcagcccccaggccccaggctgggccgcggtaccagtggcaggtccccctgggtctcaggagcttagcttctacggagctcaggtgtcatttatggggttgccagagcaagctgttaaagggcgaatttggtaagactgagctcagagacctggtgggagggcaaggactggcgggcacagcaggaggagattagaggagggtccacctgaatctttgcagcaggcacagagcttctggctgcatctcagaagggggcagacgcacaggccagggaacacggggctctaggctgtggctccgagtgtccctggtgactggaaagcctgaggggaggctggaagctgatacaggatgccggtggcttgtgagacagaatgagctctttcttcctgaagagggacagaggggagagaagagagcagacatcacactgctccttccatccctgcccgtggcagacatcactaatcaaacttacggtgcctggcagacatcactcatcaggattgcactgccatctcccactgagcccagaccaaacctcagatccccagcacagcctccagcagccacccctgatctatcagggtaggagcatcttgcaatccagttgccaacactcgtctagagtttgagaactgaatacttgtgggtgtgcatctgcgagtctccctgcccaagcctggagggaatactaagaaatgtgcggacagtgaagagacaggaaaccttgttgcagcagaaatggcctcgatgccttcgggattctttagcctggagagaagagggctcaggggagtcaatgtgtgacctcaacactccaggaaggagagtgggcaagtgggatgccatggacagagccacagaaaaacagaaacctcttctgtgtattaagctgatgctaaagtcagagcagtccaaaggcaggaggctgccttgggaggtagtaagctctctgtccctggaggtatgcaagagggtggagaagtcttggcaaggatgttgaagaagatatccaagcctcagttctgggtgtggagagggagacccagatgatcttggggatttcttccactcttggagctggggagttggggaaggacagggaagggggtggcatgtgggagaggcgggcagtgtggacaagggaatgtgatgtgcacctctgtgtgttcctggggactgagagagaggtgtggggaggtaggagcgagggcgcggtgggaagtcatggaatggt

SEQ ID NO: 373778 - DNA, 4442 bp, Homo sapiens
caccgccagccaaagcagtcccttccatttcaggcaccggcctgggcccgggagacaccgcaaggctatttaagatggtgtggtttgcccatctacgttgatcgtcccaagaaaggggcaccgtctgcagaacttgccaggaaagtcatcctgggcggcgcgggccacgccagggtctccccgcgcggcttcctcccccggcgccttctctcgggcgcgcgtgcgccccctgcaggcggcccccgggagagcctcgcgggggagccgggagcctggtttccccgccaacccccatcccgcccgccccggcggccaccctgggggcgaggcagcccggcgcgtgggaggggacggcgcgccattggcttgtgcgcggaaccgagaggagggaccagcgcgggccgccagactcggtaagccccggccgcgcagggcgccgcgcgcagtccagccggcccggccctgccctgccctgtcctgccctgccctgccctgccctgccctgcactgcccggcccggcacgggcggcgcgatgtgaggcgtccgagcccggagcctccgcctggcatcagctccacgtagcccagcgccggcacgcgcgaggccccccttctgcagaggccgggctggaggagaagatggcggccaagcagcccccgcctctgatgaagaagcacagccagacggacctcgtgagccgcctgaagacccgcaagatcctcggcgtgggcggggaggatgacgacggggaggtgcatcgctccaagatcagccaggtcttaggcaatgaaatcaagtttaccattcgggagcctttggggctcagggtctggcagttcgtctctgctgtgctcttctccggcattgccatcatggcgcttgccttccctgaccagctctatgatgcggtctttgatggagcccaggtgaccagcaagacccccatccgcctctacggcggtgccctcctcagcatctccctgatcatgtggaacgctctctacacggctgagaaggtcatcattcgatggaccctgctcaccgaagcttgctatttcggggtccagttcttggtggtcactgccacgctagctgagacgggcctcatgtccctggggatcctgctgctcctggtcagccgcctcctttttgtcgtcatcagcatttactactattaccaagtcggccgaagacccaagaaggcctagttgcccgctgggcctggggccctgcccatgcctgggccagagtggcgctggggcctcggcttccctttggctcctggaaggcaggagggtcccctgccctgccccagtcctgccccagggaggcagggggtggggggccttcctttcctcctgggcaccccgtgtgctgtgatctcctgggctttcaggcttgacatgctggtctggggagagacagggcctctgctgccctgttcttcaccctcacagtgatacctcctttccttgggtctcttggcctccagaccccctcaatagacactgactaaagtcaagctggagtcatgagggtagtgggctaagtcgagggtccagcctcttctgccaggaagcccttcttgcttttgagagaggctgtgaccaccccccatccttctccctacactcccagccaacctagtgcccaagcagctaaacttggcttccttctaatcctggaaaaccctgtacccctcctcctcaatctggccctctccacatgcacaccctgaaaacacacacagacacacaacacacacacatacacacccctgaacacacacacagacacacatacacccatgatgtgagcaaacacacacacgtgcgccttcatagcccagccaagggcatgcaggcagggtgtgctgcctgagatggcacctccctttcagccattcttcaagaatgggccacacacagctagaagtcctctcccagctccctccagccatcagcagcctcttgtcaagcttctgcctcgccccagtctatccccaaccccaaatcaagaccacctttcttcacggtcactatttattctttgttcctttttctttttgtaagaaacattcacaaaaaccagtgcaaaaccatcagtgtgggcgtcctgttttatattacaaaacttcctctggatatatcatataaaaggggggtctcacaggagagaaacgtgataaattagctctgcaatctacggcaaggaacatagtttttaaaatagactttcaacatatgacccatgggggaaggaggagggggcttctggggagacggcgggtgctggggcctcggctggtttgggaaatcctgtccgggccccttaagcatggatagagacatagacaagggaggctgtggacaggcctgagcaccaaggccagaaattaacagggaccctggggaggggccctcacccccagcccataaagagctattccctttctctaagaggcagtagcttcagagcaggaaagtggctttcgatacaggcagggtttgtgatgagcggtgtagtcttcttgttccttgccctgttagtggggtccgaggaagtctctgttatgggctgttgtatttcggggtgaaaagaaacaaagaggtatccctgcccacccctcccccacaaccccagccaccaccagaacctgctgtgggttgtatctggaccaagccagctaaaccctgtttctccctgtgctctggagggaggctcaagcctgatttgggctgagctttctttgccttgcctccaaggaatggcctcaggcagtcttgcaaatagctaccagcctgagcgaatgccaacaggagcagaaactgcctgtcttccctttccagcctaagagggtggccagtggctggctggcgagctgaatcagggctgattgagggttccttggcacatttgtagaaagctgctgaggggcagtcttgtgtctgcccttgaacccaccttagccagatttcccttcatgaccagccctttctcttgggtcctccctctgacttctgtgggccccagaagcctgggatgcccctggattagagccataaagctgtgcaatttgcctcagtcctgcccagcatgggttttttgttttttgtttttgtttttgtgtgtcatcctcagaccagccatttgcctcttccaaaaagctggggctaagcatgtgggtggttcaagaggggcagcccccaggccccaggctgggccgcggtaccagtggcaggtccccctgggtctcaggagcttagcttctacggagctcaggtgtcatttatggggttgccagagcaagctgttaaagggcgaatttggtaagactgagctcagagacctggtgggagggcaaggactggcgggcacagcaggaggagattagaggagggtccacctgaatctttgcagcaggcacagagcttctggctgcatctcagaagggggcagacgcacaggccagggaacacggggctctaggctgtggctccgagtgtccctggtgactggaaagcctgaggggaggctggaagctgatacaggatgccggtggcttgtgagacagaatgagctctttcttcctgaagagggacagaggggagagaagagagcagacatcacactgctccttccatccctgcccgtggcagacatcactaatcaaacttacggtgcctggcagacatcactcatcaggattgcactgccatctcccactgagcccagaccaaacctcagatccccagcacagcctccagcagccacccctgatctatcagggtaggagcatcttgcaatccagttgccaacactcgtctagagtttgagaactgaatacttgtgggtgtgcatctgcgagtctccctgcccaagcctggagggaatactaagaaatgtgcggacagtgaagagacaggaaaccttgttgcagcagaaatggcctcgatgccttcgggattctttagcctggagagaagagggctcaggggagtcaatgtgtgacctcaacactccaggaaggagagtgggcaagtgggatgccatggacagagccacagaaaaacagaaacctcttctgtgtattaagctgatgctaaagtcagagcagtccaaaggcaggaggctgccttgggaggtagtaagctctctgtccctggaggtatgcaagagggtggagaagtcttggcaaggatgttgaagaagatatccaagcctcagttctgggtgtggagagggagacccagatgatcttggggatttcttccactcttggagctggggagttggggaaggacagggaagggggtggcatgtgggagaggcgggcagtgtggacaagggaatgtgatgtgcacctctgtgtgttcctggggactgagagagaggtgtggggaggtaggagcgagggcgcggtgggaagtcatggaatggt

SEQ ID NO: 373779 - DNA, 3423 bp, Homo sapiens
caccgccagccaaagcagtcccttccatttcaggcaccggcctgggcccgggagacaccgcaaggctatttaagatggtgtggtttgcccatctacgttgatcgtcccaagaaaggggcaccgtctgcagaacttgccaggaaagtcatcctgggcggcgcgggccacgccagggtctccccgcgcggcttcctcccccggcgccttctctcgggcgcgcgtgcgccccctgcaggcggcccccgggagagcctcgcgggggagccgggagcctggtttccccgccaacccccatcccgcccgccccggcggccaccctgggggcgaggcagcccggcgcgtgggaggggacggcgcgccattggcttgtgcgcggaaccgagaggagggaccagcgcgggccgccagactcggtaagccccggccgcgcagggcgccgcgcgcagtccagccggcccggccctgccctgccctgtcctgccctgccctgccctgccctgccctgcactgcccggcccggcacgggcggcgcgatgtgaggcgtccgagcccggagcctccgcctggcatcagctccacgtagcccagcgccggcacgcgcgaggccccccttctgcagaggccgggctggaggagaagatggcggccaagcagcccccgcctctgatgaagaagcacagccagacggacctcgtgagccgcctgaagacccgcaagatcctcggcgtgggcggggaggatgacgacggggaggtgcatcgctccaagatcagccaggtcttaggcaatgaaatcaagtttaccattcgggagcctttggggctcagggtctggcagttcgtctctgctgtgctcttctccggcattgccatcatggcgcttgccttccctgaccagctctatgatgcggtctttgatggagcccaggtgaccagcaagacccccatccgcctctacggcggtgccctcctcagcatctccctgatcatgtggaacgctctctacacggctgagaaggtcatcattcgatggaccctgctcaccgaagcttgctatttcggggtccagttcttggtggtcactgccacgctagctgagacgggcctcatgtccctggggatcctgctgctcctggtcagccgcctcctttttgtcgtcatcagcatttactactattaccaagtcggccgaagacccaagaaggcctagttgcccgctgggcctggggccctgcccatgcctgggccagagtggcgctggggcctcggcttccctttggctcctggaaggcaggagggtcccctgccctgccccagtcctgccccagggaggcagggggtggggggccttcctttcctcctgggcaccccgtgtgctgtgatctcctgggctttcaggcttgacatgctggtctggggagagacagggcctctgctgccctgttcttcaccctcacagtgatacctcctttccttgggtctcttggcctccagaccccctcaatagacactgactaaagtcaagctggagtcatgagggtagtgggctaagtcgagggtccagcctcttctgccaggaagcccttcttgcttttgagagaggctgtgaccaccccccatccttctccctacactcccagccaacctagtgcccaagcagctaaacttggcttccttctaatcctggaaaaccctgtacccctcctcctcaatctggccctctccacatgcacaccctgaaaacacacacagacacacaacacacacacatacacacccctgaacacacacacagacacacatacacccatgatgtgagcaaacacacacacgtgcgccttcatagcccagccaagggcatgcaggcagggtgtgctgcctgagatggcacctccctttcagccattcttcaagaatgggccacacacagctagaagtcctctcccagctagaagtcctgtccccactctcctggcctgacaagatgagctctcctgggaccttgctctagggcactctgcctctaccctaggacactggaatgccctgggagccccctccctgcaaccagcctgagttcagccccacggacaaagggacacacagcccccaatggagaccattgtaagtggtggggctgggagaggaggaacagaaggaaagccatagcgctctcttgccccttggcatgtaccccaaggcctgatggccactgggctcagcctgtcccccactcctgcctgcttcccggtgagctgccccccacacgtgcagcccgggctgcctccagggtctggctgagtgggatcaggtggccctccaactcagcacaggaaataagtagaaacatttcagcaggccacctcccctcatcttccccgccctgtccagcgccctggcaaaggctgacaactggctgtcttggggccgaacagcccctgccctgcctctgagggcccaccagcctgtgctgcatacccaccgcccagcttctccctgagggcccaccagcctgtgctgcatacccaccgcccagcttctccctgagggcccaccagcctgtgctgtacaccccgttagtccctgatcccaaccttctccctcctgccagcacaccgatgcacacaccggaagtggcgagcccaagccctggggacaggtgtagggagaaaagcagccccaggcctcagactcgcttcccatcctggcatagagtgggggatggctggagggtgtctataggtacagcccgctctggctgctgccaggtgggcccctgccaggggtcctcacccctgtccaccctgtgcctggctgtccctgcacccagatacagcaacatggcctgtacccagcagagtggtggcaccaccatggttacagcggatgccccgagactctgcttggtaaacgtggcagagcagaatgggaggctggaccctgaggaagggcccctctcctggcatctgtctcttgctacctaagcctgtgcctctccctaaagagctgcctccctgctgccgagccctggtctggccacgagccactactgcctcccacaggcaccactgcctcccgctgctgcccacaggtggtgccgccaatgggcagtgccctcaggccgaagcctcaatcccccatctgagccaggcctaatcctctaatagtgatggttggtttgtcctcccataactgcaggtggattccacctggggaatgaggctgcgtgtcgggcgtctgctggccctgagacatccagtcttccacactcaactgtgggatgggagggtggcgtggccttaccccatgaggctgtccaggctctggcacacaaattagcttcaaaaaaacttggggggcactgttttattaattttgactggtctcctttgatatagttaagagggcattctttatttaatat

SEQ ID NO: 373780 - DNA, 3347 bp, Homo sapiens
caccgccagccaaagcagtcccttccatttcaggcaccggcctgggcccgggagacaccgcaaggctatttaagatggtgtggtttgcccatctacgttgatcgtcccaagaaaggggcaccgtctgcagaacttgccaggaaagtcatcctgggcggcgcgggccacgccagggtctccccgcgcggcttcctcccccggcgccttctctcgggcgcgcgtgcgccccctgcaggcggcccccgggagagcctcgcgggggagccgggagcctggtttccccgccaacccccatcccgcccgccccggcggccaccctgggggcgaggcagcccggcgcgtgggaggggacggcgcgccattggcttgtgcgcggaaccgagaggagggaccagcgcgggccgccagactcggtaagccccggccgcgcagggcgccgcgcgcagtccagccggcccggccctgccctgccctgtcctgccctgccctgccctgccctgccctgcactgcccggcccggcacgggcggcgcgatgtgaggcgtccgagcccggagcctccgcctggcatcagctccacgtagcccagcgccggcacgcgcgaggccccccttctgcagaggccgggctggaggagaagatggcggccaagcagcccccgcctctgatgaagaagcacagccagacggacctcgtgagccgcctgaagacccgcaagatcctcggcgtgggcggggaggatgacgacggggaggtgcatcgctccaagatcagccaggtcttaggcaatgaaatcaagtttaccattcgggagcctttggggctcagggtctggcagttcgtctctgctgtgctcttctccggcattgccatcatggcgcttgccttccctgaccagctctatgatgcggtctttgatggagcccaggtgaccagcaagacccccatccgcctctacggcggtgccctcctcagcatctccctgatcatgtggaacgctctctacacggctgagaaggtcatcattcgatggaccctgctcaccgaagcttgctatttcggggtccagttcttggtggtcactgccacgctagctgagacgggcctcatgtccctggggatcctgctgctcctggtcagccgcctcctttttgtcgtcatcagcatttactactattaccaagtcggccgaagacccaagaaggcctagttgcccgctgggcctggggccctgcccatgcctgggccagagtggcgctggggcctcggcttccctttggctcctggaaggcaggagggtcccctgccctgccccagtcctgccccagggaggcagggggtggggggccttcctttcctcctgggcaccccgtgtgctgtgatctcctgggctttcaggcttgacatgctggtctggggagagacagggcctctgctgccctgttcttcaccctcacagtgatacctcctttccttgggtctcttggcctccagaccccctcaatagacactgactaaagtcaagctggagtcatgagggtagtgggctaagtcgagggtccagcctcttctgccaggaagcccttcttgcttttgagagaggctgtgaccaccccccatccttctccctacactcccagccaacctagtgcccaagcagctaaacttggcttccttctaatcctggaaaaccctgtacccctcctcctcaatctggccctctccacatgcacaccctgaaaacacacacagacacacaacacacacacatacacacccctgaacacacacacagacacacatacacccatgatgtgagcaaacacacacacgtgcgccttcatagcccagccaagggcatgcaggcagggtgtgctgcctgagatggcacctccctttcagccattcttcaagaatgggccacacacagctagaagtcctctcccagctagaagtcctgtccccactctcctggcctgacaagatgagctctcctgggaccttgctctagggcactctgcctctaccctaggacactggaatgccctgggagccccctccctgcaaccagcctgagttcagccccacggacaaagggacacacagcccccaatggagaccattgtaagtggtggggctgggagaggaggaacagaaggaaagccatagcgctctcttgccccttggcatgtaccccaaggcctgatggccactgggctcagcctgtcccccactcctgcctgcttcccggtgagctgccccccacacgtgcagcccgggctgcctccagggtctggctgagtgggatcaggtggccctccaactcagcacaggaaataagtagaaacatttcagcaggccacctcccctcatcttccccgccctgtccagcgccctggcaaaggctgacaactggctgtcttggggccgaacagcccctgccctgcctctgagggcccaccagcctgtagcaatgtaccgaccatgcctatgaactccgccaagtaggtgtccagtctctagacatgcaaacctcacctattcctaactaacaggcaagaaaatcccacctactcgatggcaggcatccgccatgagtgcggcagaacccaactttgcacccaccatgcaacttagcaatgcgcatggcagagagaattaatcccagaggccaggtaggtacacagaaaacaaagtcaggcgctggaggctggatgacgactcagccgcgaaccggggcaaaacagggaggatggaggagcggaattggtgacaataaaatgacagacccttcacagagcaatgggaccaggtggaggggcccctgcccagggagatccttctccccgaagcgcacccgggtggaagctctaaacgaattgcccttgcggcctcatgattgacaaacgagatttatacccgaagacgccccatcgattaatggagggaatggcccagctaaaatggaatcgtcgaatatatcttctcaggaatgcgacaagctagagggcgacgaaaaacgaaaagctctgaaaaattcgaagtcgtggactgctgacgcgtaaggagacccgccggcgacccgaggccttccgagcctcacctaaagcggaatcccgagaaggccgaagatcggacggggccgaaatttgaaagccaacaccaactgcaggcgttccctgggtccccagtggcgtatagcccgcgaagcgccgtcgaagagagcggacccccaggaggcgccgacgaaaccgtcccaacgggggtcccacacgagtatatagtgcacctcggatagggcggcgccctcaaaccagacagcgctaaagccgcccatgggagacccga

SEQ ID NO: 373781 - DNA, 1662 bp, Homo sapiens
agcggagtctttgcccccgcagggccgcggacggaggtggtggcggagttcccgctgcccacaagtctggcccgaccttctggggtgggggcctgggggcaggggccctgggccggagaacccggggccgcctaacggctcggagctcaccgccgggggacaccggcgctgaggcctgggtctcagaaagtgggaagtgggaatgatggctccatttcacagatgaggaaaccgagactcagagcacaaggccacacagcaggaagagagaaatgaaaacttacggtcccacagaaacgcgggtttgtagcagctctattcataatcatcaacaactggaaacaacccacatggccttcagtgaccgaatggataaacaagctgttacacgtaccccagggaatactgctctccaataaaaaggagcggactcttgatacacacagtgacttggaggaatctcaaaggcattctgctcaatgacaggagccagcctcaaaagatttggctgactgaggacgcgacaggtactcagcttctttctgcatctcagtcgcccagcacaggggctggcacgcacccttctgcagaggccgggctggaggagaagatggcggccaagcagcccccgcctctgatgaagaagcacagccagacggacctcgtgagccgcctgaagacccgcaagatcctcggcgtgggcggggaggatgacgacggggaggtgcatcgctccaagtacacccagtgggttggagcttgcagtcgccaccatctgcaaggagcgctcataagtgtgtgcactgcctctgggcgttgtggtacagagatggaggaagcccaggcccagcctctaggaattcacagcctagaggagaggcagatcaattcagtgtctgcaaaacccctcgcaccccccctattttatccccagagccacttctgtttgaaccacttctgtttcctctctaacctgagatgcacacgttaggatttggaattacaatttttaaagctcagcataggtaatatgcctctatttctacgaaatattctatggctccctattgcctacagaataaaggctgagctcctctggagttagggttgctggaataaaataaatgcacacccagtggcatgtctggtaccagcagacactgggtgggtggggcctgctagaggccaagtcagtggtcttctgctaaaaagtatggttcatccccctcccccaggggacttccttaaagcgagtccttaccgggctcaggttttctgtctgggagtccgtgtaaaagaaaacccaatcataggaccaggtaacccattaactcatgaactccatcaacacagcatcctcctgacagaaccggacatgggcaggggccaggggctcagtcctccccctttataaagagatcgagtctcaatgcggggaagtgactcgcccagtgtcacatagggccttggaatgacaggagcaggctgaagcagcagcattgagtctggaggggacaggatcggggacagacagctttgatttgagaaatgtgaataggggcggaggcgtggagtccaggaccccagctgtcttgcagcagtggccagaggaagcaggagcagtcctcctgccctgctgggagggagtcagctgtcccaccc

SEQ ID NO: 373782 - DNA, 345 bp, Homo sapiens
aacaactggaaacaacccacatggccttcagtgaccgaatggataaacaagctgttacacgtaccccagggaatactgctctccaataaaaaggagcggactcttgatacacacagtgacttggaggaatctcaaaggcattctgctcaatgacaggagccagcctcaaaaggttctacgctttatcattccacttacatggcatatttgaaaacacaaaagccatagtgtcagagaatagatcagtggttgccagggtggaggtgtgaggggagggagtggccagcgccagggagtttttggggtgatggaactgctcgttgtcttgatctggagctggtggct

SEQ ID NO: 373783 - DNA, 790 bp, Homo sapiens
cgctgggacacatcccctcctctgaccctgtggccttgctggactctctcccacagtggtcactgccacgctagctgagacgggcctcatgtccctggggatcctgctgctcctggtcagccgcctcctttttgtcgtcatcagcatttactactattaccaagtcggccgaagacccaagaaggcctagttgcccgctgggcctggggccctgcccatgcctgggccagagtggcgctggggcctcggcttccctttggctcctggaaggcaggagggtcccctgccctgccccagtcctgccccagggaggcagggggtggggggccttcctttcctcctgggcaccccgtgtgctgtgatctcctgggctttcaggcttgacatgctggtctggggagagacagggcctctgctgccctgttcttcaccctcacagtgatacctcctttccttgggtctcttggcctccagaccccctcaatagacactgactaaagtcaagctggagtcatgagggtagtgggctaagtcgagggtccagcctcttctgccaggaagcccttcttgcttttgagagaggctgtgaccaccccccatccttctccctacactcccagccaacctagtgcccaagcagctaaacttggcttccttctaatcctggaaaaccctgtacccctcctcctcaatctggccctctccacatgcacaccctgaaaacacacacagacacacaacacacacacatacacacccctgaacacacacacagacacacatacaccca

SEQ ID NO: 373784 - DNA, 6101 bp, Homo sapiens
caccgccagccaaagcagtcccttccatttcaggcaccggcctgggcccgggagacaccgcaaggctatttaagatggtgtggtttgcccatctacgttgatcgtcccaagaaaggggcaccgtctgcagaacttgccaggaaagtcatcctgggcggcgcgggccacgccagggtctccccgcgcggcttcctcccccggcgccttctctcgggcgcgcgtgcgccccctgcaggcggcccccgggagagcctcgcgggggagccgggagcctggtttccccgccaacccccatcccgcccgccccggcggccaccctgggggcgaggcagcccggcgcgtgggaggggacggcgcgccattggcttgtgcgcggaaccgagaggagggaccagcgcgggccgccagactcggtaagccccggccgcgcagggcgccgcgcgcagtccagccggcccggccctgccctgccctgtcctgccctgccctgccctgccctgccctgcactgcccggcccggcacgggcggcgcgatgtgaggcgtccgagcccggagcctccgcctggcatcagctccacgtagcccagcgccggcacgcgcgaggccccccttctgcagaggccgggctggaggagaagatggcggccaagcagcccccgcctctgatgaagaagcacagccagacggacctcgtgagccgcctgaagacccgcaagatcctcggcgtgggcggggaggatgacgacggggaggtgcatcgctccaagatcagccaggtcttaggcaatgaaatcaagtttaccattcgggagcctttggggctcagggtctggcagttcgtctctgctgtgctcttctccggcattgccatcatggcgcttgccttccctgaccagctctatgatgcggtctttgatggagcccaggtgaccagcaagacccccatccgcctctacggcggtgccctcctcagcatctccctgatcatgtggaacgctctctacacggctgagaaggtcatcattcgatggaccctgctcaccgaagcttgctatttcggggtccagttcttggtggtcactgccacgctagctgagacgggcctcatgtccctggggatcctgctgctcctggtcagccgcctcctttttgtcgtcatcagcatttactactattaccaagtcggccgaagacccaagaaggcctagttgcccgctgggcctggggccctgcccatgcctgggccagagtggcgctggggcctcggcttccctttggctcctggaaggcaggagggtcccctgccctgccccagtcctgccccagggaggcagggggtggggggccttcctttcctcctgggcaccccgtgtgctgtgatctcctgggctttcaggcttgacatgctggtctggggagagacagggcctctgctgccctgttcttcaccctcacagtgatacctcctttccttgggtctcttggcctccagaccccctcaatagacactgactaaagtcaagctggagtcatgagggtagtgggctaagtcgagggtccagcctcttctgccaggaagcccttcttgcttttgagagaggctgtgaccaccccccatccttctccctacactcccagccaacctagtgcccaagcagctaaacttggcttccttctaatcctggaaaaccctgtacccctcctcctcaatctggccctctccacatgcacaccctgaaaacacacacagacacacaacacacacacatacacacccctgaacacacacacagacacacatacacccatgatgtgagcaaacacacacacgtgcgccttcatagcccagccaagggcatgcaggcagggtgtgctgcctgagatggcacctccctttcagccattcttcaagaatgggccacacacagctagaagtcctctcccagctagaagtcctgtccccactctcctggcctgacaagatgagctctcctgggaccttgctctagggcactctgcctctaccctaggacactggaatgccctgggagccccctccctgcaaccagcctgagttcagccccacggacaaagggacacacagcccccaatggagaccattgtaagtggtggggctgggagaggaggaacagaaggaaagccatagcgctctcttgccccttggcatgtaccccaaggcctgatggccactgggctcagcctgtcccccactcctgcctgcttcccggtgagctgccccccacacgtgcagcccgggctgcctccagggtctggctgagtgggatcaggtggccctccaactcagcacaggaaataagtagaaacatttcagcaggccacctcccctcatcttccccgccctgtccagcgccctggcaaaggctgacaactggctgtcttggggccgaacagcccctgccctgcctctgagggcccaccagcctgtgctgcatacccaccgcccagcttctccctgagggcccaccagcctgtgctgcatacccaccgcccagcttctccctgagggcccaccagcctgtgctgtacaccccgttagtccctgatcccaaccttctccctcctgccagcacaccgatgcacacaccggaagtggcgagcccaagccctggggacaggtgtagggagaaaagcagccccaggcctcagactcgcttcccatcctggcatagagtgggggatggctggagggtgtctataggtacagcccgctctggctgctgccaggtgggcccctgccaggggtcctcacccctgtccaccctgtgcctggctgtccctgcacccagatacagcaacatggcctgtacccagcagagtggtggcaccaccatggttacagcggatgccccgagactctgcttggtaaacgtggcagagcagaatgggaggctggaccctgaggaagggcccctctcctggcatctgtctcttgctacctaagcctgtgcctctccctaaagagctgcctccctgctgccgagccctggtctggccacgagccactactgcctcccacaggcaccactgcctcccgctgctgcccacaggtggtgccgccaatgggcagtgccctcaggccgaagcctcaatcccccatctgagccaggcctaatcctctaatagtgatggttggtttgtcctcccataactgcaggtggattccacctggggaatgaggctgcgtgtcgggcgtctgctggccctgagacatccagtcttccacactcaactgtgggatgggagggtggcgtggccttaccccatgaggctgtccaggctctggcacacagctgtgctcacaaaatactgggtggcttggttagagctaattgtagtggagcctgcaggtgagggtgagggagggggctgcaggtcaggtaagatctggaagacagacgtacagcttggagggcagggggactctaaggcaaggagatttacagttgggaaggaggcagtggcagaggggtgagggacaggggcccttaagtccagcgaggaaagctcggtgtgggcccgctctacgctccgtttggggtgacctggaacgcctcttctcccagctccctccagccatcagcagcctcttgtcaagcttctgcctcgccccagtctatccccaaccccaaatcaagaccacctttcttcacggtcactatttattctttgttcctttttctttttgtaagaaacattcacaaaaaccagtgcaaaaccatcagtgtgggcgtcctgttttatattacaaaacttcctctggatatatcatataaaaggggggtctcacaggagagaaacgtgataaattagctctgcaatctacggcaaggaacatagtttttaaaatagactttcaacatatgacccatgggggaaggaggagggggcttctggggagacggcgggtgctggggcctcggctggtttgggaaatcctgtccgggccccttaagcatggatagagacatagacaagggaggctgtggacaggcctgagcaccaaggccagaaattaacagggaccctggggaggggccctcacccccagcccataaagagctattccctttctctaagaggcagtagcttcagagcaggaaagtggctttcgatacaggcagggtttgtgatgagcggtgtagtcttcttgttccttgccctgttagtggggtccgaggaagtctctgttatgggctgttgtatttcggggtgaaaagaaacaaagaggtatccctgcccacccctcccccacaaccccagccaccaccagaacctgctgtgggttgtatctggaccaagccagctaaaccctgtttctccctgtgctctggagggaggctcaagcctgatttgggctgagctttctttgccttgcctccaaggaatggcctcaggcagtcttgcaaatagctaccagcctgagcgaatgccaacaggagcagaaactgcctgtcttccctttccagcctaagagggtggccagtggctggctggcgagctgaatcagggctgattgagggttccttggcacatttgtagaaagctgctgaggggcagtcttgtgtctgcccttgaacccaccttagccagatttcccttcatgaccagccctttctcttgggtcctccctctgacttctgtgggccccagaagcctgggatgcccctggattagagccataaagctgtgcaatttgcctcagtcctgcccagcatgggttttttgttttttgtttttgtttttgtgtgtcatcctcagaccagccatttgcctcttccaaaaagctggggctaagcatgtgggtggttcaagaggggcagcccccaggccccaggctgggccgcggtaccagtggcaggtccccctgggtctcaggagcttagcttctacggagctcaggtgtcatttatggggttgccagagcaagctgttaaagggcgaatttggtaagactgagctcagagacctggtgggagggcaaggactggcgggcacagcaggaggagattagaggagggtccacctgaatctttgcagcaggcacagagcttctggctgcatctcagaagggggcagacgcacaggccagggaacacggggctctaggctgtggctccgagtgtccctggtgactggaaagcctgaggggaggctggaagctgatacaggatgccggtggcttgtgagacagaatgagctctttcttcctgaagagggacagaggggagagaagagagcagacatcacactgctccttccatccctgcccgtggcagacatcactaatcaaacttacggtgcctggcagacatcactcatcaggattgcactgccatctcccactgagcccagaccaaacctcagatccccagcacagcctccagcagccacccctgatctatcagggtaggagcatcttgcaatccagttgccaacactcgtctagagtttgagaactgaatacttgtgggtgtgcatctgcgagtctccctgcccaagcctggagggaatactaagaaatgtgcggacagtgaagagacaggaaaccttgttgcagcagaaatggcctcgatgccttcgggattctttagcctggagagaagagggctcaggggagtcaatgtgtgacctcaacactccaggaaggagagtgggcaagtgggatgccatggacagagccacagaaaaacagaaacctcttctgtgtattaagctgatgctaaagtcagagcagtccaaaggcaggaggctgccttgggaggtagtaagctctctgtccctggaggtatgcaagagggtggagaagtcttggcaaggatgttgaagaagatatccaagcctcagttctgggtgtggagagggagacccagatgatcttggggatttcttccactcttggagctggggagttggggaaggacagggaagggggtggcatgtgggagaggcgggcagtgtggacaagggaatgtgatgtgcacctctgtgtgttcctggggactgagagagaggtgtggggaggtaggagcgagggcgcggtgggaagtcatggaatggt

SEQ ID NO: 373785 - DNA, 5906 bp, Homo sapiens
caccgccagccaaagcagtcccttccatttcaggcaccggcctgggcccgggagacaccgcaaggctatttaagatggtgtggtttgcccatctacgttgatcgtcccaagaaaggggcaccgtctgcagaacttgccaggaaagtcatcctgggcggcgcgggccacgccagggtctccccgcgcggcttcctcccccggcgccttctctcgggcgcgcgtgcgccccctgcaggcggcccccgggagagcctcgcgggggagccgggagcctggtttccccgccaacccccatcccgcccgccccggcggccaccctgggggcgaggcagcccggcgcgtgggaggggacggcgcgccattggcttgtgcgcggaaccgagaggagggaccagcgcgggccgccagactcgcccttctgcagaggccgggctggaggagaagatggcggccaagcagcccccgcctctgatgaagaagcacagccagacggacctcgtgagccgcctgaagacccgcaagatcctcggcgtgggcggggaggatgacgacggggaggtgcatcgctccaagatcagccaggtcttaggcaatgaaatcaagtttaccattcgggagcctttggggctcagggtctggcagttcgtctctgctgtgctcttctccggcattgccatcatggcgcttgccttccctgaccagctctatgatgcggtctttgatggagcccaggtgaccagcaagacccccatccgcctctacggcggtgccctcctcagcatctccctgatcatgtggaacgctctctacacggctgagaaggtcatcattcgatggaccctgctcaccgaagcttgctatttcggggtccagttcttggtggtcactgccacgctagctgagacgggcctcatgtccctggggatcctgctgctcctggtcagccgcctcctttttgtcgtcatcagcatttactactattaccaagtcggccgaagacccaagaaggcctagttgcccgctgggcctggggccctgcccatgcctgggccagagtggcgctggggcctcggcttccctttggctcctggaaggcaggagggtcccctgccctgccccagtcctgccccagggaggcagggggtggggggccttcctttcctcctgggcaccccgtgtgctgtgatctcctgggctttcaggcttgacatgctggtctggggagagacagggcctctgctgccctgttcttcaccctcacagtgatacctcctttccttgggtctcttggcctccagaccccctcaatagacactgactaaagtcaagctggagtcatgagggtagtgggctaagtcgagggtccagcctcttctgccaggaagcccttcttgcttttgagagaggctgtgaccaccccccatccttctccctacactcccagccaacctagtgcccaagcagctaaacttggcttccttctaatcctggaaaaccctgtacccctcctcctcaatctggccctctccacatgcacaccctgaaaacacacacagacacacaacacacacacatacacacccctgaacacacacacagacacacatacacccatgatgtgagcaaacacacacacgtgcgccttcatagcccagccaagggcatgcaggcagggtgtgctgcctgagatggcacctccctttcagccattcttcaagaatgggccacacacagctagaagtcctctcccagctagaagtcctgtccccactctcctggcctgacaagatgagctctcctgggaccttgctctagggcactctgcctctaccctaggacactggaatgccctgggagccccctccctgcaaccagcctgagttcagccccacggacaaagggacacacagcccccaatggagaccattgtaagtggtggggctgggagaggaggaacagaaggaaagccatagcgctctcttgccccttggcatgtaccccaaggcctgatggccactgggctcagcctgtcccccactcctgcctgcttcccggtgagctgccccccacacgtgcagcccgggctgcctccagggtctggctgagtgggatcaggtggccctccaactcagcacaggaaataagtagaaacatttcagcaggccacctcccctcatcttccccgccctgtccagcgccctggcaaaggctgacaactggctgtcttggggccgaacagcccctgccctgcctctgagggcccaccagcctgtgctgcatacccaccgcccagcttctccctgagggcccaccagcctgtgctgcatacccaccgcccagcttctccctgagggcccaccagcctgtgctgtacaccccgttagtccctgatcccaaccttctccctcctgccagcacaccgatgcacacaccggaagtggcgagcccaagccctggggacaggtgtagggagaaaagcagccccaggcctcagactcgcttcccatcctggcatagagtgggggatggctggagggtgtctataggtacagcccgctctggctgctgccaggtgggcccctgccaggggtcctcacccctgtccaccctgtgcctggctgtccctgcacccagatacagcaacatggcctgtacccagcagagtggtggcaccaccatggttacagcggatgccccgagactctgcttggtaaacgtggcagagcagaatgggaggctggaccctgaggaagggcccctctcctggcatctgtctcttgctacctaagcctgtgcctctccctaaagagctgcctccctgctgccgagccctggtctggccacgagccactactgcctcccacaggcaccactgcctcccgctgctgcccacaggtggtgccgccaatgggcagtgccctcaggccgaagcctcaatcccccatctgagccaggcctaatcctctaatagtgatggttggtttgtcctcccataactgcaggtggattccacctggggaatgaggctgcgtgtcgggcgtctgctggccctgagacatccagtcttccacactcaactgtgggatgggagggtggcgtggccttaccccatgaggctgtccaggctctggcacacagctgtgctcacaaaatactgggtggcttggttagagctaattgtagtggagcctgcaggtgagggtgagggagggggctgcaggtcaggtaagatctggaagacagacgtacagcttggagggcagggggactctaaggcaaggagatttacagttgggaaggaggcagtggcagaggggtgagggacaggggcccttaagtccagcgaggaaagctcggtgtgggcccgctctacgctccgtttggggtgacctggaacgcctcttctcccagctccctccagccatcagcagcctcttgtcaagcttctgcctcgccccagtctatccccaaccccaaatcaagaccacctttcttcacggtcactatttattctttgttcctttttctttttgtaagaaacattcacaaaaaccagtgcaaaaccatcagtgtgggcgtcctgttttatattacaaaacttcctctggatatatcatataaaaggggggtctcacaggagagaaacgtgataaattagctctgcaatctacggcaaggaacatagtttttaaaatagactttcaacatatgacccatgggggaaggaggagggggcttctggggagacggcgggtgctggggcctcggctggtttgggaaatcctgtccgggccccttaagcatggatagagacatagacaagggaggctgtggacaggcctgagcaccaaggccagaaattaacagggaccctggggaggggccctcacccccagcccataaagagctattccctttctctaagaggcagtagcttcagagcaggaaagtggctttcgatacaggcagggtttgtgatgagcggtgtagtcttcttgttccttgccctgttagtggggtccgaggaagtctctgttatgggctgttgtatttcggggtgaaaagaaacaaagaggtatccctgcccacccctcccccacaaccccagccaccaccagaacctgctgtgggttgtatctggaccaagccagctaaaccctgtttctccctgtgctctggagggaggctcaagcctgatttgggctgagctttctttgccttgcctccaaggaatggcctcaggcagtcttgcaaatagctaccagcctgagcgaatgccaacaggagcagaaactgcctgtcttccctttccagcctaagagggtggccagtggctggctggcgagctgaatcagggctgattgagggttccttggcacatttgtagaaagctgctgaggggcagtcttgtgtctgcccttgaacccaccttagccagatttcccttcatgaccagccctttctcttgggtcctccctctgacttctgtgggccccagaagcctgggatgcccctggattagagccataaagctgtgcaatttgcctcagtcctgcccagcatgggttttttgttttttgtttttgtttttgtgtgtcatcctcagaccagccatttgcctcttccaaaaagctggggctaagcatgtgggtggttcaagaggggcagcccccaggccccaggctgggccgcggtaccagtggcaggtccccctgggtctcaggagcttagcttctacggagctcaggtgtcatttatggggttgccagagcaagctgttaaagggcgaatttggtaagactgagctcagagacctggtgggagggcaaggactggcgggcacagcaggaggagattagaggagggtccacctgaatctttgcagcaggcacagagcttctggctgcatctcagaagggggcagacgcacaggccagggaacacggggctctaggctgtggctccgagtgtccctggtgactggaaagcctgaggggaggctggaagctgatacaggatgccggtggcttgtgagacagaatgagctctttcttcctgaagagggacagaggggagagaagagagcagacatcacactgctccttccatccctgcccgtggcagacatcactaatcaaacttacggtgcctggcagacatcactcatcaggattgcactgccatctcccactgagcccagaccaaacctcagatccccagcacagcctccagcagccacccctgatctatcagggtaggagcatcttgcaatccagttgccaacactcgtctagagtttgagaactgaatacttgtgggtgtgcatctgcgagtctccctgcccaagcctggagggaatactaagaaatgtgcggacagtgaagagacaggaaaccttgttgcagcagaaatggcctcgatgccttcgggattctttagcctggagagaagagggctcaggggagtcaatgtgtgacctcaacactccaggaaggagagtgggcaagtgggatgccatggacagagccacagaaaaacagaaacctcttctgtgtattaagctgatgctaaagtcagagcagtccaaaggcaggaggctgccttgggaggtagtaagctctctgtccctggaggtatgcaagagggtggagaagtcttggcaaggatgttgaagaagatatccaagcctcagttctgggtgtggagagggagacccagatgatcttggggatttcttccactcttggagctggggagttggggaaggacagggaagggggtggcatgtgggagaggcgggcagtgtggacaagggaatgtgatgtgcacctctgtgtgttcctggggactgagagagaggtgtggggaggtaggagcgagggcgcggtgggaagtcatggaatggt

SEQ ID NO: 373786 - DNA, 6217 bp, Homo sapiens
caccgccagccaaagcagtcccttccatttcaggcaccggcctgggcccgggagacaccgcaaggctatttaagatggtgtggtttgcccatctacgttgatcgtcccaagaaaggggcaccgtctgcagaacttgccaggaaagtcatcctgggcggcgcgggccacgccagggtctccccgcgcggcttcctcccccggcgccttctctcgggcgcgcgtgcgccccctgcaggcggcccccgggagagcctcgcgggggagccgggagcctggtttccccgccaacccccatcccgcccgccccggcggccaccctgggggcgaggcagcccggcgcgtgggaggggacggcgcgccattggcttgtgcgcggaaccgagaggagggaccagcgcgggccgccagactcggtaagccccggccgcgcagggcgccgcgcgcagtccagccggcccggccctgccctgccctgtcctgccctgccctgccctgccctgccctgcactgcccggcccggcacgggcggcgcgatgtgaggcgtccgagcccggagcctccgcctggcatcagctccacgtagcccagcgccggcacgcgcgaggcccggcagctgtgattagagaagccagggccaccccggagccagcctctgaggcttcacctcaccccgtttacactgctgtctcctctgcatagatttggctgactgaggacgcgacagcccttctgcagaggccgggctggaggagaagatggcggccaagcagcccccgcctctgatgaagaagcacagccagacggacctcgtgagccgcctgaagacccgcaagatcctcggcgtgggcggggaggatgacgacggggaggtgcatcgctccaagatcagccaggtcttaggcaatgaaatcaagtttaccattcgggagcctttggggctcagggtctggcagttcgtctctgctgtgctcttctccggcattgccatcatggcgcttgccttccctgaccagctctatgatgcggtctttgatggagcccaggtgaccagcaagacccccatccgcctctacggcggtgccctcctcagcatctccctgatcatgtggaacgctctctacacggctgagaaggtcatcattcgatggaccctgctcaccgaagcttgctatttcggggtccagttcttggtggtcactgccacgctagctgagacgggcctcatgtccctggggatcctgctgctcctggtcagccgcctcctttttgtcgtcatcagcatttactactattaccaagtcggccgaagacccaagaaggcctagttgcccgctgggcctggggccctgcccatgcctgggccagagtggcgctggggcctcggcttccctttggctcctggaaggcaggagggtcccctgccctgccccagtcctgccccagggaggcagggggtggggggccttcctttcctcctgggcaccccgtgtgctgtgatctcctgggctttcaggcttgacatgctggtctggggagagacagggcctctgctgccctgttcttcaccctcacagtgatacctcctttccttgggtctcttggcctccagaccccctcaatagacactgactaaagtcaagctggagtcatgagggtagtgggctaagtcgagggtccagcctcttctgccaggaagcccttcttgcttttgagagaggctgtgaccaccccccatccttctccctacactcccagccaacctagtgcccaagcagctaaacttggcttccttctaatcctggaaaaccctgtacccctcctcctcaatctggccctctccacatgcacaccctgaaaacacacacagacacacaacacacacacatacacacccctgaacacacacacagacacacatacacccatgatgtgagcaaacacacacacgtgcgccttcatagcccagccaagggcatgcaggcagggtgtgctgcctgagatggcacctccctttcagccattcttcaagaatgggccacacacagctagaagtcctctcccagctagaagtcctgtccccactctcctggcctgacaagatgagctctcctgggaccttgctctagggcactctgcctctaccctaggacactggaatgccctgggagccccctccctgcaaccagcctgagttcagccccacggacaaagggacacacagcccccaatggagaccattgtaagtggtggggctgggagaggaggaacagaaggaaagccatagcgctctcttgccccttggcatgtaccccaaggcctgatggccactgggctcagcctgtcccccactcctgcctgcttcccggtgagctgccccccacacgtgcagcccgggctgcctccagggtctggctgagtgggatcaggtggccctccaactcagcacaggaaataagtagaaacatttcagcaggccacctcccctcatcttccccgccctgtccagcgccctggcaaaggctgacaactggctgtcttggggccgaacagcccctgccctgcctctgagggcccaccagcctgtgctgcatacccaccgcccagcttctccctgagggcccaccagcctgtgctgcatacccaccgcccagcttctccctgagggcccaccagcctgtgctgtacaccccgttagtccctgatcccaaccttctccctcctgccagcacaccgatgcacacaccggaagtggcgagcccaagccctggggacaggtgtagggagaaaagcagccccaggcctcagactcgcttcccatcctggcatagagtgggggatggctggagggtgtctataggtacagcccgctctggctgctgccaggtgggcccctgccaggggtcctcacccctgtccaccctgtgcctggctgtccctgcacccagatacagcaacatggcctgtacccagcagagtggtggcaccaccatggttacagcggatgccccgagactctgcttggtaaacgtggcagagcagaatgggaggctggaccctgaggaagggcccctctcctggcatctgtctcttgctacctaagcctgtgcctctccctaaagagctgcctccctgctgccgagccctggtctggccacgagccactactgcctcccacaggcaccactgcctcccgctgctgcccacaggtggtgccgccaatgggcagtgccctcaggccgaagcctcaatcccccatctgagccaggcctaatcctctaatagtgatggttggtttgtcctcccataactgcaggtggattccacctggggaatgaggctgcgtgtcgggcgtctgctggccctgagacatccagtcttccacactcaactgtgggatgggagggtggcgtggccttaccccatgaggctgtccaggctctggcacacagctgtgctcacaaaatactgggtggcttggttagagctaattgtagtggagcctgcaggtgagggtgagggagggggctgcaggtcaggtaagatctggaagacagacgtacagcttggagggcagggggactctaaggcaaggagatttacagttgggaaggaggcagtggcagaggggtgagggacaggggcccttaagtccagcgaggaaagctcggtgtgggcccgctctacgctccgtttggggtgacctggaacgcctcttctcccagctccctccagccatcagcagcctcttgtcaagcttctgcctcgccccagtctatccccaaccccaaatcaagaccacctttcttcacggtcactatttattctttgttcctttttctttttgtaagaaacattcacaaaaaccagtgcaaaaccatcagtgtgggcgtcctgttttatattacaaaacttcctctggatatatcatataaaaggggggtctcacaggagagaaacgtgataaattagctctgcaatctacggcaaggaacatagtttttaaaatagactttcaacatatgacccatgggggaaggaggagggggcttctggggagacggcgggtgctggggcctcggctggtttgggaaatcctgtccgggccccttaagcatggatagagacatagacaagggaggctgtggacaggcctgagcaccaaggccagaaattaacagggaccctggggaggggccctcacccccagcccataaagagctattccctttctctaagaggcagtagcttcagagcaggaaagtggctttcgatacaggcagggtttgtgatgagcggtgtagtcttcttgttccttgccctgttagtggggtccgaggaagtctctgttatgggctgttgtatttcggggtgaaaagaaacaaagaggtatccctgcccacccctcccccacaaccccagccaccaccagaacctgctgtgggttgtatctggaccaagccagctaaaccctgtttctccctgtgctctggagggaggctcaagcctgatttgggctgagctttctttgccttgcctccaaggaatggcctcaggcagtcttgcaaatagctaccagcctgagcgaatgccaacaggagcagaaactgcctgtcttccctttccagcctaagagggtggccagtggctggctggcgagctgaatcagggctgattgagggttccttggcacatttgtagaaagctgctgaggggcagtcttgtgtctgcccttgaacccaccttagccagatttcccttcatgaccagccctttctcttgggtcctccctctgacttctgtgggccccagaagcctgggatgcccctggattagagccataaagctgtgcaatttgcctcagtcctgcccagcatgggttttttgttttttgtttttgtttttgtgtgtcatcctcagaccagccatttgcctcttccaaaaagctggggctaagcatgtgggtggttcaagaggggcagcccccaggccccaggctgggccgcggtaccagtggcaggtccccctgggtctcaggagcttagcttctacggagctcaggtgtcatttatggggttgccagagcaagctgttaaagggcgaatttggtaagactgagctcagagacctggtgggagggcaaggactggcgggcacagcaggaggagattagaggagggtccacctgaatctttgcagcaggcacagagcttctggctgcatctcagaagggggcagacgcacaggccagggaacacggggctctaggctgtggctccgagtgtccctggtgactggaaagcctgaggggaggctggaagctgatacaggatgccggtggcttgtgagacagaatgagctctttcttcctgaagagggacagaggggagagaagagagcagacatcacactgctccttccatccctgcccgtggcagacatcactaatcaaacttacggtgcctggcagacatcactcatcaggattgcactgccatctcccactgagcccagaccaaacctcagatccccagcacagcctccagcagccacccctgatctatcagggtaggagcatcttgcaatccagttgccaacactcgtctagagtttgagaactgaatacttgtgggtgtgcatctgcgagtctccctgcccaagcctggagggaatactaagaaatgtgcggacagtgaagagacaggaaaccttgttgcagcagaaatggcctcgatgccttcgggattctttagcctggagagaagagggctcaggggagtcaatgtgtgacctcaacactccaggaaggagagtgggcaagtgggatgccatggacagagccacagaaaaacagaaacctcttctgtgtattaagctgatgctaaagtcagagcagtccaaaggcaggaggctgccttgggaggtagtaagctctctgtccctggaggtatgcaagagggtggagaagtcttggcaaggatgttgaagaagatatccaagcctcagttctgggtgtggagagggagacccagatgatcttggggatttcttccactcttggagctggggagttggggaaggacagggaagggggtggcatgtgggagaggcgggcagtgtggacaagggaatgtgatgtgcacctctgtgtgttcctggggactgagagagaggtgtggggaggtaggagcgagggcgcggtgggaagtcatggaatggt

SEQ ID NO: 373787 - DNA, 5905 bp, Homo sapiens
cagtggcatggctgctctgggaaacagtttgatgctttctctgaaagtccaacagggatgtaccacacagctcagcaattccacccctggcatttacatagagaaatgaaaacttacggtcccacagaaacgcgggtttgtagcagctctattcataatcatcaacaactggaaacaacccacatggccttcagtgaccgaatggataaacaagctgttacacgtaccccagggaatactgctctccaataaaaaggagcggactcttgatacacacagtgacttggaggaatctcaaaggcattctgctcaatgacaggagccagcctcaaaagatttggctgactgaggacgcgacaggtactcagcttctttctgcatctcagtcgcccagcacaggggctggcacgcacccttctgcagaggccgggctggaggagaagatggcggccaagcagcccccgcctctgatgaagaagcacagccagacggacctcgtgagccgcctgaagacccgcaagatcctcggcgtgggcggggaggatgacgacggggaggtgcatcgctccaagatcagccaggtcttaggcaatgaaatcaagtttaccattcgggagcctttggggctcagggtctggcagttcgtctctgctgtgctcttctccggcattgccatcatggcgcttgccttccctgaccagctctatgatgcggtctttgatggagcccaggtgaccagcaagacccccatccgcctctacggcggtgccctcctcagcatctccctgatcatgtggaacgctctctacacggctgagaaggtcatcattcgatggaccctgctcaccgaagcttgctatttcggggtccagttcttggtggtcactgccacgctagctgagacgggcctcatgtccctggggatcctgctgctcctggtcagccgcctcctttttgtcgtcatcagcatttactactattaccaagtcggccgaagacccaagaaggcctagttgcccgctgggcctggggccctgcccatgcctgggccagagtggcgctggggcctcggcttccctttggctcctggaaggcaggagggtcccctgccctgccccagtcctgccccagggaggcagggggtggggggccttcctttcctcctgggcaccccgtgtgctgtgatctcctgggctttcaggcttgacatgctggtctggggagagacagggcctctgctgccctgttcttcaccctcacagtgatacctcctttccttgggtctcttggcctccagaccccctcaatagacactgactaaagtcaagctggagtcatgagggtagtgggctaagtcgagggtccagcctcttctgccaggaagcccttcttgcttttgagagaggctgtgaccaccccccatccttctccctacactcccagccaacctagtgcccaagcagctaaacttggcttccttctaatcctggaaaaccctgtacccctcctcctcaatctggccctctccacatgcacaccctgaaaacacacacagacacacaacacacacacatacacacccctgaacacacacacagacacacatacacccatgatgtgagcaaacacacacacgtgcgccttcatagcccagccaagggcatgcaggcagggtgtgctgcctgagatggcacctccctttcagccattcttcaagaatgggccacacacagctagaagtcctctcccagctagaagtcctgtccccactctcctggcctgacaagatgagctctcctgggaccttgctctagggcactctgcctctaccctaggacactggaatgccctgggagccccctccctgcaaccagcctgagttcagccccacggacaaagggacacacagcccccaatggagaccattgtaagtggtggggctgggagaggaggaacagaaggaaagccatagcgctctcttgccccttggcatgtaccccaaggcctgatggccactgggctcagcctgtcccccactcctgcctgcttcccggtgagctgccccccacacgtgcagcccgggctgcctccagggtctggctgagtgggatcaggtggccctccaactcagcacaggaaataagtagaaacatttcagcaggccacctcccctcatcttccccgccctgtccagcgccctggcaaaggctgacaactggctgtcttggggccgaacagcccctgccctgcctctgagggcccaccagcctgtgctgcatacccaccgcccagcttctccctgagggcccaccagcctgtgctgcatacccaccgcccagcttctccctgagggcccaccagcctgtgctgtacaccccgttagtccctgatcccaaccttctccctcctgccagcacaccgatgcacacaccggaagtggcgagcccaagccctggggacaggtgtagggagaaaagcagccccaggcctcagactcgcttcccatcctggcatagagtgggggatggctggagggtgtctataggtacagcccgctctggctgctgccaggtgggcccctgccaggggtcctcacccctgtccaccctgtgcctggctgtccctgcacccagatacagcaacatggcctgtacccagcagagtggtggcaccaccatggttacagcggatgccccgagactctgcttggtaaacgtggcagagcagaatgggaggctggaccctgaggaagggcccctctcctggcatctgtctcttgctacctaagcctgtgcctctccctaaagagctgcctccctgctgccgagccctggtctggccacgagccactactgcctcccacaggcaccactgcctcccgctgctgcccacaggtggtgccgccaatgggcagtgccctcaggccgaagcctcaatcccccatctgagccaggcctaatcctctaatagtgatggttggtttgtcctcccataactgcaggtggattccacctggggaatgaggctgcgtgtcgggcgtctgctggccctgagacatccagtcttccacactcaactgtgggatgggagggtggcgtggccttaccccatgaggctgtccaggctctggcacacagctgtgctcacaaaatactgggtggcttggttagagctaattgtagtggagcctgcaggtgagggtgagggagggggctgcaggtcaggtaagatctggaagacagacgtacagcttggagggcagggggactctaaggcaaggagatttacagttgggaaggaggcagtggcagaggggtgagggacaggggcccttaagtccagcgaggaaagctcggtgtgggcccgctctacgctccgtttggggtgacctggaacgcctcttctcccagctccctccagccatcagcagcctcttgtcaagcttctgcctcgccccagtctatccccaaccccaaatcaagaccacctttcttcacggtcactatttattctttgttcctttttctttttgtaagaaacattcacaaaaaccagtgcaaaaccatcagtgtgggcgtcctgttttatattacaaaacttcctctggatatatcatataaaaggggggtctcacaggagagaaacgtgataaattagctctgcaatctacggcaaggaacatagtttttaaaatagactttcaacatatgacccatgggggaaggaggagggggcttctggggagacggcgggtgctggggcctcggctggtttgggaaatcctgtccgggccccttaagcatggatagagacatagacaagggaggctgtggacaggcctgagcaccaaggccagaaattaacagggaccctggggaggggccctcacccccagcccataaagagctattccctttctctaagaggcagtagcttcagagcaggaaagtggctttcgatacaggcagggtttgtgatgagcggtgtagtcttcttgttccttgccctgttagtggggtccgaggaagtctctgttatgggctgttgtatttcggggtgaaaagaaacaaagaggtatccctgcccacccctcccccacaaccccagccaccaccagaacctgctgtgggttgtatctggaccaagccagctaaaccctgtttctccctgtgctctggagggaggctcaagcctgatttgggctgagctttctttgccttgcctccaaggaatggcctcaggcagtcttgcaaatagctaccagcctgagcgaatgccaacaggagcagaaactgcctgtcttccctttccagcctaagagggtggccagtggctggctggcgagctgaatcagggctgattgagggttccttggcacatttgtagaaagctgctgaggggcagtcttgtgtctgcccttgaacccaccttagccagatttcccttcatgaccagccctttctcttgggtcctccctctgacttctgtgggccccagaagcctgggatgcccctggattagagccataaagctgtgcaatttgcctcagtcctgcccagcatgggttttttgttttttgtttttgtttttgtgtgtcatcctcagaccagccatttgcctcttccaaaaagctggggctaagcatgtgggtggttcaagaggggcagcccccaggccccaggctgggccgcggtaccagtggcaggtccccctgggtctcaggagcttagcttctacggagctcaggtgtcatttatggggttgccagagcaagctgttaaagggcgaatttggtaagactgagctcagagacctggtgggagggcaaggactggcgggcacagcaggaggagattagaggagggtccacctgaatctttgcagcaggcacagagcttctggctgcatctcagaagggggcagacgcacaggccagggaacacggggctctaggctgtggctccgagtgtccctggtgactggaaagcctgaggggaggctggaagctgatacaggatgccggtggcttgtgagacagaatgagctctttcttcctgaagagggacagaggggagagaagagagcagacatcacactgctccttccatccctgcccgtggcagacatcactaatcaaacttacggtgcctggcagacatcactcatcaggattgcactgccatctcccactgagcccagaccaaacctcagatccccagcacagcctccagcagccacccctgatctatcagggtaggagcatcttgcaatccagttgccaacactcgtctagagtttgagaactgaatacttgtgggtgtgcatctgcgagtctccctgcccaagcctggagggaatactaagaaatgtgcggacagtgaagagacaggaaaccttgttgcagcagaaatggcctcgatgccttcgggattctttagcctggagagaagagggctcaggggagtcaatgtgtgacctcaacactccaggaaggagagtgggcaagtgggatgccatggacagagccacagaaaaacagaaacctcttctgtgtattaagctgatgctaaagtcagagcagtccaaaggcaggaggctgccttgggaggtagtaagctctctgtccctggaggtatgcaagagggtggagaagtcttggcaaggatgttgaagaagatatccaagcctcagttctgggtgtggagagggagacccagatgatcttggggatttcttccactcttggagctggggagttggggaaggacagggaagggggtggcatgtgggagaggcgggcagtgtggacaagggaatgtgatgtgcacctctgtgtgttcctggggactgagagagaggtgtggggaggtaggagcgagggcgcggtgggaagtcatggaatggt

SEQ ID NO: 373788 - DNA, 5582 bp, Homo sapiens
caccgccagccaaagcagtcccttccatttcaggcaccggcctgggcccgggagacaccgcaaggctatttaagatggtgtggtttgcccatctacgttgatcgtcccaagaaaggggcaccgtctgcagaacttgccaggaaagtcatcctgggcggcgcgggccacgccagggtctccccgcgcggcttcctcccccggcgccttctctcgggcgcgcgtgcgccccctgcaggcggcccccgggagagcctcgcgggggagccgggagcctggtttccccgccaacccccatcccgcccgccccggcggccaccctgggggcgaggcagcccggcgcgtgggaggggacggcgcgccattggcttgtgcgcggaaccgagaggagggaccagcgcgggccgccagactcggtaagccccggccgcgcagggcgccgcgcgcagtccagccggcccggccctgccctgccctgtcctgccctgccctgccctgccctgccctgcactgcccggcccggcacgggcggcgcgatgtgaggcgtccgagcccggagcctccgcctggcatcagctccacgtagcccagcgccggcacgcgcgaggccccccttctgcagaggccgggctggaggagaagatggcggccaagcagcccccgcctctgatgaagaagcacagccagacggacctcgtgagccgcctgaagacccgcaagatcctcggcgtgggcggggaggatgacgacggggaggtgcatcgctccaagatcagccaggtcttaggcaatgaaatcaagtttaccattcgggagcctttggggctcagggtctggcagttcgtctctgctgtgctcttctccggcattgccatcatggcgcttgccttccctgaccagctctatgatgcggtctttgatggagcccaggtgaccagcaagacccccatccgcctctacggcggtgccctcctcagcatctccctgatcatgtggaacgctctctacacggctgagaaggtcatcattcgatggaccctgctcaccgaagcttgctatttcggggtccagttcttggtggtcactgccacgctagctgagacgggcctcatgtccctggggatcctgctgctcctggtcagccgcctcctttttgtcgtcatcagcatttactactattaccaagtcggccgaagacccaagaaggcctagttgcccgctgggcctggggccctgcccatgcctgggccagagtggcgctggggcctcggcttccctttggctcctggaaggcaggagggtcccctgccctgccccagtcctgccccagggaggcagggggtggggggccttcctttcctcctgggcaccccgtgtgctgtgatctcctgggctttcaggcttgacatgctggtctggggagagacagggcctctgctgccctgttcttcaccctcacagtgatacctcctttccttgggtctcttggcctccagaccccctcaatagacactgactaaagtcaagctggagtcatgagggtagtgggctaagtcgagggtccagcctcttctgccaggaagcccttcttgcttttgagagaggctgtgaccaccccccatccttctccctacactcccagccaacctagtgcccaagcagctaaacttggcttccttctaatcctggaaaaccctgtacccctcctcctcaatctggccctctccacatgcacaccctgaaaacacacacagacacacaacacacacacatacacacccctgaacacacacacagacacacatacacccatgatgtgagcaaacacacacacgtgcgccttcatagcccagccaagggcatgcaggcagggtgtgctgcctgagatggcacctccctttcagccattcttcaagaatgggccacacacagctagaagtcctctcccagctagaagtcctgtccccactctcctggcctgacaagatgagctctcctgggaccttgctctagggcactctgcctctaccctaggacactggaatgccctgggagccccctccctgcaaccagcctgagttcagccccacggacaaagggacacacagcccccaatggagaccattgtaagtggtggggctgggagaggaggaacagaaggaaagccatagcgctctcttgccccttggcatgtaccccaaggcctgatggccactgggctcagcctgtcccccactcctgcctgcttcccggtgagctgccccccacacgtgcagcccgggctgcctccagggtctggctgagtgggatcaggtggccctccaactcagcacaggaaataagtagaaacatttcagcaggccacctcccctcatcttccccgccctgtccagcgccctggcaaaggctgacaactggctgtcttggggccgaacagcccctgccctgcctctgagggcccaccagcctgtgctgcatacccaccgcccagcttctccctgagggcccaccagcctgtgctgcatacccaccgcccagcttctccctgagggcccaccagcctgtgctgtacaccccgttagtccctgatcccaaccttctccctcctgccagcacaccgatgcacacaccggaagtggcgagcccaagccctggggacaggtgtagggagaaaagcagccccaggcctcagactcgcttcccatcctggcatagagtgggggatggctggagggtgtctataggtacagcccgctctggctgctgccaggtgggcccctgccaggggtcctcacccctgtccaccctgtgcctggctgtccctgcacccagatacagcaacatggcctgtacccagcagagtggtggcaccaccatggttacagcggatgccccgagactctgcttggtaaacgtggcagagcagaatgggaggctggaccctgaggaagggcccctctcctggcatctgtctcttgctacctaagcctgtgcctctccctaaagagctgcctccctgctgccgagccctggtctggccacgagccactactgcctcccacaggcaccactgcctcccgctgctgcccacaggtggtgccgccaatgggcagtgccctcaggccgaagcctcaatcccccatctgagccaggcctaatcctctaatagtgatggttggtttgtcctcccataactgcaggtggattccacctggggaatgaggctgcgtgtcgggcgtctgctggccctgagacatccagtcttccacactcaactgtgggatgggagggtggcgtggccttaccccatgaggctgtccaggctctggcacacagctgtgctcacaaaatactgggtggcttggttagagctaattgtagtggagcctgcaggtgagggtgagggagggggctgcaggtcaggtaagatctggaagacagacgtacagcttggagggcagggggactctaaggcaaggagatttacagttgggaaggaggcagtggcagaggggtgagggacaggggcccttaagtccagcgaggaaagctcggtgtgggcccgctctacgctccgtttggggtgacctggaacgcctcttctcccagctccctccagccatcagcagcctcttgtcaagcttctgcctcgccccagtctatccccaaccccaaatcaagaccacctttcttcacggtcactatttattctttgttcctttttctttttgtaagaaacattcacaaaaaccagtgcaaaaccatcagtgtgggcgtcctgttttatattacaaaacttcctctggatatatcatataaaaggggggtctcacaggagagaaacgtgataaattagctctgcaatctacggcaaggaacatagtttttaaaatagactttcaacatatgacccatgggggaaggaggagggggcttctggggagacggcgggtgctggggcctcggctggtttgggaaatcctgtccgggccccttaagcatggatagagacatagacaagggaggctgtggacaggcctgagcaccaaggccagaaattaacagggaccctggggaggggccctcacccccagcccataaagagctattccctttctctaagaggcagtagcttcagagcaggaaagtggctttcgatacaggcagggtttgtgatgagcggtgtagtcttcttgttccttgccctgttagtggggtccgaggaagtctctgttatgggctgttgtatttcggggtgaaaagaaacaaagaggtatccctgcccacccctcccccacaaccccagccaccaccagaacctgctgtgggttgtatctggaccaagccagctaaaccctgtttctccctgtgctctggagggaggctcaagcctgatttgggctgagctttctttgccttgcctccaaggaatggcctcaggcagtcttgcaaatagctaccagcctgagcgaatgccaacaggagcagaaactgcctgtcttccctttccagcctaagagggtggccagtggctggctggcgagctgaatcagggctgattgagggttccttggcacatttgtagaaagctgctgaggggcagtcttgtgtctgcccttgaacccaccttagccagatttcccttcatgaccagccctttctcttgggtcctccctctgacttctgtgggccccagaagcctgggatgcccctggattagagccataaagctgtgcaatttgcctcagtcctgcccagcatgggttttttgttttttgtttttgtttttgtgtgtcatcctcagaccagccatttgcctcttccaaaaagctggggctaagcatgtgggtggttcaagaggggcagcccccaggccccaggctgggccgcggtaccagtggcaggtccccctgggtctcaggagcttagcttctacggagctcaggtgtcatttatggggttgccagagcaagctgttaaagggcgaatttggtaagactgagctcagagacctggtgggagggcaaggactggcgggcacagcaggaggagattagaggagggtccacctgaatctttgcagcaggcacagagcttctggctgcatctcagaagggggcagacgcacaggccagggaacacggggctctaggctgtggctccgagtgtccctggtgactggaaagcctgaggggaggctggaagctgatacaggatgccggtggcttgtgagacagaatgagctctttcttcctgaagagggacagaggggagagaagagagcagacatcacactgctccttccatccctgcccgtggcagacatcactaatcaaacttacggtgcctggcagacatcactcatcaggattgcactgccatctcccactgagctttctttgccttgcctccaaggaatggcctcaggcagtcttgcaaatagctaccagcctgagcgaatgccaacaggagcagaaactgcctgtcttccctttccagcctaagagggtggccagtggctggctggcgagctgaatcagggctgattgagggttccttggcacatttgtagaaagcttacaggg

SEQ ID NO: 373789 - DNA, 4658 bp, Homo sapiens
aaaataaaaaaaaaaagagaaaacggaaaaaaaaaaaaaaaaaaaaaaaaaaaacctcattggacactgactaaagtcaagctggagtcatgagggtagtgggctaagtcgagggtccagcctcttctgccaggaagcccttcttgcttttgagagaggctgtgaccaccccccatccttctccctacactcccagccaacctagtgcccaagcagctaaacttggcttccttctaatcctggaaaaccctgtacccctcctcctcaatctggccctctccacatgcacaccctgaaaacacacacagacacacaacacacacacatacacacccctgaacacacacacagacacacatacacccatgatgtgagcaaacacacacacgtgcgccttcatagcccagccaagggcatgcaggcagggtgtgctgcctgagatggcacctccctttcagccattcttcaagaatgggccacacacagctagaagtcctctcccagctagaagtcctgtccccactctcctggcctgacaagatgagctctcctgggaccttgctctagggcactctgcctctaccctaggacactggaatgccctgggagccccctccctgcaaccagcctgagttcagccccacggacaaagggacacacagcccccaatggagaccattgtaagtggtggggctgggagaggaggaacagaaggaaagccatagcgctctcttgccccttggcatgtaccccaaggcctgatggccactgggctcagcctgtcccccactcctgcctgcttcccggtgagctgccccccacacgtgcagcccgggctgcctccagggtctggctgagtgggatcaggtggccctccaactcagcacaggaaataagtagaaacatttcagcaggccacctcccctcatcttccccgccctgtccagcgccctggcaaaggctgacaactggctgtcttggggccgaacagcccctgccctgcctctgagggcccaccagcctgtgctgcatacccaccgcccagcttctccctgagggcccaccagcctgtgctgcatacccaccgcccagcttctccctgagggcccaccagcctgtgctgtacaccccgttagtccctgatcccaaccttctccctcctgccagcacaccgatgcacacaccggaagtggcgagcccaagccctggggacaggtgtagggagaaaagcagccccaggcctcagactcgcttcccatcctggcatagagtgggggatggctggagggtgtctataggtacagcccgctctggctgctgccaggtgggcccctgccaggggtcctcacccctgtccaccctgtgcctggctgtccctgcacccagatacagcaacatggcctgtacccagcagagtggtggcaccaccatggttacagcggatgccccgagactctgcttggtaaacgtggcagagcagaatgggaggctggaccctgaggaagggcccctctcctggcatctgtctcttgctacctaagcctgtgcctctccctaaagagctgcctccctgctgccgagccctggtctggccacgagccactactgcctcccacaggcaccactgcctcccgctgctgcccacaggtggtgccgccaatgggcagtgccctcaggccgaagcctcaatcccccatctgagccaggcctaatcctctaatagtgatggttggtttgtcctcccataactgcaggtggattccacctggggaatgaggctgcgtgtcgggcgtctgctggccctgagacatccagtcttccacactcaactgtgggatgggagggtggcgtggccttaccccatgaggctgtccaggctctggcacacagctgtgctcacaaaatactgggtggcttggttagagctaattgtagtggagcctgcaggtgagggtgagggagggggctgcaggtcaggtaagatctggaagacagacgtacagcttggagggcagggggactctaaggcaaggagatttacagttgggaaggaggcagtggcagaggggtgagggacaggggcccttaagtccagcgaggaaagctcggtgtgggcccgctctacgctccgtttggggtgacctggaacgcctcttctcccagctccctccagccatcagcagcctcttgtcaagcttctgcctcgccccagtctatccccaaccccaaatcaagaccacctttcttcacggtcactatttattctttgttcctttttctttttgtaagaaacattcacaaaaaccagtgcaaaaccatcagtgtgggcgtcctgttttatattacaaaacttcctctggatatatcatataaaaggggggtctcacaggagagaaacgtgataaattagctctgcaatctacggcaaggaacatagtttttaaaatagactttcaacatatgacccatgggggaaggaggagggggcttctggggagacggcgggtgctggggcctcggctggtttgggaaatcctgtccgggccccttaagcatggatagagacatagacaagggaggctgtggacaggcctgagcaccaaggccagaaattaacagggaccctggggaggggccctcacccccagcccataaagagctattccctttctctaagaggcagtagcttcagagcaggaaagtggctttcgatacaggcagggtttgtgatgagcggtgtagtcttcttgttccttgccctgttagtggggtccgaggaagtctctgttatgggctgttgtatttcggggtgaaaagaaacaaagaggtatccctgcccacccctcccccacaaccccagccaccaccagaacctgctgtgggttgtatctggaccaagccagctaaaccctgtttctccctgtgctctggagggaggctcaagcctgatttgggctgagctttctttgccttgcctccaaggaatggcctcaggcagtcttgcaaatagctaccagcctgagcgaatgccaacaggagcagaaactgcctgtcttccctttccagcctaagagggtggccagtggctggctggcgagctgaatcagggctgattgagggttccttggcacatttgtagaaagctgctgaggggcagtcttgtgtctgcccttgaacccaccttagccagatttcccttcatgaccagccctttctcttgggtcctccctctgacttctgtgggccccagaagcctgggatgcccctggattagagccataaagctgtgcaatttgcctcagtcctgcccagcatgggttttttgttttttgtttttgtttttgtgtgtcatcctcagaccagccatttgcctcttccaaaaagctggggctaagcatgtgggtggttcaagaggggcagcccccaggccccaggctgggccgcggtaccagtggcaggtccccctgggtctcaggagcttagcttctacggagctcaggtgtcatttatggggttgccagagcaagctgttaaagggcgaatttggtaagactgagctcagagacctggtgggagggcaaggactggcgggcacagcaggaggagattagaggagggtccacctgaatctttgcagcaggcacagagcttctggctgcatctcagaagggggcagacgcacaggccagggaacacggggctctaggctgtggctccgagtgtccctggtgactggaaagcctgaggggaggctggaagctgatacaggatgccggtggcttgtgagacagaatgagctctttcttcctgaagagggacagaggggagagaagagagcagacatcacactgctccttccatccctgcccgtggcagacatcactaatcaaacttacggtgcctggcagacatcactcatcaggattgcactgccatctcccactgagcccagaccaaacctcagatccccagcacagcctccagcagccacccctgatctatcagggtaggagcatcttgcaatccagttgccaacactcgtctagagtttgagaactgaatacttgtgggtgtgcatctgcgagtctccctgcccaagcctggagggaatactaagaaatgtgcggacagtgaagagacaggaaaccttgttgcagcagaaatggcctcgatgccttcgggattctttagcctggagagaagagggctcaggggagtcaatgtgtgacctcaacactccaggaaggagagtgggcaagtgggatgccatggacagagccacagaaaaacagaaacctcttctgtgtattaagctgatgctaaagtcagagcagtccaaaggcaggaggctgccttgggaggtagtaagctctctgtccctggaggtatgcaagagggtggagaagtcttggcaaggatgttgaagaagatatccaagcctcagttctgggtgtggagagggagacccagatgatcttggggatttcttccactcttggagctggggagttggggaaggacagggaagggggtggcatgtgggagaggcgggcagtgtggacaagggaatgtgatgtgcacctctgtgtgttcctggggactgagagagaggtgtggggaggtaggagcgagggcgcggtgggaagtcatggaatggt

SEQ ID NO: 373790 - DNA, 5806 bp, Homo sapiens
caccgccagccaaagcagtcccttccatttcaggcaccggcctgggcccgggagacaccgcaaggctatttaagatggtgtggtttgcccatctacgttgatcgtcccaagaaaggggcaccgtctgcagaacttgccaggaaagtcatcctgggcggcgcgggccacgccagggtctccccgcgcggcttcctcccccggcgccttctctcgggcgcgcgtgcgccccctgcaggcggcccccgggagagcctcgcgggggagccgggagcctggtttccccgccaacccccatcccgcccgccccggcggccaccctgggggcgaggcagcccggcgcgtgggaggggacggcgcgccattggcttgtgcgcggaaccgagaggagggaccagcgcgggccgccagactcggtaagccccggccgcgcagggcgccgcgcgcagtccagccggcccggccctgccctgccctgtcctgccctgccctgccctgccctgccctgcactgcccggcccggcacgggcggcgcgatgtgaggcgtccgagcccggagcctccgcctggcatcagctccacgtagcccagcgccggcacgcgcgaggccccccttctgcagaggccgggctggaggagaagatggcggccaagcagcccccgcctctgatgaagaagcacagccagacggacctcgtgagccgcctgaagacccgcaagatcctcggcgtgggcggggaggatgacgacggggaggtgcatcgctccaagatcagccaggtcttaggcaatgaaatcaagtttaccattcgggagcctttggggctcagggtctggcagttcgtctctgctgtgctcttctccggcattgccatcatggcgcttgccttccctgaccagctctatgatgcggtctttgatggagcccaggtgaccagcaagacccccatccgcctctacggcggtgccctcctcagcatctccctgatcatgtggaacgctctctacacggctgagaaggtcatcattcgatggaccctgctcaccgaagcttgctatttcggggtccagttcttggtggtcactgccacgctagctgagacgggcctcatgtccctggggatcctgctgctcctggtcagccgcctcctttttgtcgtcatcagcatttactactattaccaagtcggccgaagacccaagaaggcctagttgcccgctgggcctggggccctgcccatgcctgggccagagtggcgctggggcctcggcttccctttggctcctggaaggcaggagggtcccctgccctgccccagtcctgccccagggaggcagggggtggggggccttcctttcctcctgggcaccccgtgtgctgtgatctcctgggctttcaggcttgacatgctggtctggggagagacagggcctctgctgccctgttcttcaccctcacagtgatacctcctttccttgggtctcttggcctccagaccccctcaatagacactgactaaagtcaagctggagtcatgagggtagtgggctaagtcgagggtccagcctcttctgccaggaagcccttcttgcttttgagagaggctgtgaccaccccccatccttctccctacactcccagccaacctagtgcccaagcagctaaacttggcttccttctaatcctggaaaaccctgtacccctcctcctcaatctggccctctccacatgcacaccctgaaaacacacacagacacacaacacacacacatacacacccctgaacacacacacagacacacatacacccatgatgtgagcaaacacacacacgtgcgccttcatagcccagccaagggcatgcaggcagggtgtgctgcctgagatggcacctccctttcagccattcttcaagaatgggccacacacagctagaagtcctctcccagctagaagtcctgtccccactctcctggcctgacaagatgagctctcctgggaccttgctctagggcactctgcctctaccctaggacactggaatgccctgggagccccctccctgcaaccagcctgagttcagccccacggacaaagggacacacagcccccaatggagaccattgtaagtggtggggctgggagaggaggaacagaaggaaagccatagcgctctcttgccccttggcatgtaccccaaggcctgatggccactgggctcagcctgtcccccactcctgcctgcttcccggtgagctgccccccacacgtgcagcccgggctgcctccagggtctggctgagtgggatcaggtggccctccaactcagcacaggaaataagtagaaacatttcagcaggccacctcccctcatcttccccgccctgtccagcgccctggcaaaggctgacaactggctgtcttggggccgaacagcccctgccctgcctctgagggcccaccagcctgtgctgcatacccaccgcccagcttctccctgagggcccaccagcctgtgctgcatacccaccgcccagcttctccctgagggcccaccagcctgtgctgtacaccccgttagtccctgatcccaaccttctccctcctgccagcacaccgatgcacacaccggaagtggcgagcccaagccctggggacaggtgtagggagaaaagcagccccaggcctcagactcgcttcccatcctggcatagagtgggggatggctggagggtgtctataggtacagcccgctctggctgctgccaggtgggcccctgccaggggtcctcacccctgtccaccctgtgcctggctgtccctgcacccagatacagcaacatggcctgtacccagcagagtggtggcaccaccatggttacagcggatgccccgagactctgcttggtaaacgtggcagagcagaatgggaggctggaccctgaggaagggcccctctcctggcatctgtctcttgctacctaagcctgtgcctctccctaaagagctgcctccctgctgccgagccctggtctggccacgagccactactgcctcccacaggcaccactgcctcccgctgctgcccacaggtggtgccgccaatgggcagtgccctcaggccgaagcctcaatcccccatctgagccaggcctaatcctctaatagtgatggttggtttgtcctcccataactgcaggtggattccacctggggaatgaggctgcgtgtcgggcgtctgctggccctgagacatccagtcttccacactcaactgtgggatgggagggtggcgtggccttaccccatgaggctgtccaggctctggcacacagctgtgctcacaaaatactgggtggcttggttagagctaattgtagtggagcctgcaggtgagggtgagggagggggctgcaggtcaggtaagatctggaagacagacgtacagcttggagggcagggggactctaaggcaaggagatttacagttgggaaggaggcagtggcagaggggtgagggacaggggcccttaagtccagcgaggaaagctcggtgtgggcccgctctacgctccgtttggggtgacctggaacgcctcttctcccagctccctccagccatcagcagcctcttgtcaagcttctgcctcgccccagtctatccccaaccccaaatcaagaccacctttcttcacggtcactatttattctttgttcctttttctttttgtaagaaacattcacaaaaaccagtgcaaaaccatcagtgtgggcgtcctgttttatattacaaaacttcctctggatatatcatataaaaggggggtctcacaggagagaaacgtgataaattagctctgcaatctacggcaaggaacatagtttttaaaatagactttcaacatatgacccatgggggaaggaggagaagtctctgttatgggctgttgtatttcggggtgaaaagaaacaaagaggtatccctgcccacccctcccccacaaccccagccaccaccagaacctgctgtgggttgtatctggaccaagccagctaaaccctgtttctccctgtgctctggagggaggctcaagcctgatttgggctgagctttctttgccttgcctccaaggaatggcctcaggcagtcttgcaaatagctaccagcctgagcgaatgccaacaggagcagaaactgcctgtcttccctttccagcctaagagggtggccagtggctggctggcgagctgaatcagggctgattgagggttccttggcacatttgtagaaagctgctgaggggcagtcttgtgtctgcccttgaacccaccttagccagatttcccttcatgaccagccctttctcttgggtcctccctctgacttctgtgggccccagaagcctgggatgcccctggattagagccataaagctgtgcaatttgcctcagtcctgcccagcatgggttttttgttttttgtttttgtttttgtgtgtcatcctcagaccagccatttgcctcttccaaaaagctggggctaagcatgtgggtggttcaagaggggcagcccccaggccccaggctgggccgcggtaccagtggcaggtccccctgggtctcaggagcttagcttctacggagctcaggtgtcatttatggggttgccagagcaagctgttaaagggcgaatttggtaagactgagctcagagacctggtgggagggcaaggactggcgggcacagcaggaggagattagaggagggtccacctgaatctttgcagcaggcacagagcttctggctgcatctcagaagggggcagacgcacaggccagggaacacggggctctaggctgtggctccgagtgtccctggtgactggaaagcctgaggggaggctggaagctgatacaggatgccggtggcttgtgagacagaatgagctctttcttcctgaagagggacagaggggagagaagagagcagacatcacactgctccttccatccctgcccgtggcagacatcactaatcaaacttacggtgcctggcagacatcactcatcaggattgcactgccatctcccactgagcccagaccaaacctcagatccccagcacagcctccagcagccacccctgatctatcagggtaggagcatcttgcaatccagttgccaacactcgtctagagtttgagaactgaatacttgtgggtgtgcatctgcgagtctccctgcccaagcctggagggaatactaagaaatgtgcggacagtgaagagacaggaaaccttgttgcagcagaaatggcctcgatgccttcgggattctttagcctggagagaagagggctcaggggagtcaatgtgtgacctcaacactccaggaaggagagtgggcaagtgggatgccatggacagagccacagaaaaacagaaacctcttctgtgtattaagctgatgctaaagtcagagcagtccaaaggcaggaggctgccttgggaggtagtaagctctctgtccctggaggtatgcaagagggtggagaagtcttggcaaggatgttgaagaagatatccaagcctcagttctgggtgtggagagggagacccagatgatcttggggatttcttccactcttggagctggggagttggggaaggacagggaagggggtggcatgtgggagaggcgggcagtgtggacaagggaatgtgatgtgcacctctgtgtgttcctggggactgagagagaggtgtggggaggtaggagcgagggcgcggtgggaagtcatggaatggt

SEQ ID NO: 373791 - DNA, 4221 bp, Homo sapiens
caccgccagccaaagcagtcccttccatttcaggcaccggcctgggcccgggagacaccgcaaggctatttaagatggtgtggtttgcccatctacgttgatcgtcccaagaaaggggcaccgtctgcagaacttgccaggaaagtcatcctgggcggcgcgggccacgccagggtctccccgcgcggcttcctcccccggcgccttctctcgggcgcgcgtgcgccccctgcaggcggcccccgggagagcctcgcgggggagccgggagcctggtttccccgccaacccccatcccgcccgccccggcggccaccctgggggcgaggcagcccggcgcgtgggaggggacggcgcgccattggcttgtgcgcggaaccgagaggagggaccagcgcgggccgccagactcggtaagccccggccgcgcagggcgccgcgcgcagtccagccggcccggccctgccctgccctgtcctgccctgccctgccctgccctgccctgcactgcccggcccggcacgggcggcgcgatgtgaggcgtccgagcccggagcctccgcctggcatcagctccacgtagcccagcgccggcacgcgcgaggccccccttctgcagaggccgggctggaggagaagatggcggccaagcagcccccgcctctgatgaagaagcacagccagacggacctcgtgagccgcctgaagacccgcaagatcctcggcgtgggcggggaggatgacgacggggaggtgcatcgctccaagatcagccaggtcttaggcaatgaaatcaagtttaccattcgggagcctttggggctcagggtctggcagttcgtctctgctgtgctcttctccggcattgccatcatggcgcttgccttccctgaccagctctatgatgcggtctttgatggagcccaggtgaccagcaagacccccatccgcctctacggcggtgccctcctcagcatctccctgatcatgtggaacgctctctacacggctgagaaggtcatcattcgatggaccctgctcaccgaagcttgctatttcggggtccagttcttggtggtcactgccacgctagctgagacgggcctcatgtccctggggatcctgctgctcctggtcagccgcctcctttttgtcgtcatcagcatttactactattaccaagtcggccgaagacccaagaaggcctagttgcccgctgggcctggggccctgcccatgcctgggccagagtggcgctggggcctcggcttccctttggctcctggaaggcaggagggtcccctgccctgccccagtcctgccccagggaggcagggggtggggggccttcctttcctcctgggcaccccgtgtgctgtgatctcctgggctttcaggcttgacatgctggtctggggagagacagggcctctgctgccctgttcttcaccctcacagtgatacctcctttccttgggtctcttggcctccagaccccctcaatagacactgactaaagtcaagctggagtcatgagggtagtgggctaagtcgagggtccagcctcttctgccaggaagcccttcttgcttttgagagaggctgtgaccaccccccatccttctccctacactcccagccaacctagtgcccaagcagctaaacttggcttccttctaatcctggaaaaccctgtacccctcctcctcaatctggccctctccacatgcacaccctgaaaacacacacagacacacaacacacacacatacacacccctgaacacacacacagacacacatacacccatgatgtgagcaaacacacacacgtgcgccttcatagcccagccaagggcatgcaggcagggtgtgctgcctgagatggcacctccctttcagccattcttcaagaatgggccacacacagctagaagtcctctcccagctagaagtcctgtccccactctcctggcctgacaagatgagctctcctgggaccttgctctagggcactctgcctctaccctaggacactggaatgccctgggagccccctccctgcaaccagcctgagttcagccccacggacaaagggacacacagcccccaatggagaccattgtaagtggtggggctgggagaggaggaacagaaggaaagccatagcgctctcttgccccttggcatgtaccccaaggcctgatggccactgggctcagcctgtcccccactcctgcctgcttcccggtgagctgccccccacacgtgcagcccgggctgcctccagggtctggctgagtgggatcaggtggccctccaactcagcacaggaaataagtagaaacatttcagcaggccacctcccctcatcttccccgccctgtccagcgccctggcaaaggctgacaactggctgtcttggggccgaacagcccctgccctgcctctgagggcccaccagcctgtgctgcatacccaccgcccagcttctccctgagggcccaccagcctgtgctgcatacccaccgcccagcttctccctgagggcccaccagcctgtgctgtacaccccgttagtccctgatcccaaccttctccctcctgccagcacaccgatgcacacaccggaagtggcgagcccaagccctggggacaggtgtagggagaaaagcagccccaggcctcagactcgcttcccatcctggcatagagtgggggatggctggagggtgtctataggtacagcccgctctggctgctgccaggtgggcccctgccaggggtcctcacccctgtccaccctgtgcctggctgtccctgcacccagatacagcaacatggcctgtacccagcagagtggtggcaccaccatggttacagcggatgccccgagactctgcttggtaaacgtggcagagcagaatgggaggctggaccctgaggaagggcccctctcctggcatctgtctcttgctacctaagcctgtgcctctccctaaagagctgcctccctgctgccgagccctggtctggccacgagccactactgcctcccacaggcaccactgcctcccgctgctgcccacaggtggtgccgccaatgggcagtgccctcaggccgaagcctcaatcccccatctgagccaggcctaatcctctaatagtgatggttggtttgtcctcccataactgcaggtggattccacctggggaatgaggctgcgtgtcgggcgtctgctggccctgagacatccagtcttccacactcaactgtgggatgggagggtggcgtggccttaccccatgaggctgtccaggctctggcacacagctgtgctcacaaaatactgggtggcttggttagagctaattgtagtggagcctgcaggtgagggtgagggagggggctgcaggtcaggtaagatctggaagacagacgtacagcttggagggcagggggactctaaggcaaggagatttacagttgggaaggaggcagtggcagaggggtgagggacaggggcccttaagtccagcgaggaaagctcggtgtgggcccgctctacgctccgtttggggtgacctggaacgcctcttctcccagctccctccagccatcagcagcctcttgtcaagcttctgcctcgccccagtctatccccaaccccaaatcaagaccacctttcttcacggtcactatttattctttgttcctttttctttttgtaagaaacattcacaaaaaccagtgcaaaaccatcaaaaaaaaaaaaaaaaaaaaaaaaaaaaaaaaaaaaaaaaaacaaaaaaaaaaaaaaaaaaaaaaaaaaaaaacgaagagaaaaaaaggaacgaaaacgacaacacgacagaacgcgtagagaacacagaagaaaaagcgtggagggcggccagggcgacgccggaaaggaggagaggaaggggggaagagaggcgggagagggggaggggaggagcgcgagagggcgggggcagagggacgggacacgcgagagggagggcggcgcgcgcggcgcggcgagaaggagcaggacgaggcagaggaagtagcgggagggaggacaagacaggggaacgaacaaggaaagcatggggaaggcgaaaaggcacgcacgagcgggcgcagagaagaagagacggggcagaaggaagacaacgcagggaaggcggacgacccgacacaccaaacggccgaagg

SEQ ID NO: 373792 - DNA, 6081 bp, Homo sapiens
caccgccagccaaagcagtcccttccatttcaggcaccggcctgggcccgggagacaccgcaaggctatttaagatggtgtggtttgcccatctacgttgatcgtcccaagaaaggggcaccgtctgcagaacttgccaggaaagtcatcctgggcggcgcgggccacgccagggtctccccgcgcggcttcctcccccggcgccttctctcgggcgcgcgtgcgccccctgcaggcggcccccgggagagcctcgcgggggagccgggagcctggtttccccgccaacccccatcccgcccgccccggcggccaccctgggggcgaggcagcccggcgcgtgggaggggacggcgcgccattggcttgtgcgcggaaccgagaggagggaccagcgcgggccgccagactcggtaagccccggccgcgcagggcgccgcgcgcagtccagccggcccggccctgccctgccctgtcctgccctgccctgccctgccctgccctgcactgcccggcccggcacgggcggcgcgatgtgaggcgtccgagcccggagcctccgcctggcatcagctccacgtagcccagcgccggcacgcgcgaggccccccttctgcagaggccgggctggaggagaagatggcggccaagcagcccccgcctctgatgaagaagcacagccagacggacctcgtgagccgcctgaagacccgcaagatcctcggcgtgggcggggaggatgacgacggggaggtgcatcgctccaagatcagccaggtcttaggcaatgaaatcaagtttaccattcgggagcctttggggctcagggtctggcagttcgtctctgctgtgctcttctccggcattgccatcatggcgcttgccttccctgaccagctctatgatgcggtctttgatggagcccaggtgaccagcaagacccccatccgcctctacggcggtgccctcctcagcatctccctgatcatgtggaacgctctctacacggctgagaaggtcatcattcgatggaccctgctcaccgaagcttgctatttcggggtccagttcttggtggtcactgccacgctagctgagacgggcctcatgtccctggggatcctgctgctcctggtcagccgcctcctttttgtcgtcatcagcatttactactattaccaagtcggccgaagacccaagaaggcctagttgcccgctgggcctggggccctgcccatgcctgggccagagtggcgctggggcctcggcttccctttggctcctggaaggcaggagggtcccctgccctgccccagtcctgccccagggaggcagggggtggggggccttcctttcctcctgggcaccccgtgtgctgtgatctcctgggctttcaggcttgacatgctggtctggggagagacagggcctctgctgccctgttcttcaccctcacagtgatacctcctttccttgggtctcttggcctccagaccccctcaatagacactgactaaagtcaagctggagtcatgagggtagtgggctaagtcgagggtccagcctcttctgccaggaagcccttcttgcttttgagagaggctgtgaccaccccccatccttctccctacactcccagccaacctagtgcccaagcagctaaacttggcttccttctaatcctggaaaaccctgtacccctcctcctcaatctggccctctccacatgcacaccctgaaaacacacacagacacacaacacacacacatacacacccctgaacacacacacagacacacatacacccatgatgtgagcaaacacacacacgtgcgccttcatagcccagccaagggcatgcaggcagggtgtgctgcctgagatggcacctccctttcagccattcttcaagaatgggccacacacagctagaagtcctctcccagctagaagtcctgtccccactctcctggcctgacaagatgagctctcctgggaccttgctctagggcactctgcctctaccctaggacactggaatgccctgggagccccctccctgcaaccagcctgagttcagccccacggacaaagggacacacagcccccaatggagaccattgtaagtggtggggctgggagaggaggaacagaaggaaagccatagcgctctcttgccccttggcatgtaccccaaggcctgatggccactgggctcagcctgtcccccactcctgcctgcttcccggtgagctgccccccacacgtgcagcccgggctgcctccagggtctggctgagtgggatcaggtggccctccaactcagcacaggaaataagtagaaacatttcagcaggccacctcccctcatcttccccgccctgtccagcgccctggcaaaggctgacaactggctgtcttggggccgaacagcccctgccctgcctctgagggcccaccagcctgtgctgcatacccaccgcccagcttctccctgagggcccaccagcctgtgctgcatacccaccgcccagcttctccctgagggcccaccagcctgtgctgtacaccccgttagtccctgatcccaaccttctccctcctgccagcacaccgatgcacacaccggaagtggcgagcccaagccctggggacaggtgtagggagaaaagcagccccaggcctcagactcgcttcccatcctggcatagagtgggggatggctggagggtgtctataggtacagcccgctctggctgctgccaggtgggcccctgccaggggtcctcacccctgtccaccctgtgcctggctgtccctgcacccagatacagcaacatggcctgtacccagcagagtggtggcaccaccatggttacagcggatgccccgagactctgcttggtaaacgtggcagagcagaatgggaggctggaccctgaggaagggcccctctcctggcatctgtctcttgctacctaagcctgtgcctctccctaaagagctgcctccctgctgccgagccctggtctggccacgagccacactgcctcccgctgctgcccacaggtggtgccgccaatgggcagtgccctcaggccgaagcctcaatcccccatctgagccaggcctaatcctctaatagtgatggttggtttgtcctcccataactgcaggtggattccacctggggaatgaggctgcgtgtcgggcgtctgctggccctgagacatccagtcttccacactcaactgtgggatgggagggtggcgtggccttaccccatgaggctgtccaggctctggcacacagctgtgctcacaaaatactgggtggcttggttagagctaattgtagtggagcctgcaggtgagggtgagggagggggctgcaggtcaggtaagatctggaagacagacgtacagcttggagggcagggggactctaaggcaaggagatttacagttgggaaggaggcagtggcagaggggtgagggacaggggcccttaagtccagcgaggaaagctcggtgtgggcccgctctacgctccgtttggggtgacctggaacgcctcttctcccagctccctccagccatcagcagcctcttgtcaagcttctgcctcgccccagtctatccccaaccccaaatcaagaccacctttcttcacggtcactatttattctttgttcctttttctttttgtaagaaacattcacaaaaaccagtgcaaaaccatcagtgtgggcgtcctgttttatattacaaaacttcctctggatatatcatataaaaggggggtctcacaggagagaaacgtgataaattagctctgcaatctacggcaaggaacatagtttttaaaatagactttcaacatatgacccatgggggaaggaggagggggcttctggggagacggcgggtgctggggcctcggctggtttgggaaatcctgtccgggccccttaagcatggatagagacatagacaagggaggctgtggacaggcctgagcaccaaggccagaaattaacagggaccctggggaggggccctcacccccagcccataaagagctattccctttctctaagaggcagtagcttcagagcaggaaagtggctttcgatacaggcagggtttgtgatgagcggtgtagtcttcttgttccttgccctgttagtggggtccgaggaagtctctgttatgggctgttgtatttcggggtgaaaagaaacaaagaggtatccctgcccacccctcccccacaaccccagccaccaccagaacctgctgtgggttgtatctggaccaagccagctaaaccctgtttctccctgtgctctggagggaggctcaagcctgatttgggctgagctttctttgccttgcctccaaggaatggcctcaggcagtcttgcaaatagctaccagcctgagcgaatgccaacaggagcagaaactgcctgtcttccctttccagcctaagagggtggccagtggctggctggcgagctgaatcagggctgattgagggttccttggcacatttgtagaaagctgctgaggggcagtcttgtgtctgcccttgaacccaccttagccagatttcccttcatgaccagccctttctcttgggtcctccctctgacttctgtgggccccagaagcctgggatgcccctggattagagccataaagctgtgcaatttgcctcagtcctgcccagcatgggttttttgttttttgtttttgtttttgtgtgtcatcctcagaccagccatttgcctcttccaaaaagctggggctaagcatgtgggtggttcaagaggggcagcccccaggccccaggctgggccgcggtaccagtggcaggtccccctgggtctcaggagcttagcttctacggagctcaggtgtcatttatggggttgccagagcaagctgttaaagggcgaatttggtaagactgagctcagagacctggtgggagggcaaggactggcgggcacagcaggaggagattagaggagggtccacctgaatctttgcagcaggcacagagcttctggctgcatctcagaagggggcagacgcacaggccagggaacacggggctctaggctgtggctccgagtgtccctggtgactggaaagcctgaggggaggctggaagctgatacaggatgccggtggcttgtgagacagaatgagctctttcttcctgaagagggacagaggggagagaagagagcagacatcacactgctccttccatccctgcccgtggcagacatcactaatcaaacttacggtgcctggcagacatcactcatcaggattgcactgccatctcccactgagcccagaccaaacctcagatccccagcacagcctccagcagccacccctgatctatcagggtaggagcatcttgcaatccagttgccaacactcgtctagagtttgagaactgaatacttgtgggtgtgcatctgcgagtctccctgcccaagcctggagggaatactaagaaatgtgcggacagtgaagagacaggaaaccttgttgcagcagaaatggcctcgatgccttcgggattctttagcctggagagaagagggctcaggggagtcaatgtgtgacctcaacactccaggaaggagagtgggcaagtgggatgccatggacagagccacagaaaaacagaaacctcttctgtgtattaagctgatgctaaagtcagagcagtccaaaggcaggaggctgccttgggaggtagtaagctctctgtccctggaggtatgcaagagggtggagaagtcttggcaaggatgttgaagaagatatccaagcctcagttctgggtgtggagagggagacccagatgatcttggggatttcttccactcttggagctggggagttggggaaggacagggaagggggtggcatgtgggagaggcgggcagtgtggacaagggaatgtgatgtgcacctctgtgtgttcctggggactgagagagaggtgtggggaggtaggagcgagggcgcggtgggaagtcatggaatggt

SEQ ID NO: 373793 - DNA, 5747 bp, Homo sapiens
caccgccagccaaagcagtcccttccatttcaggcaccggcctgggcccgggagacaccgcaaggctatttaagatggtgtggtttgcccatctacgttgatcgtcccaagaaaggggcaccgtctgcagaacttgccaggaaagtcatcctgggcggcgcgggccacgccagggtctccccgcgcggcttcctcccccggcgccttctctcgggcgcgcgtgcgccccctgcaggcggcccccgggagagcctcgcgggggagccgggagcctggtttccccgccaacccccatcccgcccgccccggcggccaccctgggggcgaggcagcccggcgcgtgggaggggacggcgcgccattggcttgtgcgcggaaccgagaggagggaccagcgcgggccgccagactcggtaagccccggccgcgcagggcgccgcgcgcagtccagccggcccggccctgccctgccctgtcctgccctgccctgccctgccctgccctgcactgcccggcccggcacgggcggcgcgatgtgaggcgtccgagcccggagcctccgcctggcatcagctccacgtagcccagcgccggcacgcgcgaggccccccttctgcagaggccgggctggaggagaagatggcggccaagcagcccccgcctctgatgaagaagcacagccagacggacctcgtgagccgcctgaagacccgcaagatcctcggcgtgggcggggaggatgacgacggggaggtgcatcgctccaagatcagccaggtcttaggcaatgaaatcaagtttaccattcgggagcctttggggctcagggtctggcagttcgtctctgctgtgctcttctccggcattgccatcatggcgcttgccttccctgaccagctctatgatgcggtctttgatggagcccaggtgaccagcaagacccccatccgcctctacggcggtgccctcctcagcatctccctgatcatgtggaacgctctctacacggctgagaaggtcatcattcgatggaccctgctcaccgaagcttgctatttcggggtccagttcttggtggtcactgccacgctagctgagacgggcctcatgtccctggggatcctgctgctcctggtcagccgcctcctttttgtcgtcatcagcatttactactattaccaagtcggccgaagacccaagaaggcctagttgcccgctgggcctggggccctgcccatgcctgggccagagtggcgctggggcctcggcttccctttggctcctggaaggcaggagggtcccctgccctgccccagtcctgccccagggaggcagggggtggggggccttcctttcctcctgggcaccccgtgtgctgtgatctcctgggctttcaggcttgacatgctggtctggggagagacagggcctctgctgccctgttcttcaccctcacagtgatacctcctttccttgggtctcttggcctccagaccccctcaatagacactgactaaagtcaagctggagtcatgagggtagtgggctaagtcgagggtccagcctcttctgccaggaagcccttcttgcttttgagagaggctgtgaccaccccccatccttctccctacactcccagccaacctagtgcccaagcagctaaacttggcttccttctaatcctggaaaaccctgtacccctcctcctcaatctggccctctccacatgcacaccctgaaaacacacacagacacacaacacacacacatacacacccctgaacacacacacagacacacatacacccatgatgtgagcaaacacacacacgtgcgccttcatagcccagccaagggcatgcaggcagggtgtgctgcctgagatggcacctccctttcagccattcttcaagaatgggccacacacagctagaagtcctctcccagctagaagtcctgtccccactctcctggcctgacaagatgagctctcctgggaccttgctctagggcactctgcctctaccctaggacactggaatgccctgggagccccctccctgcaaccagcctgagttcagccccacggacaaagggacacacagcccccaatggagaccattgtaagtggtggggctgggagaggaggaacagaaggaaagccatagcgctctcttgccccttggcatgtaccccaaggcctgatggccactgggctcagcctgtcccccactcctgccttctccctcctgccagcacaccgatgcacacaccggaagtggcgagcccaagccctggggacaggtgtagggagaaaagcagccccaggcctcagactcgcttcccatcctggcatagagtgggggatggctggagggtgtctataggtacagcccgctctggctgctgccaggtgggcccctgccaggggtcctcacccctgtccaccctgtgcctggctgtccctgcacccagatacagcaacatggcctgtacccagcagagtggtggcaccaccatggttacagcggatgccccgagactctgcttggtaaacgtggcagagcagaatgggaggctggaccctgaggaagggcccctctcctggcatctgtctcttgctacctaagcctgtgcctctccctaaagagctgcctccctgctgccgagccctggtctggccacgagccactactgcctcccacaggcaccactgcctcccgctgctgcccacaggtggtgccgccaatgggcagtgccctcaggccgaagcctcaatcccccatctgagccaggcctaatcctctaatagtgatggttggtttgtcctcccataactgcaggtggattccacctggggaatgaggctgcgtgtcgggcgtctgctggccctgagacatccagtcttccacactcaactgtgggatgggagggtggcgtggccttaccccatgaggctgtccaggctctggcacacagctgtgctcacaaaatactgggtggcttggttagagctaattgtagtggagcctgcaggtgagggtgagggagggggctgcaggtcaggtaagatctggaagacagacgtacagcttggagggcagggggactctaaggcaaggagatttacagttgggaaggaggcagtggcagaggggtgagggacaggggcccttaagtccagcgaggaaagctcggtgtgggcccgctctacgctccgtttggggtgacctggaacgcctcttctcccagctccctccagccatcagcagcctcttgtcaagcttctgcctcgccccagtctatccccaaccccaaatcaagaccacctttcttcacggtcactatttattctttgttcctttttctttttgtaagaaacattcacaaaaaccagtgcaaaaccatcagtgtgggcgtcctgttttatattacaaaacttcctctggatatatcatataaaaggggggtctcacaggagagaaacgtgataaattagctctgcaatctacggcaaggaacatagtttttaaaatagactttcaacatatgacccatgggggaaggaggagggggcttctggggagacggcgggtgctggggcctcggctggtttgggaaatcctgtccgggccccttaagcatggatagagacatagacaagggaggctgtggacaggcctgagcaccaaggccagaaattaacagggaccctggggaggggccctcacccccagcccataaagagctattccctttctctaagaggcagtagcttcagagcaggaaagtggctttcgatacaggcagggtttgtgatgagcggtgtagtcttcttgttccttgccctgttagtggggtccgaggaagtctctgttatgggctgttgtatttcggggtgaaaagaaacaaagaggtatccctgcccacccctcccccacaaccccagccaccaccagaacctgctgtgggttgtatctggaccaagccagctaaaccctgtttctccctgtgctctggagggaggctcaagcctgatttgggctgagctttctttgccttgcctccaaggaatggcctcaggcagtcttgcaaatagctaccagcctgagcgaatgccaacaggagcagaaactgcctgtcttccctttccagcctaagagggtggccagtggctggctggcgagctgaatcagggctgattgagggttccttggcacatttgtagaaagctgctgaggggcagtcttgtgtctgcccttgaacccaccttagccagatttcccttcatgaccagccctttctcttgggtcctccctctgacttctgtgggccccagaagcctgggatgcccctggattagagccataaagctgtgcaatttgcctcagtcctgcccagcatgggttttttgttttttgtttttgtttttgtgtgtcatcctcagaccagccatttgcctcttccaaaaagctggggctaagcatgtgggtggttcaagaggggcagcccccaggccccaggctgggccgcggtaccagtggcaggtccccctgggtctcaggagcttagcttctacggagctcaggtgtcatttatggggttgccagagcaagctgttaaagggcgaatttggtaagactgagctcagagacctggtgggagggcaaggactggcgggcacagcaggaggagattagaggagggtccacctgaatctttgcagcaggcacagagcttctggctgcatctcagaagggggcagacgcacaggccagggaacacggggctctaggctgtggctccgagtgtccctggtgactggaaagcctgaggggaggctggaagctgatacaggatgccggtggcttgtgagacagaatgagctctttcttcctgaagagggacagaggggagagaagagagcagacatcacactgctccttccatccctgcccgtggcagacatcactaatcaaacttacggtgcctggcagacatcactcatcaggattgcactgccatctcccactgagcccagaccaaacctcagatccccagcacagcctccagcagccacccctgatctatcagggtaggagcatcttgcaatccagttgccaacactcgtctagagtttgagaactgaatacttgtgggtgtgcatctgcgagtctccctgcccaagcctggagggaatactaagaaatgtgcggacagtgaagagacaggaaaccttgttgcagcagaaatggcctcgatgccttcgggattctttagcctggagagaagagggctcaggggagtcaatgtgtgacctcaacactccaggaaggagagtgggcaagtgggatgccatggacagagccacagaaaaacagaaacctcttctgtgtattaagctgatgctaaagtcagagcagtccaaaggcaggaggctgccttgggaggtagtaagctctctgtccctggaggtatgcaagagggtggagaagtcttggcaaggatgttgaagaagatatccaagcctcagttctgggtgtggagagggagacccagatgatcttggggatttcttccactcttggagctggggagttggggaaggacagggaagggggtggcatgtgggagaggcgggcagtgtggacaagggaatgtgatgtgcacctctgtgtgttcctggggactgagagagaggtgtggggaggtaggagcgagggcgcggtgggaagtcatggaatggt

SEQ ID NO: 373794 - DNA, 5941 bp, Homo sapiens
caccgccagccaaagcagtcccttccatttcaggcaccggcctgggcccgggagacaccgcaaggctatttaagatggtgtggtttgcccatctacgttgatcgtcccaagaaaggggcaccgtctgcagaacttgccaggaaagtcatcctgggcggcgcgggccacgccagggtctccccgcgcggcttcctcccccggcgccttctctcgggcgcgcgtgcgccccctgcaggcggcccccgggagagcctcgcgggggagccgggagcctggtttccccgccaacccccatcccgcccgccccggcggccaccctgggggcgaggcagcccggcgcgtgggaggggacggcgcgccattggcttgtgcgcggaaccgagaggagggaccagcgcgggccgccagactcggtaagccccggccgcgcagggcgccgcgcgcagtccagccggcccggccctgccctgccctgtcctgccctgccctgccctgccctgccctgcactgcccggcccggcacgggcggcgcgatgtgaggcgtccgagcccggagcctccgcctggcatcagctccacgtagcccagcgccggcacgcgcgaggccccccttctgcagaggccgggctggaggagaagatggcggccaagcagcccccgcctctgatgaagaagcacagccagacggacctcgtgagccgcctgaagacccgcaagatcctcggcgtgggcggggaggatgacgacggggaggtgcatcgctccaagatcagccaggtcttaggcaatgaaatcaagtttaccattcgggagcctttggggctcagggtctggcagttcgtctctgctgtgctcttctccggcattgccatcatggcgcttgccttccctgaccagctctatgatgcggtctttgatggagcccaggtgaccagcaagacccccatccgcctctacggcggtgccctcctcagcatctccctgatcatgtggaacgctctctacacggctgagaaggtcatcattcgatggaccctgctcaccgaagcttgctatttcggggtccagttcttggtggtcactgccacgctagctgagacgggcctcatgtccctggggatcctgctgctcctggtcagccgcctcctttttgtcgtcatcagcatttactactattaccaagtcggccgaagacccaagaaggcctagttgcccgctgggcctggggccctgcccatgcctgggccagagtggcgctggggcctcggcttccctttggctcctggaaggcaggagggtcccctgccctgccccagtcctgccccagggaggcagggggtggggggccttcctttcctcctgggcaccccgtgtgctgtgatctcctgggctttcaggcttgacatgctggtctggggagagacagggcctctgctgccctgttcttcaccctcacagtgatacctcctttccttgggtctcttggcctccagaccccctcaatagacactgactaaagtcaagctggagtcatgagggtagtgggctaagtcgagggtccagcctcttctgccaggaagcccttcttgcttttgagagaggctgtgaccaccccccatccttctccctacactcccagccaacctagtgcccaagcagctaaacttggcttccttctaatcctggaaaaccctgtacccctcctcctcaatctggccctctccacatgcacaccctgaaaacacacacagacacacaacacacacacatacacacccctgaacacacacacagacacacatacacccatgatgtgagcaaacacacacacgtgcgccttcatagcccagccaagggcatgcaggcagggtgtgctgcctgagatggcacctccctttcagccattcttcaagaatgggccacacacagctagaagtcctctcccagctagaagtcctgtccccactctcctggcctgacaagatgagctctcctgggaccttgctctagggcactctgcctctaccctaggacactggaatgccctgggagccccctccctgcaaccagcctgagttcagccccacggacaaagggacacacagcccccaatggagaccattgtaagtggtggggctgggagaggaggaacagaaggaaagccatagcgctctcttgccccttggcatgtaccccaaggcctgatggccactgggctcagcctgtcccccactcctgcctgcttcccggtgagctgccccccacacgtgcagcccgggctgcctccagggtctggctgagtgggatcaggtggccctccaactcagcacaggaaataagtagaaacatttcagcaggccacctcccctcatcttccccgccctgtccagcgccctggcaaaggctgacaactggctgtcttggggccgaacagcccctgccctgcctctgagggcccaccagcctgtgctgcatacccaccgcccagcttctccctgagggcccaccagcctgtgctgcatacccaccgcccagcttctccctgagggcccaccagcctgtgctgtacaccccgttagtccctgatcccaaccttctccctcctgccagcacaccgatgcacacaccggaagtggcgagcccaagccctggggacaggtgtagggagaaaagcagccccaggcctcagactcgcttcccatcctggcatagagtgggggatggctggagggtgtctataggtacagcccgctctggctgctgccaggtgggcccctgccaggggtcctcacccctgtccaccctgtgcctggctgtccctgcacccagatacagcaacatggcctgtacccagcagagtggtggcaccaccatggttacagcggatgccccgagactctgcttggtaaacgtggcagagcagaatgggaggctggaccctgaggaagggcccctctcctggcatctgtctcttgctacctaagcctgtgcctctccctaaagagctgcctccctgctgccgagccctggtctggccacgagccactactgcctcccacaggcaccactgcctcccgctgctgcccacaggtggtgccgccaatgggcagtgccctcaggccgaagcctcaatcccccatctgagccaggcctaatcctctaatagtgatggttggtttgtcctcccataactgcaggtggattccacctggggaatgaggctgcgtgtcgggcgtctgctggccctgagacatccagtcttccacactcaactgtgggatgggagggtggcgtggccttaccccatgaggctgtccaggctctggcacacagctgtgctcacaaaatactgggtggcttggttagagctaattgtagtggagcctgcaggtgagggtgagggagggggctgcaggtcaggtaagatctggaagacagacgtacagctccctccagccatcagcagcctcttgtcaagcttctgcctcgccccagtctatccccaaccccaaatcaagaccacctttcttcacggtcactatttattctttgttcctttttctttttgtaagaaacattcacaaaaaccagtgcaaaaccatcagtgtgggcgtcctgttttatattacaaaacttcctctggatatatcatataaaaggggggtctcacaggagagaaacgtgataaattagctctgcaatctacggcaaggaacatagtttttaaaatagactttcaacatatgacccatgggggaaggaggagggggcttctggggagacggcgggtgctggggcctcggctggtttgggaaatcctgtccgggccccttaagcatggatagagacatagacaagggaggctgtggacaggcctgagcaccaaggccagaaattaacagggaccctggggaggggccctcacccccagcccataaagagctattccctttctctaagaggcagtagcttcagagcaggaaagtggctttcgatacaggcagggtttgtgatgagcggtgtagtcttcttgttccttgccctgttagtggggtccgaggaagtctctgttatgggctgttgtatttcggggtgaaaagaaacaaagaggtatccctgcccacccctcccccacaaccccagccaccaccagaacctgctgtgggttgtatctggaccaagccagctaaaccctgtttctccctgtgctctggagggaggctcaagcctgatttgggctgagctttctttgccttgcctccaaggaatggcctcaggcagtcttgcaaatagctaccagcctgagcgaatgccaacaggagcagaaactgcctgtcttccctttccagcctaagagggtggccagtggctggctggcgagctgaatcagggctgattgagggttccttggcacatttgtagaaagctgctgaggggcagtcttgtgtctgcccttgaacccaccttagccagatttcccttcatgaccagccctttctcttgggtcctccctctgacttctgtgggccccagaagcctgggatgcccctggattagagccataaagctgtgcaatttgcctcagtcctgcccagcatgggttttttgttttttgtttttgtttttgtgtgtcatcctcagaccagccatttgcctcttccaaaaagctggggctaagcatgtgggtggttcaagaggggcagcccccaggccccaggctgggccgcggtaccagtggcaggtccccctgggtctcaggagcttagcttctacggagctcaggtgtcatttatggggttgccagagcaagctgttaaagggcgaatttggtaagactgagctcagagacctggtgggagggcaaggactggcgggcacagcaggaggagattagaggagggtccacctgaatctttgcagcaggcacagagcttctggctgcatctcagaagggggcagacgcacaggccagggaacacggggctctaggctgtggctccgagtgtccctggtgactggaaagcctgaggggaggctggaagctgatacaggatgccggtggcttgtgagacagaatgagctctttcttcctgaagagggacagaggggagagaagagagcagacatcacactgctccttccatccctgcccgtggcagacatcactaatcaaacttacggtgcctggcagacatcactcatcaggattgcactgccatctcccactgagcccagaccaaacctcagatccccagcacagcctccagcagccacccctgatctatcagggtaggagcatcttgcaatccagttgccaacactcgtctagagtttgagaactgaatacttgtgggtgtgcatctgcgagtctccctgcccaagcctggagggaatactaagaaatgtgcggacagtgaagagacaggaaaccttgttgcagcagaaatggcctcgatgccttcgggattctttagcctggagagaagagggctcaggggagtcaatgtgtgacctcaacactccaggaaggagagtgggcaagtgggatgccatggacagagccacagaaaaacagaaacctcttctgtgtattaagctgatgctaaagtcagagcagtccaaaggcaggaggctgccttgggaggtagtaagctctctgtccctggaggtatgcaagagggtggagaagtcttggcaaggatgttgaagaagatatccaagcctcagttctgggtgtggagagggagacccagatgatcttggggatttcttccactcttggagctggggagttggggaaggacagggaagggggtggcatgtgggagaggcgggcagtgtggacaagggaatgtgatgtgcacctctgtgtgttcctggggactgagagagaggtgtggggaggtaggagcgagggcgcggtgggaagtcatggaatggt

SEQ ID NO: 373795 - DNA, 5867 bp, Homo sapiens
caccgccagccaaagcagtcccttccatttcaggcaccggcctgggcccgggagacaccgcaaggctatttaagatggtgtggtttgcccatctacgttgatcgtcccaagaaaggggcaccgtctgcagaacttgccaggaaagtcatcctgggcggcgcgggccacgccagggtctccccgcgcggcttcctcccccggcgccttctctcgggcgcgcgtgcgccccctgcaggcggcccccgggagagcctcgcgggggagccgggagcctggtttccccgccaacccccatcccgcccgccccggcggccaccctgggggcgaggcagcccggcgcgtgggaggggacggcgcgccattggcttgtgcgcggaaccgagaggagggaccagcgcgggccgccagactcggtaagccccggccgcgcagggcgccgcgcgcagtccagccggcccggccctgccctgccctgtcctgccctgccctgccctgccctgccctgcactgcccggcccggcacgggcggcgcgatgtgaggcgtccgagcccggagcctccgcctggcatcagctccacgtagcccagcgccggcacgcgcgaggccccccttctgcagaggccgggctggaggagaagatggcggccaagcagcccccgcctctgatgaagaagcacagccagacggacctcgtgagccgcctgaagacccgcaagatcctcggcgtgggcggggaggatgacgacggggaggtgcatcgctccaagatcagccaggtcttaggcaatgaaatcaagtttaccattcgggagcctttggggctcagggtctggcagttcgtctctgctgtgctcttctccggcattgccatcatggcgcttgccttccctgaccagctctatgatgcggtctttgatggagcccaggtgaccagcaagacccccatccgcctctacggcggtgccctcctcagcatctccctgatcatgtggaacgctctctacacggctgagaaggtcatcattcgatggaccctgctcaccgaagcttgctatttcggggtccagttcttggtggtcactgccacgctagctgagacgggcctcatgtccctggggatcctgctgctcctggtcagccgcctcctttttgtcgtcatcagcatttactactattaccaagtcggccgaagacccaagaaggcctagttgcccgctgggcctggggccctgcccatgcctgggccagagtggcgctggggcctcggcttccctttggctcctggaaggcaggagggtcccctgccctgccccagtcctgccccagggaggcagggggtggggggccttcctttcctcctgggcaccccgtgtgctgtgatctcctgggctttcaggcttgacatgctggtctggggagagacagggcctctgctgccctgttcttcaccctcacagtgatacctcctttccttgggtctcttggcctccagaccccctcaatagacactgactaaagtcaagctggagtcatgagggtagtgggctaagtcgagggtccagcctcttctgccaggaagcccttcttgcttttgagagaggctgtgaccaccccccatccttctccctacactcccagccaacctagtgcccaagcagctaaacttggcttccttctaatcctggaaaaccctgtacccctcctcctcaatctggccctctccacatgcacaccctgaaaacacacacagacacacaacacacacacatacacacccctgaacacacacacagacacacatacacccatgatgtgagcaaacacacacacgtgcgccttcatagcccagccaagggcatgcaggcagggtgtgctgcctgagatggcacctccctttcagccattcttcaagaatgggccacacacagctagaagtcctctcccagctagaagtcctgtccccactctcctggcctgacaagatgagctctcctgggaccttgctctagggcactctgcctctaccctaggacactggaatgccctgggagccccctccctgcaaccagcctgagttcagccccacggacaaagggacacacagcccccaatggagaccattgtaagtggtggggctgggagaggaggaacagaaggaaagccatagcgctctcttgccccttggcatgtaccccaaggcctgatggccactgggctcagcctgtcccccactcctgcctgcttcccggtgagctgccccccacacgtgcagcccgggctgcctccagggtctggctgagtgggatcaggtggccctccaactcagcacaggaaataagtagaaacatttcagcaggccacctcccctcatcttccccgccctgtccagcgccctggcaaaggctgacaactggctgtcttggggccgaacagcccctgccctgcctctgagggcccaccagcctgtgctgcatacccaccgcccagcttctccctgagggcccaccagcctgtgctgcatacccaccgcccagcttctccctgagggcccaccagcctgtgctgtacaccccgttagtccctgatcccaaccttctccctcctgccagcacaccgatgcacacaccggaagtggcgagcccaagccctggggacaggtgtagggagaaaagcagccccaggcctcagactcgcttcccatcctggcatagagtgggggatggctggagggtgtctataggtacagcccgctctggctgctgccaggtgggcccctgccaggggtcctcacccctgtccaccctgtgcctggctgtccctgcacccagatacagcaacatggcctgtacccagcagagtggtggcaccaccatggttacagcggatgccccgagactctgcttggtaaacgtggcagagcagaatgggaggctggaccctgaggaagggcccctctcctggcatctgtctcttgctacctaagcctgtgcctctccctaaagagctgcctccctgctgccgagccctggtctggccacgagccactactgcctcccacaggcaccactgcctcccgctgctgcccacaggtggtgccgccaatgggcagtgccctcaggccgaagcctcaatcccccatctgagccaggcctaatcctctaatagtgatggttggtttgtcctcccataactgcaggtggattccacctggggaatgaggctgcgtgtcgggcgtctgctggccctgagacatccagtcttccacactcaactgtgggatgggacaggggcccttaagtccagcgaggaaagctcggtgtgggcccgctctacgctccgtttggggtgacctggaacgcctcttctcccagctccctccagccatcagcagcctcttgtcaagcttctgcctcgccccagtctatccccaaccccaaatcaagaccacctttcttcacggtcactatttattctttgttcctttttctttttgtaagaaacattcacaaaaaccagtgcaaaaccatcagtgtgggcgtcctgttttatattacaaaacttcctctggatatatcatataaaaggggggtctcacaggagagaaacgtgataaattagctctgcaatctacggcaaggaacatagtttttaaaatagactttcaacatatgacccatgggggaaggaggagggggcttctggggagacggcgggtgctggggcctcggctggtttgggaaatcctgtccgggccccttaagcatggatagagacatagacaagggaggctgtggacaggcctgagcaccaaggccagaaattaacagggaccctggggaggggccctcacccccagcccataaagagctattccctttctctaagaggcagtagcttcagagcaggaaagtggctttcgatacaggcagggtttgtgatgagcggtgtagtcttcttgttccttgccctgttagtggggtccgaggaagtctctgttatgggctgttgtatttcggggtgaaaagaaacaaagaggtatccctgcccacccctcccccacaaccccagccaccaccagaacctgctgtgggttgtatctggaccaagccagctaaaccctgtttctccctgtgctctggagggaggctcaagcctgatttgggctgagctttctttgccttgcctccaaggaatggcctcaggcagtcttgcaaatagctaccagcctgagcgaatgccaacaggagcagaaactgcctgtcttccctttccagcctaagagggtggccagtggctggctggcgagctgaatcagggctgattgagggttccttggcacatttgtagaaagctgctgaggggcagtcttgtgtctgcccttgaacccaccttagccagatttcccttcatgaccagccctttctcttgggtcctccctctgacttctgtgggccccagaagcctgggatgcccctggattagagccataaagctgtgcaatttgcctcagtcctgcccagcatgggttttttgttttttgtttttgtttttgtgtgtcatcctcagaccagccatttgcctcttccaaaaagctggggctaagcatgtgggtggttcaagaggggcagcccccaggccccaggctgggccgcggtaccagtggcaggtccccctgggtctcaggagcttagcttctacggagctcaggtgtcatttatggggttgccagagcaagctgttaaagggcgaatttggtaagactgagctcagagacctggtgggagggcaaggactggcgggcacagcaggaggagattagaggagggtccacctgaatctttgcagcaggcacagagcttctggctgcatctcagaagggggcagacgcacaggccagggaacacggggctctaggctgtggctccgagtgtccctggtgactggaaagcctgaggggaggctggaagctgatacaggatgccggtggcttgtgagacagaatgagctctttcttcctgaagagggacagaggggagagaagagagcagacatcacactgctccttccatccctgcccgtggcagacatcactaatcaaacttacggtgcctggcagacatcactcatcaggattgcactgccatctcccactgagcccagaccaaacctcagatccccagcacagcctccagcagccacccctgatctatcagggtaggagcatcttgcaatccagttgccaacactcgtctagagtttgagaactgaatacttgtgggtgtgcatctgcgagtctccctgcccaagcctggagggaatactaagaaatgtgcggacagtgaagagacaggaaaccttgttgcagcagaaatggcctcgatgccttcgggattctttagcctggagagaagagggctcaggggagtcaatgtgtgacctcaacactccaggaaggagagtgggcaagtgggatgccatggacagagccacagaaaaacagaaacctcttctgtgtattaagctgatgctaaagtcagagcagtccaaaggcaggaggctgccttgggaggtagtaagctctctgtccctggaggtatgcaagagggtggagaagtcttggcaaggatgttgaagaagatatccaagcctcagttctgggtgtggagagggagacccagatgatcttggggatttcttccactcttggagctggggagttggggaaggacagggaagggggtggcatgtgggagaggcgggcagtgtggacaagggaatgtgatgtgcacctctgtgtgttcctggggactgagagagaggtgtggggaggtaggagcgagggcgcggtgggaagtcatggaatggt

SEQ ID NO: 373796 - DNA, 4134 bp, Homo sapiens
caccgccagccaaagcagtcccttccatttcaggcaccggcctgggcccgggagacaccgcaaggctatttaagatggtgtggtttgcccatctacgttgatcgtcccaagaaaggggcaccgtctgcagaacttgccaggaaagtcatcctgggcggcgcgggccacgccagggtctccccgcgcggcttcctcccccggcgccttctctcgggcgcgcgtgcgccccctgcaggcggcccccgggagagcctcgcgggggagccgggagcctggtttccccgccaacccccatcccgcccgccccggcggccaccctgggggcgaggcagcccggcgcgtgggaggggacggcgcgccattggcttgtgcgcggaaccgagaggagggaccagcgcgggccgccagactcggtaagccccggccgcgcagggcgccgcgcgcagtccagccggcccggccctgccctgccctgtcctgccctgccctgccctgccctgccctgcactgcccggcccggcacgggcggcgcgatgtgaggcgtccgagcccggagcctccgcctggcatcagctccacgtagcccagcgccggcacgcgcgaggccccccttctgcagaggccgggctggaggagaagatggcggccaagcagcccccgcctctgatgaagaagcacagccagacggacctcgtgagccgcctgaagacccgcaagatcctcggcgtgggcggggaggatgacgacggggaggtgcatcgctccaagatcagccaggtcttaggcaatgaaatcaagtttaccattcgggagcctttggggctcagggtctggcagttcgtctctgctgtgctcttctccggcattgccatcatggcgcttgccttccctgaccagctctatgatgcggtctttgatggagcccaggtgaccagcaagacccccatccgcctctacggcggtgccctcctcagcatctccctgatcatgtggaacgctctctacacggctgagaaggtcatcattcgatggaccctgctcaccgaagcttgctatttcggggtccagttcttggtggtcactgccacgctagctgagacgggcctcatgtccctggggatcctgctgctcctggtcagccgcctcctttttgtcgtcatcagcatttactactattaccaagtcggccgaagacccaagaaggcctagttgcccgctgggcctggggccctgcccatgcctgggccagagtggcgctggggcctcggcttccctttggctcctggaaggcaggagggtcccctgccctgccccagtcctgccccagggaggcagggggtggggggccttcctttcctcctgggcaccccgtgtgctgtgatctcctgggctttcaggcttgacatgctggtctggggagagacagggcctctgctgccctgttcttcaccctcacagtgatacctcctttccttgggtctcttggcctccagaccccctcaatagacactgactaaagtcaagctggagtcatgagggtagtgggctaagtcgagggtccagcctcttctgccaggaagcccttcttgcttttgagagaggctgtgaccaccccccatccttctccctacactcccagctccctccagccatcagcagcctcttgtcaagcttctgcctcgccccagtctatccccaaccccaaatcaagaccacctttcttcacggtcactatttattctttgttcctttttctttttgtaagaaacattcacaaaaaccagtgcaaaaccatcagtgtgggcgtcctgttttatattacaaaacttcctctggatatatcatataaaaggggggtctcacaggagagaaacgtgataaattagctctgcaatctacggcaaggaacatagtttttaaaatagactttcaacatatgacccatgggggaaggaggagggggcttctggggagacggcgggtgctggggcctcggctggtttgggaaatcctgtccgggccccttaagcatggatagagacatagacaagggaggctgtggacaggcctgagcaccaaggccagaaattaacagggaccctggggaggggccctcacccccagcccataaagagctattccctttctctaagaggcagtagcttcagagcaggaaagtggctttcgatacaggcagggtttgtgatgagcggtgtagtcttcttgttccttgccctgttagtggggtccgaggaagtctctgttatgggctgttgtatttcggggtgaaaagaaacaaagaggtatccctgcccacccctcccccacaaccccagccaccaccagaacctgctgtgggttgtatctggaccaagccagctaaaccctgtttctccctgtgctctggagggaggctcaagcctgatttgggctgagctttctttgccttgcctccaaggaatggcctcaggcagtcttgcaaatagctaccagcctgagcgaatgccaacaggagcagaaactgcctgtcttccctttccagcctaagagggtggccagtggctggctggcgagctgaatcagggctgattgagggttccttggcacatttgtagaaagctgctgaggggcagtcttgtgtctgcccttgaacccaccttagccagatttcccttcatgaccagccctttctcttgggtcctccctctgacttctgtgggccccagaagcctgggatgcccctggattagagccataaagctgtgcaatttgcctcagtcctgcccagcatgggttttttgttttttgtttttgtttttgtgtgtcatcctcagaccagccatttgcctcttccaaaaagctggggctaagcatgtgggtggttcaagaggggcagcccccaggccccaggctgggccgcggtaccagtggcaggtccccctgggtctcaggagcttagcttctacggagctcaggtgtcatttatggggttgccagagcaagctgttaaagggcgaatttggtaagactgagctcagagacctggtgggagggcaaggactggcgggcacagcaggaggagattagaggagggtccacctgaatctttgcagcaggcacagagcttctggctgcatctcagaagggggcagacgcacaggccagggaacacggggctctaggctgtggctccgagtgtccctggtgactggaaagcctgaggggaggctggaagctgatacaggatgccggtggcttgtgagacagaatgagctctttcttcctgaagagggacagaggggagagaagagagcagacatcacactgctccttccatccctgcccgtggcagacatcactaatcaaacttacggtgcctggcagacatcactcatcaggattgcactgccatctcccactgagcccagaccaaacctcagatccccagcacagcctccagcagccacccctgatctatcagggtaggagcatcttgcaatccagttgccaacactcgtctagagtttgagaactgaatacttgtgggtgtgcatctgcgagtctccctgcccaagcctggagggaatactaagaaatgtgcggacagtgaagagacaggaaaccttgttgcagcagaaatggcctcgatgccttcgggattctttagcctggagagaagagggctcaggggagtcaatgtgtgacctcaacactccaggaaggagagtgggcaagtgggatgccatggacagagccacagaaaaacagaaacctcttctgtgtattaagctgatgctaaagtcagagcagtccaaaggcaggaggctgccttgggaggtagtaagctctctgtccctggaggtatgcaagagggtggagaagtcttggcaaggatgttgaagaagatatccaagcctcagttctgggtgtggagagggagacccagatgatcttggggatttcttccactcttggagctggggagttggggaaggacagggaagggggtggcatgtgggagaggcgggcagtgtggacaagggaatgtgatgtgcacctctgtgtgttcctggggactgagagagaggtgtggggaggtaggagcgagggcgcggtgggaagtcatggaatggt

SEQ ID NO: 373797 - DNA, 1943 bp, Homo sapiens
agcggagtctttgcccccgcagggccgcggacggaggtggtggcggagttcccgctgcccacaagtctggcccgaccttctggggtgggggcctgggggcaggggccctgggccggagaacccggggccgcctaacggctcggagctcaccgccgggggacaccggcgctgaggcctgggtctcagaaagtgggaagtgggaatgatggctccatttcacagatgaggaaaccgagactcagagcacaaggccacacagcaggaagagagaaatgaaaacttacggtcccacagaaacgcgggtttgtagcagctctattcataatcatcaacaactggaaacaacccacatggccttcagtgaccgaatggataaacaagctgttacacgtaccccagggaatactgctctccaataaaaaggagcggactcttgatacacacagtgacttggaggaatctcaaaggcattctgctcaatgacaggagccagcctcaaaagatttggctgactgaggacgcgacaggtactcagcttctttctgcatctcagtcgcccagcacaggggctggcacgcacccttctgcagaggccgggctggaggagaagatggcggccaagcagcccccgcctctgatgaagaagcacagccagacggacctcgtgagccgcctgaagacccgcaagatcctcggcgtgggcggggaggatgacgacggggaggtgcatcgctccaagatcagccaggtcttaggcaatgaaatcaagtttaccattcgggagcctttggggctcagggtctggcagttcgtctctgctgtgctcttctccggcattgccatcatggcgcttgccttccctgaccagctctatgatgcggtctttgatggagcccaggtgaccagcaagacccccatccgcctctacggcggtgccctcctcaatgctgcgcccacaccccggcctctgatgaagctctctgctggggatgtgctgccatcttgtggccattggtggaatacacccagtgggttggagcttgcagtcgccaccatctgcaaggagcgctcataagtgtgtgcactgcctctgggcgttgtggtacagagatggaggaagcccaggcccagcctctaggaattcacagcctagaggagaggcagatcaattcagtgtctgcaaaacccctcgcaccccccctattttatccccagagccacttctgtttgaaccacttctgtttcctctctaacctgagatgcacacgttaggatttggaattacaatttttaaagctcagcataggtaatatgcctctatttctacgaaatattctatggctccctattgcctacagaataaaggctgagctcctctggagttagggttgctggaataaaataaatgcacacccagtggcatgtctggtaccagcagacactgggtgggtggggcctgctagaggccaagtcagtggtcttctgctaaaaagtatggttcatccccctcccccaggggacttccttaaagcgagtccttaccgggctcaggttttctgtctgggagtccgtgtaaaagaaaacccaatcataggaccaggtaacccattaactcatgaactccatcaacacagcatcctcctgacagaaccggacatgggcaggggccaggggctcagtcctccccctttataaagagatcgagtctcaatgcggggaagtgactcgcccagtgtcacatagggccttggaatgacaggagcaggctgaagcagcagcattgagtctggaggggacaggatcggggacagacagctttgatttgagaaatgtgaataggggcggaggcgtggagtccaggaccccagctgtcttgcagcagtggccagaggaagcaggagcagtcctcctgccctgctgggagggagtcagctgtcccaccc

SEQ ID NO: 373798 - DNA, 1837 bp, Homo sapiens
agcggagcgtgcgggtggcctggatcccgcgcagtggcccggcgatgtcgctcgtgctgctaagcctggccgcgctgtgcaggagcgccgtaccccgagagccgaccgttcaatgtggctctgaaactgggccatctccagagtggatgctacaacatgatctaatccccggagacttgagggacctccgagtagaacctgttacaactagtgttgcaacaggggactattcaattttgatgaatgtaagctgggtactccgggcagatgccagcatccgcttgttgaaggccaccaagatttgtgtgacgggcaaaagcaacttccagtcctacagctgtgtgaggtgcaattacacagaggccttccagactcagaccagaccctctggtggtaaatggacattttcctatatcggcttccctgtagagctgaacacagtctatttcattggggcccataatattcctaatgcaaatatgaatgaagatggcccttccatgtctgtgaatttcacctcaccaggctgcctagaccacataatgaaatataaaaaaaagtgtgtcaaggccggaagcctgtgggatccgaacatcactgcttgtaagaagaatgaggagacagtagaagtgaacttcacaaccactcccctgggaaacagatacatggctcttatccaacacagcactatcatcgggttttctcaggtgtttgagccacaccagaagaaacaaacgcgagcttcagtggtgattccagtgactggggatagtgaaggtgctacggtgcagctgactccatattttcctacttgtggcagcgactgcatccgacataaaggaacagttgtgctctgcccacaaacaggcgtccctttccctctggataacaacaaaagcaagccgggaggctggctgcctctcctcctgctgtctctgctggtggccacatgggtgctggtggcagggatctatctaatgtggaggcacgaaaggatcaagaagacttccttttctaccaccacactactgccccccattaaggttcttgtggtttacccatctgaaatatgtttccatcacacaatttgttacttcactgaatttcttcaaaaccattgcagaagtgaggtcatccttgaaaagtggcagaaaaagaaaatagcagagatgggtccagtgcagtggcttgccactcaaaagaaggcagcagacaaagtcgtcttccttctttccaatgacgtcaacagtgtgtgcgatggtacctgtggcaagagcgagggcagtcccagtgagaactctcaagacctcttcccccttgcctttaaccttttctgcagtgatctaagaagccagattcatctgcacaaatacgtggtggtctactttagagagattgatacaaaagacgattacaatgctctcagtgtctgccccaagtaccacctcatgaaggatgccactgctttctgtgcagaacttctccatgtcaagcagcaggtgtcagcaggaaaaagatcacaagcctgccacgatggctgctgctccttgtagcccacccatgagaagcaagagaccttaaaggcttcctatcccaccaattacagggaaaaaacgtgtgatgatcctgaagcttactatgcagcctacaaacagccttagtaattaaaacattttataccaataaaattttcaaatattgctaactaatgtagcattaactaacgattggaaactacatttacaacttcaaagctgttttatacatagaaatcaattacagttttaattgaaaactataaccattttgataatgcaacaataaagcatcttcagcc

SEQ ID NO: 373799 - DNA, 2044 bp, Homo sapiens
agcggagcgtgcgggtggcctggatcccgcgcagtggcccggcgatgtcgctcgtgctgctaagcctggccgcgctgtgcaggagcgccgtaccccgagagccgaccgttcaatgtggctctgaaactgggccatctccagagtggatgctacaacatgatctaatccccggagacttgagggacctccgagtagaacctgttacaactagtgttgcaacaggggactattcaattttgatgaatgtaagctgggtactccgggcagatgccagcatccgcttgttgaaggccaccaagatttgtgtgacgggcaaaagcaacttccagtcctacagctgtgtgaggtgcaattacacagaggccttccagactcagaccagaccctctggtggtaaatggacattttcctatatcggcttccctgtagagctgaacacagtctatttcattggggcccataatattcctaatgcaaatatgaatgaagatggcccttccatgtctgtgaatttcacctcaccaggctgcctagaccacataatgaaatataaaaaaaagtgtgtcaaggccggaagcctgtgggatccgaacatcactgcttgtaagaagaatgaggagacagtagaagtgaacttcacaaccactcccctgggaaacagatacatggctcttatccaacacagcactatcatcgggttttctcaggtgtttgagccacaccagaagaaacaaacgcgagcttcagtggtgattccagtgactggggatagtgaaggtgctacggtgcagctgactccatattttcctacttgtggcagcgactgcatccgacataaaggaacagttgtgctctgcccacaaacaggcgtccctttccctctggataacaacaaaagcaagccgggaggctggctgcctctcctcctgctgtctctgctggtggccacatgggtgctggtggcagggatctatctaatgtggaggcacgaaaggatcaagaagacttccttttctaccaccacactactgccccccattaaggttcttgtggtttacccatctgaaatatgtttccatcacacaatttgttacttcactgaatttcttcaaaaccattgcagaagtgaggtcatccttgaaaagtggcagaaaaagaaaatagcagagatgggtccagtgcagtggcttgccactcaaaagaaggcagcagacaaagtcgtcttccttctttccaatgacgtcaacagtgtgtgcgatggtacctgtggcaagagcgagggcagtcccagtgagaactctcaagacctcttcccccttgcctttaaccttttctgcagtgatctaagaagccagattcatctgcacaaatacgtggtggtctactttagagagattgatacaaaagacgattacaatgctctcagtgtctgccccaagtaccacctcatgaaggatgccactgctttctgtgcagaacttctccatgtcaagcagcaggtgtcagcaggaaaaagatcacaagcctgccacgatggctgctgctccttgtagcccacccatgagaagcaagagaccttaaaggcttcctatcccaccaattacagggaaaaaacgtgtgatgatcctgaagcttactatgcagcctacaaacagccttagtaattaaaacattttataccaataaaattttcaaatattgctaactaatgtagcattaactaacgattggaaactacatttacaacttcaaagctgttttatacatagaaatcaattacagttttaattgaaaactataaccattttgataatgcaacaataaagcatcttcagccaaacatctagtcttccatagaccatgcattgcagtgtacccagaactgtttagctaatattctatgtttaattaatgaatactaactctaagaacccctcactgattcactcaatagcatcttaagtgaaaaaccttctattacatgcaaaaaatcattgtttttaagataacaaaagtagggaataaacaagctgaacccactttt

SEQ ID NO: 373800 - DNA, 786 bp, Homo sapiens
caaaggtgaataagctttgttttttccagacaaaagcaagccgggaggctggctgcctctcctcctgctgtctctgctggtggccacatgggtgctggtggcagggatctatctaatgtggaggcacgggtaagggttataattctttaaagacatcctagtaaggaaataacattttgaatttttttttaaagaagattcctctggaggcaatcacatgttggcgtttcccagagttagatagcatttatgtaataccttcaagtgctcctacagagactgatacgagcatgactggattacacatgccaggtgaaagcagggtcaggacttccagatcttctgactgtcccgtttttatttttaccattgagccttctaccagtactgaaatgggcaaaagatggctgataacaaattacactttacctgtgatggttactctatgctagttcctgttttttaaaaaatagttcttatgaggtgttaagaaaagctttcgcttggattcatacacagttgacccttgaacaacacaggtttggactgcgcagagccacttacacctggattttttcaatacatatattggaaaattttttggagatttgtatcactttgaaaaaacttagatgaaactcggatgaacttttcaattaaaatattgaaaaaaatgaagaaaaaggtatgtcataaatgcagaaaatgtatacagatactagtctactttatcatttcctaccataccaatagttaactattttaactattaaaagttaaaaattt

SEQ ID NO: 373801 - DNA, 2804 bp, Homo sapiens
agcggagcgtgcgggtggcctggatcccgcgcagtggcccggcgatgtcgctcgtgctgctaagcctggccgcgctgtgcaggagcgccgtaccccgagagccgaccgttcaatgtggctctgaaactgggccatctccagagtggatgctacaacatgatctaatccccggagacttgagggacctccgagtagaacctgttacaactagtgttgcaacaggggactattcaattttgatgaatgtaagctgggtactccgggcagatgccagcatccgcttgttgaaggccaccaagatttgtgtgacgggcaaaagcaacttccagtcctacagctgtgtgaggtgcaattacacagaggccttccagactcagaccagaccctctggtggtaaatggacattttcctatatcggcttccctgtagagctgaacacagtctatttcattggggcccataatattcctaatgcaaatatgaatgaagatggcccttccatgtctgtgaatttcacctcaccaggctgcctagaccacataatgaaatataaaaaaaagtgtgtcaaggccggaagcctgtgggatccgaacatcactgcttgtaagaagaatgaggagacagtagaagtgaacttcacaaccactcccctgggaaacagatacatggctcttatccaacacagcactatcatcgggttttctcaggtgtttgagccacaccagaagaaacaaacgcgagcttcagtggtgattccagtgactggggatagtgaaggtgctacggtgcagctgactccatattttcctacttgtggcagcgactgcatccgacataaaggaacagttgtgctctgcccacaaacaggcgtccctttccctctggataacaacaaaagcaagccgggaggctggctgcctctcctcctgctgtctctgctggtggccacatgggtgctggtggcagggatctatctaatgtggaggcacgaaaggatcaagaagacttccttttctaccaccacactactgccccccattaaggttcttgtggtttacccatctgaaatatgtttccatcacacaatttgttacttcactgaatttcttcaaaaccattgcagaagtgaggtcatccttgaaaagtggcagaaaaagaaaatagcagagatgggtccagtgcagtggcttgccactcaaaagaaggcagcagacaaagtcgtcttccttctttccaatgacgtcaacagtgtgtgcgatggtacctgtggcaagagcgagggcagtcccagtgagaactctcaagacctcttcccccttgcctttaaccttttctgcagtgatctaagaagccagattcatctgcacaaatacgtggtggtctactttagagagattgatacaaaagacgattacaatgctctcagtgtctgccccaagtaccacctcatgaaggatgccactgctttctgtgcagaacttctccatgtcaagcagcaggtgtcagcaggaaaaagatcacaagcctgccacgatggctgctgctccttgtagcccacccatgagaagcaagagaccttaaaggcttcctatcccaccaattacagggaaaaaacgtgtgatgatcctgaagcttactatgcagcctacaaacagccttagtaattaaaacattttataccaataaaattttcaaatattgctaactaatgtagcattaactaacgattggaaactacatttacaacttcaaagctgttttatacatagaaatcaattacagttttaattgaaaactataaccattttgataatgcaacaataaagcatcttcagccaaacatctagtcttccatagaccatgcattgcagtgtacccagaactgtttagctaatattctatgtttaattaatgaatactaactctaagaacccctcactgattcactcaatagcatcttaagtgaaaaaccttctattacatgcaaaaaatcattgtttttaagataacaaaagtagggaataaacaagctgaacccacttttactggaccaaatgatctattatatgtgtaaccacttgtatgatttggtatttgcataagaccttccctctacaaactagattcatatcttgattcttgtacaggtgccttttaacatgaacaacaaaatacccacaaacttgtctacttttgcctaaagttacctattagaggtcactgtcagagttctcagtttcttagttactatttaacttttcatgttcaaaatgaaaataattcttaagttgaaagccctcttgaagtaacctttttataaatgagttattataatggtttacttaaaaaaaaaacaggggtgggtgcagtggctcatgcctccaatcccagcactttggcaaggccaaggcaaaaggatcgctcaagaccaggctacgtcacaaagcgagacctccatctctacaaaagatttaaaaaattagctgagtgtgatggtgtaagcctgtggtcccagctactagggaggctgagatgggaggatcacttgagccctggaggtcaagggtgcagtaaacggtgattgtgccactgcactccatcctgggtgagagcagaccctgtctaaaacaaacaaacgaaaaaacccccacagaatgacagaacataaaagatgcacattttgtcttccaactttttactcttctaaaagcatcttttttaaattttttaaattttttttttttgagacagagtttcactctgtcacccaggctggagtgcagtggcgtgacctcggctcacta

SEQ ID NO: 373802 - DNA, 3724 bp, Homo sapiens
  misc_feature (928)..(928): n is a, c, g, or t
  misc_feature (1277)..(1277): n is a, c, g, or t
  misc_feature (1292)..(1292): n is a, c, g, or t
  misc_feature (1323)..(1323): n is a, c, g, or t
  misc_feature (1330)..(1330): n is a, c, g, or t
  misc_feature (1407)..(1407): n is a, c, g, or t
agcggagcgtgcgggtggcctggatcccgcgcagtggcccggcgatgtcgctcgtgctgctaagcctggccgcgctgtgcaggagcgccgtaccccgagagccgaccgttcaatgtggctctgaaactgggccatctccagagtggatgctacaacatgatctaatccccggagacttgagggacctccgagtagaacctgttacaactagtgttgcaacaggggactattcaattttgatgaatgtaagctgggtactccgggcagatgccagcatccgcttgttgaaggccaccaagatttgtgtgacgggcaaaagcaacttccagtcctacagctgtgtgaggtgcaattacacagaggccttccagactcagaccagaccctctggtggtaaatggacattttcctatatcggcttccctgtagagctgaacacagtctatttcattggggcccataatattcctaatgcaaatatgaatgaagatggcccttccatgtctgtgaatttcacctcaccaggctgcctagaccacataatgaaatataaaaaaaagtgtgtcaaggccggaagcctgtgggatccgaacatcactgcttgtaagaagaatgaggagacagtagaagtgaacttcacaaccactcccctgggaaacagatacatggctcttatccaacacagcactatcatcgggttttctcaggtgtttgagccacaccagaagaaacaaacgcgagcttcagtggtgattccagtgactggggatagtgaaggtgctacggtgcaggtaaagttcagtgagctgctctggggagggaagggacatagaagactgttccatcattcattgcttttaaggatgagttctctcttgtcaaatgcacttctgccagcagacaccagttaagtggcgttcatgggggntctttcgctgcagcctccaccgtgctgaggtcaggaggccgacgtggcagttgtggtcccttttgcttgtattaatggctgctgaccttccaaagcactttttattttcattttctgtcacagacactcagggatagcagtaccattttacttccgcaagcctttaactgcaagatgaagctgcaaagggtttgaaatgggaaggtttgagttccaggcagcgtatgaactctggagaggggctgccagtcctctctgggccgcagcggacccagctggaacacaggaagttggagcagtaggtgctccttcacctctcagtatgtctctttcaactctagtttttgangtggggacacaggangtccagtgggacacagccactccccaaagantaaggancttccatgcttcattccctggcataaaaagtgctcaaacacaccagagggggcaggcaccagccagggtatgatggntactacccttttctggagaaccatagacttcccttactacagggacttgcatgtcctaaagcactggctgaaggaagccaagaggatcactgctgctccttttttctagaggaaatgtttgtctacgtggtaagatatgacctagcccttttaggtaagcgaactggtatgttagtaacgtgtacaaagtttaggttcagaccccgggagtcttgggcatgtgggtctcgggtcactggttttgactttagggctttgttacagatgtgtgaccaaggggaaaatgtgcatgacaacactagagctgactccatattttcctacttgtggcagcgactgcatccgacataaaggaacagttgtgctctgcccacaaacaggcgtccctttccctctggataacaacaaaagcaagccgggaggctggctgcctctcctcctgctgtctctgctggtggccacatgggtgctggtggcagggatctatctaatgtggaggcacgaaaggatcaagaagacttccttttctaccaccacactactgccccccattaaggttcttgtggtttacccatctgaaatatgtttccatcacacaatttgttacttcactgaatttcttcaaaaccattgcagaagtgaggtcatccttgaaaagtggcagaaaaagaaaatagcagagatgggtccagtgcagtggcttgccactcaaaagaaggcagcagacaaagtcgtcttccttctttccaatgacgtcaacagtgtgtgcgatggtacctgtggcaagagcgagggcagtcccagtgagaactctcaagacctcttcccccttgcctttaaccttttctgcagtgatctaagaagccagattcatctgcacaaatacgtggtggtctactttagagagattgatacaaaagacgattacaatgctctcagtgtctgccccaagtaccacctcatgaaggatgccactgctttctgtgcagaacttctccatgtcaagcagcaggtgtcagcaggaaaaagatcacaagcctgccacgatggctgctgctccttgtagcccacccatgagaagcaagagaccttaaaggcttcctatcccaccaattacagggaaaaaacgtgtgatgatcctgaagcttactatgcagcctacaaacagccttagtaattaaaacattttataccaataaaattttcaaatattgctaactaatgtagcattaactaacgattggaaactacatttacaacttcaaagctgttttatacatagaaatcaattacagttttaattgaaaactataaccattttgataatgcaacaataaagcatcttcagccaaacatctagtcttccatagaccatgcattgcagtgtacccagaactgtttagctaatattctatgtttaattaatgaatactaactctaagaacccctcactgattcactcaatagcatcttaagtgaaaaaccttctattacatgcaaaaaatcattgtttttaagataacaaaagtagggaataaacaagctgaacccacttttactggaccaaatgatctattatatgtgtaaccacttgtatgatttggtatttgcataagaccttccctctacaaactagattcatatcttgattcttgtacaggtgccttttaacatgaacaacaaaatacccacaaacttgtctacttttgcctaaagttacctattagaggtcactgtcagagttctcagtttcttagttactatttaacttttcatgttcaaaatgaaaataattcttaagttgaaagccctcttgaagtaacctttttataaatgagttattataatggtttacttaaaaaaaaaacaggggtgggtgcagtggctcatgcctccaatcccagcactttggcaaggccaaggcaaaaggatcgctcaagaccaggctacgtcacaaagcgagacctccatctctacaaaagatttaaaaaattagctgagtgtgatggtgtaagcctgtggtcccagctactagggaggctgagatgggaggatcacttgagccctggaggtcaagggtgcagtaaacggtgattgtgccactgcactccatcctgggtgagagcagaccctgtctaaaacaaacaaacgaaaaaacccccacagaatgacagaacataaaagatgcacattttgtcttccaactttttactcttctaaaagcatcttttttaaattttttaaattttttttttttgagacagagtttcactctgtcacccaggctggagtgcagtggcgtgacctcggctcacta

SEQ ID NO: 373803 - DNA, 3746 bp, Homo sapiens
  misc_feature (928)..(928): n is a, c, g, or t
  misc_feature (1277)..(1277): n is a, c, g, or t
  misc_feature (1292)..(1292): n is a, c, g, or t
  misc_feature (1323)..(1323): n is a, c, g, or t
  misc_feature (1330)..(1330): n is a, c, g, or t
  misc_feature (1407)..(1407): n is a, c, g, or t
  misc_feature (1715)..(1715): n is a, c, g, or t
agcggagcgtgcgggtggcctggatcccgcgcagtggcccggcgatgtcgctcgtgctgctaagcctggccgcgctgtgcaggagcgccgtaccccgagagccgaccgttcaatgtggctctgaaactgggccatctccagagtggatgctacaacatgatctaatccccggagacttgagggacctccgagtagaacctgttacaactagtgttgcaacaggggactattcaattttgatgaatgtaagctgggtactccgggcagatgccagcatccgcttgttgaaggccaccaagatttgtgtgacgggcaaaagcaacttccagtcctacagctgtgtgaggtgcaattacacagaggccttccagactcagaccagaccctctggtggtaaatggacattttcctatatcggcttccctgtagagctgaacacagtctatttcattggggcccataatattcctaatgcaaatatgaatgaagatggcccttccatgtctgtgaatttcacctcaccaggctgcctagaccacataatgaaatataaaaaaaagtgtgtcaaggccggaagcctgtgggatccgaacatcactgcttgtaagaagaatgaggagacagtagaagtgaacttcacaaccactcccctgggaaacagatacatggctcttatccaacacagcactatcatcgggttttctcaggtgtttgagccacaccagaagaaacaaacgcgagcttcagtggtgattccagtgactggggatagtgaaggtgctacggtgcaggtaaagttcagtgagctgctctggggagggaagggacatagaagactgttccatcattcattgcttttaaggatgagttctctcttgtcaaatgcacttctgccagcagacaccagttaagtggcgttcatgggggntctttcgctgcagcctccaccgtgctgaggtcaggaggccgacgtggcagttgtggtcccttttgcttgtattaatggctgctgaccttccaaagcactttttattttcattttctgtcacagacactcagggatagcagtaccattttacttccgcaagcctttaactgcaagatgaagctgcaaagggtttgaaatgggaaggtttgagttccaggcagcgtatgaactctggagaggggctgccagtcctctctgggccgcagcggacccagctggaacacaggaagttggagcagtaggtgctccttcacctctcagtatgtctctttcaactctagtttttgangtggggacacaggangtccagtgggacacagccactccccaaagantaaggancttccatgcttcattccctggcataaaaagtgctcaaacacaccagagggggcaggcaccagccagggtatgatggntactacccttttctggagaaccatagacttcccttactacagggacttgcatgtcctaaagcactggctgaaggaagccaagaggatcactgctgctccttttttctagaggaaatgtttgtctacgtggtaagatatgacctagcccttttaggtaagcgaactggtatgttagtaacgtgtacaaagtttaggttcagaccccgggagtcttgggcatgtgggtctcgggtcactggttttgactttagggctttgttacagatgtgtgaccaaggggaaaatgtgcatgacaacactagaggtangggcgaagccagaaagaagggaagttttggctgaagtaggagtcttgcgactgcatccgacataaaggaacagttgtgctctgcccacaaacaggcgtccctttccctctggataacaacaaaagcaagccgggaggctggctgcctctcctcctgctgtctctgctggtggccacatgggtgctggtggcagggatctatctaatgtggaggcacgaaaggatcaagaagacttccttttctaccaccacactactgccccccattaaggttcttgtggtttacccatctgaaatatgtttccatcacacaatttgttacttcactgaatttcttcaaaaccattgcagaagtgaggtcatccttgaaaagtggcagaaaaagaaaatagcagagatgggtccagtgcagtggcttgccactcaaaagaaggcagcagacaaagtcgtcttccttctttccaatgacgtcaacagtgtgtgcgatggtacctgtggcaagagcgagggcagtcccagtgagaactctcaagacctcttcccccttgcctttaaccttttctgcagtgatctaagaagccagattcatctgcacaaatacgtggtggtctactttagagagattgatacaaaagacgattacaatgctctcagtgtctgccccaagtaccacctcatgaaggatgccactgctttctgtgcagaacttctccatgtcaagcagcaggtgtcagcaggaaaaagatcacaagcctgccacgatggctgctgctccttgtagcccacccatgagaagcaagagaccttaaaggcttcctatcccaccaattacagggaaaaaacgtgtgatgatcctgaagcttactatgcagcctacaaacagccttagtaattaaaacattttataccaataaaattttcaaatattgctaactaatgtagcattaactaacgattggaaactacatttacaacttcaaagctgttttatacatagaaatcaattacagttttaattgaaaactataaccattttgataatgcaacaataaagcatcttcagccaaacatctagtcttccatagaccatgcattgcagtgtacccagaactgtttagctaatattctatgtttaattaatgaatactaactctaagaacccctcactgattcactcaatagcatcttaagtgaaaaaccttctattacatgcaaaaaatcattgtttttaagataacaaaagtagggaataaacaagctgaacccacttttactggaccaaatgatctattatatgtgtaaccacttgtatgatttggtatttgcataagaccttccctctacaaactagattcatatcttgattcttgtacaggtgccttttaacatgaacaacaaaatacccacaaacttgtctacttttgcctaaagttacctattagaggtcactgtcagagttctcagtttcttagttactatttaacttttcatgttcaaaatgaaaataattcttaagttgaaagccctcttgaagtaacctttttataaatgagttattataatggtttacttaaaaaaaaaacaggggtgggtgcagtggctcatgcctccaatcccagcactttggcaaggccaaggcaaaaggatcgctcaagaccaggctacgtcacaaagcgagacctccatctctacaaaagatttaaaaaattagctgagtgtgatggtgtaagcctgtggtcccagctactagggaggctgagatgggaggatcacttgagccctggaggtcaagggtgcagtaaacggtgattgtgccactgcactccatcctgggtgagagcagaccctgtctaaaacaaacaaacgaaaaaacccccacagaatgacagaacataaaagatgcacattttgtcttccaactttttactcttctaaaagcatcttttttaaattttttaaattttttttttttgagacagagtttcactctgtcacccaggctggagtgcagtggcgtgacctcggctcacta

SEQ ID NO: 373804 - DNA, 2358 bp, Homo sapiens
agcggagcgtgcgggtggcctggatcccgcgcagtggcccggcgatgtcgctcgtgctgctaagcctggccgcgctgtgcaggagcgccgtaccccgagagccgaccgttcaatgtggctctgaaactgggccatctccagagtggatgctacaacatgatctaatccccggagacttgagggacctccgagtagaacctgttacaactagtgttgcaacaggggactattcaattttgatgaatgtaagctgggtactccgggcagatgccacaccagaagaaacaaacgcgagcttcagtggtgattccagtgactggggatagtgaaggtgctacggtgcagctgactccatattttcctacttgtggcagcgactgcatccgacataaaggaacagttgtgctctgcccacaaacaggcgtccctttccctctggataacaacaaaagcaagccgggaggctggctgcctctcctcctgctgtctctgctggtggccacatgggtgctggtggcagggatctatctaatgtggaggcacgaaaggatcaagaagacttccttttctaccaccacactactgccccccattaaggttcttgtggtttacccatctgaaatatgtttccatcacacaatttgttacttcactgaatttcttcaaaaccattgcagaagtgaggtcatccttgaaaagtggcagaaaaagaaaatagcagagatgggtccagtgcagtggcttgccactcaaaagaaggcagcagacaaagtcgtcttccttctttccaatgacgtcaacagtgtgtgcgatggtacctgtggcaagagcgagggcagtcccagtgagaactctcaagacctcttcccccttgcctttaaccttttctgcagtgatctaagaagccagattcatctgcacaaatacgtggtggtctactttagagagattgatacaaaagacgattacaatgctctcagtgtctgccccaagtaccacctcatgaaggatgccactgctttctgtgcagaacttctccatgtcaagcagcaggtgtcagcaggaaaaagatcacaagcctgccacgatggctgctgctccttgtagcccacccatgagaagcaagagaccttaaaggcttcctatcccaccaattacagggaaaaaacgtgtgatgatcctgaagcttactatgcagcctacaaacagccttagtaattaaaacattttataccaataaaattttcaaatattgctaactaatgtagcattaactaacgattggaaactacatttacaacttcaaagctgttttatacatagaaatcaattacagttttaattgaaaactataaccattttgataatgcaacaataaagcatcttcagccaaacatctagtcttccatagaccatgcattgcagtgtacccagaactgtttagctaatattctatgtttaattaatgaatactaactctaagaacccctcactgattcactcaatagcatcttaagtgaaaaaccttctattacatgcaaaaaatcattgtttttaagataacaaaagtagggaataaacaagctgaacccacttttactggaccaaatgatctattatatgtgtaaccacttgtatgatttggtatttgcataagaccttccctctacaaactagattcatatcttgattcttgtacaggtgccttttaacatgaacaacaaaatacccacaaacttgtctacttttgcctaaagttacctattagaggtcactgtcagagttctcagtttcttagttactatttaacttttcatgttcaaaatgaaaataattcttaagttgaaagccctcttgaagtaacctttttataaatgagttattataatggtttacttaaaaaaaaaacaggggtgggtgcagtggctcatgcctccaatcccagcactttggcaaggccaaggcaaaaggatcgctcaagaccaggctacgtcacaaagcgagacctccatctctacaaaagatttaaaaaattagctgagtgtgatggtgtaagcctgtggtcccagctactagggaggctgagatgggaggatcacttgagccctggaggtcaagggtgcagtaaacggtgattgtgccactgcactccatcctgggtgagagcagaccctgtctaaaacaaacaaacgaaaaaacccccacagaatgacagaacataaaagatgcacattttgtcttccaactttttactcttctaaaagcatcttttttaaattttttaaattttttttttttgagacagagtttcactctgtcacccaggctggagtgcagtggcgtgacctcggctcacta

SEQ ID NO: 373805 - DNA, 2079 bp, Homo sapiens
ccgaggtcacgcccactgcactccagcctgggcgacagagtgagactatgtcccccaaaaaaaaaaagttaaggtttaagcatcagtgtgtttcaggtgatgtgttcaaaaggaacatcaggatgtttttccttgctgtcactaacaaggcccttggtgctcagctgacattctctagcaagggatcatttgtcagggatggtttacagagtgaaagcctgctgtttgctgttcacagataacaaatgcttttctcctctcacagaaaggatcaagaagacttccttttctaccaccacactactgccccccattaaggttcttgtggtttacccatctgaaatatgtttccatcacacaatttgttacttcactgaatttcttcaaaaccattgcagaagtgaggtcatccttgaaaagtggcagaaaaagaaaatagcagagatgggtccagtgcagtggcttgccactcaaaagaaggcagcagacaaagtcgtcttccttctttccaatgacgtcaacagtgtgtgcgatggtacctgtggcaagagcgagggcagtcccagtgagaactctcaagacctcttcccccttgcctttaaccttttctgcagtgatctaagaagccagattcatctgcacaaatacgtggtggtctactttagagagattgatacaaaagacgattacaatgctctcagtgtctgccccaagtaccacctcatgaaggatgccactgctttctgtgcagaacttctccatgtcaagcagcaggtgtcagcaggaaaaagatcacaagcctgccacgatggctgctgctccttgtagcccacccatgagaagcaagagaccttaaaggcttcctatcccaccaattacagggaaaaaacgtgtgatgatcctgaagcttactatgcagcctacaaacagccttagtaattaaaacattttataccaataaaattttcaaatattgctaactaatgtagcattaactaacgattggaaactacatttacaacttcaaagctgttttatacatagaaatcaattacagttttaattgaaaactataaccattttgataatgcaacaataaagcatcttcagccaaacatctagtcttccatagaccatgcattgcagtgtacccagaactgtttagctaatattctatgtttaattaatgaatactaactctaagaacccctcactgattcactcaatagcatcttaagtgaaaaaccttctattacatgcaaaaaatcattgtttttaagataacaaaagtagggaataaacaagctgaacccacttttactggaccaaatgatctattatatgtgtaaccacttgtatgatttggtatttgcataagaccttccctctacaaactagattcatatcttgattcttgtacaggtgccttttaacatgaacaacaaaatacccacaaacttgtctacttttgcctaaagttacctattagaggtcactgtcagagttctcagtttcttagttactatttaacttttcatgttcaaaatgaaaataattcttaagttgaaagccctcttgaagtaacctttttataaatgagttattataatggtttacttaaaaaaaaaacaggggtgggtgcagtggctcatgcctccaatcccagcactttggcaaggccaaggcaaaaggatcgctcaagaccaggctacgtcacaaagcgagacctccatctctacaaaagatttaaaaaattagctgagtgtgatggtgtaagcctgtggtcccagctactagggaggctgagatgggaggatcacttgagccctggaggtcaagggtgcagtaaacggtgattgtgccactgcactccatcctgggtgagagcagaccctgtctaaaacaaacaaacgaaaaaacccccacagaatgacagaacataaaagatgcacattttgtcttccaactttttactcttctaaaagcatcttttttaaattttttaaattttttttttttgagacagagtttcactctgtcacccaggctggagtgcagtggcgtgacctcggctcacta

SEQ ID NO: 373806 - DNA, 1648 bp, Homo sapiens
agcggagcgtgcgggtggcctggatcccgcgcagtggcccggcgatgtcgctcgtgctgctaagcctggccgcgctgtgcaggagcgccgtaccccgagagccgaccgttcaatgtggctctgaaactgggccatctccagagtggatgctacaacatgatctaatccccggagacttgagggacctccgagtagaacctgttacaactagtgttgcaacaggggactattcaattttgatgaatgtaagctgggtactccgggcagatgccagcatccgcttgttgaaggccaccaagatttgtgtgacgggcaaaagcaacttccagtcctacagctgtgtgaggtgcaattacacagaggccttccagactcagaccagaccctctggtggtaaatggacattttcctatatcggcttccctgtagagctgaacacagtctatttcattggggcccataatattcctaatgcaaatatgaatgaagatggcccttccatgtctgtgaatttcacctcaccaggctgcctagaccacataatgaaatataaaaaaaagtgtgtcaaggccggaagcctgtgggatccgaacatcactgcttgtaagaagaatgaggagacagtagaagtgaacttcacaaccactcccctgggaaacagatacatggctcttatccaacacagcactatcatcgggttttctcaggtgtttgagccacaccagaagaaacaaacgcgagcttcagtggtgattccagtgactggggatagtgaaggtgctacggtgcagctgactccatattttcctacttgtggcagcgactgcatccgacataaaggaacagttgtgctctgcccacaaacaggcgtccctttccctctggataacaacaaaagcaagccgggaggctggctgcctctcctcctgctgtctctgctggtggccacatgggtgctggtggcagggatctatctaatgtggaggcacgggtaagggttataattctttaaagacatcctagtaaggaaataacattttgaatttttttttaaagaagattcctctggaggcaatcacatgttggcgtttcccagagttagatagcatttatgtaataccttcaagtgctcctacagagactgatacgagcatgactggattacacatgccaggtgaaagcagggtcaggacttccagatcttctgactgtcccgtttttatttttaccattgagccttctaccagtactgaaatgggcaaaagatggctgataacaaattacactttacctgtgatggttactctatgctagttcctgttttttaaaaaatagttcttatgaggtgttaagaaaagctttcgcttggattcatacacagttgacccttgaacaacacaggtttggactgcgcagagccacttacacctggattttttcaatacatatattggaaaattttttggagatttgtatcactttgaaaaaacttagatgaaactcggatgaacttttcaattaaaatattgaaaaaaatgaagaaaaaggtatgtcataaatgcagaaaatgtatacagatactagtctactttatcatttcctaccataccaatagttaactattttaactattaaaagttaaaaattt

SEQ ID NO: 373807 - DNA, 2865 bp, Homo sapiens
  misc_feature (928)..(928): n is a, c, g, or t
  misc_feature (1277)..(1277): n is a, c, g, or t
  misc_feature (1292)..(1292): n is a, c, g, or t
  misc_feature (1323)..(1323): n is a, c, g, or t
  misc_feature (1330)..(1330): n is a, c, g, or t
  misc_feature (1407)..(1407): n is a, c, g, or t
  misc_feature (1715)..(1715): n is a, c, g, or t
agcggagcgtgcgggtggcctggatcccgcgcagtggcccggcgatgtcgctcgtgctgctaagcctggccgcgctgtgcaggagcgccgtaccccgagagccgaccgttcaatgtggctctgaaactgggccatctccagagtggatgctacaacatgatctaatccccggagacttgagggacctccgagtagaacctgttacaactagtgttgcaacaggggactattcaattttgatgaatgtaagctgggtactccgggcagatgccagcatccgcttgttgaaggccaccaagatttgtgtgacgggcaaaagcaacttccagtcctacagctgtgtgaggtgcaattacacagaggccttccagactcagaccagaccctctggtggtaaatggacattttcctatatcggcttccctgtagagctgaacacagtctatttcattggggcccataatattcctaatgcaaatatgaatgaagatggcccttccatgtctgtgaatttcacctcaccaggctgcctagaccacataatgaaatataaaaaaaagtgtgtcaaggccggaagcctgtgggatccgaacatcactgcttgtaagaagaatgaggagacagtagaagtgaacttcacaaccactcccctgggaaacagatacatggctcttatccaacacagcactatcatcgggttttctcaggtgtttgagccacaccagaagaaacaaacgcgagcttcagtggtgattccagtgactggggatagtgaaggtgctacggtgcaggtaaagttcagtgagctgctctggggagggaagggacatagaagactgttccatcattcattgcttttaaggatgagttctctcttgtcaaatgcacttctgccagcagacaccagttaagtggcgttcatgggggntctttcgctgcagcctccaccgtgctgaggtcaggaggccgacgtggcagttgtggtcccttttgcttgtattaatggctgctgaccttccaaagcactttttattttcattttctgtcacagacactcagggatagcagtaccattttacttccgcaagcctttaactgcaagatgaagctgcaaagggtttgaaatgggaaggtttgagttccaggcagcgtatgaactctggagaggggctgccagtcctctctgggccgcagcggacccagctggaacacaggaagttggagcagtaggtgctccttcacctctcagtatgtctctttcaactctagtttttgangtggggacacaggangtccagtgggacacagccactccccaaagantaaggancttccatgcttcattccctggcataaaaagtgctcaaacacaccagagggggcaggcaccagccagggtatgatggntactacccttttctggagaaccatagacttcccttactacagggacttgcatgtcctaaagcactggctgaaggaagccaagaggatcactgctgctccttttttctagaggaaatgtttgtctacgtggtaagatatgacctagcccttttaggtaagcgaactggtatgttagtaacgtgtacaaagtttaggttcagaccccgggagtcttgggcatgtgggtctcgggtcactggttttgactttagggctttgttacagatgtgtgaccaaggggaaaatgtgcatgacaacactagaggtangggcgaagccagaaagaagggaagttttggctgaagtaggagtcttggtgagattttgctctgatgcatggtgtgaactttctgagcctcttgtttttcctcagctgactccatattttcctacttgtggcagcgactgcatccgacataaaggaacagttgtgctctgcccacaaacaggcgtccctttccctctggataacaacaaaagcaagccgggaggctggctgcctctcctcctgctgtctctgctggtggccacatgggtgctggtggcagggatctatctaatgtggaggcacgaaaggatcaagaagacttccttttctaccaccacactactgccccccattaaggttcttgtggtttacccatctgaaatatgtttccatcacacaatttgttacttcactgaatttcttcaaaaccattgcagaagtgaggtcatccttgaaaagtggcagaaaaagaaaatagcagagatgggtccagtgcagtggcttgccactcaaaagaaggcagcagacaaagtcgtcttccttctttccaatgacgtcaacagtgtgtgcgatggtacctgtggcaagagcgagggcagtcccagtgagaactctcaagacctcttcccccttgcctttaaccttttctgcagtgatctaagaagccagattcatctgcacaaatacgtggtggtctactttagagagattgatacaaaagacgattacaatgctctcagtgtctgccccaagtaccacctcatgaaggatgccactgctttctgtgcagaacttctccatgtcaagcagcaggtgtcagcaggaaaaagatcacaagcctgccacgatggctgctgctccttgtagcccacccatgagaagcaagagaccttaaaggcttcctatcccaccaattacagggaaaaaacgtgtgatgatcctgaagcttactatgcagcctacaaacagccttagtaattaaaacattttataccaataaaattttcaaatattgctaactaatgtagcattaactaacgattggaaactacatttacaacttcaaagctgttttatacatagaaatcaattacagttttaattgaaaactataaccattttgataatgcaacaataaagcatcttcagcc

SEQ ID NO: 373808 - DNA, 2535 bp, Homo sapiens
agcggagcgtgcgggtggcctggatcccgcgcagtggcccggcgatgtcgctcgtgctgctaagcctggccgcgctgtgcaggagcgccgtaccccgagagccgaccgttcaatgtggctctgaaactgtggacattttcctatatcggcttccctgtagagctgaacacagtctatttcattggggcccataatattcctaatgcaaatatgaatgaagatggcccttccatgtctgtgaatttcacctcaccaggctgcctagaccacataatgaaatataaaaaaaagtgtgtcaaggccggaagcctgtgggatccgaacatcactgcttgtaagaagaatgaggagacagtagaagtgaacttcacaaccactcccctgggaaacagatacatggctcttatccaacacagcactatcatcgggttttctcaggtgtttgagccacaccagaagaaacaaacgcgagcttcagtggtgattccagtgactggggatagtgaaggtgctacggtgcagctgactccatattttcctacttgtggcagcgactgcatccgacataaaggaacagttgtgctctgcccacaaacaggcgtccctttccctctggataacaacaaaagcaagccgggaggctggctgcctctcctcctgctgtctctgctggtggccacatgggtgctggtggcagggatctatctaatgtggaggcacgaaaggatcaagaagacttccttttctaccaccacactactgccccccattaaggttcttgtggtttacccatctgaaatatgtttccatcacacaatttgttacttcactgaatttcttcaaaaccattgcagaagtgaggtcatccttgaaaagtggcagaaaaagaaaatagcagagatgggtccagtgcagtggcttgccactcaaaagaaggcagcagacaaagtcgtcttccttctttccaatgacgtcaacagtgtgtgcgatggtacctgtggcaagagcgagggcagtcccagtgagaactctcaagacctcttcccccttgcctttaaccttttctgcagtgatctaagaagccagattcatctgcacaaatacgtggtggtctactttagagagattgatacaaaagacgattacaatgctctcagtgtctgccccaagtaccacctcatgaaggatgccactgctttctgtgcagaacttctccatgtcaagcagcaggtgtcagcaggaaaaagatcacaagcctgccacgatggctgctgctccttgtagcccacccatgagaagcaagagaccttaaaggcttcctatcccaccaattacagggaaaaaacgtgtgatgatcctgaagcttactatgcagcctacaaacagccttagtaattaaaacattttataccaataaaattttcaaatattgctaactaatgtagcattaactaacgattggaaactacatttacaacttcaaagctgttttatacatagaaatcaattacagttttaattgaaaactataaccattttgataatgcaacaataaagcatcttcagccaaacatctagtcttccatagaccatgcattgcagtgtacccagaactgtttagctaatattctatgtttaattaatgaatactaactctaagaacccctcactgattcactcaatagcatcttaagtgaaaaaccttctattacatgcaaaaaatcattgtttttaagataacaaaagtagggaataaacaagctgaacccacttttactggaccaaatgatctattatatgtgtaaccacttgtatgatttggtatttgcataagaccttccctctacaaactagattcatatcttgattcttgtacaggtgccttttaacatgaacaacaaaatacccacaaacttgtctacttttgcctaaagttacctattagaggtcactgtcagagttctcagtttcttagttactatttaacttttcatgttcaaaatgaaaataattcttaagttgaaagccctcttgaagtaacctttttataaatgagttattataatggtttacttaaaaaaaaaacaggggtgggtgcagtggctcatgcctccaatcccagcactttggcaaggccaaggcaaaaggatcgctcaagaccaggctacgtcacaaagcgagacctccatctctacaaaagatttaaaaaattagctgagtgtgatggtgtaagcctgtggtcccagctactagggaggctgagatgggaggatcacttgagccctggaggtcaagggtgcagtaaacggtgattgtgccactgcactccatcctgggtgagagcagaccctgtctaaaacaaacaaacgaaaaaacccccacagaatgacagaacataaaagatgcacattttgtcttccaactttttactcttctaaaagcatcttttttaaattttttaaattttttttttttgagacagagtttcactctgtcacccaggctggagtgcagtggcgtgacctcggctcacta

SEQ ID NO: 373809 - DNA, 2756 bp, Homo sapiens
agcggagcgtgcgggtggcctggatcccgcgcagtggcccggcgatgtcgctcgtgctgctaagcctggccgcgctgtgcaggagcgccgtaccccgagagccgaccgttcaatgtggctctgaaactgggccatctccagagtggatgctacaacatgatctaatccccggagacttgagggacctccgagtagaacctgttacaactagtgttgcaacaggggactattcaattttgatgaatgtaagctgggtactccgggcagatgccagcatccgcttgttgaaggccaccaagatttgtgtgacgggcaaaagcaacttccagtcctacagctgtgtgaggtgcaattacacagaggccttccagactcagaccagaccctctggtggtaaatggacattttcctatatcggcttccctgtagagctgaacacagtctatttcattggggcccataatattcctaatgcaaatatgaatgaagatggcccttccatgtctgtgaatttcacctcaccaggaagcctgtgggatccgaacatcactgcttgtaagaagaatgaggagacagtagaagtgaacttcacaaccactcccctgggaaacagatacatggctcttatccaacacagcactatcatcgggttttctcaggtgtttgagccacaccagaagaaacaaacgcgagcttcagtggtgattccagtgactggggatagtgaaggtgctacggtgcagctgactccatattttcctacttgtggcagcgactgcatccgacataaaggaacagttgtgctctgcccacaaacaggcgtccctttccctctggataacaacaaaagcaagccgggaggctggctgcctctcctcctgctgtctctgctggtggccacatgggtgctggtggcagggatctatctaatgtggaggcacgaaaggatcaagaagacttccttttctaccaccacactactgccccccattaaggttcttgtggtttacccatctgaaatatgtttccatcacacaatttgttacttcactgaatttcttcaaaaccattgcagaagtgaggtcatccttgaaaagtggcagaaaaagaaaatagcagagatgggtccagtgcagtggcttgccactcaaaagaaggcagcagacaaagtcgtcttccttctttccaatgacgtcaacagtgtgtgcgatggtacctgtggcaagagcgagggcagtcccagtgagaactctcaagacctcttcccccttgcctttaaccttttctgcagtgatctaagaagccagattcatctgcacaaatacgtggtggtctactttagagagattgatacaaaagacgattacaatgctctcagtgtctgccccaagtaccacctcatgaaggatgccactgctttctgtgcagaacttctccatgtcaagcagcaggtgtcagcaggaaaaagatcacaagcctgccacgatggctgctgctccttgtagcccacccatgagaagcaagagaccttaaaggcttcctatcccaccaattacagggaaaaaacgtgtgatgatcctgaagcttactatgcagcctacaaacagccttagtaattaaaacattttataccaataaaattttcaaatattgctaactaatgtagcattaactaacgattggaaactacatttacaacttcaaagctgttttatacatagaaatcaattacagttttaattgaaaactataaccattttgataatgcaacaataaagcatcttcagccaaacatctagtcttccatagaccatgcattgcagtgtacccagaactgtttagctaatattctatgtttaattaatgaatactaactctaagaacccctcactgattcactcaatagcatcttaagtgaaaaaccttctattacatgcaaaaaatcattgtttttaagataacaaaagtagggaataaacaagctgaacccacttttactggaccaaatgatctattatatgtgtaaccacttgtatgatttggtatttgcataagaccttccctctacaaactagattcatatcttgattcttgtacaggtgccttttaacatgaacaacaaaatacccacaaacttgtctacttttgcctaaagttacctattagaggtcactgtcagagttctcagtttcttagttactatttaacttttcatgttcaaaatgaaaataattcttaagttgaaagccctcttgaagtaacctttttataaatgagttattataatggtttacttaaaaaaaaaacaggggtgggtgcagtggctcatgcctccaatcccagcactttggcaaggccaaggcaaaaggatcgctcaagaccaggctacgtcacaaagcgagacctccatctctacaaaagatttaaaaaattagctgagtgtgatggtgtaagcctgtggtcccagctactagggaggctgagatgggaggatcacttgagccctggaggtcaagggtgcagtaaacggtgattgtgccactgcactccatcctgggtgagagcagaccctgtctaaaacaaacaaacgaaaaaacccccacagaatgacagaacataaaagatgcacattttgtcttccaactttttactcttctaaaagcatcttttttaaattttttaaattttttttttttgagacagagtttcactctgtcacccaggctggagtgcagtggcgtgacctcggctcacta

SEQ ID NO: 373810 - DNA, 2749 bp, Homo sapiens
agcggagcgtgcgggtggcctggatcccgcgcagtggcccggcgatgtcgctcgtgctgctaagcctggccgcgctgtgcaggagcgccgtaccccgagagccgaccgttcaatgtggctctgaaactgggccatctccagagtggatgctacaacatgatctaatccccggagacttgagggacctccgagtagaacctgttacaactagtgttgcaacaggggactattcaattttgatgaatgtaagctgggtactccgggcagatgccagcatccgcttgttgaaggccaccaagatttgtgtgacgggcaaaagcaacttccagtcctacagctgtgtgaggtgcaattacacagaggccttccagactcagaccagaccctctggtggtaaatggacattttcctatatcggcttccctgtagagctgaacacagtctatttcattggggcccataatattcctaatgcaaatatgaatgaagatggcccttccatgtctgtgaatttcacctcaccaggctgcctagaccacataatgaaatataaaaaaaagtgtgtcaaggccggaagcctgtgggatccgaacatcactgcttgtaagaagaatgaggagacagtagaagtgaacttcacaaccactcccctgggaaacagatacatggctcttatccaacacagcactatcatcgggttttctcaggtgtttgagccacaccagaagaaacaaacgcgagcttcagtggtgattccagtgactggggatagtgaaggtgctacggtgcagctgactccatattttcctacttgtggcagcgactgcatccgacataaaggaacagttgtgctctgcccacaaacaggcgtccctttccctctggataacaacaaaagcaagccgggaggctggctgcctctcctcctgctgtctctgctggtggccacatgggtgctggtggcagggatctatctaatgtggaggcacgtcttgtggtttacccatctgaaatatgtttccatcacacaatttgttacttcactgaatttcttcaaaaccattgcagaagtgaggtcatccttgaaaagtggcagaaaaagaaaatagcagagatgggtccagtgcagtggcttgccactcaaaagaaggcagcagacaaagtcgtcttccttctttccaatgacgtcaacagtgtgtgcgatggtacctgtggcaagagcgagggcagtcccagtgagaactctcaagacctcttcccccttgcctttaaccttttctgcagtgatctaagaagccagattcatctgcacaaatacgtggtggtctactttagagagattgatacaaaagacgattacaatgctctcagtgtctgccccaagtaccacctcatgaaggatgccactgctttctgtgcagaacttctccatgtcaagcagcaggtgtcagcaggaaaaagatcacaagcctgccacgatggctgctgctccttgtagcccacccatgagaagcaagagaccttaaaggcttcctatcccaccaattacagggaaaaaacgtgtgatgatcctgaagcttactatgcagcctacaaacagccttagtaattaaaacattttataccaataaaattttcaaatattgctaactaatgtagcattaactaacgattggaaactacatttacaacttcaaagctgttttatacatagaaatcaattacagttttaattgaaaactataaccattttgataatgcaacaataaagcatcttcagccaaacatctagtcttccatagaccatgcattgcagtgtacccagaactgtttagctaatattctatgtttaattaatgaatactaactctaagaacccctcactgattcactcaatagcatcttaagtgaaaaaccttctattacatgcaaaaaatcattgtttttaagataacaaaagtagggaataaacaagctgaacccacttttactggaccaaatgatctattatatgtgtaaccacttgtatgatttggtatttgcataagaccttccctctacaaactagattcatatcttgattcttgtacaggtgccttttaacatgaacaacaaaatacccacaaacttgtctacttttgcctaaagttacctattagaggtcactgtcagagttctcagtttcttagttactatttaacttttcatgttcaaaatgaaaataattcttaagttgaaagccctcttgaagtaacctttttataaatgagttattataatggtttacttaaaaaaaaaacaggggtgggtgcagtggctcatgcctccaatcccagcactttggcaaggccaaggcaaaaggatcgctcaagaccaggctacgtcacaaagcgagacctccatctctacaaaagatttaaaaaattagctgagtgtgatggtgtaagcctgtggtcccagctactagggaggctgagatgggaggatcacttgagccctggaggtcaagggtgcagtaaacggtgattgtgccactgcactccatcctgggtgagagcagaccctgtctaaaacaaacaaacgaaaaaacccccacagaatgacagaacataaaagatgcacattttgtcttccaactttttactcttctaaaagcatcttttttaaattttttaaattttttttttttgagacagagtttcactctgtcacccaggctggagtgcagtggcgtgacctcggctcacta

SEQ ID NO: 373811 - DNA, 871 bp, Homo sapiens
cgcttctccttctcccccggcccctagatggcccttccctgacctagaaagagggagacagagtttcataggggaggcaaaatggagactccgtggcttgggggtggggggaatggaggcccaaagggtaggaaggagacctagaaagaggggtgagatggagacccagggagaagtagtggcaaagaaagatggtgagatggggccttgcaaggctataaccaaattcaaatcctggctctgctagttactaatggggtgattgggcaagtcatttaacctctctgtgatcttgggaaaatcacttaacttctttgggccttactctccttatggacaaaaaggggatgacaacaggcctggcacacagggtgtttttcaggattatgaaagttaataaaactgctgaggtcaatattttgcacataataagtgctcaataaaaattagccttcactcctattatagcatacatattgtgtgcaaccagatggactggctggggcagtgattaaaatgacttatctactcttccccccacccgccagggaggcccctgcctcttggttctcaggcacattgagcctggaagggcctcctgcagttggctgtcaatgctgctcctcacttacctctcctccacagagctgaaggtcaggccaggacagtgagacctgactccttgctcctaccagcctactatggcttaagacccagggccagggtcccgttgatgtaacagagcagaggaccagcagatgaatggacaccttgaagcagaggagcagcaggaccaggtaagggaccatctaaaagccaagatcctcatactgtggaaagacaaaatctgaagcttttctttaaaaaaaaa

SEQ ID NO: 373812 - DNA, 2692 bp, Homo sapiens
  misc_feature (2690)..(2692): n is a, c, g, or t
ggggaacaaaggtgagcgaaaggaggaggcagaatccgggcagagggcagggagagggcctgtggggaagggacctcagtcctgctcccacccgctccctggagagcaggcggccagacacccagaggccagaccaggagctgaccgggagctggggccacgggcctaggagcaccctggtcagggctaaggccatggccccgcccccaccgccactggctgccagcaccccgctcctccatggcgagtttggctcctacccagcccgaggcccacgctttgccctcacccttacatcgcaggccctgcacatacagcggctgcgccccaaacctgaagccaggccccggggtggcctggtcccgttggccgaggtctcaggctgctgcaccctgcgaagccgcagcccctcagactcagcggcctacttctgcatctacacctaccctcggggccggcgcggggcccggcgcagagccactcgcaccttccgggcagatggggccgccacctacgaagagaaccgtgccgaggcccagcgctgggccactgccctcacctgtctgctccgaggactgccactgcccggggatggggagatcacccctgacctgctacctcggccgccccggttgcttctattggtcaatccctttgggggtcggggcctggcctggcagtggtgtaagaaccacgtgcttcccatgatctctgaagctgggctgtccttcaacctcatccagacagaacgacagaaccacgcccgggagctggtccaggggctgagcctgagtgagtgggatggcatcgtcacggtctcgggagacgggctgctccatgaggtgctgaacgggctcctagatcgccctgactgggaggaagctgtgaagatgcctgtgggcatcctcccctgcggctcgggcaacgcgctggccggagcagtgaaccagcacgggggatttgagccagccctgggcctcgacctgttgctcaactgctcactgttgctgtgccggggtggtggccacccactggacctgctctccgtgacgctggcctcgggctcccgctgtttctccttcctgtctgtggcctggggcttcgtgtcagatgtggatatccagagcgagcgcttcagggccttgggcagtgcccgcttcacactgggcacggtgctgggcctcgccacactgcacacctaccgcggacgcctctcctacctccccgccactgtggaacctgcctcgcccacccctgcccatagcctgcctcgtgccaagtcggagctgaccctaaccccagacccagccccgcccatggcccactcacccctgcatcgttctgtgtctgacctgcctcttcccctgccccagcctgccctggcctctcctggctcgccagaacccctgcccatcctgtccctcaacggtgggggcccagagctggctggggactggggtggggctggggatgctccgctgtccccggacccactgctgtcttcacctcctggctctcccaaggcagctctacactcacccgtctccgaaggggcccccgtaattcccccatcctctgggctcccacttcccacccctgatgcccgggtaggggcctccacctgcggcccgcccgaccacctgctgcctccgctgggcaccccgctgcccccagactgggtgacgctggagggggactttgtgctcatgttggccatctcgcccagccacctaggcgctgacctggtggcagctccgcatgcgcgcttcgacgacggcctggtgcacctgtgctgggtgcgtagcggcatctcgcgggctgcgctgctgcgccttttcttggccatggagcgtggtagccacttcagcctgggctgtccgcagctgggctacgccgcggcccgtgccttccgcctagagccgctcacaccacgcggcgtgctcacagtggacggggagcaggtggagtatgggccgctacaggcacagatgcaccctggcatcggtacactgctcactgggcctcctggctgcccggggcgggagccctgaaactaaacaagcttggtacccgccgggggcggggcctacattccaatggggcggagcctgagctagggggtgtggcctggctgctagagttgtggtggcaggggccctggccccgtctcaggattgcgctcgctttcatgggaccagacgtgatgctggaaggtgggcgtcgtcacggttaaagagaaatgggctcgtcccgagggtagtgcctgatcaatgagggcggggcctggcgtctgatctggggccgcccttacggggcagggctcagtcctgacgcttgccacctgctcctacccggccaggatggctgagggcggagtctattttacgcgtcgcccaatgacaggacctggaatgtactggctggggtaggcctcagtgagtcggccggtcagggcccgcagcctcgccccatccactccggtgcctccatttagctggccaatcagcccaggaggggcaggttccccggggccggcgctaggatttgcactaatgttcctctccccgcgggtgggggcggggaaattcatatcccctgttcgtctcatgcgcgtcctccgtccccaatctaaaaagcaattgaaaaggtctatgcaataaaggcagtcgcttcattcctctcaaaaaaannn

SEQ ID NO: 373813 - DNA, 3719 bp, Homo sapiens
  misc_feature (3717)..(3719): n is a, c, g, or t
caaaaatctttttaataagagagtaggatccagggttagtttttgtagcctcggctggcccgtcggcctctggcacgctcgaacttccgcccttggagcggacgtagggtttggtgttgctgtgcggggttcctggggccttgccgatatgccggtacacctctcggcccttgcgaggaccggagagcaggacagtgccacagcccttaggggagtccagggccagctggtcgaaagtgaggatcttgccccctgccctgaggatgcggctgcgggcccggctggtcacgcgcagtgcacataccttcagtttgggtacctcctgaacccgcacatcatcagttatggtccccacaaccacgccgtcttgttttcccggccaggaagcttcatcttccggatcatccgggaaagggacagaggcggccggttggtgcgactcataaacaacctcttcaacacaacctggttgaatgtggagttggttcttctggccagaaacctgtataacttgaccaacagcctcaggtagatatcctggctcttgggctccttgcgccgaacctttcggtccttgttatggcggatgtccactcccatgatggcgcctcctgctcggccaggtccggaaagagagaacgggctggggtgggcggggaaagcctcaagcgagtggcgccgccgtgacgtcacatgggtgcgacgcggcgctctaccacgatccggacttctctgtggtgagttggacgactgactagccgggcgataacggcagagagcatagagcgcaggaacaagcgcaacgtccaagagggaagggccagcacgtcgggggcctctctggccctacccaggccgtgttctcgatagctttccggaagaaagggatctgggagcgagatgcgtgtagctagcacgatgcgtcgcgcggtgacgctctggcccgacgccgacggcctctcagtggctcccggaggacccggcgggcccagtgttggagagctgaaggtcaggccaggacagtgagacctgactccttgctcctaccagcctactatggcttaagacccagggccagggtcccgttgatgtaacagagcagaggaccagcagatgaatggacaccttgaagcagaggagcagcaggaccagaggccagaccaggagctgaccgggagctggggccacgggcctaggagcaccctggtcagggctaaggccatggccccgcccccaccgccactggctgccagcaccccgctcctccatggcgagtttggctcctacccagcccgaggcccacgctttgccctcacccttacatcgcaggccctgcacatacagcggctgcgccccaaacctgaagccaggccccggggtggcctggtcccgttggccgaggtctcaggctgctgcaccctgcgaagccgcagcccctcagactcagcggcctacttctgcatctacacctaccctcggggccggcgcggggcccggcgcagagccactcgcaccttccgggcagatggggccgccacctacgaagagaaccgtgccgaggcccagcgctgggccactgccctcacctgtctgctccgaggactgccactgcccggggatggggagatcacccctgacctgctacctcggccgccccggttgcttctattggtcaatccctttgggggtcggggcctggcctggcagtggtgtaagaaccacgtgcttcccatgatctctgaagctgggctgtccttcaacctcatccagacagaacgacagaaccacgcccgggagctggtccaggggctgagcctgagtgagtgggatggcatcgtcacggtctcgggagacgggctgctccatgaggtgctgaacgggctcctagatcgccctgactgggaggaagctgtgaagatgcctgtgggcatcctcccctgcggctcgggcaacgcgctggccggagcagtgaaccagcacgggggatttgagccagccctgggcctcgacctgttgctcaactgctcactgttgctgtgccggggtggtggccacccactggacctgctctccgtgacgctggcctcgggctcccgctgtttctccttcctgtctgtggcctggggcttcgtgtcagatgtggatatccagagcgagcgcttcagggccttgggcagtgcccgcttcacactgggcacggtgctgggcctcgccacactgcacacctaccgcggacgcctctcctacctccccgccactgtggaacctgcctcgcccacccctgcccatagcctgcctcgtgccaagtcggagctgaccctaaccccagacccagccccgcccatggcccactcacccctgcatcgttctgtgtctgacctgcctcttcccctgccccagcctgccctggcctctcctggctcgccagaacccctgcccatcctgtccctcaacggtgggggcccagagctggctggggactggggtggggctggggatgctccgctgtccccggacccactgctgtcttcacctcctggctctcccaaggcagctctacactcacccgtctccgaaggggcccccgtaattcccccatcctctgggctcccacttcccacccctgatgcccgggtaggggcctccacctgcggcccgcccgaccacctgctgcctccgctgggcaccccgctgcccccagactgggtgacgctggagggggactttgtgctcatgttggccatctcgcccagccacctaggcgctgacctggtggcagctccgcatgcgcgcttcgacgacggcctggtgcacctgtgctgggtgcgtagcggcatctcgcgggctgcgctgctgcgccttttcttggccatggagcgtggtagccacttcagcctgggctgtccgcagctgggctacgccgcggcccgtgccttccgcctagagccgctcacaccacgcggcgtgctcacagtggacggggagcaggtggagtatgggccgctacaggcacagatgcaccctggcatcggtacactgctcactgggcctcctggctgcccggggcgggagccctgaaactaaacaagcttggtacccgccgggggcggggcctacattccaatggggcggagcctgagctagggggtgtggcctggctgctagagttgtggtggcaggggccctggccccgtctcaggattgcgctcgctttcatgggaccagacgtgatgctggaaggtgggcgtcgtcacggttaaagagaaatgggctcgtcccgagggtagtgcctgatcaatgagggcggggcctggcgtctgatctggggccgcccttacggggcagggctcagtcctgacgcttgccacctgctcctacccggccaggatggctgagggcggagtctattttacgcgtcgcccaatgacaggacctggaatgtactggctggggtaggcctcagtgagtcggccggtcagggcccgcagcctcgccccatccactccggtgcctccatttagctggccaatcagcccaggaggggcaggttccccggggccggcgctaggatttgcactaatgttcctctccccgcgggtgggggcggggaaattcatatcccctgttcgtctcatgcgcgtcctccgtccccaatctaaaaagcaattgaaaaggtctatgcaataaaggcagtcgcttcattcctctcaaaaaaannn

SEQ ID NO: 373814 - DNA, 3865 bp, Homo sapiens
  misc_feature (3863)..(3865): n is a, c, g, or t
caaaaatctttttaataagagagtaggatccagggttagtttttgtagcctcggctggcccgtcggcctctggcacgctcgaacttccgcccttggagcggacgtagggtttggtgttgctgtgcggggttcctggggccttgccgatatgccggtacacctctcggcccttgcgaggaccggagagcaggacagtgccacagcccttaggggagtccagggccagctggtcgaaagtgaggatcttgccccctgccctgaggatgcggctgcgggcccggctggtcacgcgcagtgcacataccttcagtttgggtacctcctgaacccgcacatcatcagttatggtccccacaaccacgccgtcttgttttcccggccaggaagcttcatcttccggatcatccgggaaagggacagaggcggccggttggtgcgactcataaacaacctcttcaacacaacctggttgaatgtggagttggttcttctggccagaaacctgtataacttgaccaacagcctcaggtagatatcctggctcttgggctccttgcgccgaacctttcggtccttgttatggcggatgtccactcccatgatggcgcctcctgctcggccaggtccggaaagagagaacgggctggggtgggcggggaaagcctcaagcgagtggcgccgccgtgacgtcacatgggtgcgacgcggcgctctaccacgatccggacttctctgtggtgagttggacgactgactagccgggcgataacggcagagagcatagagcgcaggaacaagcgcaacgtccaagagggaagggccagcacgtcgggggcctctctggccctacccaggccgtgttctcgatagctttccggaagaaagggatctgggagcgagatgcgtgtagctagcacgatgcgtcgcgcggtgacgctctggcccgacgccgacggcctctcagtggctcccggaggacccggcgggcccagtgttggaggtgaggaggcggggctggcagggctagtcggggcatctggaaatttccgaccccacgcttcgggcgtttccttatcaggttcaccgctccctgatctcgcgctgcacttcgtaggcgcagccgctgcttgggaagtcctacttaagagctgaaggtcaggccaggacagtgagacctgactccttgctcctaccagcctactatggcttaagacccagggccagggtcccgttgatgtaacagagcagaggaccagcagatgaatggacaccttgaagcagaggagcagcaggaccagaggccagaccaggagctgaccgggagctggggccacgggcctaggagcaccctggtcagggctaaggccatggccccgcccccaccgccactggctgccagcaccccgctcctccatggcgagtttggctcctacccagcccgaggcccacgctttgccctcacccttacatcgcaggccctgcacatacagcggctgcgccccaaacctgaagccaggccccggggtggcctggtcccgttggccgaggtctcaggctgctgcaccctgcgaagccgcagcccctcagactcagcggcctacttctgcatctacacctaccctcggggccggcgcggggcccggcgcagagccactcgcaccttccgggcagatggggccgccacctacgaagagaaccgtgccgaggcccagcgctgggccactgccctcacctgtctgctccgaggactgccactgcccggggatggggagatcacccctgacctgctacctcggccgccccggttgcttctattggtcaatccctttgggggtcggggcctggcctggcagtggtgtaagaaccacgtgcttcccatgatctctgaagctgggctgtccttcaacctcatccagacagaacgacagaaccacgcccgggagctggtccaggggctgagcctgagtgagtgggatggcatcgtcacggtctcgggagacgggctgctccatgaggtgctgaacgggctcctagatcgccctgactgggaggaagctgtgaagatgcctgtgggcatcctcccctgcggctcgggcaacgcgctggccggagcagtgaaccagcacgggggatttgagccagccctgggcctcgacctgttgctcaactgctcactgttgctgtgccggggtggtggccacccactggacctgctctccgtgacgctggcctcgggctcccgctgtttctccttcctgtctgtggcctggggcttcgtgtcagatgtggatatccagagcgagcgcttcagggccttgggcagtgcccgcttcacactgggcacggtgctgggcctcgccacactgcacacctaccgcggacgcctctcctacctccccgccactgtggaacctgcctcgcccacccctgcccatagcctgcctcgtgccaagtcggagctgaccctaaccccagacccagccccgcccatggcccactcacccctgcatcgttctgtgtctgacctgcctcttcccctgccccagcctgccctggcctctcctggctcgccagaacccctgcccatcctgtccctcaacggtgggggcccagagctggctggggactggggtggggctggggatgctccgctgtccccggacccactgctgtcttcacctcctggctctcccaaggcagctctacactcacccgtctccgaaggggcccccgtaattcccccatcctctgggctcccacttcccacccctgatgcccgggtaggggcctccacctgcggcccgcccgaccacctgctgcctccgctgggcaccccgctgcccccagactgggtgacgctggagggggactttgtgctcatgttggccatctcgcccagccacctaggcgctgacctggtggcagctccgcatgcgcgcttcgacgacggcctggtgcacctgtgctgggtgcgtagcggcatctcgcgggctgcgctgctgcgccttttcttggccatggagcgtggtagccacttcagcctgggctgtccgcagctgggctacgccgcggcccgtgccttccgcctagagccgctcacaccacgcggcgtgctcacagtggacggggagcaggtggagtatgggccgctacaggcacagatgcaccctggcatcggtacactgctcactgggcctcctggctgcccggggcgggagccctgaaactaaacaagcttggtacccgccgggggcggggcctacattccaatggggcggagcctgagctagggggtgtggcctggctgctagagttgtggtggcaggggccctggccccgtctcaggattgcgctcgctttcatgggaccagacgtgatgctggaaggtgggcgtcgtcacggttaaagagaaatgggctcgtcccgagggtagtgcctgatcaatgagggcggggcctggcgtctgatctggggccgcccttacggggcagggctcagtcctgacgcttgccacctgctcctacccggccaggatggctgagggcggagtctattttacgcgtcgcccaatgacaggacctggaatgtactggctggggtaggcctcagtgagtcggccggtcagggcccgcagcctcgccccatccactccggtgcctccatttagctggccaatcagcccaggaggggcaggttccccggggccggcgctaggatttgcactaatgttcctctccccgcgggtgggggcggggaaattcatatcccctgttcgtctcatgcgcgtcctccgtccccaatctaaaaagcaattgaaaaggtctatgcaataaaggcagtcgcttcattcctctcaaaaaaannn

SEQ ID NO: 373815 - DNA, 2771 bp, Homo sapiens
  misc_feature (18)..(18): n is a, c, g, or t
  misc_feature (27)..(27): n is a, c, g, or t
  misc_feature (2769)..(2771): n is a, c, g, or t
gcaggctggtactggccngggagttanggcatggcgggcccagtgttggatgagctgaaggtcaggccaggacagtgagacctgactccttgctcctaccagcctactatggcttaagacccagggccagggtcccgttgatgtaacagagcagaggaccagcagatgaatggacaccttgaagcagaggagcagcaggaccagaggccagaccaggagctgaccgggagctggggccacgggcctaggagcaccctggtcagggctaaggccatggccccgcccccaccgccactggctgccagcaccccgctcctccatggcgagtttggctcctacccagcccgaggcccacgctttgccctcacccttacatcgcaggccctgcacatacagcggctgcgccccaaacctgaagccaggccccggggtggcctggtcccgttggccgaggtctcaggctgctgcaccctgcgaagccgcagcccctcagactcagcggcctacttctgcatctacacctaccctcggggccggcgcggggcccggcgcagagccactcgcaccttccgggcagatggggccgccacctacgaagagaaccgtgccgaggcccagcgctgggccactgccctcacctgtctgctccgaggactgccactgcccggggatggggagatcacccctgacctgctacctcggccgccccggttgcttctattggtcaatccctttgggggtcggggcctggcctggcagtggtgtaagaaccacgtgcttcccatgatctctgaagctgggctgtccttcaacctcatccagacagaacgacagaaccacgcccgggagctggtccaggggctgagcctgagtgagtgggatggcatcgtcacggtctcgggagacgggctgctccatgaggtgctgaacgggctcctagatcgccctgactgggaggaagctgtgaagatgcctgtgggcatcctcccctgcggctcgggcaacgcgctggccggagcagtgaaccagcacgggggatttgagccagccctgggcctcgacctgttgctcaactgctcactgttgctgtgccggggtggtggccacccactggacctgctctccgtgacgctggcctcgggctcccgctgtttctccttcctgtctgtggcctggggcttcgtgtcagatgtggatatccagagcgagcgcttcagggccttgggcagtgcccgcttcacactgggcacggtgctgggcctcgccacactgcacacctaccgcggacgcctctcctacctccccgccactgtggaacctgcctcgcccacccctgcccatagcctgcctcgtgccaagtcggagctgaccctaaccccagacccagccccgcccatggcccactcacccctgcatcgttctgtgtctgacctgcctcttcccctgccccagcctgccctggcctctcctggctcgccagaacccctgcccatcctgtccctcaacggtgggggcccagagctggctggggactggggtggggctggggatgctccgctgtccccggacccactgctgtcttcacctcctggctctcccaaggcagctctacactcacccgtctccgaaggggcccccgtaattcccccatcctctgggctcccacttcccacccctgatgcccgggtaggggcctccacctgcggcccgcccgaccacctgctgcctccgctgggcaccccgctgcccccagactgggtgacgctggagggggactttgtgctcatgttggccatctcgcccagccacctaggcgctgacctggtggcagctccgcatgcgcgcttcgacgacggcctggtgcacctgtgctgggtgcgtagcggcatctcgcgggctgcgctgctgcgccttttcttggccatggagcgtggtagccacttcagcctgggctgtccgcagctgggctacgccgcggcccgtgccttccgcctagagccgctcacaccacgcggcgtgctcacagtggacggggagcaggtggagtatgggccgctacaggcacagatgcaccctggcatcggtacactgctcactgggcctcctggctgcccggggcgggagccctgaaactaaacaagcttggtacccgccgggggcggggcctacattccaatggggcggagcctgagctagggggtgtggcctggctgctagagttgtggtggcaggggccctggccccgtctcaggattgcgctcgctttcatgggaccagacgtgatgctggaaggtgggcgtcgtcacggttaaagagaaatgggctcgtcccgagggtagtgcctgatcaatgagggcggggcctggcgtctgatctggggccgcccttacggggcagggctcagtcctgacgcttgccacctgctcctacccggccaggatggctgagggcggagtctattttacgcgtcgcccaatgacaggacctggaatgtactggctggggtaggcctcagtgagtcggccggtcagggcccgcagcctcgccccatccactccggtgcctccatttagctggccaatcagcccaggaggggcaggttccccggggccggcgctaggatttgcactaatgttcctctccccgcgggtgggggcggggaaattcatatcccctgttcgtctcatgcgcgtcctccgtccccaatctaaaaagcaattgaaaaggtctatgcaataaaggcagtcgcttcattcctctcaaaaaaannn

SEQ ID NO: 373816 - DNA, 3589 bp, Homo sapiens
  misc_feature (3587)..(3589): n is a, c, g, or t
caaaaatctttttaataagagagtaggatccagggttagtttttgtagcctcggctggcccgtcggcctctggcacgctcgaacttccgcccttggagcggacgtagggtttggtgttgctgtgcggggttcctggggccttgccgatatgccggtacacctctcggcccttgcgaggaccggagagcaggacagtgccacagcccttaggggagtccagggccagctggtcgaaagtgaggatcttgccccctgccctgaggatgcggctgcgggcccggctggtcacgcgcagtgcacataccttcagtttgggtacctcctgaacccgcacatcatcagttatggtccccacaaccacgccgtcttgttttcccggccaggaagcttcatcttccggatcatccgggaaagggacagaggcggccggttggtgcgactcataaacaacctcttcaacacaacctggttgaatgtggagttggttcttctggccagaaacctgtataacttgaccaacagcctcaggtagatatcctggctcttgggctccttgcgccgaacctttcggtccttgttatggcggatgtccactcccatgatggcgcctcctgctcggccaggtccggaaagagagaacgggctggggtgggcggggaaagcctcaagcgagtggcgccgccgtgacgtcacatgggtgcgacgcggcgctctaccacgatccggacttctctgtggtgagttggacgactgactagccgggcgataacggcagagagcatagagcgcaggaacaagcgcaacgtccaagagggaagggccagcacgtcgggggcctctctggccctacccaggccgtgttctcgatagctttccggaagaaagggatctgggagcgagatgcgtgtagctagcacgatgcgtcgcgcggtgacgctctggcccgacgccgacggcctctcagtggctcccggaggacccggcgggcccagtgttggagagctgaaggtcaggccaggacagtgagacctgactccttgctcctaccagcctactatggcttaagacccagggccagggtcccgttgatgtaacagagcagaggaccagcagatgaatggacaccttgaagcagaggagcagcaggaccagaggccagaccaggagctgaccgggagctggggccacgggcctaggagcaccctggtcagggctaaggccatggccccgcccccaccgccactggctgccagcaccccgctcctccatggcgagtttggctcctacccagcccgaggcccacgctttgccctcacccttacatcgcaggccctgcacatacagcggctgcgccccaaacctgaagccaggccccggggtggcctggtcccgttggccgaggtctcaggctgctgcaccctgcgaagccgcagcccctcagactcagcggcctacttctgcatctacacctaccctcggggccggcgcggggcccggcgcagagccactcgcaccttccgggcagatggggccgccacctacgaagagaaccgtgccgaggcccagcgctgggccactgccctcacctgtctgctccgaggactgccactgcccggggatggggagatcacccctgacctgctacctcggccgccccggttgcttctattggtcaatccctttgggggtcggggcctggcctggcagtggtgtaagaaccacgtgcttcccatgatctctgaagctgggctgtccttcaacctcatccagacagaacgacagaaccacgcccgggagctggtccaggggctgagcctgagtgagtgggatggcatcgtcacggtctcgggagacgggctgctccatgaggtgctgaacgggctcctagatcgccctgactgggaggaagctgtgaagatgcctgtgggcatcctcccctgcggctcgggcaacgcgctggccggagcagtgaaccagcacgggggatttgagccagccctgggcctcgacctgttgctcaactgctcactgttgctgtgccggggtggtggccacccactggacctgctctccgtgacgctggcctcgggctcccgctgtttctccttcctgtctgtggcctggggcttcgtgtcagatgtggatatccagagcgagcgcttcagggccttgggcagtgcccgcttcacactgggcacggtgctgggcctcgccacactgcacacctaccgcggacgcctctcctacctccccgccactgtggaacctgcctcgcccacccctgcccatagcctgcctcgtgccaagtcggagctgaccctaaccccagacccagccccgcccatggcccactcacccctgcatcgttctgtgtctgacctgcctcttcccctgccccagcctgccctggcctctcctggctcgccagaacccctgcccatcctgtccctcaacggtgggggcccagagctggctggggactggggtggggctggggatgctccgctgtccccggacccactgctgtcttcacctcctggctctcccaaggcagctctacactcacccgtctccgaaggggcccccgtaattcccccatcctctgggctcccacttcccacccctgatgcccgggtaggggcctccacctgcggcccgcccgaccacctgctgcctccgctgggcaccccgctgcccccagactgggtgacgctggagggggactttgtgctcatgttggccatctcgcccagccacctaggcgctgacctggtggcagctccgcatgcgcgcttcgacgacggcctggtgcacctgtgctgggtgcgtagcggcatctcgcgggctgcgctgctgcgccttttcttggccatggagcgtggtagccacttcagcctgggctgtccgcagctgggctacgccgcggcccgtgccttccgcctagagccgctcacaccacgcggcgtgctcacagtggacggggagcaggtggagtatgggccgctacaggcacagatgcaccctggcatcggtacactgctcactgggcctcctggctgcccggggcgggattgcgctcgctttcatgggaccagacgtgatgctggaaggtgggcgtcgtcacggttaaagagaaatgggctcgtcccgagggtagtgcctgatcaatgagggcggggcctggcgtctgatctggggccgcccttacggggcagggctcagtcctgacgcttgccacctgctcctacccggccaggatggctgagggcggagtctattttacgcgtcgcccaatgacaggacctggaatgtactggctggggtaggcctcagtgagtcggccggtcagggcccgcagcctcgccccatccactccggtgcctccatttagctggccaatcagcccaggaggggcaggttccccggggccggcgctaggatttgcactaatgttcctctccccgcgggtgggggcggggaaattcatatcccctgttcgtctcatgcgcgtcctccgtccccaatctaaaaagcaattgaaaaggtctatgcaataaaggcagtcgcttcattcctctcaaaaaaannn

SEQ ID NO: 373817 - DNA, 4122 bp, Homo sapiens
  misc_feature (4120)..(4122): n is a, c, g, or t
caaaaatctttttaataagagagtaggatccagggttagtttttgtagcctcggctggcccgtcggcctctggcacgctcgaacttccgcccttggagcggacgtagggtttggtgttgctgtgcggggttcctggggccttgccgatatgccggtacacctctcggcccttgcgaggaccggagagcaggacagtgccacagcccttaggggagtccagggccagctggtcgaaagtgaggatcttgccccctgccctgaggatgcggctgcgggcccggctggtcacgcgcagtgcacataccttcagtttgggtacctcctgaacccgcacatcatcagttatggtccccacaaccacgccgtcttgttttcccggccaggaagcttcatcttccggatcatccgggaaagggacagaggcggccggttggtgcgactcataaacaacctcttcaacacaacctggttgaatgtggagttggttcttctggccagaaacctgtataacttgaccaacagcctcaggtagatatcctggctcttgggctccttgcgccgaacctttcggtccttgttatggcggatgtccactcccatgatggcgcctcctgctcggccaggtccggaaagagagaacgggctggggtgggcggggaaagcctcaagcgagtggcgccgccgtgacgtcacatgggtgcgacgcggcgctctaccacgatccggacttctctgtggtgagttggacgactgactagccgggcgataacggcagagagcatagagcgcaggaacaagcgcaacgtccaagagggaagggccagcacgtcgggggcctctctggccctacccaggccgtgttctcgatagctttccggaagaaagggatctgggagcgagatgcgtgtagctagcacgatgcgtcgcgcggtgacgctctggcccgacgccgacggcctctcagtggctcccggaggacccggcgggcccagtgttggagagctgaaggtcaggccaggacagtgagacctgactccttgctcctaccagcctactatggcttaagacccagggccagggtcccgttgatgtaacagagcagaggaccagcagatgaatggacaccttgaagcagaggagcagcaggaccagaggccagaccaggagctgaccgggagctggggccacgggcctaggagcaccctggtcagggctaaggccatggccccgcccccaccgccactggctgccagcaccccgctcctccatggcgagtttggctcctacccagcccgaggcccacgctttgccctcacccttacatcgcaggccctgcacatacagcggctgcgccccaaacctgaagccaggccccggggtggcctggtcccgttggccgaggtctcaggctgctgcaccctgcgaagccgcagcccctcagactcagcggcctacttctgcatctacacctaccctcggggccggcgcggggcccggcgcagagccactcgcaccttccgggcagatggggccgccacctacgaagagaaccgtgccgaggcccagcgctgggccactgccctcacctgtctgctccgaggactgccactgcccggggatggggagatcacccctgacctgctacctcggccgccccggttgcttctattggtcaatccctttgggggtcggggcctggcctggcagtggtgtaagaaccacgtgcttcccatgatctctgaagctgggctgtccttcaacctcatccagacagaacgacagaaccacgcccgggagctggtccaggggctgagcctgagtgagtgggatggcatcgtcacggtctcgggagacgggctgctccatgaggtgctgaacgggctcctagatcgccctgactgggaggaagctgtgaagatgcctgtgggcatcctcccctgcggctcgggcaacgcgctggccggagcagtgaaccagcacggggggtaggttgaggataccacgaagggagggatgagcccctcctggggtgatagggacccctatatctcccactcagccaaacccacagtcagtcaagtaaatcagcctgcctgtgggatgctcacccccagctcctggacatttttgcctgcctgcttcccagctgtatcccgagcgcccagaactctgcctggcatgggaggcactcagtgaattgtagggagcaaatgaaagatgaccaggaacctggccccgtaaggagtcgcctggaggtggccccacggctgtggtgggcctgggccatggccttcgtggtctcattgccagctgctttcctacctgtctctttccccaacccctgtttgctccttccttctgtgtgtccgtccatctccggctgtgaagatttgagccagccctgggcctcgacctgttgctcaactgctcactgttgctgtgccggggtggtggccacccactggacctgctctccgtgacgctggcctcgggctcccgctgtttctccttcctgtctgtggcctggggcttcgtgtcagatgtggatatccagagcgagcgcttcagggccttgggcagtgcccgcttcacactgggcacggtgctgggcctcgccacactgcacacctaccgcggacgcctctcctacctccccgccactgtggaacctgcctcgcccacccctgcccatagcctgcctcgtgccaagtcggagctgaccctaaccccagacccagccccgcccatggcccactcacccctgcatcgttctgtgtctgacctgcctcttcccctgccccagcctgccctggcctctcctggctcgccagaacccctgcccatcctgtccctcaacggtgggggcccagagctggctggggactggggtggggctggggatgctccgctgtccccggacccactgctgtcttcacctcctggctctcccaaggcagctctacactcacccgtctccgaaggggcccccgtaattcccccatcctctgggctcccacttcccacccctgatgcccgggtaggggcctccacctgcggcccgcccgaccacctgctgcctccgctgggcaccccgctgcccccagactgggtgacgctggagggggactttgtgctcatgttggccatctcgcccagccacctaggcgctgacctggtggcagctccgcatgcgcgcttcgacgacggcctggtgcacctgtgctgggtgcgtagcggcatctcgcgggctgcgctgctgcgccttttcttggccatggagcgtggtagccacttcagcctgggctgtccgcagctgggctacgccgcggcccgtgccttccgcctagagccgctcacaccacgcggcgtgctcacagtggacggggagcaggtggagtatgggccgctacaggcacagatgcaccctggcatcggtacactgctcactgggcctcctggctgcccggggcgggagccctgaaactaaacaagcttggtacccgccgggggcggggcctacattccaatggggcggagcctgagctagggggtgtggcctggctgctagagttgtggtggcaggggccctggccccgtctcaggattgcgctcgctttcatgggaccagacgtgatgctggaaggtgggcgtcgtcacggttaaagagaaatgggctcgtcccgagggtagtgcctgatcaatgagggcggggcctggcgtctgatctggggccgcccttacggggcagggctcagtcctgacgcttgccacctgctcctacccggccaggatggctgagggcggagtctattttacgcgtcgcccaatgacaggacctggaatgtactggctggggtaggcctcagtgagtcggccggtcagggcccgcagcctcgccccatccactccggtgcctccatttagctggccaatcagcccaggaggggcaggttccccggggccggcgctaggatttgcactaatgttcctctccccgcgggtgggggcggggaaattcatatcccctgttcgtctcatgcgcgtcctccgtccccaatctaaaaagcaattgaaaaggtctatgcaataaaggcagtcgcttcattcctctcaaaaaaannn

SEQ ID NO: 373818 - DNA, 3650 bp, Homo sapiens
  misc_feature (3648)..(3650): n is a, c, g, or t
caaaaatctttttaataagagagtaggatccagggttagtttttgtagcctcggctggcccgtcggcctctggcacgctcgaacttccgcccttggagcggacgtagggtttggtgttgctgtgcggggttcctggggccttgccgatatgccggtacacctctcggcccttgcgaggaccggagagcaggacagtgccacagcccttaggggagtccagggccagctggtcgaaagtgaggatcttgccccctgccctgaggatgcggctgcgggcccggctggtcacgcgcagtgcacataccttcagtttgggtacctcctgaacccgcacatcatcagttatggtccccacaaccacgccgtcttgttttcccggccaggaagcttcatcttccggatcatccgggaaagggacagaggcggccggttggtgcgactcataaacaacctcttcaacacaacctggttgaatgtggagttggttcttctggccagaaacctgtataacttgaccaacagcctcaggtagatatcctggctcttgggctccttgcgccgaacctttcggtccttgttatggcggatgtccactcccatgatggcgcctcctgctcggccaggtccggaaagagagaacgggctggggtgggcggggaaagcctcaagcgagtggcgccgccgtgacgtcacatgggtgcgacgcggcgctctaccacgatccggacttctctgtggtgagttggacgactgactagccgggcgataacggcagagagcatagagcgcaggaacaagcgcaacgtccaagagggaagggccagcacgtcgggggcctctctggccctacccaggccgtgttctcgatagctttccggaagaaagggatctgggagcgagatgcgtgtagctagcacgatgcgtcgcgcggtgacgctctggcccgacgccgacggcctctcagtggctcccggaggacccggcgggcccagtgttggagagctgaaggtcaggccaggacagtgagacctgactccttgctcctaccagcctactatggcttaagacccagggccagggtcccgttgatgtaacagagcagaggaccagcagatgaatggacaccttgaagcagaggagcagcaggaccagagatcacccctgacctgctacctcggccgccccggttgcttctattggtcaatccctttgggggtcggggcctggcctggcagtggtgtaagaaccacgtgcttcccatgatctctgaagctgggctgtccttcaacctcatccagacagaacgacagaaccacgcccgggagctggtccaggggctgagcctgagtgagtgggatggcatcgtcacggtctcgggagacgggctgctccatgaggtgctgaacgggctcctagatcgccctgactgggaggaagctgtgaagatgcctgtgggcatcctcccctgcggctcgggcaacgcgctggccggagcagtgaaccagcacggggggtaggttgaggataccacgaagggagggatgagcccctcctggggtgatagggacccctatatctcccactcagccaaacccacagtcagtcaagtaaatcagcctgcctgtgggatgctcacccccagctcctggacatttttgcctgcctgcttcccagctgtatcccgagcgcccagaactctgcctggcatgggaggcactcagtgaattgtagggagcaaatgaaagatgaccaggaacctggccccgtaaggagtcgcctggaggtggccccacggctgtggtgggcctgggccatggccttcgtggtctcattgccagctgctttcctacctgtctctttccccaacccctgtttgctccttccttctgtgtgtccgtccatctccggctgtgaagatttgagccagccctgggcctcgacctgttgctcaactgctcactgttgctgtgccggggtggtggccacccactggacctgctctccgtgacgctggcctcgggctcccgctgtttctccttcctgtctgtggcctggggcttcgtgtcagatgtggatatccagagcgagcgcttcagggccttgggcagtgcccgcttcacactgggcacggtgctgggcctcgccacactgcacacctaccgcggacgcctctcctacctccccgccactgtggaacctgcctcgcccacccctgcccatagcctgcctcgtgccaagtcggagctgaccctaaccccagacccagccccgcccatggcccactcacccctgcatcgttctgtgtctgacctgcctcttcccctgccccagcctgccctggcctctcctggctcgccagaacccctgcccatcctgtccctcaacggtgggggcccagagctggctggggactggggtggggctggggatgctccgctgtccccggacccactgctgtcttcacctcctggctctcccaaggcagctctacactcacccgtctccgaaggggcccccgtaattcccccatcctctgggctcccacttcccacccctgatgcccgggtaggggcctccacctgcggcccgcccgaccacctgctgcctccgctgggcaccccgctgcccccagactgggtgacgctggagggggactttgtgctcatgttggccatctcgcccagccacctaggcgctgacctggtggcagctccgcatgcgcgcttcgacgacggcctggtgcacctgtgctgggtgcgtagcggcatctcgcgggctgcgctgctgcgccttttcttggccatggagcgtggtagccacttcagcctgggctgtccgcagctgggctacgccgcggcccgtgccttccgcctagagccgctcacaccacgcggcgtgctcacagtggacggggagcaggtggagtatgggccgctacaggcacagatgcaccctggcatcggtacactgctcactgggcctcctggctgcccggggcgggagccctgaaactaaacaagcttggtacccgccgggggcggggcctacattccaatggggcggagcctgagctagggggtgtggcctggctgctagagttgtggtggcaggggccctggccccgtctcaggattgcgctcgctttcatgggaccagacgtgatgctggaaggtgggcgtcgtcacggttaaagagaaatgggctcgtcccgagggtagtgcctgatcaatgagggcggggcctggcgtctgatctggggccgcccttacggggcagggctcagtcctgacgcttgccacctgctcctacccggccaggatggctgagggcggagtctattttacgcgtcgcccaatgacaggacctggaatgtactggctggggtaggcctcagtgagtcggccggtcagggcccgcagcctcgccccatccactccggtgcctccatttagctggccaatcagcccaggaggggcaggttccccggggccggcgctaggatttgcactaatgttcctctccccgcgggtgggggcggggaaattcatatcccctgttcgtctcatgcgcgtcctccgtccccaatctaaaaagcaattgaaaaggtctatgcaataaaggcagtcgcttcattcctctcaaaaaaannn

SEQ ID NO: 373819 - DNA, 2774 bp, Homo sapiens
  misc_feature (2772)..(2774): n is a, c, g, or t
gggactgagggaccaagaggaacagagactcaggcccgggactggggcaccggggtgggagatggaaatggaaaacctgggccaggactgaacccagccaggcctgggactgggttctggaaataagagtgcggatggcggtttgggggcccagggccagacacgcaggcctatggattggggaccaatggatggagacccaggtccaggtctcggggacccagggacagagacccaggcccaagactggaggacatctagggctctgtgcttgaacctgatttgaggttcccataatggggccagggcaggtttgggggtgaagcagacgtcctggacccgagagagccgctggggataggggggcagatgtagttcctaagggccctgcacatacagcggctgcgccccaaacctgaagccaggccccggggtggcctggtcccgttggccgaggtctcaggctgctgcaccctgcgaagccgcagcccctcagactcagcggcctacttctgcatctacacctaccctcggggccggcgcggggcccggcgcagagccactcgcaccttccgggcagatggggccgccacctacgaagagaaccgtgccgaggcccagcgctgggccactgccctcacctgtctgctccgaggactgccactgcccggggatggggagatcacccctgacctgctacctcggccgccccggttgcttctattggtcaatccctttgggggtcggggcctggcctggcagtggtgtaagaaccacgtgcttcccatgatctctgaagctgggctgtccttcaacctcatccagacagaacgacagaaccacgcccgggagctggtccaggggctgagcctgagtgagtgggatggcatcgtcacggtctcgggagacgggctgctccatgaggtgctgaacgggctcctagatcgccctgactgggaggaagctgtgaagatgcctgtgggcatcctcccctgcggctcgggcaacgcgctggccggagcagtgaaccagcacgggggatttgagccagccctgggcctcgacctgttgctcaactgctcactgttgctgtgccggggtggtggccacccactggacctgctctccgtgacgctggcctcgggctcccgctgtttctccttcctgtctgtggcctggggcttcgtgtcagatgtggatatccagagcgagcgcttcagggccttgggcagtgcccgcttcacactgggcacggtgctgggcctcgccacactgcacacctaccgcggacgcctctcctacctccccgccactgtggaacctgcctcgcccacccctgcccatagcctgcctcgtgccaagtcggagctgaccctaaccccagacccagccccgcccatggcccactcacccctgcatcgttctgtgtctgacctgcctcttcccctgccccagcctgccctggcctctcctggctcgccagaacccctgcccatcctgtccctcaacggtgggggcccagagctggctggggactggggtggggctggggatgctccgctgtccccggacccactgctgtcttcacctcctggctctcccaaggcagctctacactcacccgtctccgaaggggcccccgtaattcccccatcctctgggctcccacttcccacccctgatgcccgggtaggggcctccacctgcggcccgcccgaccacctgctgcctccgctgggcaccccgctgcccccagactgggtgacgctggagggggactttgtgctcatgttggccatctcgcccagccacctaggcgctgacctggtggcagctccgcatgcgcgcttcgacgacggcctggtgcacctgtgctgggtgcgtagcggcatctcgcgggctgcgctgctgcgccttttcttggccatggagcgtggtagccacttcagcctgggctgtccgcagctgggctacgccgcggcccgtgccttccgcctagagccgctcacaccacgcggcgtgctcacagtggacggggagcaggtggagtatgggccgctacaggcacagatgcaccctggcatcggtacactgctcactgggcctcctggctgcccggggcgggagccctgaaactaaacaagcttggtacccgccgggggcggggcctacattccaatggggcggagcctgagctagggggtgtggcctggctgctagagttgtggtggcaggggccctggccccgtctcaggattgcgctcgctttcatgggaccagacgtgatgctggaaggtgggcgtcgtcacggttaaagagaaatgggctcgtcccgagggtagtgcctgatcaatgagggcggggcctggcgtctgatctggggccgcccttacggggcagggctcagtcctgacgcttgccacctgctcctacccggccaggatggctgagggcggagtctattttacgcgtcgcccaatgacaggacctggaatgtactggctggggtaggcctcagtgagtcggccggtcagggcccgcagcctcgccccatccactccggtgcctccatttagctggccaatcagcccaggaggggcaggttccccggggccggcgctaggatttgcactaatgttcctctccccgcgggtgggggcggggaaattcatatcccctgttcgtctcatgcgcgtcctccgtccccaatctaaaaagcaattgaaaaggtctatgcaataaaggcagtcgcttcattcctctcaaaaaaannn

SEQ ID NO: 373820 - DNA, 1585 bp, Homo sapiens
  misc_feature (1583)..(1585): n is a, c, g, or t
caaaaatctttttaataagagagtaggatccagggttagtttttgtagcctcggctggcccgtcggcctctggcacgctcgaacttccgcccttggagcggacgtagggtttggtgttgctgtgcggggttcctggggccttgccgatatgccggtacacctctcggcccttgcgaggaccggagagcaggacagtgccacagcccttaggggagtccagggccagctggtcgaaagtgaggatcttgccccctgccctgaggatgcggctgcgggcccggctggtcacgcgcagtgcacataccttcagtttgggtacctcctgaacccgcacatcatcagttatggtccccacaaccacgccgtcttgttttcccggccaggaagcttcatcttccggatcatccgggaaagggacagaggcggccggttggtgcgactcataaacaacctcttcaacacaacctggttgaatgtggagttggttcttctggccagaaacctgtataacttgaccaacagcctcaggtagatatcctggctcttgggctccttgcgccgaacctttcggtccttgttatggcggatgtccactcccatgatggcgcctcctgctcggccaggtccggaaagagagaacgggctggggtgggcggggaaagcctcaagcgagtggcgccgccgtgacgtcacatgggtgcgacgcggcgctctaccacgatccggacttctctgtggtgagttggacgactgactagccgggcgataacggcagagagcatagagcgcaggaacaagcgcaacgtccaagagggaagggccagcacgtcgggggcctctctggccctacccaggccgtgttctcgatagctttccggaagaaagggatctgggagcgagatgcgtgtagctagcacgatgcgtcgcgcggtgacgctctggcccgacgccgacggcctctcagtggctcccggaggacccggcgggcccagtgttggagagctgaaggtcaggccaggacagtgagacctgactccttgctcctaccagcctactatggcttaagacccagggccagggtcccgttgatgtaacagagcagaggaccagcagatgaatggacaccttgaagcagaggagcagcaggaccagaggccagaccaggagctgaccgggagctggggccacgggcctaggagcaccctgggcagggctcagtcctgacgcttgccacctgctcctacccggccaggatggctgagggcggagtctattttacgcgtcgcccaatgacaggacctggaatgtactggctggggtaggcctcagtgagtcggccggtcagggcccgcagcctcgccccatccactccggtgcctccatttagctggccaatcagcccaggaggggcaggttccccggggccggcgctaggatttgcactaatgttcctctccccgcgggtgggggcggggaaattcatatcccctgttcgtctcatgcgcgtcctccgtccccaatctaaaaagcaattgaaaaggtctatgcaataaaggcagtcgcttcattcctctcaaaaaaannn

SEQ ID NO: 373821 - DNA, 509 bp, Homo sapiens
gcgctctgggcctggggaatgtgaggggcaggactggcaggtggctgggcggggcagtggggaacaaaggtgagcgaaaggaggaggcagaatccgggcagagggcagggagagggcctgtggggaagggacctcagtcctgctcccacccgctccctggagagcaggcggccagacacccaggtcagtgctcagggaccagctcttggcccctgccccttgcaggcgctcgcatgtggctcctctcggaccccgtagtccctgtcatatcccttctctccagctgtctccatgcctgcctcgtacccctcctatttgctctcccttccactctgtcttgcctttctcgttggggtgaaaaagtcttactctcttaagtatctttcatcgcctgagtttcacctcattgaccctgtttgtctcctctcagtgtttctctggctctcagaccctatctctattgcgtttgtgattgttttgctgttttacccactgcaccgtatgggggg

SEQ ID NO: 373822 - DNA, 1162 bp, Homo sapiens
gtgctgacttgcgggaccgcctggaggaggacccggcgtaggccagaccaggagctgaccgggagctggggccacgggcctaggagcaccctggtcagggctaaggccatggccccgcccccaccgccactggctgccagcaccccgctcctccatggcgagtttggctcctacccagcccgaggcccacgctttgccctcacccttacatcgcaggccctgcacatacagcggctgcgccccaaacctgaagccaggccccggggtggcctggtcccgttggccgaggtctcaggctgctgcaccctgcgaagccgcagcccctcagactcagcggcctacttctgcatctacacctaccctcggggccggcgcggggcccggcgcagagccactcgcaccttccgggcagatggggccgccacctacgaagagaaccgtgccgaggcccagcgctgggccactgccctcacctgtctgctccgaggactgccactgcccggggatggggagatcacccctgacctgctacctcggccgccccggttgcttctattggtcaatccctttgggggtcggggcctggcctggcagtggtgtaagaaccacgtgcttcccatgatctctgaagctgggctgtccttcaacctcatccagacagaacgacagaaccacgcccgggagctggtccaggggctgagcctgagtgagtgggatggcatcgtcacggtctcgggagacgggctgctccatgaggtgctgaacgggctcctagatcgccctgactgggaggaagctgtgaagatgcctgtgggcatcctcccctgcggctcgggcaacgcgctggccggagcagtgaaccagcacgggggcccgcgggaggactcagactccagcacttccagcagcgcctgccctctatggacgacagcccggagctgcccacgggctgcagccagtatgccagggagctgccctcttcttccacaacagctggctctggggttctcaagatttattcaggatcgtgttaacggaggcggtgggaggatagggtccctgacgtgccggggacacacacagagaaccctccccgcccccgcaagggaggggggaggctcgctttttcttaaaaatataaatgtatttatctgcattatca

SEQ ID NO: 373823 - DNA, 3364 bp, Homo sapiens
  misc_feature (3362)..(3364): n is a, c, g, or t
cgcttctccttctcccccggcccctagatggcccttccctgacctagaaagagggagacagagtttcataggggaggcaaaatggagactccgtggcttgggggtggggggaatggaggcccaaagggtaggaaggagacctagaaagaggggtgagatggagacccagggagaagtagtggcaaagaaagatggtgagatggggccttgcaaggctataaccaaattcaaatcctggctctgctagttactaatggggtgattgggcaagtcatttaacctctctgtgatcttgggaaaatcacttaacttctttgggccttactctccttatggacaaaaaggggatgacaacaggcctggcacacagggtgtttttcaggattatgaaagttaataaaactgctgaggtcaatattttgcacataataagtgctcaataaaaattagccttcactcctattatagcatacatattgtgtgcaaccagatggactggctggggcagtgattaaaatgacttatctactcttccccccacccgccagggaggcccctgcctcttggttctcaggcacattgagcctggaagggcctcctgcagttggctgtcaatgctgctcctcacttacctctcctccacagagctgaaggtcaggccaggacagtgagacctgactccttgctcctaccagcctactatggcttaagacccagggccagggtcccgttgatgtaacagagcagaggaccagcagatgaatggacaccttgaagcagaggagcagcaggaccagaggccagaccaggagctgaccgggagctggggccacgggcctaggagcaccctggtcagggctaaggccatggccccgcccccaccgccactggctgccagcaccccgctcctccatggcgagtttggctcctacccagcccgaggcccacgctttgccctcacccttacatcgcaggccctgcacatacagcggctgcgccccaaacctgaagccaggccccggggtggcctggtcccgttggccgaggtctcaggctgctgcaccctgcgaagccgcagcccctcagactcagcggcctacttctgcatctacacctaccctcggggccggcgcggggcccggcgcagagccactcgcaccttccgggcagatggggccgccacctacgaagagaaccgtgccgaggcccagcgctgggccactgccctcacctgtctgctccgaggactgccactgcccggggatggggagatcacccctgacctgctacctcggccgccccggttgcttctattggtcaatccctttgggggtcggggcctggcctggcagtggtgtaagaaccacgtgcttcccatgatctctgaagctgggctgtccttcaacctcatccagacagaacgacagaaccacgcccgggagctggtccaggggctgagcctgagtgagtgggatggcatcgtcacggtctcgggagacgggctgctccatgaggtgctgaacgggctcctagatcgccctgactgggaggaagctgtgaagatgcctgtgggcatcctcccctgcggctcgggcaacgcgctggccggagcagtgaaccagcacgggggatttgagccagccctgggcctcgacctgttgctcaactgctcactgttgctgtgccggggtggtggccacccactggacctgctctccgtgacgctggcctcgggctcccgctgtttctccttcctgtctgtggcctggggcttcgtgtcagatgtggatatccagagcgagcgcttcagggccttgggcagtgcccgcttcacactgggcacggtgctgggcctcgccacactgcacacctaccgcggacgcctctcctacctccccgccactgtggaacctgcctcgcccacccctgcccatagcctgcctcgtgccaagtcggagctgaccctaaccccagacccagccccgcccatggcccactcacccctgcatcgttctgtgtctgacctgcctcttcccctgccccagcctgccctggcctctcctggctcgccagaacccctgcccatcctgtccctcaacggtgggggcccagagctggctggggactggggtggggctggggatgctccgctgtccccggacccactgctgtcttcacctcctggctctcccaaggcagctctacactcacccgtctccgaaggggcccccgtaattcccccatcctctgggctcccacttcccacccctgatgcccgggtaggggcctccacctgcggcccgcccgaccacctgctgcctccgctgggcaccccgctgcccccagactgggtgacgctggagggggactttgtgctcatgttggccatctcgcccagccacctaggcgctgacctggtggcagctccgcatgcgcgcttcgacgacggcctggtgcacctgtgctgggtgcgtagcggcatctcgcgggctgcgctgctgcgccttttcttggccatggagcgtggtagccacttcagcctgggctgtccgcagctgggctacgccgcggcccgtgccttccgcctagagccgctcacaccacgcggcgtgctcacagtggacggggagcaggtggagtatgggccgctacaggcacagatgcaccctggcatcggtacactgctcactgggcctcctggctgcccggggcgggagccctgaaactaaacaagcttggtacccgccgggggcggggcctacattccaatggggcggagcctgagctagggggtgtggcctggctgctagagttgtggtggcaggggccctggccccgtctcaggattgcgctcgctttcatgggaccagacgtgatgctggaaggtgggcgtcgtcacggttaaagagaaatgggctcgtcccgagggtagtgcctgatcaatgagggcggggcctggcgtctgatctggggccgcccttacggggcagggctcagtcctgacgcttgccacctgctcctacccggccaggatggctgagggcggagtctattttacgcgtcgcccaatgacaggacctggaatgtactggctggggtaggcctcagtgagtcggccggtcagggcccgcagcctcgccccatccactccggtgcctccatttagctggccaatcagcccaggaggggcaggttccccggggccggcgctaggatttgcactaatgttcctctccccgcgggtgggggcggggaaattcatatcccctgttcgtctcatgcgcgtcctccgtccccaatctaaaaagcaattgaaaaggtctatgcaataaaggcagtcgcttcattcctctcaaaaaaannn

SEQ ID NO: 373824 - DNA, 2275 bp, Homo sapiens
caaaaatctttttaataagagagtaggatccagggttagtttttgtagcctcggctggcccgtcggcctctggcacgctcgaacttccgcccttggagcggacgtagggtttggtgttgctgtgcggggttcctggggccttgccgatatgccggtacacctctcggcccttgcgaggaccggagagcaggacagtgccacagcccttaggggagtccagggccagctggtcgaaagtgaggatcttgccccctgccctgaggatgcggctgcgggcccggctggtcacgcgcagtgcacataccttcagtttgggtacctcctgaacccgcacatcatcagttatggtccccacaaccacgccgtcttgttttcccggccaggaagcttcatcttccggatcatccgggaaagggacagaggcggccggttggtgcgactcataaacaacctcttcaacacaacctggttgaatgtggagttggttcttctggccagaaacctgtataacttgaccaacagcctcaggtagatatcctggctcttgggctccttgcgccgaacctttcggtccttgttatggcggatgtccactcccatgatggcgcctcctgctcggccaggtccggaaagagagaacgggctggggtgggcggggaaagcctcaagcgagtggcgccgccgtgacgtcacatgggtgcgacgcggcgctctaccacgatccggacttctctgtggtgagttggacgactgactagccgggcgataacggcagagagcatagagcgcaggaacaagcgcaacgtccaagagggaagggccagcacgtcgggggcctctctggccctacccaggccgtgttctcgatagctttccggaagaaagggatctgggagcgagatgcgtgtagctagcacgatgcgtcgcgcggtgacgctctggcccgacgccgacggcctctcagtggctcccggaggacccggcgggcccagtgttggagagctgaaggtcaggccaggacagtgagacctgactccttgctcctaccagcctactatggcttaagacccagggccagggtcccgttgatgtaacagagcagaggaccagcagatgaatggacaccttgaagcagaggagcagcaggaccagaggccagaccaggagctgaccgggagctggggccacgggcctaggagcaccctggtcagggctaaggccatggccccgcccccaccgccactggctgccagcaccccgctcctccatggcgagtttggctcctacccagcccgaggcccacgctttgccctcacccttacatcgcaggccctgcacatacagcggctgcgccccaaacctgaagccaggccccggggtggcctggtcccgttggccgaggtctcaggctgctgcaccctgcgaagccgcagcccctcagactcagcggcctacttctgcatctacacctaccctcggggccggcgcggggcccggcgcagagccactcgcaccttccgggcagatggggccgccacctacgaagagaaccgtgccgaggcccagcgctgggccactgccctcacctgtctgctccgaggactgccactgcccggggatggggagatcacccctgacctgctacctcggccgccccggttgcttctattggtcaatccctttgggggtcggggcctggcctggcagtggtgtaagaaccacgtgcttcccatgatctctgaagctgggctgtccttcaacctcatccagacagaacgacagaaccacgcccgggagctggtccaggggctgagcctgagtgagtgggatggcatcgtcacggtctcgggagacgggctgctccatgaggtgctgaacgggctcctagatcgccctgactgggaggaagctgtgaagatgcctgtgggcatcctcccctgcggctcgggcaacgcgctggccggagcagtgaaccagcacgggggcccgcgggaggactcagactccagcacttccagcagcgcctgccctctatggacgacagcccggagctgcccacgggctgcagccagtatgccagggagctgccctcttcttccacaacagctggctctggggttctcaagatttattcaggatcgtgttaacggaggcggtgggaggatagggtccctgacgtgccggggacacacacagagaaccctccccgcccccgcaagggaggggggaggctcgctttttcttaaaaatataaatgtatttatctgcattatca

SEQ ID NO: 373825 - DNA, 2609 bp, Homo sapiens
  misc_feature (2607)..(2609): n is a, c, g, or t
tacatctgctgttctcttgctagatttatgtttctgtctcctatcctcttcccctttgcatgggtcttgaccacaggtgagtcacccagggtggtgagagcagcagcctgagacaggaccaggtaccacccagagtgatgggtgccaacagaggtctagggcttccctggagttcagaggtggcatctaatcctgcctggggcccctaagggctggaagtaacctaatcctgggtaataggtgtttggggtgaggaaagtgggaaccacagctctgaactacagctcctcccacacatggggacaaagggcatttggtttcacacctaagccctgcctttgtctcagcagctaggagttggggcagggctgcatacctaggcctggccacatgagagccagcaggtcccaggggccagccctccaccaattccgttgggggctgatgaagggactgtttccaaggtggggggcctgggtcactggcctctgcagaccctaacctctctccacagagatcacccctgacctgctacctcggccgccccggttgcttctattggtcaatccctttgggggtcggggcctggcctggcagtggtgtaagaaccacgtgcttcccatgatctctgaagctgggctgtccttcaacctcatccagacagaacgacagaaccacgcccgggagctggtccaggggctgagcctgagtgagtgggatggcatcgtcacggtctcgggagacgggctgctccatgaggtgctgaacgggctcctagatcgccctgactgggaggaagctgtgaagatgcctgtgggcatcctcccctgcggctcgggcaacgcgctggccggagcagtgaaccagcacgggggatttgagccagccctgggcctcgacctgttgctcaactgctcactgttgctgtgccggggtggtggccacccactggacctgctctccgtgacgctggcctcgggctcccgctgtttctccttcctgtctgtggcctggggcttcgtgtcagatgtggatatccagagcgagcgcttcagggccttgggcagtgcccgcttcacactgggcacggtgctgggcctcgccacactgcacacctaccgcggacgcctctcctacctccccgccactgtggaacctgcctcgcccacccctgcccatagcctgcctcgtgccaagtcggagctgaccctaaccccagacccagccccgcccatggcccactcacccctgcatcgttctgtgtctgacctgcctcttcccctgccccagcctgccctggcctctcctggctcgccagaacccctgcccatcctgtccctcaacggtgggggcccagagctggctggggactggggtggggctggggatgctccgctgtccccggacccactgctgtcttcacctcctggctctcccaaggcagctctacactcacccgtctccgaaggggcccccgtaattcccccatcctctgggctcccacttcccacccctgatgcccgggtaggggcctccacctgcggcccgcccgaccacctgctgcctccgctgggcaccccgctgcccccagactgggtgacgctggagggggactttgtgctcatgttggccatctcgcccagccacctaggcgctgacctggtggcagctccgcatgcgcgcttcgacgacggcctggtgcacctgtgctgggtgcgtagcggcatctcgcgggctgcgctgctgcgccttttcttggccatggagcgtggtagccacttcagcctgggctgtccgcagctgggctacgccgcggcccgtgccttccgcctagagccgctcacaccacgcggcgtgctcacagtggacggggagcaggtggagtatgggccgctacaggcacagatgcaccctggcatcggtacactgctcactgggcctcctggctgcccggggcgggagccctgaaactaaacaagcttggtacccgccgggggcggggcctacattccaatggggcggagcctgagctagggggtgtggcctggctgctagagttgtggtggcaggggccctggccccgtctcaggattgcgctcgctttcatgggaccagacgtgatgctggaaggtgggcgtcgtcacggttaaagagaaatgggctcgtcccgagggtagtgcctgatcaatgagggcggggcctggcgtctgatctggggccgcccttacggggcagggctcagtcctgacgcttgccacctgctcctacccggccaggatggctgagggcggagtctattttacgcgtcgcccaatgacaggacctggaatgtactggctggggtaggcctcagtgagtcggccggtcagggcccgcagcctcgccccatccactccggtgcctccatttagctggccaatcagcccaggaggggcaggttccccggggccggcgctaggatttgcactaatgttcctctccccgcgggtgggggcggggaaattcatatcccctgttcgtctcatgcgcgtcctccgtccccaatctaaaaagcaattgaaaaggtctatgcaataaaggcagtcgcttcattcctctcaaaaaaannn

SEQ ID NO: 373826 - DNA, 2717 bp, Homo sapiens
  misc_feature (2715)..(2717): n is a, c, g, or t
caaaaatctttttaataagagagtaggatccagggttagtttttgtagcctcggctggcccgtcggcctctggcacgctcgaacttccgcccttggagcggacgtagggtttggtgttgctgtgcggggttcctggggccttgccgatatgccggtacacctctcggcccttgcgaggaccggagagcaggacagtgccacagcccttaggggagtccagggccagctggtcgaaagtgaggatcttgccccctgccctgaggatgcggctgcgggcccggctggtcacgcgcagtgcacataccttcagtttgggtacctcctgaacccgcacatcatcagttatggtccccacaaccacgccgtcttgttttcccggccaggaagcttcatcttccggatcatccgggaaagggacagaggcggccggttggtgcgactcataaacaacctcttcaacacaacctggttgaatgtggagttggttcttctggccagaaacctgtataacttgaccaacagcctcaggtagatatcctggctcttgggctccttgcgccgaacctttcggtccttgttatggcggatgtccactcccatgatggcgcctcctgctcggccaggtccggaaagagagaacgggctggggtgggcggggaaagcctcaagcgagtggcgccgccgtgacgtcacatgggtgcgacgcggcgctctaccacgatccggacttctctgtggtgagttggacgactgactagccgggcgataacggcagagagcatagagcgcaggaacaagcgcaacgtccaagagggaagggccagcacgtcgggggcctctctggccctacccaggccgtgttctcgatagctttccggaagaaagggatctgggagcgagatgcgtgtagctagcacgatgcgtcgcgcggtgacgctctggcccgacgccgacggcctctcagtggctcccggaggacccggcgggcccagtgttggaggtgaggaggcggggctggcagggctagtcggggcatctggaaatttccgaccccacgcttcgggcgtttccttatcaggttcaccgctccctgatctcgcgctgcacttcgtaggcgcagccgctgcttgggaagtcctacttaagagctgaaggtcaggccaggacagtgagacctgactccttgctcctaccagcctactatggcttaagacccagggccagggtcccgttgatgtaacagagcagaggaccagcagatgaatggacaccttgaagcagaggagcagcaggaccagaggccagaccaggagctgaccgggagctggggccacgggcctaggagcaccctggtcagggctaaggccatggccccgcccccaccgccactggctgccagcaccccgctcctccatggcgagtttggctcctacccagcccgaggcccacgctttgccctcacccttacatcgcaggccctgcacatacagcggctgcgccccaaacctgaagccaggccccggggtggcctggtcccgttggccgaggtctcaggctgctgcaccctgcgaagccgcagcccctcagactcagcggcctacttctgcatctacacccacccctgatgcccgggtaggggcctccacctgcggcccgcccgaccacctgctgcctccgctgggcaccccgctgcccccagactgggtgacgctggagggggactttgtgctcatgttggccatctcgcccagccacctaggcgctgacctggtggcagctccgcatgcgcgcttcgacgacggcctggtgcacctgtgctgggtgcgtagcggcatctcgcgggctgcgctgctgcgccttttcttggccatggagcgtggtagccacttcagcctgggctgtccgcagctgggctacgccgcggcccgtgccttccgcctagagccgctcacaccacgcggcgtgctcacagtggacggggagcaggtggagtatgggccgctacaggcacagatgcaccctggcatcggtacactgctcactgggcctcctggctgcccggggcgggagccctgaaactaaacaagcttggtacccgccgggggcggggcctacattccaatggggcggagcctgagctagggggtgtggcctggctgctagagttgtggtggcaggggccctggccccgtctcaggattgcgctcgctttcatgggaccagacgtgatgctggaaggtgggcgtcgtcacggttaaagagaaatgggctcgtcccgagggtagtgcctgatcaatgagggcggggcctggcgtctgatctggggccgcccttacggggcagggctcagtcctgacgcttgccacctgctcctacccggccaggatggctgagggcggagtctattttacgcgtcgcccaatgacaggacctggaatgtactggctggggtaggcctcagtgagtcggccggtcagggcccgcagcctcgccccatccactccggtgcctccatttagctggccaatcagcccaggaggggcaggttccccggggccggcgctaggatttgcactaatgttcctctccccgcgggtgggggcggggaaattcatatcccctgttcgtctcatgcgcgtcctccgtccccaatctaaaaagcaattgaaaaggtctatgcaataaaggcagtcgcttcattcctctcaaaaaaannn

SEQ ID NO: 373827 - DNA, 1372 bp, Homo sapiens
caaaaatctttttaataagagagtaggatccagggttagtttttgtagcctcggctggcccgtcggcctctggcacgctcgaacttccgcccttggagcggacgtagggtttggtgttgctgtgcggggttcctggggccttgccgatatgccggtacacctctcggcccttgcgaggaccggagagcaggacagtgccacagcccttaggggagtccagggccagctggtcgaaagtgaggatcttgccccctgccctgaggatgcggctgcgggcccggctggtcacgcgcagtgcacataccttcagtttgggtacctcctgaacccgcacatcatcagttatggtccccacaaccacgccgtcttgttttcccggccaggaagcttcatcttccggatcatccgggaaagggacagaggcggccggttggtgcgactcataaacaacctcttcaacacaacctggttgaatgtggagttggttcttctggccagaaacctgtataacttgaccaacagcctcaggtagatatcctggctcttgggctccttgcgccgaacctttcggtccttgttatggcggatgtccactcccatgatggcgcctcctgctcggccaggtccggaaagagagaacgggctggggtgggcggggaaagcctcaagcgagtggcgccgccgtgacgtcacatgggtgcgacgcggcgctctaccacgatccggacttctctgtggtgagttggacgactgactagccgggcgataacggcagagagcatagagcgcaggaacaagcgcaacgtccaagagggaagggccagcacgtcgggggcctctctggccctacccaggccgtgttctcgatagctttccggaagaaagggatctgggagcgagatgcgtgtagctagcacgatgcgtcgcgcggtgacgctctggcccgacgccgacggcctctcagtggctcccggaggacccggcgggcccagtgttggaggtgaggaggcggggctggcagggctagtcggggcatctggaaatttccgaccccacgcttcgggcgtttccttatcaggttcaccgctccctgatctcgcgctgcacttcgtaggcgcagccgctgcttgggaagtcctacttaagagctgaaggtcaggccaggacagtgagacctgactccttgctcctaccagcctactatggcttaagacccagggccagggtcccgttgatgtaacagagcagaggaccagcagatgaatggacaccttgaagcagaggagcagcaggaccaggtaagggaccatctaaaagccaagatcctcatactgtggaaagacaaaatctgaagcttttctttaaaaaaaaa

SEQ ID NO: 373828 - DNA, 1739 bp, Homo sapiens
gcctgattccagaaggtaccttgggtctcactgtgtcatccagagctggagtgcagcggcacagtcatggctcactggaactcaggctcaagcaatcctcccgcctcagccttccaagtaactaggactacaggtgtctgagatgctgccaccgcagaagaagccctgggagtccatggctaaggggctggtgctgggcgcgctcttcactagtttcctgctgctgatgtactcctatgccgtgcccccgctgcatgccggcctggcctccacgaccccggaggccgcagcgtcctgctctccacctgcactcgagccagaggcagtgatccgggccaacggctcggcgggggagtgccagccgcggcgcaacatcgtgttcttgaagacgcacaagacggccagcagcaccctgctcaacatcctgttccgcttcggccagaagcaccggctcaagttcgccttccctaacggccgcaatgacttcgactacccgaccttcttcgcccgcagcctggtgcaggactatcggcccggggcctgcttcaacatcatctgcaaccacatgcgcttccactacgacgaggtgcgcggcctggtgccgaccaacgccatcttcatcacggtgctccgcgaccccgcccgcttgttcgagtcctccttccactacttcgggccggtggtgcccctcacgtggaagctctcggccggcgacaagctgaccgagttcctgcaagacccggatcgctactacgaccccaacggcttcaatgcccactacctccgaaacctgctcttcttcgacctgggctatgacaacagcctggaccccagcagcccgcaggtgcaggagcacatcctggaggtggagcgtcgcttccacctggtgctccttcaagagtacttcgacgagtcgctggtgctgctgaaggacctgctgtgctgggagctggaggacgtgctctacttcaagctcaacgcccgccgcgactcgcccgtgccgcggctctcgggggagctgtatgggcgcgccaccgcctggaacatgctggactcccacctctaccgccacttcaacgccagcttctggcgcaaggtggaggccttcgggcgggagcgcatggcccgcgaggtggccgccctgcgccatgccaacgagcgcatgcggaccatctgcatcgacgggggccacgccgtggacgccgccgccatccaggacgaggccatgcagccctggcagccgctgggcaccaagtccatcctgggctacaacctcaagaagagcatcgggcagcggcacgcgcagctctgccggcgcatgctcacgcccgagatccagtacctgatggacctcggcgccaacctgtgggtcaccaagctctggaagttcattcgcgatttcctgcggtggtgacgtcccaccgcccagcggcttgcctgcctgctcgctccctgcagaggggctgagcaggacgccgctggtgctggccgcccccagccccctcctggtgccacctcagaccccggggtgagggggggctccctggggggaggcagccagccaagactgggcccatgaacacagagagggcctaaccgagatcagtatttaactaattataccagtttttattaaacccctttccctccccgataaagaatgttctatttctgcctccccttaaaggggagacctcagaagtaaaggaatttgatgttgtgtttttgttaaaaaaaaa

SEQ ID NO: 373829 - DNA, 422 bp, Homo sapiens
  misc_feature (26)..(26): n is a, c, g, or t
  misc_feature (37)..(37): n is a, c, g, or t
atgattacgaaatttaaatacgactnaactaataggnaattttggccctcgaaggccaaagaaattcgggcacgagggcgatttcctgcggtggtgacgtcccaccgcccagcggcttgcctgcctgctcgctccctgcagaggggctgagcaggacgccgctggtgctggccgcccccagccccctcctggtgccacctcagaccccggggtgagggggggctccctggggggaggcagccagccaagactgggcccatgaacacagagagggcctaaccgagatcagtatttaactaattataccagtttttattaaacccctttccctccccgataaagaatgttctatttctgcctccccttaaaggggagacctcagaagtaaaggaatttgatgttgtgtttttgttaaaaaaaaa

SEQ ID NO: 373830 - DNA, 1671 bp, Homo sapiens
ggcagcctgggagttggacgtggctcaggcagtgggtagaaaggggcagccagccacagcccgaggtgtctgagatgctgccaccgcagaagaagccctgggagtccatggctaaggggctggtgctgggcgcgctcttcactagtttcctgctgctgatgtactcctatgccgtgcccccgctgcatgccggcctggcctccacgaccccggaggccgcagcgtcctgctctccacctgcactcgagccagaggcagtgatccgggccaacggctcggcgggggagtgccagccgcggcgcaacatcgtgttcttgaagacgcacaagacggccagcagcaccctgctcaacatcctgttccgcttcggccagaagcaccggctcaagttcgccttccctaacggccgcaatgacttcgactacccgaccttcttcgcccgcagcctggtgcaggactatcggcccggggcctgcttcaacatcatctgcaaccacatgcgcttccactacgacgaggtgcgcggcctggtgccgaccaacgccatcttcatcacggtgctccgcgaccccgcccgcttgttcgagtcctccttccactacttcgggccggtggtgcccctcacgtggaagctctcggccggcgacaagctgaccgagttcctgcaagacccggatcgctactacgaccccaacggcttcaatgcccactacctccgaaacctgctcttcttcgacctgggctatgacaacagcctggaccccagcagcccgcaggtgcaggagcacatcctggaggtggagcgtcgcttccacctggtgctccttcaagagtacttcgacgagtcgctggtgctgctgaaggacctgctgtgctgggagctggaggacgtgctctacttcaagctcaacgcccgccgcgactcgcccgtgccgcggctctcgggggagctgtatgggcgcgccaccgcctggaacatgctggactcccacctctaccgccacttcaacgccagcttctggcgcaaggtggaggccttcgggcgggagcgcatggcccgcgaggtggccgccctgcgccatgccaacgagcgcatgcggaccatctgcatcgacgggggccacgccgtggacgccgccgccatccaggacgaggccatgcagccctggcagccgctgggcaccaagtccatcctgggctacaacctcaagaagagcatcgggcagcggcacgcgcagctctgccggcgcatgctcacgcccgagatccagtacctgatggacctcggcgccaacctgtgggtcaccaagctctggaagttcattcgcgatttcctgcggtggtgacgtcccaccgcccagcggcttgcctgcctgctcgctccctgcagaggggctgagcaggacgccgctggtgctggccgcccccagccccctcctggtgccacctcagaccccggggtgagggggggctccctggggggaggcagccagccaagactgggcccatgaacacagagagggcctaaccgagatcagtatttaactaattataccagtttttattaaacccctttccctccccgataaagaatgttctatttctgcctccccttaaaggggagacctcagaagtaaaggaatttgatgttgtgtttttgttaaaaaaaaa

SEQ ID NO: 373831 - DNA, 1935 bp, Homo sapiens
tcagccagcttaaaaattaaaaggagtggaaagtttggggccctggttctctacccggttcattttaatttttaaattttaaccttctccctgccccattccccaacctctctttgagttgcttcacccaccgtctctgcaaccctggggctgtctctttccaggtggttgtcagtctatctctccagtgcctctctgtccctgtctggaccctgctggggggccacagagcaggcaaaggcagggctcaactgccaggcctgggcagccttgggggctccctggggccagcttcctgacacttgccctactctgtgctgcccctgcaggtgtctgagatgctgccaccgcagaagaagccctgggagtccatggctaaggggctggtgctgggcgcgctcttcactagtttcctgctgctgatgtactcctatgccgtgcccccgctgcatgccggcctggcctccacgaccccggaggccgcagcgtcctgctctccacctgcactcgagccagaggcagtgatccgggccaacggctcggcgggggagtgccagccgcggcgcaacatcgtgttcttgaagacgcacaagacggccagcagcaccctgctcaacatcctgttccgcttcggccagaagcaccggctcaagttcgccttccctaacggccgcaatgacttcgactacccgaccttcttcgcccgcagcctggtgcaggactatcggcccggggcctgcttcaacatcatctgcaaccacatgcgcttccactacgacgaggtgcgcggcctggtgccgaccaacgccatcttcatcacggtgctccgcgaccccgcccgcttgttcgagtcctccttccactacttcgggccggtggtgcccctcacgtggaagctctcggccggcgacaagctgaccgagttcctgcaagacccggatcgctactacgaccccaacggcttcaatgcccactacctccgaaacctgctcttcttcgacctgggctatgacaacagcctggaccccagcagcccgcaggtgcaggagcacatcctggaggtggagcgtcgcttccacctggtgctccttcaagagtacttcgacgagtcgctggtgctgctgaaggacctgctgtgctgggagctggaggacgtgctctacttcaagctcaacgcccgccgcgactcgcccgtgccgcggctctcgggggagctgtatgggcgcgccaccgcctggaacatgctggactcccacctctaccgccacttcaacgccagcttctggcgcaaggtggaggccttcgggcgggagcgcatggcccgcgaggtggccgccctgcgccatgccaacgagcgcatgcggaccatctgcatcgacgggggccacgccgtggacgccgccgccatccaggacgaggccatgcagccctggcagccgctgggcaccaagtccatcctgggctacaacctcaagaagagcatcgggcagcggcacgcgcagctctgccggcgcatgctcacgcccgagatccagtacctgatggacctcggcgccaacctgtgggtcaccaagctctggaagttcattcgcgatttcctgcggtggtgacgtcccaccgcccagcggcttgcctgcctgctcgctccctgcagaggggctgagcaggacgccgctggtgctggccgcccccagccccctcctggtgccacctcagaccccggggtgagggggggctccctggggggaggcagccagccaagactgggcccatgaacacagagagggcctaaccgagatcagtatttaactaattataccagtttttattaaacccctttccctccccgataaagaatgttctatttctgcctccccttaaaggggagacctcagaagtaaaggaatttgatgttgtgtttttgttaaaaaaaaa

SEQ ID NO: 373832 - DNA, 1800 bp, Homo sapiens
ggcagcctgggagttggacgtggctcaggcagtgggtagaaaggggcagccagccacagcccgagggtctcactgtgtcatccagagctggagtgcagcggcacagtcatggctcactggaactcaggctcaagcaatcctcccgcctcagccttccaagtaactaggactacaggcatgtgccaccacgcctggtgtctgagatgctgccaccgcagaagaagccctgggagtccatggctaaggggctggtgctgggcgcgctcttcactagtttcctgctgctgatgtactcctatgccgtgcccccgctgcatgccggcctggcctccacgaccccggaggccgcagcgtcctgctctccacctgcactcgagccagaggcagtgatccgggccaacggctcggcgggggagtgccagccgcggcgcaacatcgtgttcttgaagacgcacaagacggccagcagcaccctgctcaacatcctgttccgcttcggccagaagcaccggctcaagttcgccttccctaacggccgcaatgacttcgactacccgaccttcttcgcccgcagcctggtgcaggactatcggcccggggcctgcttcaacatcatctgcaaccacatgcgcttccactacgacgaggtgcgcggcctggtgccgaccaacgccatcttcatcacggtgctccgcgaccccgcccgcttgttcgagtcctccttccactacttcgggccggtggtgcccctcacgtggaagctctcggccggcgacaagctgaccgagttcctgcaagacccggatcgctactacgaccccaacggcttcaatgcccactacctccgaaacctgctcttcttcgacctgggctatgacaacagcctggaccccagcagcccgcaggtgcaggagcacatcctggaggtggagcgtcgcttccacctggtgctccttcaagagtacttcgacgagtcgctggtgctgctgaaggacctgctgtgctgggagctggaggacgtgctctacttcaagctcaacgcccgccgcgactcgcccgtgccgcggctctcgggggagctgtatgggcgcgccaccgcctggaacatgctggactcccacctctaccgccacttcaacgccagcttctggcgcaaggtggaggccttcgggcgggagcgcatggcccgcgaggtggccgccctgcgccatgccaacgagcgcatgcggaccatctgcatcgacgggggccacgccgtggacgccgccgccatccaggacgaggccatgcagccctggcagccgctgggcaccaagtccatcctgggctacaacctcaagaagagcatcgggcagcggcacgcgcagctctgccggcgcatgctcacgcccgagatccagtacctgatggacctcggcgccaacctgtgggtcaccaagctctggaagttcattcgcgatttcctgcggtggtgacgtcccaccgcccagcggcttgcctgcctgctcgctccctgcagaggggctgagcaggacgccgctggtgctggccgcccccagccccctcctggtgccacctcagaccccggggtgagggggggctccctggggggaggcagccagccaagactgggcccatgaacacagagagggcctaaccgagatcagtatttaactaattataccagtttttattaaacccctttccctccccgataaagaatgttctatttctgcctccccttaaaggggagacctcagaagtaaaggaatttgatgttgtgtttttgttaaaaaaaaa

SEQ ID NO: 373833 - DNA, 1629 bp, Homo sapiens
gcctgattccagaaggtaccttggtgtctgagatgctgccaccgcagaagaagccctgggagtccatggctaaggggctggtgctgggcgcgctcttcactagtttcctgctgctgatgtactcctatgccgtgcccccgctgcatgccggcctggcctccacgaccccggaggccgcagcgtcctgctctccacctgcactcgagccagaggcagtgatccgggccaacggctcggcgggggagtgccagccgcggcgcaacatcgtgttcttgaagacgcacaagacggccagcagcaccctgctcaacatcctgttccgcttcggccagaagcaccggctcaagttcgccttccctaacggccgcaatgacttcgactacccgaccttcttcgcccgcagcctggtgcaggactatcggcccggggcctgcttcaacatcatctgcaaccacatgcgcttccactacgacgaggtgcgcggcctggtgccgaccaacgccatcttcatcacggtgctccgcgaccccgcccgcttgttcgagtcctccttccactacttcgggccggtggtgcccctcacgtggaagctctcggccggcgacaagctgaccgagttcctgcaagacccggatcgctactacgaccccaacggcttcaatgcccactacctccgaaacctgctcttcttcgacctgggctatgacaacagcctggaccccagcagcccgcaggtgcaggagcacatcctggaggtggagcgtcgcttccacctggtgctccttcaagagtacttcgacgagtcgctggtgctgctgaaggacctgctgtgctgggagctggaggacgtgctctacttcaagctcaacgcccgccgcgactcgcccgtgccgcggctctcgggggagctgtatgggcgcgccaccgcctggaacatgctggactcccacctctaccgccacttcaacgccagcttctggcgcaaggtggaggccttcgggcgggagcgcatggcccgcgaggtggccgccctgcgccatgccaacgagcgcatgcggaccatctgcatcgacgggggccacgccgtggacgccgccgccatccaggacgaggccatgcagccctggcagccgctgggcaccaagtccatcctgggctacaacctcaagaagagcatcgggcagcggcacgcgcagctctgccggcgcatgctcacgcccgagatccagtacctgatggacctcggcgccaacctgtgggtcaccaagctctggaagttcattcgcgatttcctgcggtggtgacgtcccaccgcccagcggcttgcctgcctgctcgctccctgcagaggggctgagcaggacgccgctggtgctggccgcccccagccccctcctggtgccacctcagaccccggggtgagggggggctccctggggggaggcagccagccaagactgggcccatgaacacagagagggcctaaccgagatcagtatttaactaattataccagtttttattaaacccctttccctccccgataaagaatgttctatttctgcctccccttaaaggggagacctcagaagtaaaggaatttgatgttgtgtttttgttaaaaaaaaa

SEQ ID NO: 373834 - DNA, 1657 bp, Homo sapiens
cgcggcccgggccgagccagccacgctgaggcggaggaggacggggacaaggtgtctgagatgctgccaccgcagaagaagccctgggagtccatggctaaggggctggtgctgggcgcgctcttcactagtttcctgctgctgatgtactcctatgccgtgcccccgctgcatgccggcctggcctccacgaccccggaggccgcagcgtcctgctctccacctgcactcgagccagaggcagtgatccgggccaacggctcggcgggggagtgccagccgcggcgcaacatcgtgttcttgaagacgcacaagacggccagcagcaccctgctcaacatcctgttccgcttcggccagaagcaccggctcaagttcgccttccctaacggccgcaatgacttcgactacccgaccttcttcgcccgcagcctggtgcaggactatcggcccggggcctgcttcaacatcatctgcaaccacatgcgcttccactacgacgaggtgcgcggcctggtgccgaccaacgccatcttcatcacggtgctccgcgaccccgcccgcttgttcgagtcctccttccactacttcgggccggtggtgcccctcacgtggaagctctcggccggcgacaagctgaccgagttcctgcaagacccggatcgctactacgaccccaacggcttcaatgcccactacctccgaaacctgctcttcttcgacctgggctatgacaacagcctggaccccagcagcccgcaggtgcaggagcacatcctggaggtggagcgtcgcttccacctggtgctccttcaagagtacttcgacgagtcgctggtgctgctgaaggacctgctgtgctgggagctggaggacgtgctctacttcaagctcaacgcccgccgcgactcgcccgtgccgcggctctcgggggagctgtatgggcgcgccaccgcctggaacatgctggactcccacctctaccgccacttcaacgccagcttctggcgcaaggtggaggccttcgggcgggagcgcatggcccgcgaggtggccgccctgcgccatgccaacgagcgcatgcggaccatctgcatcgacgggggccacgccgtggacgccgccgccatccaggacgaggccatgcagccctggcagccgctgggcaccaagtccatcctgggctacaacctcaagaagagcatcgggcagcggcacgcgcagctctgccggcgcatgctcacgcccgagatccagtacctgatggacctcggcgccaacctgtgggtcaccaagctctggaagttcattcgcgatttcctgcggtggtgacgtcccaccgcccagcggcttgcctgcctgctcgctccctgcagaggggctgagcaggacgccgctggtgctggccgcccccagccccctcctggtgccacctcagaccccggggtgagggggggctccctggggggaggcagccagccaagactgggcccatgaacacagagagggcctaaccgagatcagtatttaactaattataccagtttttattaaacccctttccctccccgataaagaatgttctatttctgcctccccttaaaggggagacctcagaagtaaaggaatttgatgttgtgtttttgttaaaaaaaaa

SEQ ID NO: 373835 - DNA, 1290 bp, Homo sapiens
cgcggcccgggccgagccagccacgctgaggcggaggaggacggggacaagggtctcactgtgtcatccagagctggagtgcagcggcacagtcatggctcactggaactcaggctcaagcaatcctcccgcctcagccttccaagtaactaggactacaggcatgtgccaccacgcctggtgtctgagatgctgccaccgcagaagaagccctgggagtccatggctaaggggctggtgctgggcgcgctcttcactagtttcctgctgctgatgtactcctatgccgtgcccccgctgcatgccggcctggcctccacgaccccggaggccgcagcgtcctgctctccacctgcactcgagccagaggcagtgatccgggccaacggctcggcgggggagtgccagccgcggcgcaacatcgtgttcttgaagacgcacaagacggccagcagcaccctgctcaacatcctgttccgcttcggccagaagcaccggctcaagttcgccttccctaacggccgcaatgacttcgactacccgaccttcttcgcccgcagcctggtgcaggactatcggcccggggcctgcttcaacatcatctgcaaccacatgcgcttccattcaacgccagcttctggcgcaaggtggaggccttcgggcgggagcgcatggcccgcgaggtggccgccctgcgccatgccaacgagcgcatgcggaccatctgcatcgacgggggccacgccgtggacgccgccgccatccaggacgaggccatgcagccctggcagccgctgggcaccaagtccatcctgggctacaacctcaagaagagcatcgggcagcggcacgcgcagctctgccggcgcatgctcacgcccgagatccagtacctgatggacctcggcgccaacctgtgggtcaccaagctctggaagttcattcgcgatttcctgcggtggtgacgtcccaccgcccagcggcttgcctgcctgctcgctccctgcagaggggctgagcaggacgccgctggtgctggccgcccccagccccctcctggtgccacctcagaccccggggtgagggggggctccctggggggaggcagccagccaagactgggcccatgaacacagagagggcctaaccgagatcagtatttaactaattataccagtttttattaaacccctttccctccccgataaagaatgttctatttctgcctccccttaaaggggagacctcagaagtaaaggaatttgatgttgtgtttttgttaaaaaaaaa

SEQ ID NO: 373836 - DNA, 1511 bp, Homo sapiens
gccccgcgcggatggcgacggaaggggaggccgctcggcctggcctggagggagacctcgctctgccccgcgtcccagccatggcgacatcctcggccgcgctgccccgaatactcggcgcgggtgcccgggccccgtcgcgctggttgggctttctcgggaaggcgaccccccggcctgctcggccgagccgcaggacgcttggaagcgcgacggcccttatgatccgcgagtcggaggacagcaccgatttcaacgacaagattttgaatgagcccctcaagcactctgacttcttcaatgtcaaggaactgttttccgtgagaagcctcttcgatgcccgagtccatctgggacacaaagctggctgtcggcacaggtttatggagccgtacatctttgggagccgcctggaccacgacatcatcgacctggaacagacagccacgcacctccagctggccttgaacttcaccgcccacatggcctaccgcaagggcatcatcttgtttataagccgcaaccggcagttctcgtacctgattgagaacatggcccgtgactgtggcgagtacgcccacactcgctacttcaggggcggcatgctgaccaacgcgcgcctcctctttggccccacggtccgcctgccggacctcatcatcttcctgcacacgctcaacaacatctttgagccacacgtggccgtgagagacgcagccaagatgaacatccccacagtgggcatcgtggacaccaactgcaacccctgcctcatcacctaccctgtacccggcaatgacgactctccgctggctgtgcacctctactgcaggctcttccagacggccatcacccgggccaaggagaagcggcagcaggttgaggctctctatcgcctgcagggccagaaggagcccggggaccaggggccagcccaccctcctggggctgacatgagccattccctgtgatgttcactctcctcccaaagcaaaccacagccaagcctgtctgagctgggagtccccttccccagccctgggtcagcggcatcctcagtcgttgttacttactcagctgatgtcacagtgcagacatccaccgttccaccacagaaccagtggctgagcggaccaacgttgccatgtgcgtttgctctgtggggaacagagcacagagggtgagcgacatgtgcagaacggccccttggctgcagttaggacctcagtggctggtatggccgagctgctagaagatgctgctgtccctgtgatcccagcagccctcccttcaccgtgacccctgacctttgtcaggaaggtgcagtttttcttctcaatctaaatgcctttcaggtgggccgcttccttggctacctggttccagggggctgttttgtaatgagatgctgctggcaggccactcagaggctcccagctgggttggtgggacagccaggccagatgacctgattccagcaaaaataaaactcagatttgggcaaaatgaga

SEQ ID NO: 373837 - DNA, 585 bp, Homo sapiens
gcagtcgttgttacttactcagctgaggatgccgctgacccaggctggggaaggggactcccagctcagacaggcttggctgtggtttgctttgggaggagagtgaacatccctgggtcagcggcatcctcagtcgttgttacttactcagctgatgtcacagtgcagacatccaccgttccaccacagaaccagtggctgagcggaccaacgttgccatgtgcgtttgctctgtggggaacagagcacagagggtgagcgacatgtgcagaacggccccttggctgcagttaggacctcagtggctggtatggccgagctgctagaagatgctgctgtccctgtgatcccagcagccctcccttcaccgtgacccctgacctttgtcaggaaggtgcagtttttcttctcaatctaaatgcctttcaggtgggccgcttccttggctacctggttccagggggctgttttgtaatgagatgctgctggcaggccactcagaggctcccagctgggttggtgggacagccaggccagatgacctgattccagcaaaaataaaactcagatttgggcaaaatgaga

SEQ ID NO: 373838 - DNA, 458 bp, Homo sapiens
gccccgcgcggatggcgacggaaggggaggccgctcggcctggcctggagggagacctcgctctgccccgcgtcccagccatggcgacatcctcggccgcgctgccccgaatactcggcgcgggtgcccgggccccgtcgcgctggttgggctttctcgggaaggcgaccccccggcctgctcggccgagccgcaggacgcttggaagcgcgacggcccttatgatccgcgagtcggaggacagcaccgatttcaacgacaagattttgaatgagcccctcaagcactctgacttcttcaatgtcaaggaactgttttccgtgagaagcctcttcgatgcccgagtccatctgggacacaaagctggctgtcggcacagttttaggtgattacagccccatcctcctccacatgggaatacagagccccacagagaagcaggagtttattcctcagct

SEQ ID NO: 373839 - DNA, 1454 bp, Homo sapiens
taatttcatgcacgggcctggggcttagatcataattacatggccctcggtctgtcaatttccagggtgcccgggccccgtcgcgctggttgggctttctcgggaaggcgaccccccggcctgctcggccgagccgcaggacgcttggaagcgcgacggcccttatgatccgcgagtcggaggacagcaccgatttcaacgacaagattttgaatgagcccctcaagcactctgacttcttcaatgtcaaggaactgttttccgtgagaagcctcttcgatgcccgagtccatctgggacacaaagctggctgtcggcacaggtttatggagccgtacatctttgggagccgcctggaccacgacatcatcgacctggaacagacagccacgcacctccagctggccttgaacttcaccgcccacatggcctaccgcaagggcatcatcttgtttataagccgcaaccggcagttctcgtacctgattgagaacatggcccgtgactgtggcgagtacgcccacactcgctacttcaggggcggcatgctgaccaacgcgcgcctcctctttggccccacggtccgcctgccggacctcatcatcttcctgcacacgctcaacaacatctttgagccacacgtggccgtgagagacgcagccaagatgaacatccccacagtgggcatcgtggacaccaactgcaacccctgcctcatcacctaccctgtacccggcaatgacgactctccgctggctgtgcacctctactgcaggctcttccagacggccatcacccgggccaaggagaagcggcagcaggttgaggctctctatcgcctgcagggccagaaggagcccggggaccaggggccagcccaccctcctggggctgacatgagccattccctgtgatgttcactctcctcccaaagcaaaccacagccaagcctgtctgagctgggagtccccttccccagccctgggtcagcggcatcctcagtcgttgttacttactcagctgatgtcacagtgcagacatccaccgttccaccacagaaccagtggctgagcggaccaacgttgccatgtgcgtttgctctgtggggaacagagcacagagggtgagcgacatgtgcagaacggccccttggctgcagttaggacctcagtggctggtatggccgagctgctagaagatgctgctgtccctgtgatcccagcagccctcccttcaccgtgacccctgacctttgtcaggaaggtgcagtttttcttctcaatctaaatgcctttcaggtgggccgcttccttggctacctggttccagggggctgttttgtaatgagatgctgctggcaggccactcagaggctcccagctgggttggtgggacagccaggccagatgacctgattccagcaaaaataaaactcagatttgggcaaaatgaga

SEQ ID NO: 373840 - DNA, 1235 bp, Homo sapiens
gccccgcgcggatggcgacggaaggggaggccgctcggcctggcctggagggagacctcgctctgccccgcgtcccagccatggcgacatcctcggccgcgctgccccgaatactcggcgcgggtgcccgggccccgtcgcgctggttgggctttctcgggaaggcgaccccccggcctgctcggccgagccgcaggacgcttggaagcgcgacggcccttatgatccgcgagtcggaggacagcaccgatttcaacgacaagattttgaatgagcccctcaagcactctgacttcttcaatgtcaaggaactgttttccgtgagaagcctcttcgatgcccgagtccatctgggacacaaagctggctgtcggcacaggtttatggagccgtacatctttgggagccgcctggaccacgacatcatcgacctggaacagacagccacgcacctccagctggccttgaacttcaccgcccacatggcctaccgcaagggcatcatcttgtttataagccgcaaccggcagttctcgtacctgattgagaacatggcccgtgactgtggcgagtacgcccacactcgctacttcaggggcggcatgctgaccaacgcgcgcctcctctttggccccacggtccgcctgccggacctcatcatcttcctgcacacgctcaacaacatctttgagccacacgtggccgtgagagacgcagccaagatgaacatccccacagtgggcatcgtggacaccaactgcaacccctgcctcatcacctaccctgtacccggcaatgacgactctccgctggctgtgcacctctactgcaggctcttccagacggccatcacccgggccaaggagaagcggcagcaggttgaggctctctatcgcctgcagggccagaaggagcccggggaccaggggccagcccaccctcctggggctgacatgagccattccctgtgatgttcactctcctcccaaagcaaaccacagccaagcctgtctgagctgggagtccccttccccagccctgggtcagcggcatcctcagtcgttgttacttactcagctgatgtcacagtgcagacatccaccgttccagggggctgttttgtaatgagatgctgctggcaggccactcagaggctcccagctgggttggtgggacagccaggccagatgacctgattccagcaaaaataaaactcagatttgggcaaaatgaga

SEQ ID NO: 373841 - DNA, 1654 bp, Homo sapiens
gccccgcgcggatggcgacggaaggggaggccgctcggcctggcctggagggagacctcgctctgccccgcgtcccagccatggcgacatcctcggccgcgctgccccgaatactcggcgcgggtgcccgggccccgtcgcgctggttgggctttctcgggaaggcgaccccccggcctgctcggccgagccgcaggacgcttggaagcgcgacggcccttatgatccgcgagtcggaggacagcaccgatttcaacgacaagattttgaatgagcccctcaagcactctgacttcttcaatgtcaaggaactgttttccgtgagaagcctcttcgatgcccgagtccatctgggacacaaagctggctgtcggcacagagcaccccgctaagtccaaccccagaggggcctcatccgcaaagcctcgggaagaggacagtgacggaggcggctgccctgtgagctgcacggggcagaatgtccttttggcgtcatgttggatgtccacacatccatatggggtttatggagccgtacatctttgggagccgcctggaccacgacatcatcgacctggaacagacagccacgcacctccagctggccttgaacttcaccgcccacatggcctaccgcaagggcatcatcttgtttataagccgcaaccggcagttctcgtacctgattgagaacatggcccgtgactgtggcgagtacgcccacactcgctacttcaggggcggcatgctgaccaacgcgcgcctcctctttggccccacggtccgcctgccggacctcatcatcttcctgcacacgctcaacaacatctttgagccacacgtggccgtgagagacgcagccaagatgaacatccccacagtgggcatcgtggacaccaactgcaacccctgcctcatcacctaccctgtacccggcaatgacgactctccgctggctgtgcacctctactgcaggctcttccagacggccatcacccgggccaaggagaagcggcagcaggttgaggctctctatcgcctgcagggccagaaggagcccggggaccaggggccagcccaccctcctggggctgacatgagccattccctgtgatgttcactctcctcccaaagcaaaccacagccaagcctgtctgagctgggagtccccttccccagccctgggtcagcggcatcctcagtcgttgttacttactcagctgatgtcacagtgcagacatccaccgttccaccacagaaccagtggctgagcggaccaacgttgccatgtgcgtttgctctgtggggaacagagcacagagggtgagcgacatgtgcagaacggccccttggctgcagttaggacctcagtggctggtatggccgagctgctagaagatgctgctgtccctgtgatcccagcagccctcccttcaccgtgacccctgacctttgtcaggaaggtgcagtttttcttctcaatctaaatgcctttcaggtgggccgcttccttggctacctggttccagggggctgttttgtaatgagatgctgctggcaggccactcagaggctcccagctgggttggtgggacagccaggccagatgacctgattccagcaaaaataaaactcagatttgggcaaaatgaga

SEQ ID NO: 373842 - DNA, 424 bp, Homo sapiens
gccccgcgcggatggcgacggaaggggaggccgctcggcctggcctggagggagacctcgctctgccccgcgtcccagccatggcgacatcctcggccgcgctgccccgaatactcggcgcgggtgcccgggccccgtcgcgctggttgggctttctcgggaaggcgaccccccggcctgctcggccgagccgcaggacgcttggaagcgcgacggcccttatgatccgcgagtcggaggacagcaccgatttcaacgacaagattttgaatgagcccctcaagcactctgacttcttcaatgtcaaggaactgttttccgtgagaagcctcttcgatgcccgagtccatctgggttggtgggacagccaggccagatgacctgattccagcaaaaataaaactcagatttgggcaaaatgaga

SEQ ID NO: 373843 - DNA, 217 bp, Homo sapiens
caaccccagaggggcctcatccgcaaagcctcgggaagaggacagtgacggaggcggctgccctgtgagctgcacggggcagaatgtccttttggcgtcatgttggatgtccacacatccatatggggtcagttctattaggattccttcgggaagaggtagagggtaggaggggttaagccacgagacgaggcatgcagaggggtggcctggatgg

SEQ ID NO: 373844 - DNA, 1807 bp, Homo sapiens
gccccgcgcggatggcgacggaaggggaggccgctcggcctggcctggagggagacctcgctctgccccgcgtcccagccatggcgacatcctcggccgcgctgccccgaatactcggcgcgggtgcccgggccccgtcgcgctggttgggctttctcgggaaggcgaccccccggcctgctcggccgagccgcaggacgcttggaagcgcgacggcccttatgatccgcgagtcggaggacagcaccgatttcaacgacaagattttgaatgagcccctcaagcactctgacttcttcaatgtcaaggaactgttttccgtgagaagcctcttcgatgcccgagtccatctgggacacaaagctggctgtcggcacaggtttatggagccgtacatctttgggagccgcctggaccacgacatcatcgacctggaacagacagccacgcacctccagctggccttgaacttcaccgcccacatggcctaccgcaagggcatcatcttgtttataagccgcaaccggcagttctcgtacctgattgagaacatggcccgtgactgtggcgagtacgcccacactcgctacttcaggggcggcatgctgaccaacgcgcgcctcctctttggccccacggtccgcctgccggacctcatcatcttcctgcacacgctcaacaacatctttgagccacacgtggccgtgagagacgcagccaagatgaacatccccacagtgggcatcgtggacaccaactgcaacccctgcctcatcacctaccctgtacccggcaatgacgactctccgctggctgtgcacctctactgcaggctcttccagacggccatcacccgggccaaggagaagcggcagcaggttgaggctctctatcgcctgcagggccagaaggagcccggggaccaggggccagcccaccctcctggggctgacatgagccattccctgtgatgttcactctcctcccaaagcaaaccacagccaagcctgtctgagctgggagtccccttccccagccctgggtcagcggcatcctcagtcgttgttacttactcagctgatgtcacagtgcagacatccaccgttccaccacagaaccagtggctgagcggaccaacgttgccatgtgcgtttgctctgtggggaacagagcacagagggtgagcgacatgtgcagaacggccccttggctgcagttaggacctcagtggctggtatggccgagctgctagaagatgctgctgtccctgtgatcccagcagccctcccttcaccgtgacccctgacctttgtcaggaaggtgcagtttttcttctcaatctaaatgcctttcaggtgggccgcttccttggctacctggttccagggggctgttttgtaatgagatgctgctggcaggccactcagaggctcccagctgggttggtgggacagccaggccagatgacctgattccagcaaaaataaaactcagatttgggcaaaatgagaaacacacaaaaaaaaggcaaaaaaaaacaccacacaaaaaaaaacacctttgggggcgccgggccctggaaaaagtttcagacccctcgtggggcgcgcggcccgtgtgtcgacctggccaagggtcccaggaaccggcgcagacagggcggttcccccaaaaaaaccggggccacgggtcttgaaaaccgaggttcgggcacgggtccaacggccggctacccccgcgcgcgatcgcagaaacaacaagacacagcgccgcgagcgagaaggcacgggcgaggccacgaagcgga

SEQ ID NO: 373845 - DNA, 1520 bp, Homo sapiens
gggactcggggagggcgcggggacgcggaggggacccgttagggacgcggaggggcccgttggggatgcggtggggagcgggcgtggtgcattcgggactcggcgccaggacctctatctacttccccccaggtgcccgggccccgtcgcgctggttgggctttctcgggaaggcgaccccccggcctgctcggccgagccgcaggacgcttggaagcgcgacggcccttatgatccgcgagtcggaggacagcaccgatttcaacgacaagattttgaatgagcccctcaagcactctgacttcttcaatgtcaaggaactgttttccgtgagaagcctcttcgatgcccgagtccatctgggacacaaagctggctgtcggcacaggtttatggagccgtacatctttgggagccgcctggaccacgacatcatcgacctggaacagacagccacgcacctccagctggccttgaacttcaccgcccacatggcctaccgcaagggcatcatcttgtttataagccgcaaccggcagttctcgtacctgattgagaacatggcccgtgactgtggcgagtacgcccacactcgctacttcaggggcggcatgctgaccaacgcgcgcctcctctttggccccacggtccgcctgccggacctcatcatcttcctgcacacgctcaacaacatctttgagccacacgtggccgtgagagacgcagccaagatgaacatccccacagtgggcatcgtggacaccaactgcaacccctgcctcatcacctaccctgtacccggcaatgacgactctccgctggctgtgcacctctactgcaggctcttccagacggccatcacccgggccaaggagaagcggcagcaggttgaggctctctatcgcctgcagggccagaaggagcccggggaccaggggccagcccaccctcctggggctgacatgagccattccctgtgatgttcactctcctcccaaagcaaaccacagccaagcctgtctgagctgggagtccccttccccagccctgggtcagcggcatcctcagtcgttgttacttactcagctgatgtcacagtgcagacatccaccgttccaccacagaaccagtggctgagcggaccaacgttgccatgtgcgtttgctctgtggggaacagagcacagagggtgagcgacatgtgcagaacggccccttggctgcagttaggacctcagtggctggtatggccgagctgctagaagatgctgctgtccctgtgatcccagcagccctcccttcaccgtgacccctgacctttgtcaggaaggtgcagtttttcttctcaatctaaatgcctttcaggtgggccgcttccttggctacctggttccagggggctgttttgtaatgagatgctgctggcaggccactcagaggctcccagctgggttggtgggacagccaggccagatgacctgattccagcaaaaataaaactcagatttgggcaaaatgaga

SEQ ID NO: 373846 - DNA, 1723 bp, Homo sapiens
gggactcggggagggcgcggggacgcggaggggacccgttagggacgcggaggggcccgttggggatgcggtggggagcgggcgtggtgcattcgggactcggcgccaggacctctatctacttccccccaggtgcccgggccccgtcgcgctggttgggctttctcgggaaggcgaccccccggcctgctcggccgagccgcaggacgcttggaagcgcgacggcccttatgatccgcgagtcggaggacagcaccggtaacactgggcgcccagccgagttgggtgggaacgaggagaggccggcagccgcgggggatgcgaaccctagaggggcctgggcgctgcacgcggtcgaaactgcgcgctccgctgggctcctcccactcccgtgctcgccgccgctcggtcctgcctgacgtagcacagcgggctgaggccaccgcctcaccatggataggatttcaacgacaagattttgaatgagcccctcaagcactctgacttcttcaatgtcaaggaactgttttccgtgagaagcctcttcgatgcccgagtccatctgggacacaaagctggctgtcggcacaggtttatggagccgtacatctttgggagccgcctggaccacgacatcatcgacctggaacagacagccacgcacctccagctggccttgaacttcaccgcccacatggcctaccgcaagggcatcatcttgtttataagccgcaaccggcagttctcgtacctgattgagaacatggcccgtgactgtggcgagtacgcccacactcgctacttcaggggcggcatgctgaccaacgcgcgcctcctctttggccccacggtccgcctgccggacctcatcatcttcctgcacacgctcaacaacatctttgagccacacgtggccgtgagagacgcagccaagatgaacatccccacagtgggcatcgtggacaccaactgcaacccctgcctcatcacctaccctgtacccggcaatgacgactctccgctggctgtgcacctctactgcaggctcttccagacggccatcacccgggccaaggagaagcggcagcaggttgaggctctctatcgcctgcagggccagaaggagcccggggaccaggggccagcccaccctcctggggctgacatgagccattccctgtgatgttcactctcctcccaaagcaaaccacagccaagcctgtctgagctgggagtccccttccccagccctgggtcagcggcatcctcagtcgttgttacttactcagctgatgtcacagtgcagacatccaccgttccaccacagaaccagtggctgagcggaccaacgttgccatgtgcgtttgctctgtggggaacagagcacagagggtgagcgacatgtgcagaacggccccttggctgcagttaggacctcagtggctggtatggccgagctgctagaagatgctgctgtccctgtgatcccagcagccctcccttcaccgtgacccctgacctttgtcaggaaggtgcagtttttcttctcaatctaaatgcctttcaggtgggccgcttccttggctacctggttccagggggctgttttgtaatgagatgctgctggcaggccactcagaggctcccagctgggttggtgggacagccaggccagatgacctgattccagcaaaaataaaactcagatttgggcaaaatgaga

SEQ ID NO: 373847 - DNA, 1714 bp, Homo sapiens
gccccgcgcggatggcgacggaaggggaggccgctcggcctggcctggagggagacctcgctctgccccgcgtcccagccatggcgacatcctcggccgcgctgccccgaatactcggcgcgggtgcccgggccccgtcgcgctggttgggctttctcgggaaggcgaccccccggcctgctcggccgagccgcaggacgcttggaagcgcgacggcccttatgatccgcgagtcggaggacagcaccggtaacactgggcgcccagccgagttgggtgggaacgaggagaggccggcagccgcgggggatgcgaaccctagaggggcctgggcgctgcacgcggtcgaaactgcgcgctccgctgggctcctcccactcccgtgctcgccgccgctcggtcctgcctgacgtagcacagcgggctgaggccaccgcctcaccatggataggatttcaacgacaagattttgaatgagcccctcaagcactctgacttcttcaatgtcaaggaactgttttccgtgagaagcctcttcgatgcccgagtccatctgggacacaaagctggctgtcggcacaggtttatggagccgtacatctttgggagccgcctggaccacgacatcatcgacctggaacagacagccacgcacctccagctggccttgaacttcaccgcccacatggcctaccgcaagggcatcatcttgtttataagccgcaaccggcagttctcgtacctgattgagaacatggcccgtgactgtggcgagtacgcccacactcgctacttcaggggcggcatgctgaccaacgcgcgcctcctctttggccccacggtccgcctgccggacctcatcatcttcctgcacacgctcaacaacatctttgagccacacgtggccgtgagagacgcagccaagatgaacatccccacagtgggcatcgtggacaccaactgcaacccctgcctcatcacctaccctgtacccggcaatgacgactctccgctggctgtgcacctctactgcaggctcttccagacggccatcacccgggccaaggagaagcggcagcaggttgaggctctctatcgcctgcagggccagaaggagcccggggaccaggggccagcccaccctcctggggctgacatgagccattccctgtgatgttcactctcctcccaaagcaaaccacagccaagcctgtctgagctgggagtccccttccccagccctgggtcagcggcatcctcagtcgttgttacttactcagctgatgtcacagtgcagacatccaccgttccaccacagaaccagtggctgagcggaccaacgttgccatgtgcgtttgctctgtggggaacagagcacagagggtgagcgacatgtgcagaacggccccttggctgcagttaggacctcagtggctggtatggccgagctgctagaagatgctgctgtccctgtgatcccagcagccctcccttcaccgtgacccctgacctttgtcaggaaggtgcagtttttcttctcaatctaaatgcctttcaggtgggccgcttccttggctacctggttccagggggctgttttgtaatgagatgctgctggcaggccactcagaggctcccagctgggttggtgggacagccaggccagatgacctgattccagcaaaaataaaactcagatttgggcaaaatgaga

SEQ ID NO: 373848 - DNA, 1196 bp, Homo sapiens
tggttactgagatggtgaaaaccaggggagacctgggggacatcacaagcttggttcctaccaggtttatggagccgtacatctttgggagccgcctggaccacgacatcatcgacctggaacagacagccacgcacctccagctggccttgaacttcaccgcccacatggcctaccgcaagggcatcatcttgtttataagccgcaaccggcagttctcgtacctgattgagaacatggcccgtgactgtggcgagtacgcccacactcgctacttcaggggcggcatgctgaccaacgcgcgcctcctctttggccccacggtccgcctgccggacctcatcatcttcctgcacacgctcaacaacatctttgagccacacgtggccgtgagagacgcagccaagatgaacatccccacagtgggcatcgtggacaccaactgcaacccctgcctcatcacctaccctgtacccggcaatgacgactctccgctggctgtgcacctctactgcaggctcttccagacggccatcacccgggccaaggagaagcggcagcaggttgaggctctctatcgcctgcagggccagaaggagcccggggaccaggggccagcccaccctcctggggctgacatgagccattccctgtgatgttcactctcctcccaaagcaaaccacagccaagcctgtctgagctgggagtccccttccccagccctgggtcagcggcatcctcagtcgttgttacttactcagctgatgtcacagtgcagacatccaccgttccaccacagaaccagtggctgagcggaccaacgttgccatgtgcgtttgctctgtggggaacagagcacagagggtgagcgacatgtgcagaacggccccttggctgcagttaggacctcagtggctggtatggccgagctgctagaagatgctgctgtccctgtgatcccagcagccctcccttcaccgtgacccctgacctttgtcaggaaggtgcagtttttcttctcaatctaaatgcctttcaggtgggccgcttccttggctacctggttccagggggctgttttgtaatgagatgctgctggcaggccactcagaggctcccagctgggttggtgggacagccaggccagatgacctgattccagcaaaaataaaactcagatttgggcaaaatgaga

SEQ ID NO: 373849 - DNA, 1081 bp, Homo sapiens
gccccgcgcggatggcgacggaaggggaggccgctcggcctggcctggagggagacctcgctctgccccgcgtcccagccatggcgacatcctcggccgcgctgccccgaatactcggcgcgggtgcccgggccccgtcgcgctggttgggctttctcgggaaggcgaccccccggcctgctcggccgagccgcaggacgcttggaagcgcgacggcccttatgatccgcgagtcggaggacagcaccgatttcaacgacaagattttgaatgagcccctcaagcactctgacttcttcaatgtcaaggaactgttttccgtgagaagcctcttcgatgcccgagtccatctgggacacaaagctggctgtcggcacaggtttatggagccgtacatctttgggagccgcctggaccacgacatcatcgacctggaacagacagccacgcacctccagctggccttgaacttcaccgcccacatggcctaccgcaagggcatcatcttgtttataagccgcaaccggcagttctcgtacctgattgagaacatggcccgtgactgtggcgagtacgcccacactcgctacttcaggggcggcatgctgaccaacgcgcgcctcctctttggccccacggtccgcctgccggacctcatcatcttcctgcacacgctcaacaacatctttgagccacacgtggccgtgagagacgcagccaagatgaacatccccacagtgggcatcgtggacaccaactgcaacccctgcctcatcacctaccctgtacccggcaatgacgactctccgctggctgtgcacctctactgcaggctcttccagacggccatcacccgggccaaggagaagcggcagcaggttgaggctctctatcgcctgcagggccagaaggagcccggggaccaggggccagcccaccctcctggggctgacatgagccattccctgtgatgttcactctcctcccaaagcaaaccacagccaagcctgggttggtgggacagccaggccagatgacctgattccagcaaaaataaaactcagatttgggcaaaatgaga

SEQ ID NO: 373850 - DNA, 319 bp, Homo sapiens
ggttatgggatattacccttatagtcctagagcatttatactgctcgttaatcattgccttagaccttgaactgttcatttgttcaataaaatgtcttttttatcgggaatcaggaactaacaagtttatgttatgatatgattcacatgtaataaaccattataccaagagaagaaaaccagcccggatgttccaggaaaaactcacagcccacatgataggctaaataaattgcatgcattagttcatttctgacctggtactgttgagtgtgaactgcagttctcaattcccagttattcttaggaattaagacta

SEQ ID NO: 373851 - DNA, 620 bp, Homo sapiens
aattaatcccttcttcccccgctctccgccagaccgccgccgcgccgccatcatggacaccagccgtgtgcagcctatcaagctggccagggtcaccaaggtcctgggcaggaccggttctcagggacagtgcacgcaggtgcgcgtggaattcatggacgacacgagccgatccatcatccgcaatgtaaaaggccccgtgcgcgagggcgacgtgctcacccttttggagtcagagcgagaagcccggaggttgcgctgagcttggctgctcgctgggtcttggatgtcgggttcgaccacttggccgatgggaatggtctgtcacaatctgctccttttttttgtccgccacacgtaactgagatgctcctttaaataaagcgtttgtgtttcaagttaaaaaaaaaaaaaaaaaaaacttcggagggcgttcatattgtcggggtgggggagaaaggagggtattggaacatgggcacttgggtcataaggctggtttcctggaccaagttttctgggtacaaagggggtagaattctggcggggtcttccctatagtggagtcggaataaattgggataaaggccaagggttaacctggctttaatactggggga

SEQ ID NO: 373852 - DNA, 703 bp, Homo sapiens
  misc_feature (133)..(133): n is a, c, g, or t
  misc_feature (141)..(141): n is a, c, g, or t
  misc_feature (332)..(332): n is a, c, g, or t
tggcctcagtatttcaaggattaaaggttctggcaattaaagtgactagttcatctgacacaagtatcccggccggttactgtctgagtagctcgtctgtttcggggtttaactttgctctcctgcaagttanttctagtnattcattatcaaaaggtataggggttagtccttgctatattatgcttggttataatttttcatctttcccatgcggtactatatctattgcgccaggtttcaatttctatcgcctatactttatctgggtaaatggtttggctaaggttgtctggtagtaaggtggagtgggtttctcgtgccgaattggnacgagcgccgcgccgccatcatggacaccagccgtgtgcagcctatcaagctggccagggtcaccaaggtcctgggcaggaccggttctcagggacagtgcacgcaggtgcgcgtggaattcatggacgacacgagccgatccatcatccgcaatgtaaaaggccccgtgcgcgagggcgacgtgctcacccttttggagtcagagcgagaagcccggaggttgcgctgagcttggctgctcgctgggtcttggatgtcgggttcgaccacttggccgatgggaatggtctgtcacaatctgctccttttttttgtccgccacacgtaactgagatgctcctttaaataaagcgtttgtgtttcaagttaa

SEQ ID NO: 373853 - DNA, 426 bp, Homo sapiens
aattcgcggccgcgtcgacacggctgcgagagacgacagaaggggtctccgccagaccgccgccgcgccgccatcatggacaccagccgtgtgcagcctatcaagctggccagggtcaccaaggtcctgggcaggaccggttctcagggacagtgcacgcaggtgcgcgtggaattcatggacgacacgagccgatccatcatccgcaatgtaaaaggccccgtgcgcgagggcgacgtgctcacccttttggagtcagagcgagaagcccggaggttgcgctgagcttggctgctcgctgggtcttggatgtcgggttcgaccacttggccgatgggaatggtctgtcacaatctgctccttttttttgtccgccacacgtaactgagatgctcctttaaataaagcgtttgtgtttcaagttaa

SEQ ID NO: 373854 - DNA, 389 bp, Homo sapiens
gctggtacggtcggggttaggatcgccgcgccgccatcatggacaccagccgtgtgcagcctatcaagctggccagggtcaccaaggtcctgggcaggaccggttctcagggacagtgcacgcaggtgcgcgtggaattcatggacgacacgagccgatccatcatccgcaatgtaaaaggccccgtgcgcgagggcgacgtgctcacccttttggagtcagagcgagaagcccggaggttgcgctgagcttggctgctcgctgggtcttggatgtcgggttcgaccacttggccgatgggaatggtctgtcacaatctgctccttttttttgtccgccacacgtaactgagatgctcctttaaataaagcgtttgtgtttcaagttaa

SEQ ID NO: 373855 - DNA, 374 bp, Homo sapiens
gttggatccgaattcggatccaaccggaccaacgccgtgtgcagcctatcaagctggccagggtcaccaaggtcctgggcaggaccggttctcagggacagtgcacgcaggtgcgcgtggaattcatggacgacacgagccgatccatcatccgcaatgtaaaaggccccgtgcgcgagggcgacgtgctcacccttttggagtcagagcgagaagcccggaggttgcgctgagcttggctgctcgctgggtcttggatgtcgggttcgaccacttggccgatgggaatggtctgtcacaatctgctccttttttttgtccgccacacgtaactgagatgctcctttaaataaagcgtttgtgtttcaagttaa

SEQ ID NO: 373856 - DNA, 402 bp, Homo sapiens
gcctactactactaaattcgcggccgcgtcgacccctggccagcttgataggctgcacacggctggtgtcagcctatcaagctggccagggtcaccaaggtcctgggcaggaccggttctcagggacagtgcacgcaggtgcgcgtggaattcatggacgacacgagccgatccatcatccgcaatgtaaaaggccccgtgcgcgagggcgacgtgctcacccttttggagtcagagcgagaagcccggaggttgcgctgagcttggctgctcgctgggtcttggatgtcgggttcgaccacttggccgatgggaatggtctgtcacaatctgctccttttttttgtccgccacacgtaactgagatgctcctttaaataaagcgtttgtgtttcaagttaa

SEQ ID NO: 373857 - DNA, 469 bp, Homo sapiens
  misc_feature (123)..(123): n is a, c, g, or t
ctttagcacctgtctcgtccccagtggcttttccagaactactgccttcaccatgaagctccatgagctttcccaattcaaacttgggcttcttcagcatttttacttttctaacgcaagcanccttccgattcggcacgagatcaagctggccagggtcaccaaggtcctgggcaggaccggttctcagggacagtgcacgcaggtgcgcgtggaattcatggacgacacgagccgatccatcatccgcaatgtaaaaggccccgtgcgcgagggcgacgtgctcacccttttggagtcagagcgagaagcccggaggttgcgctgagcttggctgctcgctgggtcttggatgtcgggttcgaccacttggccgatgggaatggtctgtcacaatctgctccttttttttgtccgccacacgtaactgagatgctcctttaaataaagcgtttgtgtttcaagttaa

SEQ ID NO: 373858 - DNA, 870 bp, Homo sapiens
ggaaagttagatttacgccgatgaatatgatagtgaaatggattttggagaccgccgccgcgccgccatcatggacaccagccgtgtgcagcctatcaagctggccagggtcaccaaggtcctgggcaggaccggttctcagggacagtgcacgcaggtgcgcgtggaattcatggacgacacgagccgatccatcatccgcaatgtaaaaggccccgtgcgcgagggcgacgtgctcacccttttggagtcagagcgagaagcccggaggttgcgctgagcttggctgctcgctgggtcttggatgtcgggttcgaccacttggccgatgggaatggtctgtcacaatctgctccttttttttgtccgccacacgtaactgagatgctcctttaaataaagcgtttgtgtttcaagttaatacatataactgtaaataataaatcaagaactgaagagctatatgtaaatgaccaagatcaacaggggaacataaaaagataataggggggggcatgatctataaactttaactggaaagaatgtttgatgtggcaagatattatattgacacgtggggaacacaattgaggactttgcatttcctgggtcaggcagggataatccaaagaatggtctaaggtcgggaagacttggctggtggaaggagagacccctaaggaaagtgtacggatattaagggcaggaagtagagaatgggatttggaaaattcccatgaccaaggttatgatatgaaccgatatggacatttaatctatactgaatagttcatgaatttgaatcacctgggtgatcatagggagagtggaaaagtatatacagagctattatgaagaaaattttaaggg

SEQ ID NO: 373859 - DNA, 358 bp, Homo sapiens
ccgcctctagagtatccccctatactgacctatctatactgacgcatctatactgacgctatctatactgacttatctatactgacctatctatactgacgtatctatactgacttatctatactgacccatcatccgcaatgtaaaaggccccgtgcgcgagggcgacgtgctcacccttttggagtcagagcgagaagcccggaggttgcgctgagcttggctgctcgctgggtcttggatgtcgggttcgaccacttggccgatgggaatggtctgtcacaatctgctccttttttttgtccgccacacgtaactgagatgctcctttaaataaagcgtttgtgtttcaagttaa

SEQ ID NO: 373860 - DNA, 442 bp, Homo sapiens
ctagaggatccccgtggtcgtactggagagaggggaaaagaggggggcctgctgcaatctccttgaggcaggaaacgtgggattcagccccagcctcacttagtggaggttcttttaccatggacccaggctgcctggtttgtatccaacctctgccccttctgacctggaagaggcgcttgaccttcctcccacatcccttccagtggggtgagtacaggtgttcctcagtttacaatgggttacattccggtgagtacatcataggttgaaagtattgcaagttgaaatgtgtttaatacacctaatctcccaaacatcacagcttagcatggtccatcttaagcttgttcagaacgccttagcctgtagttggggaaactcgtctaacacgaagcctgttttaataaagtattgaatgtcttatgtaatttattgaata

SEQ ID NO: 373861 - DNA, 414 bp, Homo sapiens
  misc_feature (1)..(1): n is a, c, g, or t
  misc_feature (6)..(7): n is a, c, g, or t
  misc_feature (20)..(21): n is a, c, g, or t
  misc_feature (24)..(24): n is a, c, g, or t
ngcatnntttagggaaccgnnttncgtaatgtctctccgacataccgccgccgcgccgccatcatggacaccagccgtgtgcagcctatcaagctggccagggtcaccaaggtcctgggcaggaccggttctcagggacagtgcacgcaggtgcgcgtggaattcatggacgacacgagccgatccatcatccgcaatgtaaaaggccccgtgcgcgagggcgacgtgctcacccttttggagtcagagcgagaagcccggaggttgcgctgagcttggctgctcgctgggtcttggatgtcgggttcgaccacttggccgatgggaatggtctgtcacaatctgctccttttttttgtccgccacacgtaactgagatgctcctttaaataaagcgtttgtgtttcaagttaa

SEQ ID NO: 373862 - DNA, 544 bp, Homo sapiens
ggaaactggccctcctgcaatgccaaggttaccttcctgctgtccccagcactcaccatgtggagggtcgtcacagaaccaccatgcattaggacatcctcatacaagttgctttcagcagcatggtcaccattttcaacatcatcaccaccaccaccatactccccactcagaccgccgccgcgccgccatcatggacaccagccgtgtgcagcctatcaagctggccagggtcaccaaggtcctgggcaggaccggttctcagggacagtgcacgcaggtgcgcgtggaattcatggacgacacgagccgatccatcatccgcaatgtaaaaggccccgtgcgcgagggcgacgtgctcacccttttggagtcagagcgagaagcccggaggttgcgctgagcttggctgctcgctgggtcttggatgtcgggttcgaccacttggccgatgggaatggtctgtcacaatctgctccttttttttgtccgccacacgtaactgagatgctcctttaaataaagcgtttgtgtttcaagttaa

SEQ ID NO: 373863 - DNA, 1335 bp, Homo sapiens
gctggtacggtcggggttaggatcgccgcgccgccatcatggacaccagccgtgtgcagcctatcaagctggccagggtcaccaaggtcctgggcaggaccggttctcagggacagtgcacgcaggtgcgcgtggaattcatggacgacacgagccgatccatcatccgcaatgtaaaaggccccgtgcgcgagggcgacgtgctcacccttttggagtcagagcgagaagcccggaggttgcgctgagcttggctgctcgctgggtcttggatgtcgggttcgaccacttggccgatgggaatggtctgtcacaatctgctccttttttttgtccgccacacgtaactgagatgctcctttaaataaagcgtttgtgtttcaagttaactcaggttcttgtctgggttatacgactagggtttctccaggtttcttgagtggctcccaggcggtcaccgatcctccgcactctggaaatcctggccgtgcggtcttgccaaacgaagcttttcctttttgaggcggggggtcgtgtttgtcgattgcaccctctaccccaaacaaaacacaagcgtagtaggaatgttttattagcaaagaagtttcagagagtgggtggatcagggctctatcacttggtccccacctcaccttggtggggccagagtgagccccttcctgccacagtcaccccaactgaaattgcctttctcttcggccagtgttagcctctgagcaggggaccctggacccttctgtgcgccaaaggctgaggtgactgacgaggagatctccccacagctaggtgtagtgagccagacgaggcagcttactgaacctgggggttctctccattgtcaccgcattctccttcaccaggtgtggctgtctgggagccagggggtgactcgctctggagagaggggaaaagaggggggcctgctgcaatctccttgaggcaggaaacgtgggattcagccccagcctcacttagtggaggttcttttaccatggacccaggctgcctggtttgtatccaacctctgccccttctgacctggaagaggcgcttgaccttcctcccacatcccttccagtggggtgagtacaggtgttcctcagtttacaatgggttacattccggtgagtacatcataggttgaaagtattgcaagttgaaatgtgtttaatacacctaatctcccaaacatcacagcttagcatggtccatcttaagcttgttcagaacgccttagcctgtagttggggaaactcgtctaacacgaagcctgttttaataaagtattgaatgtcttatgtaatttattgaata

SEQ ID NO: 373864 - DNA, 1051 bp, Homo sapiens
gctggtacggtcggggttaggatcgccgcgccgccatcatggacaccagccgtgtgcagcctatcaagctggccagggtcaccaaggtcctgggcaggaccggttctcagggacagtgcacgcaggtgcgcgtggaattcatggacgacacgagccgatccatcatccgcaatgtaaaaggccccgtgcgcgagggcgacgtgctcacccttttggagtcagagcgagaagcccggaggttgcgctgagcttggctgctcgctgggtcttggatgtcgggttcgaccacttggccgatgggaatggtctgtcacaatctgctccttttttttgtccgccacacgtaactgagatgctcctttaaataaagcgtttgtgtttcaagttaactcaggttcttgtctgggttatacgactagggtttctccaggtttcttgagtggctcccaggcggtcaccgatcctccgcactctggaaatcctggccgtgcggtcttgccaaacgaagcttttcctttttgaggcggggggtcgtgtttgtcgattgcaccctctaccccaaacaaaacacaagcgtagtaggaatgttttattagcaaagaagtttcagagagtgggtggatcagggctctatcacttggtccccacctcaccttggtggggccagagtgagccccttcctgccacagtcaccccaactgaaattgcctttctcttcggccagtgttagcctctgagcaggggaccctggacccttctgtgcgccaaaggctgaggtgactgacgaggagatctccccacagctaggtgtagtgagccagacgaggcagcttactgaacctgggggttctctccattgtcaccgcattctccttcaccaggtgtggctgtctgggagccagggggtgactcgctctgggtgtcgggctggcccagcttcaggtgggcatgtagcagagcggccacctcatcctgctcagcctccagggcgatggccagggcactggtgcttacattgtccaggatggcagggtcacagcctggctgggtg

SEQ ID NO: 373865 - DNA, 991 bp, Homo sapiens
aattcgcggccgcgtcgacacggctgcgagagacgacagaaggggtctccgccagaccgccgccgcgccgccatcatggacaccagccgtgtgcagcctatcaagctggccagggtcaccaaggtcctgggcaggaccggttctcagggacagtgcacgcaggtgcgcgtggaattcatggacgacacgagccgatccatcatccgcaatgtaaaaggccccgtgcgcgagggcgacgtgctcacccttttggagtcagagcgagaagcccggaggttgcgctgagcttggctgctcgctgggtcttggatgtcgggttcgaccacttggccgatgggaatggtctgtcacaatctgctccttttttttgtccgccacacgtaactgagatgctcctttaaataaagcgtttgtgtttcaagttaaaaaaaaaaaaaaaaaaaaaaaaaaaaaaaaaaaaaaaaaaaaaaaaaaaaaaaaaaaaaaaaaaaaaaaaaaaaaaaaaaaaaaaaaaaaaaaaaaaaaaaaaaaaaaaaaaaaaaaaaaaaaaaaaaaaaaaaaaaaaataaaaaacattttaaaaaataaatcaatctcttaacgatttcctatattttatttttcatccttattattttgactaacttggagaaatatgtccatttaagttacatttatcaaaacaaggagcctgtataaaacatatttacccatattaaaataattaattcacgcaataaatagcatccttaacataaaccatattttatgtaaactatttttattattcgtaggtgctataatattcctcattcctaaatatattctctcatttttaagacttattccaactttacttagcccctaataatctattttaaaaatgtactttctatcaattcatatcaatccttcattaattatagaataaaatgcttctatctttcttaaaaataatattgttaaaaatctaagagattcttctcttaaa

SEQ ID NO: 373866 - DNA, 612 bp, Homo sapiens
aattcgcggccgcgtcgacacggctgcgagagacgacagaaggggtctccgccagaccgccgccgcgccgccatcatggacaccagccgtgtgcagcctatcaagctggccagggtcaccaaggtcctgggcaggaccggttctcagggacagtgcacgcaggtgcgcgtggaattcatggacgacacgagccgatccatcatccgcaatgtaaaaggccccgtgcgcgagggcgacgtgctcacccttttggagtcagagcgagaagcccggaggttgcgctgagcttggctgctcgctgggtcttggatgtcgggttcgaccacttggccgatgggaatggtctgtcacaatctgctccttttttttgtccgccacacgtaactgagatgctcctttaaataaagcgtttgtgtttcaagttaaaaaaaaaaaaaaaaaaaaaaaaaaaaaaaaaaaaaaaactctccggggggcttcttttatcgcgggggggcggaaaaaggggtgaagagagaagtggggccatggggtgacacaagggtggtccctgggacccacgtttttttgggtccaagggggcgacatctcgcggggtcccctattgggggg

SEQ ID NO: 373867 - DNA, 1584 bp, Homo sapiens
gctggtacggtcggggttaggatcgccgcgccgccatcatggacaccagccgtgtgcagcctatcaagctggccagggtcaccaaggtcctgggcaggaccggttctcagggacagtgcacgcaggtaatcgggtgggggcatttggccgactgccggcgacctaaaccctgatgtgacctctaccctgccctaacccctgccagccggaatccgggagccgattctcatttcatcacggggttctgatggttccctttaacgatctgtattctggccccgacacgttctctgaattcatatctgcttcccactccgcggtgcctttccgcggcccgcccttacttcttcctccactccggtggggacccgtaggtgcgcgtggaattcatggacgacacgagccgatccatcatccgcaatgtaaaaggccccgtgcgcgagggcgacgtgctcacccttttggagtcagagcgagaagcccggaggttgcgctgagcttggctgctcgctgggtcttggatgtcgggttcgaccacttggccgatgggaatggtctgtcacaatctgctccttttttttgtccgccacacgtaactgagatgctcctttaaataaagcgtttgtgtttcaagttaactcaggttcttgtctgggttatacgactagggtttctccaggtttcttgagtggctcccaggcggtcaccgatcctccgcactctggaaatcctggccgtgcggtcttgccaaacgaagcttttcctttttgaggcggggggtcgtgtttgtcgattgcaccctctaccccaaacaaaacacaagcgtagtaggaatgttttattagcaaagaagtttcagagagtgggtggatcagggctctatcacttggtccccacctcaccttggtggggccagagtgagccccttcctgccacagtcaccccaactgaaattgcctttctcttcggccagtgttagcctctgagcaggggaccctggacccttctgtgcgccaaaggctgaggtgactgacgaggagatctccccacagctaggtgtagtgagccagacgaggcagcttactgaacctgggggttctctccattgtcaccgcattctccttcaccaggtgtggctgtctgggagccagggggtgactcgctctggagagaggggaaaagaggggggcctgctgcaatctccttgaggcaggaaacgtgggattcagccccagcctcacttagtggaggttcttttaccatggacccaggctgcctggtttgtatccaacctctgccccttctgacctggaagaggcgcttgaccttcctcccacatcccttccagtggggtgagtacaggtgttcctcagtttacaatgggttacattccggtgagtacatcataggttgaaagtattgcaagttgaaatgtgtttaatacacctaatctcccaaacatcacagcttagcatggtccatcttaagcttgttcagaacgccttagcctgtagttggggaaactcgtctaacacgaagcctgttttaataaagtattgaatgtcttatgtaatttattgaata

SEQ ID NO: 373868 - DNA, 1670 bp, Homo sapiens
ggaaactggccctcctgcaatgccaaggttaccttcctgctgtccccagcactcaccatgtggagggtcgtcacagaaccaccatgcattaggacatcctcatacaagttgctttcagcagcatggtcaccattttcaacatcatcaccaccaccaccatactccccactcagaccgccgccgcgccgccatcatggacaccagccgtgtgcagcctatcaagctggccagggtcaccaaggtcctgggcaggaccggttctcagggacagtgcacgcaggtgcgcgtggaattcatggacgacacgagccgatccatcatccgcaatgtaaaaggccccgtgcgcgagggcgacgtgctcacccttttggagtcagagcgagaagcccggaggttgcgctgagcttggctgctcgctggtgggtgcaaagaggacacccctttgatagacctttggttggtggtagggaggcttcgttaagcccagggtgagagggtttgggaggcagagtctacatacagagactgacaagagggaggcgggagtttgccaattgctgcggggcctgtcaacatctcatgtttgggtctgtttacagggtcttggatgtcgggttcgaccacttggccgatgggaatggtctgtcacaatctgctccttttttttgtccgccacacgtaactgagatgctcctttaaataaagcgtttgtgtttcaagttaactcaggttcttgtctgggttatacgactagggtttctccaggtttcttgagtggctcccaggcggtcaccgatcctccgcactctggaaatcctggccgtgcggtcttgccaaacgaagcttttcctttttgaggcggggggtcgtgtttgtcgattgcaccctctaccccaaacaaaacacaagcgtagtaggaatgttttattagcaaagaagtttcagagagtgggtggatcagggctctatcacttggtccccacctcaccttggtggggccagagtgagccccttcctgccacagtcaccccaactgaaattgcctttctcttcggccagtgttagcctctgagcaggggaccctggacccttctgtgcgccaaaggctgaggtgactgacgaggagatctccccacagctaggtgtagtgagccagacgaggcagcttactgaacctgggggttctctccattgtcaccgcattctccttcaccaggtgtggctgtctgggagccagggggtgactcgctctggagagaggggaaaagaggggggcctgctgcaatctccttgaggcaggaaacgtgggattcagccccagcctcacttagtggaggttcttttaccatggacccaggctgcctggtttgtatccaacctctgccccttctgacctggaagaggcgcttgaccttcctcccacatcccttccagtggggtgagtacaggtgttcctcagtttacaatgggttacattccggtgagtacatcataggttgaaagtattgcaagttgaaatgtgtttaatacacctaatctcccaaacatcacagcttagcatggtccatcttaagcttgttcagaacgccttagcctgtagttggggaaactcgtctaacacgaagcctgttttaataaagtattgaatgtcttatgtaatttattgaata

SEQ ID NO: 373869 - DNA, 566 bp, Homo sapiens
tgatcagaggcggggctttgctgttattattggaccatggcttgtatcagcctatcaagctggccagggtcaccaaggtcctgggcaggaccggttctcagggacagtgcacgcaggtgcgcgtggaattcatggacgacacgagccgatccatcatccgcaatgtaaaaggccccgtgcgcgagggcgacgtgctcacccttttggagtcagagcgagaagcccggaggttgcgctgagcttggctgctcgctgggtcttggatgtcgggttcgaccacttggccgatgggaatggtctgtcacaatctgctccttttttttgtccgccacacgtaactgagatgctcctttaaataaagcgtttgtgtttcaagttaaaaaaaaaaaaaaaaaaaaaaaaaaaaaaaaaaaaaaaactctccggggggcttcttttatcgcgggggggcggaaaaaggggtgaagagagaagtggggccatggggtgacacaagggtggtccctgggacccacgtttttttgggtccaagggggcgacatctcgcggggtcccctattgggggg

SEQ ID NO: 373870 - DNA, 885 bp, Homo sapiens
gcggccgcctactactactactactgctcgaattcaagcttctaacgatgtacggggagcgcgtggaattcatggacgacacgagccgatccatcatccgcaatgtaaaaggccccgtgcgcgagggcgacgtgctcacccttttggagtcagagcgagaagcccggaggttgcgctgagcttggctgctcgctgggtcttggatgtcgggttcgaccacttggccgatgggaatggtctgtcacaatctgctccttttttttgtccgccacacgtaactgagatgctcctttaaataaagcgtttgtgtttcaagttaaaaaaaaaaaaaaaaaaaaaaaaaaaaaaaaaaaaaaaaaaaaaaaaaaaaaaaaaaaaaaaaaaaaaaaaaaaaaaaaaaaaaaaaaaaaaaaaaaaaaaaaaaaaaaaaaaaaaaaaaaaaaaaaaaaaaaaaaaaaaataaaaaacattttaaaaaataaatcaatctcttaacgatttcctatattttatttttcatccttattattttgactaacttggagaaatatgtccatttaagttacatttatcaaaacaaggagcctgtataaaacatatttacccatattaaaataattaattcacgcaataaatagcatccttaacataaaccatattttatgtaaactatttttattattcgtaggtgctataatattcctcattcctaaatatattctctcatttttaagacttattccaactttacttagcccctaataatctattttaaaaatgtactttctatcaattcatatcaatccttcattaattatagaataaaatgcttctatctttcttaaaaataatattgttaaaaatctaagagattcttctcttaaa

SEQ ID NO: 373871 - DNA, 1020 bp, Homo sapiens
gcctactactactaaattccccctcggtcgacacgcaggtgcgcgtggaattcatggacgacacgagccgatccatcatccgcaatgtaaaaggccccgtgcgcgagggcgacgtgctcacccttttggagtcagagcgagaagcccggaggttgcgctgagcttggctgctcgctgggtcttggatgtcgggttcgaccacttggccgatgggaatggtctgtcacaatctgctccttttttttgtccgccacacgtaactgagatgctcctttaaataaagcgtttgtgtttcaagttaaaaaaaaaaaaaaaaaaaaaaaaaaaaaaaaaaaaaaaaaagaggcgagcaagaaaaaaaaaaaaaaaaagaagagaaaaagaagaaaaaaaagaagaaaaacaagcaaagaagagaacgacaaagaagagcgcagcgcacaacaagacagagcgagcgattatataaaacaacgggccgccgagccacggccgcgcggtcaacaagccacaacggtgataggaggaggacaaggcgaggacgcaagggggcgagccatccgtcgtgaagagaaggagacagacacatctccgcggcgcgcgaggtgagggaacgaaaaaaaataagcgagcgaagaacgcaacaagacaaccccgcagacagcgagaatgtagaaccgacacagacctacggagcgagaaaggaaacccacaaatcatcagaactgctataacagggacgtgtgagaaaatcactgaccgtgcgggggtgaccaccaccatgcgagccgtatcaggataataacagtgatggtcaagtgaggacgatgaaataatgaaggcagagatgtcgcgcacaagaccaacagagatacgacggggacagtgatcactgggaagaagcgagacacatggtatagatagctgccagcaccgagggacacgcgaggtgcgcacggtttagtacaatatggacaaaaaagagaaaggggaagtagcaagatgtaaaatacagcgggg

SEQ ID NO: 373872 - DNA, 403 bp, Homo sapiens
aattaatcccttcttcccccgctctccgccagaccgccgccgcgccgccatcatggacaccagccgtgtgcagcctatcaagctggccagggtcaccaaggtcctgggcaggaccggttctcagggacagtgcacgcaggtgcgcgtggaattcatggacgacacgagccgatccatcatccgcaatgtaaaaggccccgtgcgcgagggcgacgtgctcacccttttggagtcagagcgagaagcccggaggttgcgctgagcttggctgctcgctgggtcttggatgtcgggttcgaccacttggccgatgggaatggtctgtcacaatctgctccttttttttgtccgccacacgtaactgagatgctcctttaaataaagcgtttgtgtttcaagttaa

SEQ ID NO: 373873 - DNA, 421 bp, Homo sapiens
ggaaagttagatttacgccgatgaatatgatagtgaaatggattttggagaccgccgccgcgccgccatcatggacaccagccgtgtgcagcctatcaagctggccagggtcaccaaggtcctgggcaggaccggttctcagggacagtgcacgcaggtgcgcgtggaattcatggacgacacgagccgatccatcatccgcaatgtaaaaggccccgtgcgcgagggcgacgtgctcacccttttggagtcagagcgagaagcccggaggttgcgctgagcttggctgctcgctgggtcttggatgtcgggttcgaccacttggccgatgggaatggtctgtcacaatctgctccttttttttgtccgccacacgtaactgagatgctcctttaaataaagcgtttgtgtttcaagttaa

SEQ ID NO: 373874 - DNA, 848 bp, Homo sapiens
cccttaggtgattgacgtcagacacgggactctggtgcctgttgtcgtcctggaatcaagaaggagagaggaattggctgaggcatcagaaggaaagccactaggttctcgggctgctgaactggttcgattgtgacgtttctttctccctgctgttctgtcacaggggaccccactgtaatatcctcagggacgtgtcacccacagtcacaccacgttcttgctccccattccgcacatttctcgatggccgcccatcaccattcttgaagtcgtccttggcccggctgcgggtctccgcccaggaccggaccggcccgacatggcggcggcggggaacggcgggggccggggcactgctccccagacaccgggggtcgcgcgcctcacagcgcccgccaggcaccagcccagcaccgccgcgccgccatcatggacaccagccgtgtgcagcctatcaagctggccagggtcaccaaggtcctgggcaggaccggttctcagggacagtgcacgcaggtgcgcgtggaattcatggacgacacgagccgatccatcatccgcaatgtaaaaggccccgtgcgcgagggcgacgtgctcacccttttggagtcagagcgagaagcccggaggttgcgctgagcttggctgctcgctgggtcttggatgtcgggttcgaccacttggccgatgggaatggtctgtcacaatctgctccttttttttgtccgccacacgtaactgagatgctcctttaaataaagcgtttgtgtttcaagttaaaaaaaaaaaatacatcgagacgagtctccctcggccgataacaccggccttgctacctagccgta

SEQ ID NO: 373875 - DNA, 361 bp, Homo sapiens
ttgcatatggcaaggccttgccatatgcaatgcatatggcaaggccaaggtcaccaaggtcctgggcaggaccggttctcagggacagtgcacgcaggtgcgcgtggaattcatggacgacacgagccgatccatcatccgcaatgtaaaaggccccgtgcgcgagggcgacgtgctcacccttttggagtcagagcgagaagcccggaggttgcgctgagcttggctgctcgctgggtcttggatgtcgggttcgaccacttggccgatgggaatggtctgtcacaatctgctccttttttttgtccgccacacgtaactgagatgctcctttaaataaagcgtttgtgtttcaagttaa

SEQ ID NO: 373876 - DNA, 656 bp, Homo sapiens
  misc_feature (515)..(516): n is a, c, g, or t
  misc_feature (518)..(518): n is a, c, g, or t
  misc_feature (527)..(527): n is a, c, g, or t
  misc_feature (529)..(530): n is a, c, g, or t
  misc_feature (539)..(539): n is a, c, g, or t
aattcgcggccgcgtcgacacggctgcgagagacgacagaaggggtctccgccagaccgccgccgcgccgccatcatggacaccagccgtgtgcagcctatcaagctggccagggtcaccaaggtcctgggcaggaccggttctcagggacagtgcacgcaggtgcgcgtggaattcatggacgacacgagccgatccatcatccgcaatgtaaaaggccccgtgcgcgagggcgacgtgctcacccttttggagtcagagcgagaagcccggaggttgcgctgagcttggctgctcgctgggtcttggatgtcgggttcgaccacttggccgatgggaatggtctgtcacaatctgctccttttttttgtccgccacacgtaactgagatgctcctttaaataaagcgtttgtgtttcaagttaaaaaaaaaaaaaaaaaaaaaaaaaaaaaaaaaaaaaaaaaaaaaaaaaaaaaaaaaaaaaaaaagaaaaaaaaaaaaaaaaaaaaagcannanaaacaaaananngaaaaaaanaaaaaaaaaagacggaatcaaacaaagacgcccgagctaagagagcacgacacaaacaccagcaatacgcagacgaacgcaacacgcagcccgaaacagacagcggagggacaaaaa

SEQ ID NO: 373877 - DNA, 872 bp, Homo sapiens
  misc_feature (476)..(477): n is a, c, g, or t
  misc_feature (480)..(480): n is a, c, g, or t
  misc_feature (798)..(798): n is a, c, g, or t
aattcgcggccgcgtcgacacggctgcgagagacgacagaaggggtctccgccagaccgccgccgcgccgccatcatggacaccagccgtgtgcagcctatcaagctggccagggtcaccaaggtcctgggcaggaccggttctcagggacagtgcacgcaggtgcgcgtggaattcatggacgacacgagccgatccatcatccgcaatgtaaaaggccccgtgcgcgagggcgacgtgctcacccttttggagtcagagcgagaagcccggaggttgcgctgagcttggctgctcgctgggtcttggatgtcgggttcgaccacttggccgatgggaatggtctgtcacaatctgctccttttttttgtccgccacacgtaactgagatgctcctttaaataaagcgtttgtgtttcaagttaaaaaaaaaaaaaaaaaaaaaaaaaaaaaaagctatagattctaccctaacnnctncttgcgaacgaattttgctttgtttggtccggtgtcaaatctggggcgtcctttataagtactctgtctggccgtttcaggcggctttctggaaaaggcgtgaaagccccaactttttgggatgccggagtaaccgcctttgattgctagaattatggtttgaatgccctaaagggttcctcttttataaaaattcaaggctgtaatgtcctatgaaattgaaacaatcactatttgtcaatataaccgggagattttgttaaaaaaggatttttttaaccaattggtgcttacgttttttcattattaagaaaaaantgggccgattcggttatattttttaaagagtggaaactagtcgcttttaacagggggcaccaaggcaatgggca

SEQ ID NO: 373878 - DNA, 1121 bp, Homo sapiens
aattaatcccttcttcccccgctctccgccagaccgccgccgcgccgccatcatggacaccagccgtgtgcagcctatcaagctggccagggtcaccaaggtcctgggcaggaccggttctcagggacagtgcacgcaggtgcgcgtggaattcatggacgacacgagccgatccatcatccgcaatgtaaaaggccccgtgcgcgagggcgacgtgctcacccttttggagtcagagcgagaagcccggaggttgcgctgagcttggctgctcgctgggtcttggatgtcgggttcgaccacttggccgatgggaatggtctgtcacaatctgctccttttttttgtccgccacacgtaactgagatgctcctttaaataaagcgtttgtgtttcaagttaaaaaaaaaaaaaaaaaaaaaaaaaaaaaaaaaaaaaaaaaagaggcgagcaagaaaaaaaaaaaaaaaaagaagagaaaaagaagaaaaaaaagaagaaaaacaagcaaagaagagaacgacaaagaagagcgcagcgcacaacaagacagagcgagcgattatataaaacaacgggccgccgagccacggccgcgcggtcaacaagccacaacggtgataggaggaggacaaggcgaggacgcaagggggcgagccatccgtcgtgaagagaaggagacagacacatctccgcggcgcgcgaggtgagggaacgaaaaaaaataagcgagcgaagaacgcaacaagacaaccccgcagacagcgagaatgtagaaccgacacagacctacggagcgagaaaggaaacccacaaatcatcagaactgctataacagggacgtgtgagaaaatcactgaccgtgcgggggtgaccaccaccatgcgagccgtatcaggataataacagtgatggtcaagtgaggacgatgaaataatgaaggcagagatgtcgcgcacaagaccaacagagatacgacggggacagtgatcactgggaagaagcgagacacatggtatagatagctgccagcaccgagggacacgcgaggtgcgcacggtttagtacaatatggacaaaaaagagaaaggggaagtagcaagatgtaaaatacagcgggg

SEQ ID NO: 373879 - DNA, 313 bp, Homo sapiens
ggtgtcgtctagaggatccctcataggttctcagggacagtgcacgcaggtgcgcgtggaattcatggacgacacgagccgatccatcatccgcaatgtaaaaggccccgtgcgcgagggcgacgtgctcacccttttggagtcagagcgagaagcccggaggttgcgctgagcttggctgctcgctgggtcttggatgtcgggttcgaccacttggccgatgggaatggtctgtcacaatctgctccttttttttgtccgccacacgtaactgagatgctcctttaaataaagcgtttgtgtttcaagttaa

SEQ ID NO: 373880 - DNA, 638 bp, Homo sapiens
gctggtacggtcggggttaggatcgccgcgccgccatcatggacaccagccgtgtgcagcctatcaagctggccagggtcaccaaggtcctgggcaggaccggttctcagggacagtgcacgcaggtaatcgggtgggggcatttggccgactgccggcgacctaaaccctgatgtgacctctaccctgccctaacccctgccagccggaatccgggagccgattctcatttcatcacggggttctgatggttccctttaacgatctgtattctggccccgacacgttctctgaattcatatctgcttcccactccgcggtgcctttccgcggcccgcccttacttcttcctccactccggtggggacccgtaggtgcgcgtggaattcatggacgacacgagccgatccatcatccgcaatgtaaaaggccccgtgcgcgagggcgacgtgctcacccttttggagtcagagcgagaagcccggaggttgcgctgagcttggctgctcgctgggtcttggatgtcgggttcgaccacttggccgatgggaatggtctgtcacaatctgctccttttttttgtccgccacacgtaactgagatgctcctttaaataaagcgtttgtgtttcaagttaa

SEQ ID NO: 373881 - DNA, 1764 bp, Homo sapiens
gctggtacggtcggggttaggatcgccgcgccgccatcatggacaccagccgtgtgcagcctatcaagctggccagggtcaccaaggtcctgggcaggaccggttctcagggacagtgcacgcaggtaatcgggtgggggcatttggccgactgccggcgacctaaaccctgatgtgacctctaccctgccctaacccctgccagccggaatccgggagccgattctcatttcatcacggggttctgatggttccctttaacgatctgtattctggccccgacacgttctctgaattcatatctgcttcccactccgcggtgcctttccgcggcccgcccttacttcttcctccactccggtggggacccgtaggtgcgcgtggaattcatggacgacacgagccgatccatcatccgcaatgtaaaaggccccgtgcgcgagggcgacgtgctcacccttttggagtcagagcgagaagcccggaggttgcgctgagcttggctgctcgctggtgggtgcaaagaggacacccctttgatagacctttggttggtggtagggaggcttcgttaagcccagggtgagagggtttgggaggcagagtctacatacagagactgacaagagggaggcgggagtttgccaattgctgcggggcctgtcaacatctcatgtttgggtctgtttacagggtcttggatgtcgggttcgaccacttggccgatgggaatggtctgtcacaatctgctccttttttttgtccgccacacgtaactgagatgctcctttaaataaagcgtttgtgtttcaagttaactcaggttcttgtctgggttatacgactagggtttctccaggtttcttgagtggctcccaggcggtcaccgatcctccgcactctggaaatcctggccgtgcggtcttgccaaacgaagcttttcctttttgaggcggggggtcgtgtttgtcgattgcaccctctaccccaaacaaaacacaagcgtagtaggaatgttttattagcaaagaagtttcagagagtgggtggatcagggctctatcacttggtccccacctcaccttggtggggccagagtgagccccttcctgccacagtcaccccaactgaaattgcctttctcttcggccagtgttagcctctgagcaggggaccctggacccttctgtgcgccaaaggctgaggtgactgacgaggagatctccccacagctaggtgtagtgagccagacgaggcagcttactgaacctgggggttctctccattgtcaccgcattctccttcaccaggtgtggctgtctgggagccagggggtgactcgctctggagagaggggaaaagaggggggcctgctgcaatctccttgaggcaggaaacgtgggattcagccccagcctcacttagtggaggttcttttaccatggacccaggctgcctggtttgtatccaacctctgccccttctgacctggaagaggcgcttgaccttcctcccacatcccttccagtggggtgagtacaggtgttcctcagtttacaatgggttacattccggtgagtacatcataggttgaaagtattgcaagttgaaatgtgtttaatacacctaatctcccaaacatcacagcttagcatggtccatcttaagcttgttcagaacgccttagcctgtagttggggaaactcgtctaacacgaagcctgttttaataaagtattgaatgtcttatgtaatttattgaata

SEQ ID NO: 373882 - DNA, 251 bp, Homo sapiens
cacgagcagcaagtgtctggaaggtgttctagctgggtagagagcctattctaacagacacgcacatcgcagaaagcagcatgaacagctatcttccacatacttcccagtttacatttggtcttaatgatcttgaatagatcctctcttcattttactcagccaggttttgtactgatgtacaggtgttaaattacttcaagcatttttgtaagaggtgtatataattcaataaaaaaggtaaaacatga

SEQ ID NO: 373883 - DNA, 362 bp, Homo sapiens
ctaaaattggaacgatacagagaagattagcatggcccctgcgcaaggatgacgcaaattcgtgaagcgttccatattttttgagcagaaaggagttggggcttgatgaaggcgtggatagcctgaaggcagccattcaggtaaacttggcagtttgttgccacatctttaatgatctgattcctactgctaatattttctttggaatgttgtattttgttttcttcttttaagacataaccgcataccttctatttgtccttttaaagtgtacaatttggtggttttaagtgtatttacaaagttttacaattattaacaccaattgtaggacattttcaccattccaaaaaaactccata

SEQ ID NO: 373884 - DNA, 1434 bp, Homo sapiens
ggcgcgaaaaagaagcagtcctgggttgtacccggcgcagctgggagcggctgcttcctccggggtcgtatctccgcccggcatggggctgctggacctttgcgaggaagtgttcggcaccgccgacctttaccgggtgctgggcgtgcgacgcgaggcctccgacggcgaggtccgacgaggctaccacaaggtgtccctgcaggtacacccggaccgggtgggtgagggcgacaaggaggacgccacccgccgcttccagatcctgggaaaagtctattccgttctcagtgacagagaacagagagcagtgtacgatgagcagggaacagtggacgaggactctcctgtgctcacccaagaccgagactgggaggcgtattggcggctactctttaaaaagatatctttagaggacattcaagcttttgaaaagacatacaaaggttcggaagaagagctggctgatattaagcaggcctatctggacttcaagggtgacatggatcagatcatggagtctgtgctttgcgtgcagtacacagaggaacccaggataaggaatatcattcagcaagctattgacgccggagaggtcccatcctataatgcctttgtcaaagaatcgaaacaaaagatgaatgcaaggaaaaggagggctcaggaagaggccaaagaagcagaaatgagcagaaaggagttggggcttgatgaaggcgtggatagcctgaaggcagccattcagagcagacaaaaggatcggcaaaaggaaatggacaattttctggctcagatggaagcaaagtactgcaaatcttccaaaggaggagggaaaaaatctgctctcaagaaagaaaagaaataatggaatttttctcttcaaaggtccttaggtgtaaattgatgccatcgtaggcaaggtgcaggcaggatttgaaggcaaaagtcaattcagctcttgagaaaaggtgtctttccagcctgaatttttcagattgactagaccaagcagaatctctcaacctgatcttagtatttcctagaaagcacttgacattgtgtgaggtctcacctgaaggaacttggtggtgacatttgggagggtggagggaggcagtgtccttcctgacagcacttgcctccatggatcttctgtacacagaactcttatctaggatgtggttctgttcatgctgctttctgcgatgtgcgtgtctgttagaataggctctctacccagctagaacaccttccagacacttgctggacagctatcttccacatacttcccagtttacatttggtcttaatgatcttgaatagatcctctcttcattttactcagccaggttttgtactgatgtacaggtgttaaattacttcaagcatttttgtaagaggtgtatataattcaataaaaaaggtaaaacatga

SEQ ID NO: 373885 - DNA, 813 bp, Homo sapiens
ctaaggatccccgacgatggttgcaaggaaaaggagggctcaggaagaggccaaagaagcagaaatgagcagaaaggagttggggcttgatgaaggcgtggatagcctgaaggcagccattcagagcagacaaaaggatcggcaaaaggaaatggacaattttctggctcagatggaagcaaagtactgcaaatcttccaaaggaggagggaaaaaatctgctctcaagaaagaaaagaaataatggaatttttctcttcaaaggtccttaggtgtaaattgatgccatcgtaggcaaggtgcaggcaggatttgaaggcaaaagtcaattcagctcttgagaaaaggtgtctttccagcctgaatttttcagattgactagaccaagcagaatctctcaacctgatcttagtatttcctagaaagcacttgacattgtgtgaggtctcacctgaaggaacttggtggtgacatttgggagggtggagggaggcagtgtccttcctgacagcacttgcctccatggatcttctgtacacagaactcttatctaggatgtggttctgttcatgctgctttctgcgatgtgcgtgtctgttagaataggctctctacccagctagaacaccttccagacacttgctggacagctatcttccacatacttcccagtttacatttggtcttaatgatcttgaatagatcctctcttcattttactcagccaggttttgtactgatgtacaggtgttaaattacttcaagcatttttgtaagaggtgtatataattcaataaaaaaggtaaaacatga

SEQ ID NO: 373886 - DNA, 1380 bp, Homo sapiens
ggcgcgaaaaagaagcagtcctgggttgtacccggcgcagctgggagcggctgcttcctccggggtcgtatctccgcccggcatggggctgctggacctttgcgaggaagtgttcggcaccgccgacctttaccgggtgctgggcgtgcgacgcgaggcctccgacggcgaggtccgacgaggctaccacaaggtgtccctgcaggtacacccggaccgggtgggtgagggcgacaaggaggacgccacccgccgcttccagatcctgggaaaagtctattccgttctcagtgacagagaacagagagcagtgtacgatgagcagggaacagtggacgaggactctcctgtgctcacccaagaccgagactgggaggcgtattggcggctactctttaaaaagatatctttagaggacattcaagcttttgaaaagacatacaaaggttcggaagaagagctggctgatattaagcaggcctatctggacttcaagggtgacatggatcagatcatggagtctgtgctttgcgtgcagtacacagaggaacccaggataaggaatatcattcagcaagctattgacgccggagaggtcccatcctataatgcctttgtcaaagaatcgaaacaaaagatgaatgcaaggaaaaggagggctcaggaagaggccaaagaagcagaaatgagcagaaaggagttggggcttgatgaaggcgtggatagcctgaaggcagccattcagagcagacaaaaggatcggcaaaaggaaatggacaattttctggctcagatggaagcaaagtactgcaaatcttccaaaggaggagggaaaaaatctgctctcaagaaagaaaagaaataatggaatttttctcttcaaaggtccttaggtgtaaattgatgccatcgtaggcaaggtgcaggcaggatttgaaggcaaaagtcaattcagctcttgagctcaacctgatcttagtatttcctagaaagcacttgacattgtgtgaggtctcacctgaaggaacttggtggtgacatttgggagggtggagggaggcagtgtccttcctgacagcacttgcctccatggatcttctgtacacagaactcttatctaggatgtggttctgttcatgctgctttctgcgatgtgcgtgtctgttagaataggctctctacccagctagaacaccttccagacacttgctggacagctatcttccacatacttcccagtttacatttggtcttaatgatcttgaatagatcctctcttcattttactcagccaggttttgtactgatgtacaggtgttaaattacttcaagcatttttgtaagaggtgtatataattcaataaaaaaggtaaaacatga

SEQ ID NO: 373887 - DNA, 329 bp, Homo sapiens
cgaaaaagaagcagtcctgggttgtacccggcgcagctgggagcggctgcttcctccggggtcgtatctccgcccggcatggggctgctggacctttgcgaggaagtgttcggcaccgccgacctttaccgggtgctgggcgtgcgacgcgaggcctccgacggcgaggtccgacgaggctaccacaaggtgtccctgcaggtacacccggaccgggtgggtgagggcgacaaggaggacgccacccgccgcttccaggtatgcagggtcccgccccgaagccgaccggctgcgcgggcctccccctagccttttggctaccgggcccc

SEQ ID NO: 373888 - DNA, 1580 bp, Homo sapiens
ggcgcgaaaaagaagcagtcctgggttgtacccggcgcagctgggagcggctgcttcctccggggtcgtatctccgcccggcatggggctgctggacctttgcgaggaagtgttcggcaccgccgacctttaccgggtgctgggcgtgcgacgcgaggcctccgacggcgaggtccgacgaggctaccacaaggtgtccctgcaggtacacccggaccgggtgggtgagggcgacaaggaggacgccacccgccgcttccagatcctgggaaaagtctattccgttctcagtgacagagaacagagagcagtgtacgatgagcagggaacagtggacgaggactctcctgtgctcacccaagaccgagactgggaggcgtattggcggctactctttaaaaagatatctttagaggacattcaagcttttgaaaagacatacaaaggttcggaagaagagctggctgatattaagcaggcctatctggacttcaagggtgacatggatcagatcatggagtctgtgctttgcgtgcagtacacagaggaacccaggataaggaatatcattcagcaagctattgacgccggagaggtcccatcctataatgcctttgtcaaagaatcgaaacaaaagatgaatgcaaggaaaaggagggctcaggaagaggccaaagaagcagaaatgagcagaaaggagttggggcttgatgaaggcgtggatagcctgaaggcagccattcagagcagacaaaaggatcggcaaaaggaaatggacaattttctggctcagatggaagcaaagtactgcaaatcttccaaaggaggagggaaaaaatctgctctcaagaaagaaaagaaataatggaatttttctcttcaaaggtccttaggtgtaaattgatgccatcgtaggcaaggtgcaggcaggatttgaaggcaaaagtcaattcagctcttgagaaaaggtgtctttccagcctgaatttttcagattgactagaccaagcagaatctctcaacctgatcttagtatttcctagaaagcacttgacattgtgtgaggtctcacctgaaggaacttggtggtgacatttgggagggtggagggaggcagtgtccttcctgacagcacttgcctccatggatcttctgtacacagaactcttatctaggatgtggttctgttcatgctgctttctgcgatgtgcgtgtctgttagaataggctctctacccagctagaacaccttccagacacttgctggacagctatcttccacatacttcccagtttacatttggtcttaatgatcttgaatagatcctctcttcattttactcagccaggttttgtactgatgtacaggtgttaaattacttcaagcatttttgtaagaggtgtatataattcaataaaaaaggtaaaacatgatgattaagttctgggggctttgtaaatgatcccactaaaatgtgacctaggaaaaatatgaatggtgtttaggatgagagaaaagggaaaacaatagccctggtcagctttataatagagagcctggtttccctagcatgaagaga

SEQ ID NO: 373889 - DNA, 960 bp, Homo sapiens
ggcgcgaaaaagaagcagtcctgggttgtacccggcgcagctgggagcggctgcttcctccggggtcgtatctccgcccggcatggggctgctggacctttgcgaggaagtgttcggcaccgccgacctttaccgggtgctgggcgtgcgacgcgaggcctccgacggcgaggtccgacgaggctaccacaaggtgtccctgcaggtacacccggaccgggtgggtgagggcgacaaggaggacgccacccgccgcttccagatcctgggaaaagtctattccgttctcagtgacagagaacagagagcagtgtacgatgagcagggaacagtggacgaggactctcctgtgctcacccaagaccgagactgggaggcgtattggcggctactctttaaaaagatatctttagaggacattcaagcttttgaaaagacatacaaaggttcggaagaagagctggctgatattaagcaggcctatctggacttcaagggtgacatggatcagatcatggagtctgtgctttgcgtgcagtacacagaggaacccaggataaggaatatcattcagcaagctattgacgccggagaggtcccatcctataatgcctttgtcaaagaatcgaaacaaaagatgaatgcaaggaaaaggagggctcaggaagaggccaaagaagcagaaatgagcagaaaggagttggggcttgatgaaggcgtggatagcctgaaggcagccattcaggttttagcatcaagactctgctgaccttattatgaactgaattgagaagtattccttatactttttggaaaaaagtttgcatcattgttatttcttccacaaatggatgagagaattcacctgggcctagagctttctctgtgtgagaactgtttcatttaatttcttgaataattttacaataatccacaaatataataaccttataaaagtat

SEQ ID NO: 373890 - DNA, 295 bp, Homo sapiens
atttttgaattttttagagatgaggtttcactatattggccaggctggtctcaaactcctagcctcaagtgatccacccgccttggcctcccaaagtactgggattacaggcgtgagccagccaaggcaatgattttcaacccagagaaatctggcccctcagggggacatttgacaacctctagagacttttttgattgttacaattgggaagaggggtgctcttggtatctagtgggtaagaggccagtgatgctgctaaaaatcctacaatgcgtagaacagcacctgcagc

SEQ ID NO: 373891 - DNA, 465 bp, Homo sapiens
gtgagaattagacaaggacactaaaagaattattataactgtattccatatgtactaagtagagactaggaagatatttttaaatacccactttgaattttagagacgaaaactaaaatgtctgagatgatggggtgggtggggtaggcagaaagaggaggatgggaagaagtaccaaggggaaggaggaatgatttggggatgacggctgtgtttattatcttaattgtggtgatggtttcacaggtatatgtaatttctaaacttatcaaattgtacacttaaaatatgtggtctatggaatgttaattatatctcaataaagctgttaaaattgtactgaaacaaaaccattgggggaaactgggtaaagagtccaaaggacctccctatactatcattgtaacttcctgtcaattataacgattccaaaataaagaatttaaaagtgtttttaaaattaaa

SEQ ID NO: 373892 - DNA, 399 bp, Homo sapiens
tttttcatatatgtttactgggtgtttcagtaaatcagccaccaaattttccctgaagcagtcatccactcaattattactgaatgcctaataactaaccatgtattgaatgcttactatatgcaaggaacattacatattttatctctaatcctctcagcaactccacaagctagggattattatattcatttcagagatgcgtctgaggcccaaagaataattacccaagttttcacagctggtaaatggaagaatcagactttgaacttaggcttatttactccaaagtccattacccattcattataccccatggcacacacaagtctatgactcaaaatccagacacataaaaagctgaataatttaaaaggttttgctacttgactcagtaca

SEQ ID NO: 373893 - DNA, 1702 bp, Homo sapiens
gccggtgaccaggcccaacgcagccttcaagtcggcccaaacacggtttctgcctcaaggattatttatataaccattgcttattggctgctggcaaacactcgctcttctcgttggctgaaactgtcgggagaagttctgcgaaggctgctccttgcggcgttgggactgagggtcacaggcacctatatttccgtttccggttcgcctccggagccatggcggcggcactgaagtgtctactgacattaggaagatggtgccccggccttggagtggctccccaggcccgggcgctcgccgccttagtacccggagtgacccaggtagataacaagtccggtttcctgcagaagaggcctcatcgccagcaccctggcatcctaaagctgccgcacgtgcggctgccacaggcactggctaacggtgcccagttattgctacttgggagcgctgggcccactatggagaatcaggtgcaaacactgaccagttatctctggagcagacatttgcctgtagagccagaggagttgcaaagacgggctaggcatcttgagaaaaaattcctggaaaacccagacttatctcagacagaggagaaacttcgtggagcagtgctacacgcactacgtaaaactacctaccattggcaagaactgagctacactgagggactgagcctggtgtatatggcagcaagactggatggtggctttgcagcagtctccagagcattccatgagatccgggctcgaaatccagcatttcagccacaaactttgatggactttggctcaggtactggttctgtcacctgggctgctcacagtatttggggccagagcctacgtgaatatatgtgtgtggacagatcagctgccatgttggttttggcagaaaaactactgaaaggtggttcagaatctggggagccttatattccaggtgtctttttcagacagtttctacctgtatcacccaaggtgcagtttgatgtagtagtgtcagctttttccttaagtgaactgcccagcaaggctgaccgcactgaggtagttcaaaccttatggcgtaagacaggtcatttcctggtactggtggagaatggaacaaaagctgggcacagccttctcatggatgccagggatctggtccttaagggaaaagagaagtcacctttggaccctcgacctggttttgtctttgccccgtgtccccatgaactcccttgtccccagttgaccaacctggcctgtagcttctcacaggcgtaccatcccatccccttcagctggaacaagaaaccaaaggaagaaaagttctctatggtgatccttgctcgggggtctccagaggaggctcatcgctggccccgtatcactcagcctgtccttaaacggcctcgccatgtgcattgtcacttgtgctgtccagatgggcacatgcagcatgctgtgctcacagcccgccggcacggcagctcctggggagatcttttacctgtgcttactccgtctgcgtttcctccatctacggctcaggatccctctgagagttgatgaggatgtgtaacaagtattttcttctatcgtgcctgccagggctgaagctgcctggtatccaggaggggaatgctggtatccccatatgtctgtgtttgtttgagatttttaataataaataataaatttttgaagaa

SEQ ID NO: 373894 - DNA, 1045 bp, Homo sapiens
gccggtgaccaggcccaacgcagccttcaagtcggcccaaacacggtttctgcctcaaggattatttatataaccattgcttattggctgctggcaaacactcgctcttctcgttggctgaaactgtcgggagaagttctgcgaaggctgctccttgcggcgttgggactgagggtcacaggcacctatatttccgtttccggttcgcctccggagccatggcggcggcactgaagtgtctactgacattaggaagatggtgccccggccttggagtggctccccaggcccgggcgctcgccgccttagtacccggagtgacccaggtagataacaagtccggtttcctgcagaagaggcctcatcgccagcaccctggcatcctaaagctgccgcacgtgcggctgccacaggcactggctaacggtgcccagttattgctacttgggagcgctgggcccactatggagaatcaggtgcaaacactgaccagttatctctggagcagacatttgcctgtagagccagaggagttgcaaagacgggctaggcatcttgagaaaaaattcctggaaaacccaggtcctgacttccagtccttgttctcaccacagacttatctcagacagaggagaaacttcgtggagcagtgctacacgcactacgtaaaactacctaccattggcaagaactgagctacactgagggactgagcctggtgtatatggcagcaagactggatggtggctttgcagcagtctccagagcattccatgaggtgaaagtcccttaacttccaacctgaactttttgaccatcagttccctattcataaagtagttttctaggatggggattcttgggacattgcatatgcattttttttttaaagaggatctccgctggacatagtgggctcctgcctgcagtcccaactgtttgggaggctgaggcaggaggattgcttgagccagtttgaggctgcagtgagctgtgatctccactgtactccagcctggtgacagagtgagacctcatctcttaa

SEQ ID NO: 373895 - DNA, 1992 bp, Homo sapiens
gccggtgaccaggcccaacgcagccttcaagtcggcccaaacacggtttctgcctcaaggattatttatataaccattgcttattggctgctggcaaacactcgctcttctcgttggctgaaactgtcgggagaagttctgcgaaggctgctccttgcggcgttgggactgagggtcacaggcacctatatttccgtttccggttcgcctccggagccatggcggcggcactgaagtgtctactgacattaggaagatggtgccccggccttggagtggctccccaggcccgggcgctcgccgccttagtacccggagtgacccaggtagataacaagtccggtttcctgcagaagaggcctcatcgccagcaccctggcatcctaaagctgccgcacgtgcggctgccacaggcactggctaacggtgcccagttattgctacttgggagcgctgggcccactatggagaatcaggtgcaaacactgaccagttatctctggagcagacatttgcctgtagagccagaggagttgcaaagacgggctaggcatcttgagaaaaaattcctggaaaacccagacttatctcagacagaggagaaacttcgtggagcagtgctacacgcactacgtaaaactacctaccattggcaagaactgagctacactgagggactgagcctggtgtatatggcagcaagactggatggtggctttgcagcagtctccagagcattccatgagatccgggctcgaaatccagcatttcagccacaaactttgatggactttggctcaggtactggttctgtcacctgggctgctcacagtatttggggccagagcctacgtgaatatatgtgtgtggacagatcagctgccatgttggttttggcagaaaaactactgaaaggtggttcagaatctggggagccttatattccaggtgtctttttcagacagtttctacctgtatcacccaaggtgcagtttgatgtagtagtgtcagctttttccttaagtgaactgcccagcaaggctgaccgcactgaggtagttcaaaccttatggcgtaagacaggtcatttcctggtgagttaaaattccttgttctccttaagtcttgaagcagcttcatggatttcatgcctttgctcctctcattgtctttattcttcaccatttttctccttcatgggtttctttatccctctttgagggtctccatcctgattatgtaatgcctatttctttttaggactccttctccctctatgattgctcttacacagctactgacatttatactttcgtgtaattcaagtcttctgcatattttccccttttgtgaacaggtactggtggagaatggaacaaaagctgggcacagccttctcatggatgccagggatctggtccttaagggaaaagagaagtcacctttggaccctcgacctggttttgtctttgccccgtgtccccatgaactcccttgtccccagttgaccaacctggcctgtagcttctcacaggcgtaccatcccatccccttcagctggaacaagaaaccaaaggaagaaaagttctctatggtgatccttgctcgggggtctccagaggaggctcatcgctggccccgtatcactcagcctgtccttaaacggcctcgccatgtgcattgtcacttgtgctgtccagatgggcacatgcagcatgctgtgctcacagcccgccggcacggcagggatttgtatcgttgtgcccgtgtcagctcctggggagatcttttacctgtgcttactccgtctgcgtttcctccatctacggctcaggatccctctgagagttgatgaggatgtgtaacaagtattttcttctatcgtgcctgccagggctgaagctgcctggtatccaggaggggaatgctggtatccccatatgtctgtgtttgtttgagatttttaataataaataataaatttttgaagaa

SEQ ID NO: 373896 - DNA, 1751 bp, Homo sapiens
gccggtgaccaggcccaacgcagccttcaagtcggcccaaacacggtttctgcctcaaggattatttatataaccattgcttattggctgctggcaaacactcgctcttctcgttggctgaaactgtcgggagaagttctgcgaaggctgctccttgcggcgttgggactgagggtcacaggcacctatatttccgtttccggttcgcctccggagccatggcggcggcactgaagtgtctactgacattaggaagatggtgccccggccttggagtggctccccaggcccgggcgctcgccgccttagtacccggagtgacccaggtagataacaagtccggtttcctgcagaagaggcctcatcgccagcaccctggcatcctaaagctgccgcacgtgcggctgccacaggcactggctaacggtgcccagttattgctacttgggagcgctgggcccactatggagaatcaggtgcaaacactgaccagttatctctggagcagacatttgcctgtagagccagaggagttgcaaagacgggctaggcatcttgagaaaaaattcctggaaaacccagacttatctcagacagaggagaaacttcgtggagcagtgctacacgcactacgtaaaactacctaccattggcaagaactgagctacactgagggactgagcctggtgtatatggcagcaagactggatggtggctttgcagcagtctccagagcattccatgagatccgggctcgaaatccagcatttcagccacaaactttgatggactttggctcaggtactggttctgtcacctgggctgctcacagtatttggggccagagcctacgtgaatatatgtgtgtggacagatcagctgccatgttggttttggcagaaaaactactgaaaggtggttcagaatctggggagccttatattccaggtgtctttttcagacagtttctacctgtatcacccaaggtgcagtttgatgtagtagtgtcagctttttccttaagtgaactgcccagcaaggctgaccgcactgaggtagttcaaaccttatggcgtaagacaggtcatttcctggtactggtggagaatggaacaaaagctgggcacagccttctcatggatgccagggatctggtccttaagtgtccccatgaactcccttgtccccagttgaccaacctggcctgtagcttctcacaggcgtaccatcccatccccttcagctggaacaagaaaccaaaggaagaaaagttctctatggtgatccttgctcgggggtctccagaggaggctcatcgctggccccgtatcactcagcctgtccttaaacggcctcgccatgtgcattgtcacttgtgctgtccagatgggcacatgcagcatgctgtgctcacagcccgccggcacggcaggtatggggggtgtgaccaaaatcagtgggatgtggcaggaagctgcagcccacgccagcatctgtttccacagggatttgtatcgttgtgcccgtgtcagctcctggggagatcttttacctgtgcttactccgtctgcgtttcctccatctacggctcaggatccctctgagagttgatgaggatgtgtaacaagtattttcttctatcgtgcctgccagggctgaagctgcctggtatccaggaggggaatgctggtatccccatatgtctgtgtttgtttgagatttttaataataaataataaatttttgaagaa

SEQ ID NO: 373897 - DNA, 1881 bp, Homo sapiens
gccggtgaccaggcccaacgcagccttcaagtcggcccaaacacggtttctgcctcaaggattatttatataaccattgcttattggctgctggcaaacactcgctcttctcgttggctgaaactgtcgggagaagttctgcgaaggctgctccttgcggcgttgggactgagggtcacaggcacctatatttccgtttccggttcgcctccggagccatggcggcggcactgaagtgtctactgacattaggaagatggtgccccggccttggagtggctccccaggcccgggtgagtgcctacattccctgctgtcggagagactctggatctgcagagacatctccgcgcagaggaggagcgctcctggcagcccccgccctagcgattgccagcaactttcctttctgccaggaaatcaacctacctttctctgcctgcaggcgctcgccgccttagtacccggagtgacccaggtagataacaagtccggtttcctgcagaagaggcctcatcgccagcaccctggcatcctaaagctgccgcacgtgcggctgccacaggcactggctaacggtgcccagttattgctacttgggagcgctgggcccactatggagaatcaggtgcaaacactgaccagttatctctggagcagacatttgcctgtagagccagaggagttgcaaagacgggctaggcatcttgagaaaaaattcctggaaaacccagacttatctcagacagaggagaaacttcgtggagcagtgctacacgcactacgtaaaactacctaccattggcaagaactgagctacactgagggactgagcctggtgtatatggcagcaagactggatggtggctttgcagcagtctccagagcattccatgagatccgggctcgaaatccagcatttcagccacaaactttgatggactttggctcaggtactggttctgtcacctgggctgctcacagtatttggggccagagcctacgtgaatatatgtgtgtggacagatcagctgccatgttggttttggcagaaaaactactgaaaggtggttcagaatctggggagccttatattccaggtgtctttttcagacagtttctacctgtatcacccaaggtgcagtttgatgtagtagtgtcagctttttccttaagtgaactgcccagcaaggctgaccgcactgaggtagttcaaaccttatggcgtaagacaggtcatttcctggtactggtggagaatggaacaaaagctgggcacagccttctcatggatgccagggatctggtccttaagggaaaagagaagtcacctttggaccctcgacctggttttgtctttgccccgtgtccccatgaactcccttgtccccagttgaccaacctggcctgtagcttctcacaggcgtaccatcccatccccttcagctggaacaagaaaccaaaggaagaaaagttctctatggtgatccttgctcgggggtctccagaggaggctcatcgctggccccgtatcactcagcctgtccttaaacggcctcgccatgtgcattgtcacttgtgctgtccagatgggcacatgcagcatgctgtgctcacagcccgccggcacggcagggatttgtatcgttgtgcccgtgtcagctcctggggagatcttttacctgtgcttactccgtctgcgtttcctccatctacggctcaggatccctctgagagttgatgaggatgtgtaacaagtattttcttctatcgtgcctgccagggctgaagctgcctggtatccaggaggggaatgctggtatccccatatgtctgtgtttgtttgagatttttaataataaataataaatttttgaagaa

SEQ ID NO: 373898 - DNA, 1961 bp, Homo sapiens
gccggtgaccaggcccaacgcagccttcaagtcggcccaaacacggtttctgcctcaaggattatttatataaccattgcttattggctgctggcaaacactcgctcttctcgttggctgaaactgtcgggagaagttctgcgaaggctgctccttgcggcgttgggactgagggtcacaggcacctatatttccgtttccggttcgcctccggagccatggcggcggcactgaagtgtctactgacattaggaagatggtgccccggccttggagtggctccccaggcccgggtgagtgcctacattccctgctgtcggagagactctggatctgcagagacatctccgcgcagaggaggagcgctcctggcagcccccgccctagcgattgccagcaactttcctttctgccaggaaatcaacctacctttctctgcctgcaggcgctcgccgccttagtacccggagtgacccaggtagataacaagtccggtttcctgcagaagaggcctcatcgccagcaccctggcatcctaaagctgccgcacgtgcggctgccacaggcactggctaacggtgcccagttattgctacttggtgagtaacggcgggaaagcgagaagaaacgggactggacctacatgcaagtgattccgcttttcgtctttggcccatagggagcgctgggcccactatggagaatcaggtgcaaacactgaccagttatctctggagcagacatttgcctgtagagccagaggagttgcaaagacgggctaggcatcttgagaaaaaattcctggaaaacccagacttatctcagacagaggagaaacttcgtggagcagtgctacacgcactacgtaaaactacctaccattggcaagaactgagctacactgagggactgagcctggtgtatatggcagcaagactggatggtggctttgcagcagtctccagagcattccatgagatccgggctcgaaatccagcatttcagccacaaactttgatggactttggctcaggtactggttctgtcacctgggctgctcacagtatttggggccagagcctacgtgaatatatgtgtgtggacagatcagctgccatgttggttttggcagaaaaactactgaaaggtggttcagaatctggggagccttatattccaggtgtctttttcagacagtttctacctgtatcacccaaggtgcagtttgatgtagtagtgtcagctttttccttaagtgaactgcccagcaaggctgaccgcactgaggtagttcaaaccttatggcgtaagacaggtcatttcctggtactggtggagaatggaacaaaagctgggcacagccttctcatggatgccagggatctggtccttaagggaaaagagaagtcacctttggaccctcgacctggttttgtctttgccccgtgtccccatgaactcccttgtccccagttgaccaacctggcctgtagcttctcacaggcgtaccatcccatccccttcagctggaacaagaaaccaaaggaagaaaagttctctatggtgatccttgctcgggggtctccagaggaggctcatcgctggccccgtatcactcagcctgtccttaaacggcctcgccatgtgcattgtcacttgtgctgtccagatgggcacatgcagcatgctgtgctcacagcccgccggcacggcagggatttgtatcgttgtgcccgtgtcagctcctggggagatcttttacctgtgcttactccgtctgcgtttcctccatctacggctcaggatccctctgagagttgatgaggatgtgtaacaagtattttcttctatcgtgcctgccagggctgaagctgcctggtatccaggaggggaatgctggtatccccatatgtctgtgtttgtttgagatttttaataataaataataaatttttgaagaa

SEQ ID NO: 373899 - DNA, 1252 bp, Homo sapiens
gccggtgaccaggcccaacgcagccttcaagtcggcccaaacacggtttctgcctcaaggattatttatataaccattgcttattggctgctggcaaacactcgctcttctcgttggctgaaactgtcgggagaagttctgcgaaggctgctccttgcggcgttgggactgagggtcacaggcacctatatttccgtttccggttcgcctccggagccatggcggcggcactgaagtgtctactgacattaggaagatggtgccccggccttggagtggctccccaggcccgggcgctcgccgccttagtacccggagtgacccaggtagataacaagtccggtttcctgcagaagaggcctcatcgccagcaccctggcatcctaaagctgccgcacgtgcggctgccacaggcactggctaacggtgcccagttattgctacttgggagcgctgggcccactatggagaatcaggtgcaaacactgaccagttatctctggagcagacatttgcctgtagagccagaggagttgcaaagacgggctaggcatcttgagaaaaaattcctggaaaacccagacttatctcagacagaggagaaacttcgtggagcagtgctacacgcactacgtaaaactacctaccattggcaagaactgagtgtccccatgaactcccttgtccccagttgaccaacctggcctgtagcttctcacaggcgtaccatcccatccccttcagctggaacaagaaaccaaaggaagaaaagttctctatggtgatccttgctcgggggtctccagaggaggctcatcgctggccccgtatcactcagcctgtccttaaacggcctcgccatgtgcattgtcacttgtgctgtccagatgggcacatgcagcatgctgtgctcacagcccgccggcacggcaggtatggggggtgtgaccaaaatcagtgggatgtggcaggaagctgcagcccacgccagcatctgtttccacagggatttgtatcgttgtgcccgtgtcagctcctggggagatcttttacctgtgcttactccgtctgcgtttcctccatctacggctcaggatccctctgagagttgatgaggatgtgtaacaagtattttcttctatcgtgcctgccagggctgaagctgcctggtatccaggaggggaatgctggtatccccatatgtctgtgtttgtttgagatttttaataataaataataaatttttgaagaa

SEQ ID NO: 373900 - DNA, 1426 bp, Homo sapiens
cgcccaccttggcctcccaaagtgctgggattacaagcatgagccactgtgcccagctgagtctacctttttttttttaggagttgtaaataaaacaagaaaataacactattagttattttattactaactatacaactactttaacataacactctcttttcccaggggtggggttgggtgtaaatgggcctcttgtagagatgactcttggtcatgggaattggtgatttataataattttgccatcttagggctgctcacagtatttggggccagagcctacgtgaatatatgtgtgtggacagatcagctgccatgttggttttggcagaaaaactactgaaaggtggttcagaatctggggagccttatattccaggtgtctttttcagacagtttctacctgtatcacccaaggtgcagtttgatgtagtagtgtcagctttttccttaagtgaactgcccagcaaggctgaccgcactgaggtagttcaaaccttatggcgtaagacaggtcatttcctggtgagttaaaattccttgttctccttaagtcttgaagcagcttcatggatttcatgcctttgctcctctcattgtctttattcttcaccatttttctccttcatgggtttctttatccctctttgagggtctccatcctgattatgtaatgcctatttctttttaggactccttctccctctatgattgctcttacacagctactgacatttatactttcgtgtaattcaagtcttctgcatattttccccttttgtgaacaggtactggtggagaatggaacaaaagctgggcacagccttctcatggatgccagggatctggtccttaagggaaaagagaagtcacctttggaccctcgacctggttttgtctttgccccgtgtccccatgaactcccttgtccccagttgaccaacctggcctgtagcttctcacaggcgtaccatcccatccccttcagctggaacaagaaaccaaaggaagaaaagttctctatggtgatccttgctcgggggtctccagaggaggctcatcgctggccccgtatcactcagcctgtccttaaacggcctcgccatgtgcattgtcacttgtgctgtccagatgggcacatgcagcatgctgtgctcacagcccgccggcacggcagggatttgtatcgttgtgcccgtgtcagctcctggggagatcttttacctgtgcttactccgtctgcgtttcctccatctacggctcaggatccctctgagagttgatgaggatgtgtaacaagtattttcttctatcgtgcctgccagggctgaagctgcctggtatccaggaggggaatgctggtatccccatatgtctgtgtttgtttgagatttttaataataaataataaatttttgaagaa

SEQ ID NO: 373901 - DNA, 1063 bp, Homo sapiens
gccggtgaccaggcccaacgcagccttcaagtcggcccaaacacggtttctgcctcaaggattatttatataaccattgcttattggctgctggcaaacactcgctcttctcgttggctgaaactgtcgggagaagttctgcgaaggctgctccttgcggcgttgggactgagggtcacaggcacctatatttccgtttccggttcgcctccggagccatggcggcggcactgaagtgtctactgacattaggaagatggtgccccggccttggagtggctccccaggcccgggcgctcgccgccttagtacccggagtgacccaggtagataacaagtccggtttcctgcagaagaggcctcatcgccagcaccctggcatcctaaagctgccgcacgtgcggctgccacaggcactggctaacggtgcccagttattgctacttgggagcgctgggcccactatggagaatcaggtgcaaacactgaccagttatctctggagcagacatttgcctgtagcttctcacaggcgtaccatcccatccccttcagctggaacaagaaaccaaaggaagaaaagttctctatggtgatccttgctcgggggtctccagaggaggctcatcgctggccccgtatcactcagcctgtccttaaacggcctcgccatgtgcattgtcacttgtgctgtccagatgggcacatgcagcatgctgtgctcacagcccgccggcacggcaggtatggggggtgtgaccaaaatcagtgggatgtggcaggaagctgcagcccacgccagcatctgtttccacagggatttgtatcgttgtgcccgtgtcagctcctggggagatcttttacctgtgcttactccgtctgcgtttcctccatctacggctcaggatccctctgagagttgatgaggatgtgtaacaagtattttcttctatcgtgcctgccagggctgaagctgcctggtatccaggaggggaatgctggtatccccatatgtctgtgtttgtttgagatttttaataataaataataaatttttgaagaa

SEQ ID NO: 373902 - DNA, 916 bp, Homo sapiens
gccggtgaccaggcccaacgcagccttcaagtcggcccaaacacggtttctgcctcaaggattatttatataaccattgcttattggctgctggcaaacactcgctcttctcgttggctgaaactgtcgggagaagttctgcgaaggctgctccttgcggcgttgggactgagggtcacaggcacctatatttccgtttccggttcgcctccggagccatggcggcggcactgaagtgtctactgacattaggaagatggtgccccggccttggagtggctccccaggcccgggcgctcgccgccttagtacccggagtgacccaggtagataacaagtccggtttcctgcagaagaggcctcatcgccagcaccctggcatcctaaagctgccgcacgtgcggctgccacaggcactggctaacggtgcccagttattgctacttgggagcgctgggcccactatggagaatcaggtgcaaacactgaccagttatctctggagcagacatttgcctgtagagccagaggagttgcaaagacgggctaggcatcttgagaaaaaattcctggaaaacccagacttatctcagacagaggagaaacttcgtggagcagtgctacacgcactacgtaaaactacctaccattggcaagaactgagctacactgagggactgagcctggtgtatatggcagcaagactggatggtggctttgcagcagtctccagagcattccatgagatccgggctcgaaatccagcatttcagccacaaactttgatggactttggctcaggtactggttctgtcacctgggctgctcacagtatttggggccagagcctacgtgaatatatgtgtgtggacagatcagctgccatgttggttttggcagaaaaactactgaaagg

SEQ ID NO: 373903 - DNA, 810 bp, Homo sapiens
gccggtgaccaggcccaacgcagccttcaagtcggcccaaacacggtttctgcctcaaggattatttatataaccattgcttattggctgctggcaaacactcgctcttctcgttggctgaaactgtcgggagaagttctgcgaaggctgctccttgcggcgttgggactgagggtcacaggcacctatatttccgtttccggttcgcctccggagccatggcggcggcactgaagtgtctactgacattaggaagatggtgccccggccttggagtggctccccaggcccgggcgctcgccgccttagtacccggagtgacccaggtagataacaagtccggtttcctgcagaagaggcctcatcgccagcaccctggcatcctaaagctgccgcacgtgcggctgccacaggcactggctaacggtgcccagttattgctacttgggagcgctgggcccactatggagaatcaggtgcaaacactgaccagttatctctggagcagacatttgcctgtagagccagaggagttgcaaagacgggctaggcatcttgagaaaaaattcctggaaaacccagacttatctcagacagaggagaaacttcgtggagcagtgctacacgcactacgtaaaactacctaccattggcaagaactgagagttgatgaggatgtgtaacaagtattttcttctatcgtgcctgccagggctgaagctgcctggtatccaggaggggaatgctggtatccccatatgtctgtgtttgtttgagatttttaataataaataataaatttttgaagaa

SEQ ID NO: 373904 - DNA, 286 bp, Homo sapiens
tctgcatattttccccttttgtgaacaggtactggtggagaatggaacaaaagctgggcacagccttctcatggatgccagggatctggtccttaaggtaaggcttcttcttccctcactcccccacccatatggcaccaattactgttactctcttgaaaacgaaagagactgtcatgtattgacaagggtggctctcaggaaactgggcgtatgaagtcattatgatacagagcagtggttggcaaatgagagcctgtggatcaaatccgacctgccacctgtt

SEQ ID NO: 373905 - DNA, 809 bp, Homo sapiens
ggctgctcacagtatttggggccagagcctacgtgaatatatgtgtgtggacagatcagctgccatgttggttttggcagaaaaactactgaaaggtgagtgcaagagcacttccaaagttgagggagttaagaaagcaaaggggtactagtaaaagtgttttactgggaagtagagaagagggtaaaaattaagatgaatctggtttacttttaaagttatagtcaagcaaagggtggtattagaggtttctgctggactgaggatgggttgggtaagaatcaaaggacaggaggcctaatattctccctgcccttttttttttttttttaattagaggtagggtctccatatgttacccaggctggtctcaaactcctggcctcaagccatcctcccacttcagcctctagggtagctgggattacaggcacgcaccgccatacctggctcatccctgccctttttgatatacactttacctattcttggggccatgtttcttatctggatatctcttcagtttatacctaacttcctacacactcacagttgcctcttcttttctccacaggtggttcagaatctggggagccttatattccaggtgtctttttcagacagtttctacctgtatcacccaaggcaagtggcagtgtttagaatattctaaatgtggaatgtggcagatggaaaactatggcttgagctttgcagcccagcactgagtgttagaagataaaagaaatttagcggctaggactttgttgtattcttgggatgtagagatgttgagtctgtcatgttcc

SEQ ID NO: 373906 - DNA, 1729 bp, Homo sapiens
gccggtgaccaggcccaacgcagccttcaagtcggcccaaacacggtttctgcctcaaggattatttatataaccattgcttattggctgctggcaaacactcgctcttctcgttggctgaaactgtcgggagaagttctgcgaaggctgctccttgcggcgttgggactgagggtcacaggcacctatatttccgtttccggttcgcctccggagccatggcggcggcactgaagtgtctactgacattaggaagatggtgccccggccttggagtggctccccaggcccgggcgctcgccgccttagtacccggagtgacccaggtagataacaagtccggtttcctgcagaagaggcctcatcgccagcaccctggcatcctaaagctgccgcacgtgcggctgccacaggcactggctaacggtgcccagttattgctacttgggagcgctgggcccactatggagaatcaggtgcaaacactgaccagttatctctggagcagacatttgcctgtagagccagaggagttgcaaagacgggctaggcatcttgagaaaaaattcctggaaaacccagacttatctcagacagaggagaaacttcgtggagcagtgctacacgcactacgtaaaactacctaccattggcaagaactgagctacactgagggactgagcctggtgtatatggcagcaagactggatggtggctttgcagcagtctccagagcattccatgagatccgggctcgaaatccagcatttcagccacaaactttgatggactttggctcaggtactggttctgtcacctgggctgctcacagtatttggggccagagcctacgtgaatatatgtgtgtggacagatcagctgccatgttggttttggcagaaaaactactgaaaggtggttcagaatctggggagccttatattccaggtgtctttttcagacagtttctacctgtatcacccaaggtgcagtttgatgtagtagtgtcagctttttccttaagtgaactgcccagcaaggctgaccgcactgaggtagttcaaaccttatggcgtaagacaggtcatttcctggtactggtggagaatggaacaaaagctgggcacagccttctcatggatgccagggatctggtccttaagggaaaagagaagtcacctttggaccctcgacctggttttgtctttgccccgtgtccccatgaactcccttgtccccagttgaccaacctggcctgtagcttctcacaggcgtaccatcccatccccttcagctggaacaagaaaccaaaggaagaaaagttctctatggtgatccttgctcgggggtctccagaggaggctcatcgctggccccgtatcactcagcctgtccttaaacggcctcgccatgtgcattgtcacttgtgctgtccagatgggcacatgcagcatgctgtgctcacagcccgccggcacggcagggatttgtatcgttgtgcccgtgtcagctcctggggagatcttttacctgtgcttactccgtctgcgtttcctccatctacggctcaggatccctctgagagttgatgaggatgtgtaacaagtattttcttctatcgtgcctgccagggctgaagctgcctggtatccaggaggggaatgctggtatccccatatgtctgtgtttgtttgagatttttaataataaataataaatttttgaagaa

SEQ ID NO: 373907 - DNA, 1802 bp, Homo sapiens
gccggtgaccaggcccaacgcagccttcaagtcggcccaaacacggtttctgcctcaaggattatttatataaccattgcttattggctgctggcaaacactcgctcttctcgttggctgaaactgtcgggagaagttctgcgaaggctgctccttgcggcgttgggactgagggtcacaggcacctatatttccgtttccggttcgcctccggagccatggcggcggcactgaagtgtctactgacattaggaagatggtgccccggccttggagtggctccccaggcccgggcgctcgccgccttagtacccggagtgacccaggtagataacaagtccggtttcctgcagaagaggcctcatcgccagcaccctggcatcctaaagctgccgcacgtgcggctgccacaggcactggctaacggtgcccagttattgctacttgggagcgctgggcccactatggagaatcaggtgcaaacactgaccagttatctctggagcagacatttgcctgtagagccagaggagttgcaaagacgggctaggcatcttgagaaaaaattcctggaaaacccagacttatctcagacagaggagaaacttcgtggagcagtgctacacgcactacgtaaaactacctaccattggcaagaactgagctacactgagggactgagcctggtgtatatggcagcaagactggatggtggctttgcagcagtctccagagcattccatgagatccgggctcgaaatccagcatttcagccacaaactttgatggactttggctcaggtactggttctgtcacctgggctgctcacagtatttggggccagagcctacgtgaatatatgtgtgtggacagatcagctgccatgttggttttggcagaaaaactactgaaaggtggttcagaatctggggagccttatattccaggtgtctttttcagacagtttctacctgtatcacccaaggtgcagtttgatgtagtagtgtcagctttttccttaagtgaactgcccagcaaggctgaccgcactgaggtagttcaaaccttatggcgtaagacaggtcatttcctggtactggtggagaatggaacaaaagctgggcacagccttctcatggatgccagggatctggtccttaagggaaaagagaagtcacctttggaccctcgacctggttttgtctttgccccgtgtccccatgaactcccttgtccccagttgaccaacctggcctgtagcttctcacaggcgtaccatcccatccccttcagctggaacaagaaaccaaaggaagaaaagttctctatggtgatccttgctcgggggtctccagaggaggctcatcgctggccccgtatcactcagcctgtccttaaacggcctcgccatgtgcattgtcacttgtgctgtccagatgggcacatgcagcatgctgtgctcacagcccgccggcacggcaggtatggggggtgtgaccaaaatcagtgggatgtggcaggaagctgcagcccacgccagcatctgtttccacagggatttgtatcgttgtgcccgtgtcagctcctggggagatcttttacctgtgcttactccgtctgcgtttcctccatctacggctcaggatccctctgagagttgatgaggatgtgtaacaagtattttcttctatcgtgcctgccagggctgaagctgcctggtatccaggaggggaatgctggtatccccatatgtctgtgtttgtttgagatttttaataataaataataaatttttgaagaa

SEQ ID NO: 373908 - DNA, 2323 bp, Homo sapiens
gccggtgaccaggcccaacgcagccttcaagtcggcccaaacacggtttctgcctcaaggattatttatataaccattgcttattggctgctggcaaacactcgctcttctcgttggctgaaactgtcgggagaagttctgcgaaggctgctccttgcggcgttgggactgagggtcacaggcacctatatttccgtttccggttcgcctccggagccatggcggcggcactgaagtgtctactgacattaggaagatggtgccccggccttggagtggctccccaggcccgggcgctcgccgccttagtacccggagtgacccaggtagataacaagtccggtttcctgcagaagaggcctcatcgccagcaccctggcatcctaaagctgccgcacgtgcggctgccacaggcactggctaacggtgcccagttattgctacttgggagcgctgggcccactatggagaatcaggtgcaaacactgaccagttatctctggagcagacatttgcctgtagagccagaggagttgcaaagacgggctaggcatcttgagaaaaaattcctggaaaacccagacttatctcagacagaggagaaacttcgtggagcagtgctacacgcactacgtaaaactacctaccattggcaagaactgagctacactgagggactgagcctggtgtatatggcagcaagactggatggtggctttgcagcagtctccagagcattccatgagatccgggctcgaaatccagcatttcagccacaaactttgatggactttggctcaggtactggttctgtcacctgggctgctcacagtatttggggccagagcctacgtgaatatatgtgtgtggacagatcagctgccatgttggttttggcagaaaaactactgaaaggtggttcagaatctggggagccttatattccaggtgtctttttcagacagtttctacctgtatcacccaaggtgcagtttgatgtagtagtgtcagctttttccttaagtgaactgcccagcaaggctgaccgcactgaggtagttcaaaccttatggcgtaagacaggtcatttcctggtgagttaaaattccttgttctccttaagtcttgaagcagcttcatggatttcatgcctttgctcctctcattgtctttattcttcaccatttttctccttcatgggtttctttatccctctttgagggtctccatcctgattatgtaatgcctatttctttttaggactccttctccctctatgattgctcttacacagctactgacatttatactttcgtgtaattcaagtcttctgcatattttccccttttgtgaacaggtactggtggagaatggaacaaaagctgggcacagccttctcatggatgccagggatctggtccttaagggaaaagagaagtcacctttggaccctcgacctggttttgtctttgccccggtgagtattacttctgcctgtcccaccacacggatctgaacttaggcgtggccgggaaatgtaagatggtaaagctaagccactctccactactttgtgttcctatccagttcctacctaatgattcccctggctcttcctacccactgctcctgtcctcccttctccctggccccttttgactctattattctcagtttttaagttttgtgattgatggctcttttgtcttacctcatttttttatgtgttcacagttgtccccatgaactcccttgtccccagttgaccaacctggcctgtagcttctcacaggcgtaccatcccatccccttcagctggaacaagaaaccaaaggaagaaaagttctctatggtgatccttgctcgggggtctccagaggaggctcatcgctggccccgtatcactcagcctgtccttaaacggcctcgccatgtgcattgtcacttgtgctgtccagatgggcacatgcagcatgctgtgctcacagcccgccggcacggcaggtatggggggtgtgaccaaaatcagtgggatgtggcaggaagctgcagcccacgccagcatctgtttccacagggatttgtatcgttgtgcccgtgtcagctcctggggagatcttttacctgtgcttactccgtctgcgtttcctccatctacggctcaggatccctctgagagttgatgaggatgtgtaacaagtattttcttctatcgtgcctgccagggctgaagctgcctggtatccaggaggggaatgctggtatccccatatgtctgtgtttgtttgagatttttaataataaataataaatttttgaagaa

SEQ ID NO: 373909 - DNA, 2060 bp, Homo sapiens
gccggtgaccaggcccaacgcagccttcaagtcggcccaaacacggtttctgcctcaaggattatttatataaccattgcttattggctgctggcaaacactcgctcttctcgttggctgaaactgtcgggagaagttctgcgaaggctgctccttgcggcgttgggactgagggtcacaggcacctatatttccgtttccggttcgcctccggagccatggcggcggcactgaagtgtctactgacattaggaagatggtgccccggccttggagtggctccccaggcccgggcgctcgccgccttagtacccggagtgacccaggtagataacaagtccggtttcctgcagaagaggcctcatcgccagcaccctggcatcctaaagctgccgcacgtgcggctgccacaggcactggctaacggtgcccagttattgctacttgggagcgctgggcccactatggagaatcaggtgcaaacactgaccagttatctctggagcagacatttgcctgtagagccagaggagttgcaaagacgggctaggcatcttgagaaaaaattcctggaaaacccagacttatctcagacagaggagaaacttcgtggagcagtgctacacgcactacgtaaaactacctaccattggcaagaactgagctacactgagggactgagcctggtgtatatggcagcaagactggatggtggctttgcagcagtctccagagcattccatgagatccgggctcgaaatccagcatttcagccacaaactttgatggactttggctcaggtactggttctgtcacctgggctgctcacagtatttggggccagagcctacgtgaatatatgtgtgtggacagatcagctgccatgttggttttggcagaaaaactactgaaaggtggttcagaatctggggagccttatattccaggtgtctttttcagacagtttctacctgtatcacccaaggtgcagtttgatgtagtagtgtcagctttttccttaagtgaactgcccagcaaggctgaccgcactgaggtagttcaaaccttatggcgtaagacaggtcatttcctggtactggtggagaatggaacaaaagctgggcacagccttctcatggatgccagggatctggtccttaagggaaaagagaagtcacctttggaccctcgacctggttttgtctttgccccggtgagtattacttctgcctgtcccaccacacggatctgaacttaggcgtggccgggaaatgtaagatggtaaagctaagccactctccactactttgtgttcctatccagttcctacctaatgattcccctggctcttcctacccactgctcctgtcctcccttctccctggccccttttgactctattattctcagtttttaagttttgtgattgatggctcttttgtcttacctcatttttttatgtgttcacagttgtccccatgaactcccttgtccccagttgaccaacctggcctgtagcttctcacaggcgtaccatcccatccccttcagctggaacaagaaaccaaaggaagaaaagttctctatggtgatccttgctcgggggtctccagaggaggctcatcgctggccccgtatcactcagcctgtccttaaacggcctcgccatgtgcattgtcacttgtgctgtccagatgggcacatgcagcatgctgtgctcacagcccgccggcacggcaggtatggggggtgtgaccaaaatcagtgggatgtggcaggaagctgcagcccacgccagcatctgtttccacagggatttgtatcgttgtgcccgtgtcagctcctggggagatcttttacctgtgcttactccgtctgcgtttcctccatctacggctcaggatccctctgagagttgatgaggatgtgtaacaagtattttcttctatcgtgcctgccagggctgaagctgcctggtatccaggaggggaatgctggtatccccatatgtctgtgtttgtttgagatttttaataataaataataaatttttgaagaa

SEQ ID NO: 373910 - DNA, 1761 bp, Homo sapiens
gccggtgaccaggcccaacgcagccttcaagtcggcccaaacacggtttctgcctcaaggattatttatataaccattgcttattggctgctggcaaacactcgctcttctcgttggctgaaactgtcgggagaagttctgcgaaggctgctccttgcggcgttgggactgagggtcacaggcacctatatttccgtttccggttcgcctccggagccatggcggcggcactgaagtgtctactgacattaggaagatggtgccccggccttggagtggctccccaggcccgggcgctcgccgccttagtacccggagtgacccaggtagataacaagtccggtttcctgcagaagaggcctcatcgccagcaccctggcatcctaaagctgccgcacgtgcggctgccacaggcactggctaacggtgcccagttattgctacttgggagcgctgggcccactatggagaatcaggtgcaaacactgaccagttatctctggagcagacatttgcctgtagagccagaggagttgcaaagacgggctaggcatcttgagaaaaaattcctggaaaacccaggtcctgacttccagtccttgttctcaccacagacttatctcagacagaggagaaacttcgtggagcagtgctacacgcactacgtaaaactacctaccattggcaagaactgagctacactgagggactgagcctggtgtatatggcagcaagactggatggtggctttgcagcagtctccagagcattccatgagatccgggctcgaaatccagcatttcagccacaaactttgatggactttggctcaggtactggttctgtcacctgggctgctcacagtatttggggccagagcctacgtgaatatatgtgtgtggacagatcagctgccatgttggttttggcagaaaaactactgaaaggtggttcagaatctggggagccttatattccaggtgtctttttcagacagtttctacctgtatcacccaaggtgcagtttgatgtagtagtgtcagctttttccttaagtgaactgcccagcaaggctgaccgcactgaggtagttcaaaccttatggcgtaagacaggtcatttcctggtactggtggagaatggaacaaaagctgggcacagccttctcatggatgccagggatctggtccttaagggaaaagagaagtcacctttggaccctcgacctggttttgtctttgccccgtgtccccatgaactcccttgtccccagttgaccaacctggcctgtagcttctcacaggcgtaccatcccatccccttcagctggaacaagaaaccaaaggaagaaaagttctctatggtgatccttgctcgggggtctccagaggaggctcatcgctggccccgtatcactcagcctgtccttaaacggcctcgccatgtgcattgtcacttgtgctgtccagatgggcacatgcagcatgctgtgctcacagcccgccggcacggcagggatttgtatcgttgtgcccgtgtcagctcctggggagatcttttacctgtgcttactccgtctgcgtttcctccatctacggctcaggatccctctgagagttgatgaggatgtgtaacaagtattttcttctatcgtgcctgccagggctgaagctgcctggtatccaggaggggaatgctggtatccccatatgtctgtgtttgtttgagatttttaataataaataataaatttttgaagaa

SEQ ID NO: 373911 - DNA, 1809 bp, Homo sapiens
gccggtgaccaggcccaacgcagccttcaagtcggcccaaacacggtttctgcctcaaggattatttatataaccattgcttattggctgctggcaaacactcgctcttctcgttggctgaaactgtcgggagaagttctgcgaaggctgctccttgcggcgttgggactgagggtcacaggcacctatatttccgtttccggttcgcctccggagccatggcggcggcactgaagtgtctactgacattaggaagatggtgccccggccttggagtggctccccaggcccgggcgctcgccgccttagtacccggagtgacccaggtagataacaagtccggtttcctgcagaagaggcctcatcgccagcaccctggcatcctaaagctgccgcacgtgcggctgccacaggcactggctaacggtgcccagttattgctacttggtgagtaacggcgggaaagcgagaagaaacgggactggacctacatgcaagtgattccgcttttcgtctttggcccatagggagcgctgggcccactatggagaatcaggtgcaaacactgaccagttatctctggagcagacatttgcctgtagagccagaggagttgcaaagacgggctaggcatcttgagaaaaaattcctggaaaacccagacttatctcagacagaggagaaacttcgtggagcagtgctacacgcactacgtaaaactacctaccattggcaagaactgagctacactgagggactgagcctggtgtatatggcagcaagactggatggtggctttgcagcagtctccagagcattccatgagatccgggctcgaaatccagcatttcagccacaaactttgatggactttggctcaggtactggttctgtcacctgggctgctcacagtatttggggccagagcctacgtgaatatatgtgtgtggacagatcagctgccatgttggttttggcagaaaaactactgaaaggtggttcagaatctggggagccttatattccaggtgtctttttcagacagtttctacctgtatcacccaaggtgcagtttgatgtagtagtgtcagctttttccttaagtgaactgcccagcaaggctgaccgcactgaggtagttcaaaccttatggcgtaagacaggtcatttcctggtactggtggagaatggaacaaaagctgggcacagccttctcatggatgccagggatctggtccttaagggaaaagagaagtcacctttggaccctcgacctggttttgtctttgccccgtgtccccatgaactcccttgtccccagttgaccaacctggcctgtagcttctcacaggcgtaccatcccatccccttcagctggaacaagaaaccaaaggaagaaaagttctctatggtgatccttgctcgggggtctccagaggaggctcatcgctggccccgtatcactcagcctgtccttaaacggcctcgccatgtgcattgtcacttgtgctgtccagatgggcacatgcagcatgctgtgctcacagcccgccggcacggcagggatttgtatcgttgtgcccgtgtcagctcctggggagatcttttacctgtgcttactccgtctgcgtttcctccatctacggctcaggatccctctgagagttgatgaggatgtgtaacaagtattttcttctatcgtgcctgccagggctgaagctgcctggtatccaggaggggaatgctggtatccccatatgtctgtgtttgtttgagatttttaataataaataataaatttttgaagaa

SEQ ID NO: 373912 - DNA, 1190 bp, Homo sapiens
ggaagcttgtgtgcgtgtagggggagtctatagaatacccgagcgagagagaacgaagatgatctgagtgtagcaaggctaaatgcactaagctgaattacagtacacattagtcagggactgagctacactgagggactgagcctggtgtatatggcagcaagactggatggtggctttgcagcagtctccagagcattccatgagatccgggctcgaaatccagcatttcagccacaaactttgatggactttggctcaggtactggttctgtcacctgggctgctcacagtatttggggccagagcctacgtgaatatatgtgtgtggacagatcagctgccatgttggttttggcagaaaaactactgaaaggtggttcagaatctggggagccttatattccaggtgtctttttcagacagtttctacctgtatcacccaaggtgcagtttgatgtagtagtgtcagctttttccttaagtgaactgcccagcaaggctgaccgcactgaggtagttcaaaccttatggcgtaagacaggtcatttcctggtactggtggagaatggaacaaaagctgggcacagccttctcatggatgccagggatctggtccttaagggaaaagagaagtcacctttggaccctcgacctggttttgtctttgccccgtgtccccatgaactcccttgtccccagttgaccaacctggcctgtagcttctcacaggcgtaccatcccatccccttcagctggaacaagaaaccaaaggaagaaaagttctctatggtgatccttgctcgggggtctccagaggaggctcatcgctggccccgtatcactcagcctgtccttaaacggcctcgccatgtgcattgtcacttgtgctgtccagatgggcacatgcagcatgctgtgctcacagcccgccggcacggcagggatttgtatcgttgtgcccgtgtcagctcctggggagatcttttacctgtgcttactccgtctgcgtttcctccatctacggctcaggatccctctgagagttgatgaggatgtgtaacaagtattttcttctatcgtgcctgccagggctgaagctgcctggtatccaggaggggaatgctggtatccccatatgtctgtgtttgtttgagatttttaataataaataataaatttttgaagaa

SEQ ID NO: 373913 - DNA, 872 bp, Homo sapiens
ggctggtctggtccggaaggtccttaggatgacagtttctacctgtatcacccaaggtgcagtttgatgtagtagtgtcagctttttccttaagtgaactgcccagcaaggctgaccgcactgaggtagttcaaaccttatggcgtaagacaggtcatttcctggtactggtggagaatggaacaaaagctgggcacagccttctcatggatgccagggatctggtccttaagggaaaagagaagtcacctttggaccctcgacctggttttgtctttgccccgtgtccccatgaactcccttgtccccagttgaccaacctggcctgtagcttctcacaggcgtaccatcccatccccttcagctggaacaagaaaccaaaggaagaaaagttctctatggtgatccttgctcgggggtctccagaggaggctcatcgctggccccgtatcactcagcctgtccttaaacggcctcgccatgtgcattgtcacttgtgctgtccagatgggcacatgcagcatgctgtgctcacagcccgccggcacggcaggtatggggggtgtgaccaaaatcagtgggatgtggcaggaagctgcagcccacgccagcatctgtttccacagggatttgtatcgttgtgcccgtgtcagctcctggggagatcttttacctgtgcttactccgtctgcgtttcctccatctacggctcaggatccctctgagagttgatgaggatgtgtaacaagtattttcttctatcgtgcctgccagggctgaagctgcctggtatccaggaggggaatgctggtatccccatatgtctgtgtttgtttgagatttttaataataaataataaatttttgaagaa

SEQ ID NO: 373914 - DNA, 1013 bp, Homo sapiens
gccggtgaccaggcccaacgcagccttcaagtcggcccaaacacggtttctgcctcaaggattatttatataaccattgcttattggctgctggcaaacactcgctcttctcgttggctgaaactgtcgggagaagttctgcgaaggctgctccttgcggcgttgggactgagggtcacaggcacctatatttccgtttccggttcgcctccggagccatggcggcggcactgaagtgtctactgacattaggaagatggtgccccggccttggagtggctccccaggcccgggcgctcgccgccttagtacccggagtgacccaggtagataacaagtccggtttcctgcagaagaggcctcatcgccagcaccctggcatcctaaagctgccgcacgtgcggctgccacaggcactggctaacggtgcccagttattgctacttgggagcgctgggcccactatggagaatcaggtgcaaacactgaccagttatctctggagcagacatttgcctgtagagccagaggagttgcaaagacgggctaggcatcttgagaaaaaattcctggaaaacccagacttatctcagacagaggagaaacttcgtggagcagtgctacacgcactacgtaaaactacctaccattggcaagaactgagctacactgagggactgagcctggtgtatatggcagcaagactggatggtggctttgcagcagtctccagagcattccatgaggtgaaagtcccttaacttccaacctgaactttttgaccatcagttccctattcataaagtagttttctaggatggggattcttgggacattgcatatgcattttttttttaaagaggatctccgctggacatagtgggctcctgcctgcagtcccaactgtttgggaggctgaggcaggaggattgcttgagccagtttgaggctgcagtgagctgtgatctccactgtactccagcctggtgacagagtgagacctcatctcttaa

SEQ ID NO: 373915 - DNA, 538 bp, Homo sapiens
  misc_feature (489)..(489): n is a, c, g, or t
  misc_feature (496)..(496): n is a, c, g, or t
gccggtgaccaggcccaacgcagccttcaagtcggcccaaacacggtttctgcctcaaggattatttatataaccattgcttattggctgctggcaaacactcgctcttctcgttggctgaaactgtcgggagaagttctgcgaaggctgctccttgcggcgttgggactgagggtcacaggcacctatatttccgtttccggttcgcctccggagccatggcggcggcactgaagtgtctactgacattaggaagatggtgccccggccttggagtggctccccaggcccgggcgctcgccgccttagtacccggagtgacccaggtagataacaagtccggtttcctgcagaagaggcctcatcgccagcaccctggcatcctaaagctgccgcacgtgcggctgccacaggcactggctaacggtgcccagttattgctacttgcgagcgctgggcccgctgtggccaatcaggcgcttgcgctgnccagggntgggtggggcgggcctccggctggggagcctgatggggcctt

SEQ ID NO: 373916 - DNA, 581 bp, Homo sapiens
atgggccacaacccgctctagcttgaaggcaccaccgcaaaggtcagccagagggggatacagggaacacccctatggtagatattgaaggtccttcccacctgtgacctcacctcaaagacaattcatagcctgtggtctccacataaacagcaacaagacaagtaatagtcctttttttgtttgtttgtttctattctagggataactgctcatgattactcccatatatttctagtatttccctctgtactgttggcgtgacattgacactagtattattttacaaaacagactgaaaaagacattagcaagcatagtctataaacctttcagtaggatgatattctcttggttgtttttcattgttgtgtgtaatcttttttttttctttttctttttttttttttgtgaggaaaaggcatgaatttgttaacagattttgagtctcaaccaactagcagaaactttgtttagggttggctaaaagctgttaatagagatttgtggaacctgataataaagttgtagataagatgttttaacctgtcttttaatatctgttagttagacaaagatgt

SEQ ID NO: 373917 - DNA, 675 bp, Homo sapiens
atgggccacaacccgctctagcttgaaggcaccaccgcaaaggtcagccagagggggatacagggaacacccctatggtagatattgaaggtccttcccacctgtgacctcacctcaaagacaattcatagcctgtggtctccacataaacagcaacaagacaagtacccacaaacaaagaacacataattgaataaccgatgtgatttgctaagaaggatggaggtgaagatgtatgatagaaaaacgaaaaactggaataaacccaagactggctgtttggaggtttaatgtttttaacaatggaggccaaaaaagaagataatttggatttgaaccaatattttcttcatctcaactcacctcaccactacggatccaagcctgacacagagcctaacagaaatactttcctccaaatacaatcctgttcaccatggaagacattaaaaccttcagtggttgctgctgggggccttcaccaaaatgcagccattcaccttgctgctgggggccttcaccaaaatgcagccattcacctttgcttttgctctacctacaaaaaatgttcattggctcactcccgaggtcaactttgattcaaagatagtcttcagttaccaaaccttatcacatgactgtaaaactagataataaacaagtgtttaaaatatg

SEQ ID NO: 373918 - DNA, 4060 bp, Homo sapiens
ggccgagctgagggaggacctgctggctgcagtgaggagcggaggcgggcgcgggcggccggccatgatcgcgtcgtgcttgtgttacctgctgctgccggccacgcgcctcttccgcgccctctcagatgctttcttcacatgtcgaaaaaatgtccttctggcgaacagctcatccccccaggtagagggcgactttgccatggcccctcggggccctgagcaggaggaatgtgagggcctgctgcagcagtggcgagaagaagggttgagccaggtgctctcaactgcaagtgaggggccccttatagataaaggactagcccagagcagcctggcacttctgatggataatcctggagaagagaatgctgcttcagaggacaggtggtccagcaggcagctgagtgaccttcgggctgcagagaacctggatgagcctttccctgagatgctaggagaggagccactgctggaggtggagggggtggagggctccatgtgggcagctatccccatgcagtcggagccccagtatgcagactgtgctgccctcccagtgggtgccctggccacagagcagtgggaagaggacccagcggtgttggcctggagcatagcacctgagcctgtgccccaggaagaggcttccatctggccctttgagggcctggggcagttgcagcctcccgcagtggaaataccatatcatgaaattttgtggcgagaatgggaggatttctccacccagccagatgctcagggcctgaaggcaggagatggccctcagttccagttcactctgatgtcttataacatcctggctcaggacctgatgcagcagagctcagagctctatctacattgccatccagacatcctcaattggaactatcgcttcgtgaacctcatgcaggaattccagcactgggaccctgatatcctgtgtctccaggaagtccaggaagatcattactgggagcagctggaaccctctctgcgaatgatgggctttacctgtttctacaagaggaggactgggtgtaaaaccgatggctgtgctgtctgctacaagcctaccagattccgcctgctctgtgctagccctgtggagtacttccggcctggcttggagctacttaatcgggataatgtgggcttagtgttgctactgcaaccactcgtcccagaaggcctgggacaagtctcggtggccccgctgtgtgtggcaaatacccatatcctttacaacccacgccggggcgatgtcaagctggcccagatggccattctcctggcggaagtggacaaggtggccagactgtcagatggcagccactgccccatcatcttgtgcggggacctaaattctgtccctgattcacctctctacaacttcatcagggatggagagctccagtaccatgggatgccagcctggaaggtatctggacaggaagacttctcccatcagctttaccagaggaagctgcaggccccactgtggcccagctccctgggcatcactgattgctgtcagtatgtcacctcctgtcaccccaagagatcagagagacgcaagtatggccgagacttcctgctacgtttccgcttctgcagcatcgcttgtcagcgaccagtaggactggtccttatggaaggagtgacagatactaagccagagcgacctgcgggttgggctgagtctgtccttgaggaagatgcatcggagcttgagcctgccttctccaggactgtaggtaccatccagcactgcctccacctgacgtcagtatatacccacttcctgccccagcgtggccgcccagaggtcactacaatgccattgggtcttggaatgacagtagattacatcttcttctcagctgagtcctgtgagaatgggaacagaactgatcacaggctgtatcgagatggaactctcaagctcctgggtcgtctctcccttctctctgaagagatactctgggctgccaatggcttacccaaccccttctgctcttcagaccacctctgcctgctagccagcttcgggatggaagtcaccgccccatgacagggctcccaggggaagagagcttctcttccagaagagctcactggatcagagactgtggaaaaatcccatgcatctagaaacttagatccaagaaacttacatcccctcccttccccctcctcgttccctttttcccacggttagactttctccaggcctggctgcgttctctgcctgtggtccttgccccaccccagcctcttcctaatcctgtgccacacactcagtggccctgggagaggcagaaggggggctcccccttccttccatgtatccagcgctcccccttgatttttaattaccagggttatgggagttcttgatttcattggttatttgctttcaggccgtttcttgatgtaccttctgacctgaccttttccctgccttcaggacttctgggcccagccctcttgccaggcatgcatatgtgagatatgcatatcatgtatgtgtcctcttggggtgagacttctgcacagccatgcctgcctctgaccagtccacttttcatgttggggctgtaggcctggggcaggttcagagtctacccaagtacctatgtatgagcaggcagcagcagggcatggccccatctctccttttagcctctgtgtttcattaggcattcatcctgccaaccagggcaggcccggcgtctgggctctgggaacaaatggggcccacatcctggagtggcaaattttgggggatgcgctacctgtcccagcgggccctgtgcctccaacccagagctccccacagacctggtgtaatttcacaagggccatccctttccccaggcttccctgagggaggcggaagtttgaacccttatgtggggttcattgggctagggtagtggtatgaggtttaaaactatttaaggattaggaggagaaagagtcttcaggaaactcttgtttcactggactctgcagcctgcagaactggggcaagggtaggagttccagtaggggaaggagcaggtagactcttcagctgcctcagctgggactgaagacctaagctgattctctttcctctccactcctaagaagcaattttctgttcctctccttccaccactttttactttctgctatctcccatctcccgcttcccttccatttcctttctagaaaaccctggtatttagctcaggccaaactgcctcagcagaaaggtggccttggacaaaactggtccaagaatttgaagtggcagtacttgcggattggctctgtccagcaaggcctcagctgcttgttgcgtctgctttccctcccctaacagaagggtaccctggcttattcaggggactccttagtccacactgtgtcacctgcatgccttaatctttcattgctggggtgtggccttgggagatcctgggccagcccctccacacatctccctaagtcagagtggctgctggccctggtagatttgacttgctcttgcctcactcgacctccaaagtgggactgaagacagtggtcaagagacttgagttcgggacagtaagccaggggttaaggttctttcctttttttgaaagccaaagacccagtttgcattgtgctgctgcattcatggttagaagctttccatgcctaggttctagggaatttatttttctatgtgtatatattttcaaactttgtttcctgggtactgggcatgtgcctgtctgagccccaggtctgtctacaccccaccattcattctgtctgtctgttccctggacactgcctaaaagggtctcaagacagtgccctgtgggttcctaggactagggcccatcactgttctcttctgctgggaaatgcagctttaaaatggctaaccacagcagagggcagatgcttgatagattatcttttccttgctttcttgtttctgttttgaaagtgaaatggggttttaaattgttatttaaactctttttccaaataaaggtttaccttttttcccccc

SEQ ID NO: 373919 - DNA, 6979 bp, Homo sapiens
ggccgagctgagggaggacctgctggctgcagtgaggagcggaggcgggcgcgggcggccggccatgatcgcgtcgtgcttgtgttacctgctgctgccggccacgcgcctcttccgcgccctctcagatgctttcttcacatgtcgaaaaaatgtccttctggcgaacagctcatccccccaggtagagggcgactttgccatggcccctcggggccctgagcaggaggaatgtgagggcctgctgcagcagtggcgagaagaagggttgagccaggtgctctcaactgcaagtgaggggccccttatagataaaggactagcccagagcagcctggcacttctgatggataatcctggagaagagaatgctgcttcagaggacaggtggtccagcaggcagctgagtgaccttcgggctgcagagaacctggatgagcctttccctgagatgctaggagaggagccactgctggaggtggagggggtggagggctccatgtgggcagctatccccatgcagtcggagccccagtatgcagactgtgctgccctcccagtgggtgccctggccacagagcagtgggaagaggacccagcggtgttggcctggagcatagcacctgagcctgtgccccaggaagaggcttccatctggccctttgagggcctggggcagttgcagcctcccgcagtggaaataccatatcatgaaattttgtggcgagaatgggaggatttctccacccagccagatgctcagggcctgaaggcaggagatggccctcagttccagttcactctgatgtcttataacatcctggctcaggacctgatgcagcagagctcagagctctatctacattgccatccagacatcctcaattggaactatcgcttcgtgaacctcatgcaggaattccagcactgggaccctgatatcctgtgtctccaggaagtccaggaagatcattactgggagcagctggaaccctctctgcgaatgatgggctttacctgtttctacaagaggaggactgggtgtaaaaccgatggctgtgctgtctgctacaagcctaccagattccgcctgctctgtgctagccctgtggagtacttccggcctggcttggagctacttaatcgggataatgtgggcttagtgttgctactgcaaccactcgtcccagaaggcctgggacaagtctcggtggccccgctgtgtgtggcaaatacccatatcctttacaacccacgccggggcgatgtcaagctggcccagatggccattctcctggcggaagtggacaaggtggccagactgtcagatggcagccactgccccatcatcttgtgcggggacctaaattctgtccctgattcacctctctacaacttcatcagggatggagagctccagtaccatgggatgccagcctggaaggtatctggacaggaagacttctcccatcagctttaccagaggaagctgcaggccccactgtggcccagctccctgggcatcactgattgctgtcagtatgtcacctcctgtcaccccaagagatcagagagacgcaagtatggccgagacttcctgctacgtttccgcttctgcagcatcgcttgtcagcgaccagtaggactggtccttatggaaggagtgacagatactaagccagagcgacctgcgggttgggctgagtctgtccttgaggaagatgcatcggagcttgagcctgccttctccaggactgtaggtaccatccagcactgcctccacctgacgtcagtatatacccacttcctgccccagcgtggccgcccagaggtcactacaatgccattgggtcttggaatgacagtagattacatcttcttctcagctgagtcctgtgagaatgggaacagaactgatcacaggctgtatcgagatggaactctcaagctcctgggtcgtctctcccttctctctgaagagatactctgggctgccaatggcttacccaaccccttctgctcttcagaccacctctgcctgctagccagcttcgggatggaagtcaccgccccatgacagggctcccaggggaagagagcttctcttccagaagagctcactggatcagagactgtggaaaaatcccatgcatctagaaacttagatccaagaaacttacatcccctcccttccccctcctcgttccctttttcccacggttagactttctccaggcctggctgcgttctctgcctgtggtccttgccccaccccagcctcttcctaatcctgtgccacacactcagtggccctgggagaggcagaaggggggctcccccttccttccatgtatccagcgctcccccttgatttttaattaccagggttatgggagttcttgatttcattggttatttgctttcaggccgtttcttgatgtaccttctgacctgaccttttccctgccttcaggacttctgggcccagccctcttgccaggcatgcatatgtgagatatgcatatcatgtatgtgtcctcttggggtgagacttctgcacagccatgcctgcctctgaccagtccacttttcatgttggggctgtaggcctggggcaggttcagagtctacccaagtacctatgtatgagcaggcagcagcagggcatggccccatctctccttttagcctctgtgtttcattaggcattcatcctgccaaccagggcaggcccggcgtctgggctctgggaacaaatggggcccacatcctggagtggcaaattttgggggatgcgctacctgtcccagcgggccctgtgcctccaacccagagctccccacagacctggtgtaatttcacaagggccatccctttccccaggcttccctgagggaggcggaagtttgaacccttatgtggggttcattgggctagggtagtggtatgaggtttaaaactatttaaggattaggaggagaaagagtcttcaggaaactcttgtttcactggactctgcagcctgcagaactggggcaagggtaggagttccagtaggggaaggagcaggtagactcttcagctgcctcagctgggactgaagacctaagctgattctctttcctctccactcctaagaagcaattttctgttcctctccttccaccactttttactttctgctatctcccatctcccgcttcccttccatttcctttctagaaaaccctggtatttagctcaggccaaactgcctcagcagaaaggtggccttggacaaaactggtccaagaatttgaagtggcagtacttgcggattggctctgtccagcaaggcctcagctgcttgttgcgtctgctttccctcccctaacagaagggtaccctggcttattcaggggactccttagtccacactgtgtcacctgcatgccttaatctttcattgctggggtgtggccttgggagatcctgggccagcccctccacacatctccctaagtcagagtggctgctggccctggtagatttgacttgctcttgcctcactcgacctccaaagtgggactgaagacagtggtcaagagacttgagttcgggacagtaagccaggggttaaggttctttcctttttttgaaagccaaagacccagtttgcattgtgctgctgcattcatggttagaagctttccatgcctaggttctagggaatttatttttctatgtgtatatattttcaaactttgtttcctgggtactgggcatgtgcctgtctgagccccaggtctgtctacaccccaccattcattctgtctgtctgttccctggacactgcctaaaagggtctcaagacagtgccctgtgggttcctaggactagggcccatcactgttctcttctgctgggaaatgcagctttaaaatggctaaccacagcagagggcagatgcttgatagattatcttttccttgctttcttgtttctgttttgaaagtgaaatggggttttaaattgttatttaaactctttttccaaataaaggtttaccttttttccccccaatgttgttcattttattaggatcctgaagggattaggtccttgagagagggcctgaagaatgaggtgggcagaggaagagactaaggagcttttgatcttggggtggggtctcaagacatgaatctagattgagaaatgtgttgtaagatctccctctattagctgaggtaaattcccactgctgtgaggcctgggaggaacagggcttgagtgaagcctcctgccttgacactgctggggtacagctttcttctgtccttcccaagtgagagaatgattctttggactgcttttcattcttcctccatctgctccccccatgcctcctcctagtatcttctgcacttcaggagggtctgtgcaaagtgggataagatgtgtgttttcctgattaaagctatggcagctgcatgagacatgatgcgggtggcacatgcctcttgctgagcatctatttctgatctcttttgcattctggagccagggctgagcagtgggccatctgtcgctggaaaaatgtctcttccttcctaggcctacctctgttggtgcttttgtcttccaacctccctatgtagtaagaccagccaagcccacatgcccactgggagccctgaaaccagatctggttttctgtcttacctgaacaggttcccagaacccacaccaggcctctgaatcagtctctgagaatctgattgatttaaagccacttggttgcttccattgcactacctgggttgcgatcccctcaattgatttagtaaaaagaaaacttagcggccgggtgcggtggctcacacctgtaatcccagcactttgggaggctgaggcgggtggatcacctgaggtcgagagttccagaccagcctgaccaacatgaagaaatcccgtctctactaaaaatacaaaattagccgggcgtgatggcgcatgcctgtaatcccagctacttggaggctgaggcaggagaattgcttgaacctgggaagcggaggttgtggtgagccgagatcatgccattgcactccagcctggacaacaagagtgaaactccatctcaaaaaaaaaaaaaaaaagaaaagaaaagaaagaaaactcagctaggaattagaaacatcatttgtcctcttggcctgttcagctggtgactgtagatttgatgaaaaggaaacttgggactccggaggaccaagatggagcgagacggtcaatactgatggacttgcagctagcaccatggcagccctgcctggtctaaggaagctggcaggaggcgatggtacctggcgggggcagactgcccacctccccactccttcagaggactgtttcctgcccttcacaccatcatcatgttgggccctgcatgtatgttcctgcacttggagcgagcccagggacacagggcagacactgggctcacagatgttgctgcagctgagccagaaaacattccaggcaggaaaagcaggtgcacacattcacacaggcctctggtcactcgaccagccagaatgagacggactccttgacctgggaagtcaagtcccagtgggaagggctggaaatcacacgtggtcaacttcttggctctctctgctccccaaaccctggccctaggcttgctttatcatcacatcccaaggccagagggctgctgctgtccccatcttggccctgctagaagagggataggggtggctggcatgatgggtgaggggaacatgagaatatgcagaggccttggaggaagaggactggcagttatgacaggaaggctctctatacctggctccccagtgttctgcccctggcactgagcatgaggagccaggctttggggagactttgcaatcacccccccaacctggtccattttccacaggtagctttcttgaactcaccttgacccctcctcagccagcagcccccacctccaggggcaaaggagctgaaagacagtcctgaactggggggagctgggatcacatcagccaggccctgtccctcacaggaagtgagatgaggtgataccatggatggtgactaaggccccaaagtccctgcctctctgcctccccagaaacctcacagccaggccagcccccagagcagagcctgtgtaaacatgcccaggaggggaggaggggttgctacatatgagaaacagttaaaaataaatttaaaaagcaccactatgtcctgtgctggtctccacagccccgaagtctcagctcaggaagggtgagtgctgggggattatcagctggggctcggctccctcccttgcagacagcaagcaggtaagggcttcattttgctgttttctccatggagggctctgggaaaggatcctgcaagttggaacctcctaagactccagaaccaggagcggctccctctcatatctactcccctcaaaccctgtcattcccgggaagctcccagaggcagctgaggccacgcccctgctcctgagcggcagcatccagacccggaaaggacctagtttcagcctggcacctcccaaggtgagccatctcttcttaggcatagtaggaacatggagaccacactacccccactccctgaaagctgggatgggatggtgagtcaagggtcaccatgcccctattagtctggctggagttaggttaggcatcctcccagggctcattgaccccagggggaacttggggaggcaagggactgaccagctggcctcccagggtgcctctggccaggccatgctggatctggctctgggtcaagcgctgctggtttgaagagctgccagcctgtggcgccttccctgacaggcactctcatcagcaaaggcatccctggttctgccttcccttcctctttgcttcaaaggcaccatccgtctccctggcaggccaagagctacact

SEQ ID NO: 373920 - DNA, 7138 bp, Homo sapiens
ggccgagctgagggaggacctgctggctgcagtgaggagcggaggcgggcgcgggcggccggccatgatcgcgtcgtgcttgtgttacctgctgctgccggccacgcgcctcttccgcgccctctcagatgctttcttcacatgtcgaaaaaatgtccttctggcgaacagctcatccccccaggtagagggcgactttgccatggcccctcggggccctgagcaggaggaatgtgagggcctgctgcagcagtggcgagaagaagggttgagccaggtgctctcaactgcaagtgaggggccccttatagataaaggactagcccagagcagcctggcacttctgatggataatcctggagaagagaatgctgcttcagaggacaggtggtccagcaggcagctgagtgaccttcgggctgcagagaacctggatgagcctttccctgagatgctaggagaggagccactgctggaggtggagggggtggagggctccatgtgggcagctatccccatgcagtcggagccccagtatgcagactgtgctgccctcccagtgggtgccctggccacagagcagtgggaagaggacccagcggtgttggcctggagcatagcacctgagcctgtgccccaggaagaggcttccatctggccctttgagggcctggggcagttgcagcctcccgcagtggaaataccatatcatgaaattttgtggcgagaatgggaggatttctccacccagccagatgctcagggcctgaaggcaggagatggccctcagttccagttcactctgatgtcttataacatcctggctcaggacctgatgcagcagagctcagagctctatctacattgccatccagacatcctcaattggaactatcgcttcgtgaacctcatgcaggaattccagcactgggaccctgatatcctgtgtctccaggaagtccaggaagatcattactgggagcagctggaaccctctctgcgaatgatgggctttacctgtttctacaagaggaggactgggtgtaaaaccgatggctgtgctgtctgctacaagcctaccagattccgcctgctctgtgctagccctgtggagtacttccggcctggcttggagctacttaatcgggataatgtgggcttagtgttgctactgcaaccactcgtcccagaaggcctgggacaagtctcggtggccccgctgtgtgtggcaaatacccatatcctttacaacccacgccggggcgatgtcaagctggcccagatggccattctcctggcggaagtggacaaggtggccagactgtcagatggcagccactgccccatcatcttgtgcggggacctaaattctgtccctgattcacctctctacaacttcatcagggatggagagctccagtaccatgggatgccagcctggaaggtatctggacaggaagacttctcccatcagctttaccagaggaagctgcaggccccactgtggcccagctccctgggcatcactgattgctgtcagtatgtcacctcctgtcaccccaagagatcagagagacgcaagtatggccgagacttcctgctacgtttccgcttctgcagcatcgcttgtcagcgaccagtaggactggtccttatggaaggagtgacagatactaagccagagcgacctgcgggttgggctgagtctgtccttgaggaagatgcatcggagcttgagcctgccttctccaggactgtaggtaccatccagcactgcctccacctgacgtcagtatatacccacttcctgccccagcgtggccgcccagaggtcactacaatgccattgggtcttggaatgacagtagattacatcttcttctcagctgagtcctgtgagaatgggaacagaactgatcacaggctgtatcgagatggaactctcaagctcctgggtcgtctctcccttctctctgaagagatactctgggctgccaatggcttacccaaccccttctgctcttcagaccacctctgcctgctagccagcttcgggatggaagtcaccgccccatgacagggctcccaggggaagagagcttctcttccagaagagctcactggatcagagactgtggaaaaatcccatgcatctagaaacttagatccaagaaacttacatcccctcccttccccctcctcgttccctttttcccacggttagactttctccaggcctggctgcgttctctgcctgtggtccttgccccaccccagcctcttcctaatcctgtgccacacactcagtggccctgggagaggcagaaggggggctcccccttccttccatgtatccagcgctcccccttgatttttaattaccagggttatgggagttcttgatttcattggttatttgctttcaggccgtttcttgatgtaccttctgacctgaccttttccctgccttcaggacttctgggcccagccctcttgccaggcatgcatatgtgagatatgcatatcatgtatgtgtcctcttggggtgagacttctgcacagccatgcctgcctctgaccagtccacttttcatgttggggctgtaggcctggggcaggttcagagtctacccaagtacctatgtatgagcaggcagcagcagggcatggccccatctctccttttagcctctgtgtttcattaggcattcatcctgccaaccagggcaggcccggcgtctgggctctgggaacaaatggggcccacatcctggagtggcaaattttgggggatgcgctacctgtcccagcgggccctgtgcctccaacccagagctccccacagacctggtgtaatttcacaagggccatccctttccccaggcttccctgagggaggcggaagtttgaacccttatgtggggttcattgggctagggtagtggtatgaggtttaaaactatttaaggattaggaggagaaagagtcttcaggaaactcttgtttcactggactctgcagcctgcagaactggggcaagggtaggagttccagtaggggaaggagcaggtagactcttcagctgcctcagctgggactgaagacctaagctgattctctttcctctccactcctaagaagcaattttctgttcctctccttccaccactttttactttctgctatctcccatctcccgcttcccttccatttcctttctagaaaaccctggtatttagctcaggccaaactgcctcagcagaaaggtggccttggacaaaactggtccaagaatttgaagtggcagtacttgcggattggctctgtccagcaaggcctcagctgcttgttgcgtctgctttccctcccctaacagaagggtaccctggcttattcaggggactccttagtccacactgtgtcacctgcatgccttaatctttcattgctggggtgtggccttgggagatcctgggccagcccctccacacatctccctaagtcagagtggctgctggccctggtagatttgacttgctcttgcctcactcgacctccaaagtgggactgaagacagtggtcaagagacttgagttcgggacagtaagccaggggttaaggttctttcctttttttgaaagccaaagacccagtttgcattgtgctgctgcattcatggttagaagctttccatgcctaggttctagggaatttatttttctatgtgtatatattttcaaactttgtttcctgggtactgggcatgtgcctgtctgagccccaggtctgtctacaccccaccattcattctgtctgtctgttccctggacactgcctaaaagggtctcaagacagtgccctgtgggttcctaggactagggcccatcactgttctcttctgctgggaaatgcagctttaaaatggctaaccacagcagagggcagatgcttgatagattatcttttccttgctttcttgtttctgttttgaaagtgaaatggggttttaaattgttatttaaactctttttccaaataaaggtttaccttttttccccccaatgttgttcattttattaggatcctgaagggattaggtccttgagagagggcctgaagaatgaggtgggcagaggaagagactaaggagcttttgatcttggggtggggtctcaagacatgaatctagattgagaaatgtgttgtaagatctccctctattagctgaggtaaattcccactgctgtgaggcctgggaggaacagggcttgagtgaagcctcctgccttgacactgctggggtacagctttcttctgtccttcccaagtgagagaatgattctttggactgcttttcattcttcctccatctgctccccccatgcctcctcctagtatcttctgcacttcaggagggtctgtgcaaagtgggataagatgtgtgttttcctgattaaagctatggcagctgcatgagacatgatgcgggtggcacatgcctcttgctgagcatctatttctgatctcttttgcattctggagccagggctgagcagtgggccatctgtcgctggaaaaatgtctcttccttcctaggcctacctctgttggtgcttttgtcttccaacctccctatgtagtaagaccagccaagcccacatgcccactgggagccctgaaaccagatctggttttctgtcttacctgaacaggttcccagaacccacaccaggcctctgaatcagtctctgagaatctgattgatttaaagccacttggttgcttccattgcactacctgggttgcgatcccctcaattgatttagtaaaaagaaaacttagcggccgggtgcggtggctcacacctgtaatcccagcactttgggaggctgaggcgggtggatcacctgaggtcgagagttccagaccagcctgaccaacatgaagaaatcccgtctctactaaaaatacaaaattagccgggcgtgatggcgcatgcctgtaatcccagctacttggaggctgaggcaggagaattgcttgaacctgggaagcggaggttgtggtgagccgagatcatgccattgcactccagcctggacaacaagagtgaaactccatctcaaaaaaaaaaaaaaaaagaaaagaaaagaaagaaaactcagctaggaattagaaacatcatttgtcctcttggcctgttcagctggtgactgtagtcccagatgtctatggattcctgcgggtcacctctccttttcctgctgccatgcctcctcctcccctggtcactaccacaccactgaaaatgagggggtcttggcggtgcgaagctacacttctagccacgatcttgtggggactggctgggatgaaaaatttgatgaaaaggaaacttgggactccggaggaccaagatggagcgagacggtcaatactgatggacttgcagctagcaccatggcagccctgcctggtctaaggaagctggcaggaggcgatggtacctggcgggggcagactgcccacctccccactccttcagaggactgtttcctgcccttcacaccatcatcatgttgggccctgcatgtatgttcctgcacttggagcgagcccagggacacagggcagacactgggctcacagatgttgctgcagctgagccagaaaacattccaggcaggaaaagcaggtgcacacattcacacaggcctctggtcactcgaccagccagaatgagacggactccttgacctgggaagtcaagtcccagtgggaagggctggaaatcacacgtggtcaacttcttggctctctctgctccccaaaccctggccctaggcttgctttatcatcacatcccaaggccagagggctgctgctgtccccatcttggccctgctagaagagggataggggtggctggcatgatgggtgaggggaacatgagaatatgcagaggccttggaggaagaggactggcagttatgacaggaaggctctctatacctggctccccagtgttctgcccctggcactgagcatgaggagccaggctttggggagactttgcaatcacccccccaacctggtccattttccacaggtagctttcttgaactcaccttgacccctcctcagccagcagcccccacctccaggggcaaaggagctgaaagacagtcctgaactggggggagctgggatcacatcagccaggccctgtccctcacaggaagtgagatgaggtgataccatggatggtgactaaggccccaaagtccctgcctctctgcctccccagaaacctcacagccaggccagcccccagagcagagcctgtgtaaacatgcccaggaggggaggaggggttgctacatatgagaaacagttaaaaataaatttaaaaagcaccactatgtcctgtgctggtctccacagccccgaagtctcagctcaggaagggtgagtgctgggggattatcagctggggctcggctccctcccttgcagacagcaagcaggtaagggcttcattttgctgttttctccatggagggctctgggaaaggatcctgcaagttggaacctcctaagactccagaaccaggagcggctccctctcatatctactcccctcaaaccctgtcattcccgggaagctcccagaggcagctgaggccacgcccctgctcctgagcggcagcatccagacccggaaaggacctagtttcagcctggcacctcccaaggtgagccatctcttcttaggcatagtaggaacatggagaccacactacccccactccctgaaagctgggatgggatggtgagtcaagggtcaccatgcccctattagtctggctggagttaggttaggcatcctcccagggctcattgaccccagggggaacttggggaggcaagggactgaccagctggcctcccagggtgcctctggccaggccatgctggatctggctctgggtcaagcgctgctggtttgaagagctgccagcctgtggcgccttccctgacaggcactctcatcagcaaaggcatccctggttctgccttcccttcctctttgcttcaaaggcaccatccgtctccctggcaggccaagagctacact

SEQ ID NO: 373921 - DNA, 7121 bp, Homo sapiens
ggccgacgtccctcgtgggcggcccctcctcccgcctgttgtcagatggcgtccggccgcggttaaggtggagaggagctgtggacgggcagggccctttcctggccctgggggtgcagagaaattgtggggtcggccaagtcagcaccccggcgggtcgggaaggggtagtagctcggacctaggcgagtgcccaaattctcagcgggcgaggcgggtcggctctgggaggtttatggccgaagtactggacgcaccgatcttccccagatgctttcttcacatgtcgaaaaaatgtccttctggcgaacagctcatccccccaggtagagggcgactttgccatggcccctcggggccctgagcaggaggaatgtgagggcctgctgcagcagtggcgagaagaagggttgagccaggtgctctcaactgcaagtgaggggccccttatagataaaggactagcccagagcagcctggcacttctgatggataatcctggagaagagaatgctgcttcagaggacaggtggtccagcaggcagctgagtgaccttcgggctgcagagaacctggatgagcctttccctgagatgctaggagaggagccactgctggaggtggagggggtggagggctccatgtgggcagctatccccatgcagtcggagccccagtatgcagactgtgctgccctcccagtgggtgccctggccacagagcagtgggaagaggacccagcggtgttggcctggagcatagcacctgagcctgtgccccaggaagaggcttccatctggccctttgagggcctggggcagttgcagcctcccgcagtggaaataccatatcatgaaattttgtggcgagaatgggaggatttctccacccagccagatgctcagggcctgaaggcaggagatggccctcagttccagttcactctgatgtcttataacatcctggctcaggacctgatgcagcagagctcagagctctatctacattgccatccagacatcctcaattggaactatcgcttcgtgaacctcatgcaggaattccagcactgggaccctgatatcctgtgtctccaggaagtccaggaagatcattactgggagcagctggaaccctctctgcgaatgatgggctttacctgtttctacaagaggaggactgggtgtaaaaccgatggctgtgctgtctgctacaagcctaccagattccgcctgctctgtgctagccctgtggagtacttccggcctggcttggagctacttaatcgggataatgtgggcttagtgttgctactgcaaccactcgtcccagaaggcctgggacaagtctcggtggccccgctgtgtgtggcaaatacccatatcctttacaacccacgccggggcgatgtcaagctggcccagatggccattctcctggcggaagtggacaaggtggccagactgtcagatggcagccactgccccatcatcttgtgcggggacctaaattctgtccctgattcacctctctacaacttcatcagggatggagagctccagtaccatgggatgccagcctggaaggtatctggacaggaagacttctcccatcagctttaccagaggaagctgcaggccccactgtggcccagctccctgggcatcactgattgctgtcagtatgtcacctcctgtcaccccaagagatcagagagacgcaagtatggccgagacttcctgctacgtttccgcttctgcagcatcgcttgtcagcgaccagtaggactggtccttatggaaggagtgacagatactaagccagagcgacctgcgggttgggctgagtctgtccttgaggaagatgcatcggagcttgagcctgccttctccaggactgtaggtaccatccagcactgcctccacctgacgtcagtatatacccacttcctgccccagcgtggccgcccagaggtcactacaatgccattgggtcttggaatgacagtagattacatcttcttctcagctgagtcctgtgagaatgggaacagaactgatcacaggctgtatcgagatggaactctcaagctcctgggtcgtctctcccttctctctgaagagatactctgggctgccaatggcttacccaaccccttctgctcttcagaccacctctgcctgctagccagcttcgggatggaagtcaccgccccatgacagggctcccaggggaagagagcttctcttccagaagagctcactggatcagagactgtggaaaaatcccatgcatctagaaacttagatccaagaaacttacatcccctcccttccccctcctcgttccctttttcccacggttagactttctccaggcctggctgcgttctctgcctgtggtccttgccccaccccagcctcttcctaatcctgtgccacacactcagtggccctgggagaggcagaaggggggctcccccttccttccatgtatccagcgctcccccttgatttttaattaccagggttatgggagttcttgatttcattggttatttgctttcaggccgtttcttgatgtaccttctgacctgaccttttccctgccttcaggacttctgggcccagccctcttgccaggcatgcatatgtgagatatgcatatcatgtatgtgtcctcttggggtgagacttctgcacagccatgcctgcctctgaccagtccacttttcatgttggggctgtaggcctggggcaggttcagagtctacccaagtacctatgtatgagcaggcagcagcagggcatggccccatctctccttttagcctctgtgtttcattaggcattcatcctgccaaccagggcaggcccggcgtctgggctctgggaacaaatggggcccacatcctggagtggcaaattttgggggatgcgctacctgtcccagcgggccctgtgcctccaacccagagctccccacagacctggtgtaatttcacaagggccatccctttccccaggcttccctgagggaggcggaagtttgaacccttatgtggggttcattgggctagggtagtggtatgaggtttaaaactatttaaggattaggaggagaaagagtcttcaggaaactcttgtttcactggactctgcagcctgcagaactggggcaagggtaggagttccagtaggggaaggagcaggtagactcttcagctgcctcagctgggactgaagacctaagctgattctctttcctctccactcctaagaagcaattttctgttcctctccttccaccactttttactttctgctatctcccatctcccgcttcccttccatttcctttctagaaaaccctggtatttagctcaggccaaactgcctcagcagaaaggtggccttggacaaaactggtccaagaatttgaagtggcagtacttgcggattggctctgtccagcaaggcctcagctgcttgttgcgtctgctttccctcccctaacagaagggtaccctggcttattcaggggactccttagtccacactgtgtcacctgcatgccttaatctttcattgctggggtgtggccttgggagatcctgggccagcccctccacacatctccctaagtcagagtggctgctggccctggtagatttgacttgctcttgcctcactcgacctccaaagtgggactgaagacagtggtcaagagacttgagttcgggacagtaagccaggggttaaggttctttcctttttttgaaagccaaagacccagtttgcattgtgctgctgcattcatggttagaagctttccatgcctaggttctagggaatttatttttctatgtgtatatattttcaaactttgtttcctgggtactgggcatgtgcctgtctgagccccaggtctgtctacaccccaccattcattctgtctgtctgttccctggacactgcctaaaagggtctcaagacagtgccctgtgggttcctaggactagggcccatcactgttctcttctgctgggaaatgcagctttaaaatggctaaccacagcagagggcagatgcttgatagattatcttttccttgctttcttgtttctgttttgaaagtgaaatggggttttaaattgttatttaaactctttttccaaataaaggtttaccttttttccccccaatgttgttcattttattaggatcctgaagggattaggtccttgagagagggcctgaagaatgaggtgggcagaggaagagactaaggagcttttgatcttggggtggggtctcaagacatgaatctagattgagaaatgtgttgtaagatctccctctattagctgaggtaaattcccactgctgtgaggcctgggaggaacagggcttgagtgaagcctcctgccttgacactgctggggtacagctttcttctgtccttcccaagtgagagaatgattctttggactgcttttcattcttcctccatctgctccccccatgcctcctcctagtatcttctgcacttcaggagggtctgtgcaaagtgggataagatgtgtgttttcctgattaaagctatggcagctgcatgagacatgatgcgggtggcacatgcctcttgctgagcatctatttctgatctcttttgcattctggagccagggctgagcagtgggccatctgtcgctggaaaaatgtctcttccttcctaggcctacctctgttggtgcttttgtcttccaacctccctatgtagtaagaccagccaagcccacatgcccactgggagccctgaaaccagatctggttttctgtcttacctgaacaggttcccagaacccacaccaggcctctgaatcagtctctgagaatctgattgatttaaagccacttggttgcttccattgcactacctgggttgcgatcccctcaattgatttagtaaaaagaaaacttagcggccgggtgcggtggctcacacctgtaatcccagcactttgggaggctgaggcgggtggatcacctgaggtcgagagttccagaccagcctgaccaacatgaagaaatcccgtctctactaaaaatacaaaattagccgggcgtgatggcgcatgcctgtaatcccagctacttggaggctgaggcaggagaattgcttgaacctgggaagcggaggttgtggtgagccgagatcatgccattgcactccagcctggacaacaagagtgaaactccatctcaaaaaaaaaaaaaaaaagaaaagaaaagaaagaaaactcagctaggaattagaaacatcatttgtcctcttggcctgttcagctggtgactgtagatttgatgaaaaggaaacttgggactccggaggaccaagatggagcgagacggtcaatactgatggacttgcagctagcaccatggcagccctgcctggtctaaggaagctggcaggaggcgatggtacctggcgggggcagactgcccacctccccactccttcagaggactgtttcctgcccttcacaccatcatcatgttgggccctgcatgtatgttcctgcacttggagcgagcccagggacacagggcagacactgggctcacagatgttgctgcagctgagccagaaaacattccaggcaggaaaagcaggtgcacacattcacacaggcctctggtcactcgaccagccagaatgagacggactccttgacctgggaagtcaagtcccagtgggaagggctggaaatcacacgtggtcaacttcttggctctctctgctccccaaaccctggccctaggcttgctttatcatcacatcccaaggccagagggctgctgctgtccccatcttggccctgctagaagagggataggggtggctggcatgatgggtgaggggaacatgagaatatgcagaggccttggaggaagaggactggcagttatgacaggaaggctctctatacctggctccccagtgttctgcccctggcactgagcatgaggagccaggctttggggagactttgcaatcacccccccaacctggtccattttccacaggtagctttcttgaactcaccttgacccctcctcagccagcagcccccacctccaggggcaaaggagctgaaagacagtcctgaactggggggagctgggatcacatcagccaggccctgtccctcacaggaagtgagatgaggtgataccatggatggtgactaaggccccaaagtccctgcctctctgcctccccagaaacctcacagccaggccagcccccagagcagagcctgtgtaaacatgcccaggaggggaggaggggttgctacatatgagaaacagttaaaaataaatttaaaaagcaccactatgtcctgtgctggtctccacagccccgaagtctcagctcaggaagggtgagtgctgggggattatcagctggggctcggctccctcccttgcagacagcaagcaggtaagggcttcattttgctgttttctccatggagggctctgggaaaggatcctgcaagttggaacctcctaagactccagaaccaggagcggctccctctcatatctactcccctcaaaccctgtcattcccgggaagctcccagaggcagctgaggccacgcccctgctcctgagcggcagcatccagacccggaaaggacctagtttcagcctggcacctcccaaggtgagccatctcttcttaggcatagtaggaacatggagaccacactacccccactccctgaaagctgggatgggatggtgagtcaagggtcaccatgcccctattagtctggctggagttaggttaggcatcctcccagggctcattgaccccagggggaacttggggaggcaagggactgaccagctggcctcccagggtgcctctggccaggccatgctggatctggctctgggtcaagcgctgctggtttgaagagctgccagcctgtggcgccttccctgacaggcactctcatcagcaaaggcatccctggttctgccttcccttcctctttgcttcaaaggcaccatccgtctccctggcaggccaagagctacact

SEQ ID NO: 373922 - DNA, 6590 bp, Homo sapiens
ggccgagctgagggaggacctgctggctgcagtgaggagcggaggcgggcgcgggcggccggccatgatcgcgtcgtgcttgtgttacctgctgctgccggccacgcgcctcttccgcgccctctcagatgctttcttcacatgtcgaaaaaatgtccttctggcgaacagctcatccccccaggtagagggcgactttgccatggcccctcggggccctgagcaggaggaatgtgagggcctgctgcagcagtggcgagaagaagggttgagccaggtgctctcaactgcaagtgaggggccccttatagataaaggactagcccagagcagcctggcacttctgatggataatcctggagaagagaatgctgcttcagaggacaggtggtccagcaggcagctgagtgaccttcgggctgcagagaacctggatgagcctttccctgagatgctaggagaggagccactgctggaggtggagggggtggagggctccatgtgggcagctatccccatgcagtcggagccccagtatgcagactgtgctgccctcccagtgggtgccctggccacagagcagtgggaagaggacccagcggtgttggcctggagcatagcacctgagcctgtgccccaggaagaggcttccatctggccctttgagggcctggggcagttgcagcctcccgcagtggaaataccatatcatgaaattttgtggcgagaatgggaggatttctccacccagccagatgctcagggcctgaaggcaggagatggccctcagttccagttcactctgatgtcttataacatcctggctcaggacctgatgcagcagagctcagagctctatctacattgccatccagacatcctcaattggaactatcgcttcgtgaacctcatgcaggaattccagcactgggaccctgatatcctgtgtctccaggaagtccaggaagatcattactgggagcagctggaaccctctctgcgaatgatgggctttacctgtttctacaagaggaggactgggtgtaaaaccgatggctgtgctgtctgctacaagcctaccagattccgcctgctctgtgctagccctgtggagtacttccggcctggcttggagctacttaatcgggataatgtgggcttagtgttgctactgcaaccactcgtcccagaaggcctgggacaagtctcggtggccccgctgtgtgtggcaaatacccatatcctttacaacccacgccggggcgatgtcaagctggcccagatggccattctcctggcggaagtggacaaggtggccagactgtcagatggcagccactgccccatcatcttgtgcggggacctaaattctgtccctgattcacctctctacaacttcatcagggatggagagctccagtaccatgggatgccagcctggaaggtatctggacaggaagacttctcccatcagctttaccagaggaagctgcaggccccactgtggcccagctccctgggcatcactgattgctgtcagtatgtcacctcctgtcaccccaagagatcagagagacgcaagtatggccgagacttcctgctacgtttccgcttctgcagcatcgcttgtcagcgaccagtaggactggtccttatggaaggagtgacagatactaagccagagcgacctgcgggttgggctgagtctgtccttgaggaagatgcatcggagcttgagcctgccttctccaggactgtaggtaccatccagcactgcctccacctgacgtcagtatatacccacttcctgccccagcgtggccgcccagaggtcactacaatgccattgggtcttggaatgacagtagattacatcttcttctcagctgagtcctgtgagaatgggaacagaactgatcacaggctgtatcgagatggaactctcaagctcctgggtcgtctctcccttctctctgaagagatactctgggctgccaatggcttacccaaccccttctgctcttcagaccacctctgcctgctagccagcttcgggatggaagtcaccgccccatgacagggctcccaggggaagagagcttctcttccagaagagctcactggatcagagactgtggaaaaatcccatgcatctagaaacttagatccaagaaacttacatcccctcccttccccctcctcgttccctttttcccacggttagactttctccaggcctggctgcgttctctgcctgtggtccttgccccaccccagcctcttcctaatcctgtgccacacactcagtggccctgggagaggcagaaggggggctcccccttccttccatgtatccagcgctcccccttgatttttaattaccagggttatgggagttcttgatttcattggttatttgctttcaggccgtttcttgatgtaccttctgacctgaccttttccctgccttcaggacttctgggcccagccctcttgccaggcatgcatatgtgagatatgcatatcatgtatgtgtcctcttggggtgagacttctgcacagccatgcctgcctctgaccagtccacttttcatgttggggctgtaggcctggggcaggttcagagtctacccaagtacctatgtatgagcaggcagcagcagggcatggccccatctctccttttagcctctgtgtttcattaggcattcatcctgccaaccagggcaggcccggcgtctgggctctgggaacaaatggggcccacatcctggagtggcaaattttgggggatgcgctacctgtcccagcgggccctgtgcctccaacccagagctccccacagacctggtgtaatttcacaagggccatccctttccccaggcttccctgagggaggcggaagtttgaacccttatgtggggttcattgggctagggtagtggtatgaggtttaaaactatttaaggattaggaggagaaagagtcttcaggaaactcttgtttcactggactctgcagcctgcagaactggggcaagggtaggagttccagtaggggaaggagcaggtagactcttcagctgcctcagctgggactgaagacctaagctgattctctttcctctccactcctaagaagcaattttctgttcctctccttccaccactttttactttctgctatctcccatctcccgcttcccttccatttcctttctagaaaaccctggtatttagctcaggccaaactgcctcagcagaaaggtggccttggacaaaactggtccaagaatttgaagtggcagtacttgcggattggctctgtccagcaaggcctcagctgcttgttgcgtctgctttccctcccctaacagaagggtaccctggcttattcaggggactccttagtccacactgtgtcacctgcatgccttaatctttcattgctggggtgtggccttgggagatcctgggccagcccctccacacatctccctaagtcagagtggctgctggccctggtagatttgacttgctcttgcctcactcgacctccaaagtgggactgaagacagtggtcaagagacttgagttcgggacagtaagccaggggttaaggttctttcctttttttgaaagccaaagacccagtttgcattgtgctgctgcattcatggttagaagctttccatgcctaggttctagggaatttatttttctatgtgtatatattttcaaactttgtttcctgggtactgggcatgtgcctgtctgagccccaggtctgtctacaccccaccattcattctgtctgtctgttccctggacactgcctaaaagggtctcaagacagtgccctgtgggttcctaggactagggcccatcactgttctcttctgctgggaaatgcagctttaaaatggctaaccacagcagagggcagatgcttgatagattatcttttccttgctttcttgtttctgttttgaaagtgaaatggggttttaaattgttatttaaactctttttccaaataaaggtttaccttttttccccccaatgttgttcattttattaggatcctgaagggattaggtccttgagagagggcctgaagaatgaggtgggcagaggaagagactaaggagcttttgatcttggggtggggtctcaagacatgaatctagattgagaaatgtgttgtaagatctccctctattagctgaggtaaattcccactgctgtgaggcctgggaggaacagggcttgagtgaagcctcctgccttgacactgctggggtacagctttcttctgtccttcccaagtgagagaatgattctttggactgcttttcattcttcctccatctgctccccccatgcctcctcctagtatcttctgcacttcaggagggtctgtgcaaagtgggataagatgtgtgttttcctgattaaagctatggcagctgcatgagacatgatgcgggtggcacatgcctcttgctgagcatctatttctgatctcttttgcattctggagccagggctgagcagtgggccatctgtcgctggaaaaatgtctcttccttcctaggcctacctctgttggtgcttttgtcttccaacctccctatgtagtaagaccagccaagcccacatgcccactgggagccctgaaaccagatctggttttctgtcttacctgaacaggttcccagaacccacaccaggcctctgaatcagtctctgagaatctgattgatttaaagccacttggttgcttccattgcactacctgggttgcgatcccctcaattgatttagtaaaaagaaaacttagcggccgggtgcggtggctcacacctgtaatcccagcactttgggaggctgaggcgggtggatcacctgaggtcgagagttccagaccagcctgaccaacatgaagaaatcccgtctctactaaaaatacaaaattagccgggcgtgatggcgcatgcctgtaatcccagctacttggaggctgaggcaggagaattgcttgaacctgggaagcggaggttgtggtgagccgagatcatgccattgcactccagcctggacaacaagagtgaaactccatctcaaaaaaaaaaaaaaaaagaaaagaaaagaaagaaaactcagctaggaattagaaacatcatttgtcctcttggcctgttcagctggtgactgtagatttgatgaaaaggaaacttgggactccggaggaccaagatggagcgagacggtcaatactgatggacttgcagctagcaccatggcagccctgcctggtctaaggaagctggcaggaggcgatggtacctggcgggggcagactgcccacctccccactccttcagaggactgtttcctgcccttcacaccatcatcatgttgggccctgcatgtatgttcctgcacttggagcgagcccagggacacagggcagacactgggctcacagatgttgctgcagctgagccagaaaacattccaggcaggaaaagcaggtgcacacattcacacaggcctctggtcactcgaccagccagaatgagacggactccttgacctgggaagtcaagtcccagtgggaagggctggaaatcacacgtggtcaacttcttggctctctctgctccccaaaccctggccctaggcttgctttatcatcacatcccaaggccagagggctgctgctgtccccatcttggccctgctagaagagggataggggtggctggcatgatgggtgaggggaacatgagaatatgcagaggccttggaggaagaggactggcagttatgacaggaaggctctctatacctggctccccagtgttctgcccctggcactgagcatgaggagccaggctttggggagactttgcaatcacccccccaacctggtccattttccacaggtagctttcttgaactcaccttgacccctcctcagccagcagcccccacctccaggggcaaaggagctgaaagacagtcctgaactggggggagctgggatcacatcagccaggccctgtccctcacaggaagtgagatgaggtgataccatggatggtgactaaggccccaaagtccctgcctctctgcctccccagaaacctcacagccaggccagcccccagagcagagcctgtgtaaacatgcccaggaggggaggaggggttgctacatatgagaaacagttaaaaataaatttaaaaagcaccactatgtcctgtgctggtctccacagccccgaagtctcagctcaggaagggtgagtgctgggggattatcagctggggctcggctccctcccttgcagacagcaagcaggtaagggcttcattttgctgttttctccatggagggctctgggaaaggatcctgcaagttggaacctcctaagatccccaagcaccagcgattcgaatacctcgcacatctccaagctcaatcctgcagtccactgtagaggatagaccaccctaatagccacgacacgctgcctcctcgtccaaaccactcacacctcctgtaaacactaagtgacacgcg

SEQ ID NO: 373923 - DNA, 6256 bp, Homo sapiens
ggccgagctgagggaggacctgctggctgcagtgaggagcggaggcgggcgcgggcggccggccatgatcgcgtcgtgcttgtgttacctgctgctgccggccacgcgcctcttccgcgccctctcagatgctttcttcacatgtcgaaaaaatgtccttctggcgaacagctcatccccccaggtagagggcgactttgccatggcccctcggggccctgagcaggaggaatgtgagggcctgctgcagcagtggcgagaagaagggttgagccaggtgctctcaactgcaagtgaggggccccttatagataaaggactagcccagagcagcctggcacttctgatggataatcctggagaagagaatgctgcttcagaggacaggtggtccagcaggcagctgagtgaccttcgggctgcagagaacctggatgagcctttccctgagatgctaggagaggagccactgctggaggtggagggggtggagggctccatgtgggcagctatccccatgcagtcggagccccagtatgcagactgtgctgccctcccagtgggtgccctggccacagagcagtgggaagaggacccagcggtgttggcctggagcatagcacctgagcctgtgccccaggaagaggcttccatctggccctttgagggcctggggcagttgcagcctcccgcagtggaaataccatatcatgaaattttgtggcgagaatgggaggatttctccacccagccagatgctcagggcctgaaggcaggagatggccctcagttccagttcactctgatgtcttataacatcctggctcaggacctgatgcagcagagctcagagctctatctacattgccatccagacatcctcaattggaactatcgcttcgtgaacctcatgcaggaattccagcactgggaccctgatatcctgtgtctccaggaagtccaggaagatcattactgggagcagctggaaccctctctgcgaatgatgggctttacctgtttctacaagaggaggactgggtgtaaaaccgatggctgtgctgtctgctacaagcctaccagattccgcctgctctgtgctagccctgtggagtacttccggcctggcttggagctacttaatcgggataatgtgggcttagtgttgctactgcaaccactcgtcccagaaggcctgggacaagtctcggtggccccgctgtgtgtggcaaatacccatatcctttacaacccacgccggggcgatgtcaagctggcccagatggccattctcctggcggaagtggacaaggtggccagactgtcagatggcagccactgccccatcatcttgtgcggggacctaaattctgtccctgattcacctctctacaacttcatcagggatggagagctccagtaccatgggatgccagcctggaaggtatctggacaggaagacttctcccatcagctttaccagaggaagctgcaggccccactgtggcccagctccctgggcatcactgattgctgtcagtatgtcacctcctgtcaccccaagagatcagagagacgcaagtatggccgagacttcctgctacgtttccgcttctgcagcatcgcttgtcagcgaccagtaggactggtccttatggaaggagtgacagatactaagccagagcgacctgcgggttgggctgagtctgtccttgaggaagatgcatcggagcttgagcctgccttctccaggactgtaggtaccatccagcactgcctccacctgacgtcagtatatacccacttcctgccccagcgtggccgcccagaggtcactacaatgccattgggtcttggaatgacagtagattacatcttcttctcagctgagtcctgtgagaatgggaacagaactgatcacaggctgtatcgagatggaactctcaagctcctgggtcgtctctcccttctctctgaagagatactctgggctgccaatggcttacccaaccccttctgctcttcagaccacctctgcctgctagccagcttcgggatggaagtcaccgccccatgacagggctcccaggggaagagagcttctcttccagaagagctcactggatcagagactgtggaaaaatcccatgcatctagaaacttagatccaagaaacttacatcccctcccttccccctcctcgttccctttttcccacggttagactttctccaggcctggctgcgttctctgcctgtggtccttgccccaccccagcctcttcctaatcctgtgccacacactcagtggccctgggagaggcagaaggggggctcccccttccttccatgtatccagcgctcccccttgatttttaattaccagggttatgggagttcttgatttcattggttatttgctttcaggccgtttcttgatgtaccttctgacctgaccttttccctgccttcaggacttctgggcccagccctcttgccaggcatgcatatgtgagatatgcatatcatgtatgtgtcctcttggggtgagacttctgcacagccatgcctgcctctgaccagtccacttttcatgttggggctgtaggcctggggcaggttcagagtctacccaagtacctatgtatgagcaggcagcagcagggcatggccccatctctccttttagcctctgtgtttcattaggcattcatcctgccaaccagggcaggcccggcgtctgggctctgggaacaaatggggcccacatcctggagtggcaaattttgggggatgcgctacctgtcccagcgggccctgtgcctccaacccagagctccccacagacctggtgtaatttcacaagggccatccctttccccaggcttccctgagggaggcggaagtttgaacccttatgtggggttcattgggctagggtagtggtatgaggtttaaaactatttaaggattaggaggagaaagagtcttcaggaaactcttgtttcactggactctgcagcctgcagaactggggcaagggtaggagttccagtaggggaaggagcaggtagactcttcagctgcctcagctgggactgaagacctaagctgattctctttcctctccactcctaagaagcaattttctgttcctctccttccaccactttttactttctgctatctcccatctcccgcttcccttccatttcctttctagaaaaccctggtatttagctcaggccaaactgcctcagcagaaaggtggccttggacaaaactggtccaagaatttgaagtggcagtacttgcggattggctctgtccagcaaggcctcagctgcttgttgcgtctgctttccctcccctaacagaagggtaccctggcttattcaggggactccttagtccacactgtgtcacctgcatgccttaatctttcattgctggggtgtggccttgggagatcctgggccagcccctccacacatctccctaagtcagagtggctgctggccctggtagatttgacttgctcttgcctcactcgacctccaaagtgggactgaagacagtggtcaagagacttgagttcgggacagtaagccaggggttaaggttctttcctttttttgaaagccaaagacccagtttgcattgtgctgctgcattcatggttagaagctttccatgcctaggttctagggaatttatttttctatgtgtatatattttcaaactttgtttcctgggtactgggcatgtgcctgtctgagccccaggtctgtctacaccccaccattcattctgtctgtctgttccctggacactgcctaaaagggtctcaagacagtgccctgtgggttcctaggactagggcccatcactgttctcttctgctgggaaatgcagctttaaaatggctaaccacagcagagggcagatgcttgatagattatcttttccttgctttcttgtttctgttttgaaagtgaaatggggttttaaattgttatttaaactctttttccaaataaaggtttaccttttttccccccaatgttgttcattttattaggatcctgaagggattaggtccttgagagagggcctgaagaatgaggtgggcagaggaagagactaaggagcttttgatcttggggtggggtctcaagacatgaatctagattgagaaatgtgttgtaagatctccctctattagctgaggtaaattcccactgctgtgaggcctgggaggaacagggcttgagtgaagcctcctgccttgacactgctggggtacagctttcttctgtccttcccaagtgagagaatgattctttggactgcttttcattcttcctccatctgctccccccatgcctcctcctagtatcttctgcacttcaggagggtctgtgcaaagtgggataagatgtgtgttttcctgattaaagctatggcagctgcatgagacatgatgcgggtggcacatgcctcttgctgagcatctatttctgatctcttttgcattctggagccagggctgagcagtgggccatctgtcgctggaaaaatgtctcttccttcctaggcctacctctgttggtgcttttgtcttccaacctccctatgtagtaagaccagccaagcccacatgcccactgggagccctgaaaccagatctggttttctgtcttacctgaacaggttcccagaacccacaccaggcctctgaatcagtctctgagaatctgattgatttaaagccacttggttgcttccattgcactacctgggttgcgatcccctcaattgatttagtaaaaagaaaacttagcggccgggtgcggtggctcacacctgtaatcccagcactttgggaggctgaggcgggtggatcacctgaggtcgagagttccagaccagcctgaccaacatgaagaaatcccgtctctactaaaaatacaaaattagccgggcgtgatggcgcatgcctgtaatcccagctacttggaggctgaggcaggagaattgcttgaacctgggaagcggaggttgtggtgagccgagatcatgccattgcactccagcctggacaacaagagtgaaactccatctcaaaaaaaaaaaaaaaaagaaaagaaaagaaagaaaactcagctaggaattagaaacatcatttgtcctcttggcctgttcagctggtgactgtagatttgatgaaaaggaaacttgggactccggaggaccaagatggagcgagacggtcaatactgatggacttgcagctagcaccatggcagccctgcctggtctaaggaagctggcaggaggcgatggtacctggcgggggcagactgcccacctccccactccttcagaggactgtttcctgcccttcacaccatcatcatgttgggccctgcatgtatgttcctgcacttggagcgagcccagggacacagggcagacactgggctcacagatgttgctgcagctgagccagaaaacattccaggcaggaaaagcaggtgcacacattcacacaggcctctggtcactcgaccagccagaatgagacggactccttgacctgggaagtcaagtcccagtgggaagggctggaaatcacacgtggtcaacttcttggctctctctgctccccaaaccctggccctaggcttgctttatcatcacatcccaaggccagagggctgctgctgtccccatcttggccctgctagaagagggataggggtggctggcatgatgggtgaggggaacatgagaatatgcagaggccttggaggaagaggactggcagttatgacaggaaggctctctatacctggctccccagtgttctgcccctggcactgagcatgaggagccaggctttggggagactttgcaatcacccccccaacctggtccattttccacaggtagctttcttgaactcaccttgacccctcctcagccagcagcccccacctccaggggcaaaggagctgaaagacagtcctgaactggggggagctgggatcacatcagccaggccctgtccctcacaggaagtgagatgaggtgataccatggatggtgactaaggccccaaagtccctgcctctctgcctccccagaaacctcacagccaggccagcccccagagcagagcctgtgtaaacatgcccaggaggggaggaggggttgctacatatgagaaacagttaaaaataaatttaaaaagc

SEQ ID NO: 373924 - DNA, 5605 bp, Homo sapiens
actctaagatccctctctggtaaagctgatgggagaagttcgtccagtacatgggatgccagcctggaaggtatctggacaggaagacttctcccatcagctttaccagaggaagctgcaggccccactgtggcccagctccctgggcatcactgattgctgtcagtatgtcacctcctgtcaccccaagagatcagagagacgcaagtatggccgagacttcctgctacgtttccgcttctgcagcatcgcttgtcagcgaccagtaggactggtccttatggaaggagtgacagatactaagccagagcgacctgcgggttgggctgagtctgtccttgaggaagatgcatcggagcttgagcctgccttctccaggactgtaggtaccatccagcactgcctccacctgacgtcagtatatacccacttcctgccccagcgtggccgcccagaggtcactacaatgccattgggtcttggaatgacagtagattacatcttcttctcagctgagtcctgtgagaatgggaacagaactgatcacaggctgtatcgagatggaactctcaagctcctgggtcgtctctcccttctctctgaagagatactctgggctgccaatggcttacccaaccccttctgctcttcagaccacctctgcctgctagccagcttcgggatggaagtcaccgccccatgacagggctcccaggggaagagagcttctcttccagaagagctcactggatcagagactgtggaaaaatcccatgcatctagaaacttagatccaagaaacttacatcccctcccttccccctcctcgttccctttttcccacggttagactttctccaggcctggctgcgttctctgcctgtggtccttgccccaccccagcctcttcctaatcctgtgccacacactcagtggccctgggagaggcagaaggggggctcccccttccttccatgtatccagcgctcccccttgatttttaattaccagggttatgggagttcttgatttcattggttatttgctttcaggccgtttcttgatgtaccttctgacctgaccttttccctgccttcaggacttctgggcccagccctcttgccaggcatgcatatgtgagatatgcatatcatgtatgtgtcctcttggggtgagacttctgcacagccatgcctgcctctgaccagtccacttttcatgttggggctgtaggcctggggcaggttcagagtctacccaagtacctatgtatgagcaggcagcagcagggcatggccccatctctccttttagcctctgtgtttcattaggcattcatcctgccaaccagggcaggcccggcgtctgggctctgggaacaaatggggcccacatcctggagtggcaaattttgggggatgcgctacctgtcccagcgggccctgtgcctccaacccagagctccccacagacctggtgtaatttcacaagggccatccctttccccaggcttccctgagggaggcggaagtttgaacccttatgtggggttcattgggctagggtagtggtatgaggtttaaaactatttaaggattaggaggagaaagagtcttcaggaaactcttgtttcactggactctgcagcctgcagaactggggcaagggtaggagttccagtaggggaaggagcaggtagactcttcagctgcctcagctgggactgaagacctaagctgattctctttcctctccactcctaagaagcaattttctgttcctctccttccaccactttttactttctgctatctcccatctcccgcttcccttccatttcctttctagaaaaccctggtatttagctcaggccaaactgcctcagcagaaaggtggccttggacaaaactggtccaagaatttgaagtggcagtacttgcggattggctctgtccagcaaggcctcagctgcttgttgcgtctgctttccctcccctaacagaagggtaccctggcttattcaggggactccttagtccacactgtgtcacctgcatgccttaatctttcattgctggggtgtggccttgggagatcctgggccagcccctccacacatctccctaagtcagagtggctgctggccctggtagatttgacttgctcttgcctcactcgacctccaaagtgggactgaagacagtggtcaagagacttgagttcgggacagtaagccaggggttaaggttctttcctttttttgaaagccaaagacccagtttgcattgtgctgctgcattcatggttagaagctttccatgcctaggttctagggaatttatttttctatgtgtatatattttcaaactttgtttcctgggtactgggcatgtgcctgtctgagccccaggtctgtctacaccccaccattcattctgtctgtctgttccctggacactgcctaaaagggtctcaagacagtgccctgtgggttcctaggactagggcccatcactgttctcttctgctgggaaatgcagctttaaaatggctaaccacagcagagggcagatgcttgatagattatcttttccttgctttcttgtttctgttttgaaagtgaaatggggttttaaattgttatttaaactctttttccaaataaaggtttaccttttttccccccaatgttgttcattttattaggatcctgaagggattaggtccttgagagagggcctgaagaatgaggtgggcagaggaagagactaaggagcttttgatcttggggtggggtctcaagacatgaatctagattgagaaatgtgttgtaagatctccctctattagctgaggtaaattcccactgctgtgaggcctgggaggaacagggcttgagtgaagcctcctgccttgacactgctggggtacagctttcttctgtccttcccaagtgagagaatgattctttggactgcttttcattcttcctccatctgctccccccatgcctcctcctagtatcttctgcacttcaggagggtctgtgcaaagtgggataagatgtgtgttttcctgattaaagctatggcagctgcatgagacatgatgcgggtggcacatgcctcttgctgagcatctatttctgatctcttttgcattctggagccagggctgagcagtgggccatctgtcgctggaaaaatgtctcttccttcctaggcctacctctgttggtgcttttgtcttccaacctccctatgtagtaagaccagccaagcccacatgcccactgggagccctgaaaccagatctggttttctgtcttacctgaacaggttcccagaacccacaccaggcctctgaatcagtctctgagaatctgattgatttaaagccacttggttgcttccattgcactacctgggttgcgatcccctcaattgatttagtaaaaagaaaacttagcggccgggtgcggtggctcacacctgtaatcccagcactttgggaggctgaggcgggtggatcacctgaggtcgagagttccagaccagcctgaccaacatgaagaaatcccgtctctactaaaaatacaaaattagccgggcgtgatggcgcatgcctgtaatcccagctacttggaggctgaggcaggagaattgcttgaacctgggaagcggaggttgtggtgagccgagatcatgccattgcactccagcctggacaacaagagtgaaactccatctcaaaaaaaaaaaaaaaaagaaaagaaaagaaagaaaactcagctaggaattagaaacatcatttgtcctcttggcctgttcagctggtgactgtagatttgatgaaaaggaaacttgggactccggaggaccaagatggagcgagacggtcaatactgatggacttgcagctagcaccatggcagccctgcctggtctaaggaagctggcaggaggcgatggtacctggcgggggcagactgcccacctccccactccttcagaggactgtttcctgcccttcacaccatcatcatgttgggccctgcatgtatgttcctgcacttggagcgagcccagggacacagggcagacactgggctcacagatgttgctgcagctgagccagaaaacattccaggcaggaaaagcaggtgcacacattcacacaggcctctggtcactcgaccagccagaatgagacggactccttgacctgggaagtcaagtcccagtgggaagggctggaaatcacacgtggtcaacttcttggctctctctgctccccaaaccctggccctaggcttgctttatcatcacatcccaaggccagagggctgctgctgtccccatcttggccctgctagaagagggataggggtggctggcatgatgggtgaggggaacatgagaatatgcagaggccttggaggaagaggactggcagttatgacaggaaggctctctatacctggctccccagtgttctgcccctggcactgagcatgaggagccaggctttggggagactttgcaatcacccccccaacctggtccattttccacaggtagctttcttgaactcaccttgacccctcctcagccagcagcccccacctccaggggcaaaggagctgaaagacagtcctgaactggggggagctgggatcacatcagccaggccctgtccctcacaggaagtgagatgaggtgataccatggatggtgactaaggccccaaagtccctgcctctctgcctccccagaaacctcacagccaggccagcccccagagcagagcctgtgtaaacatgcccaggaggggaggaggggttgctacatatgagaaacagttaaaaataaatttaaaaagcaccactatgtcctgtgctggtctccacagccccgaagtctcagctcaggaagggtgagtgctgggggattatcagctggggctcggctccctcccttgcagacagcaagcaggtaagggcttcattttgctgttttctccatggagggctctgggaaaggatcctgcaagttggaacctcctaagactccagaaccaggagcggctccctctcatatctactcccctcaaaccctgtcattcccgggaagctcccagaggcagctgaggccacgcccctgctcctgagcggcagcatccagacccggaaaggacctagtttcagcctggcacctcccaaggtgagccatctcttcttaggcatagtaggaacatggagaccacactacccccactccctgaaagctgggatgggatggtgagtcaagggtcaccatgcccctattagtctggctggagttaggttaggcatcctcccagggctcattgaccccagggggaacttggggaggcaagggactgaccagctggcctcccagggtgcctctggccaggccatgctggatctggctctgggtcaagcgctgctggtttgaagagctgccagcctgtggcgccttccctgacaggcactctcatcagcaaaggcatccctggttctgccttcccttcctctttgcttcaaaggcaccatccgtctccctggcaggccaagagctacact

SEQ ID NO: 373925 - DNA, 6879 bp, Homo sapiens
ggccgagctgagggaggacctgctggctgcagtgaggagcggaggcgggcgcgggcggccggccatgatcgcgtcgtgcttgtgttacctgctgctgccggccacgcgcctcttccgcgccctctcagatgctttcttcacatgtcgaaaaaatgtccttctggcgaacagctcatccccccaggtagagggcgactttgccatggcccctcggggccctgagcaggaggaatgtgagggcctgctgcagcagtggcgagaagaagggttgagccaggtgctctcaactgcaagtgaggggccccttatagataaaggactagcccagagcagcctggcacttctgatggataatcctggagaagagaatgctgcttcagaggacaggtggtccagcaggcagctgagtgaccttcgggctgcagagaacctggatgagcctttccctgagatgctaggagaggagccactgctggaggtggagggggtggagggctccatgtgggcagctatccccatgcagtcggagccccagtatgcagactgtgctgccctcccagtgggtgccctggccacagagcagtgggaagaggacccagcggtgttggcctggagcatagcacctgagcctgtgccccaggaagaggcttccatctggccctttgagggcctggggcagttgcagcctcccgcagtggaaataccatatcatgaaattttgtggcgagaatgggaggatttctccacccagccagatgctcagggcctgaaggcaggagatggccctcagttccagttcactctgatgtcttataacatcctggctcaggacctgatgcagcagagctcagagctctatctacattgccatccagacatcctcaattggaactatcgcttcgtgaacctcatgcaggaattccagcactgggaccctgatatcctgtgtctccaggaagtccaggaagatcattactgggagcagctggaaccctctctgcgaatgatgggctttacctgtttctacaagaggaggactgggtgtaaaaccgatggctgtgctgtctgctacaagcctaccagattccgcctgctctgtgctagccctgtggagtacttccggcctggcttggagctacttaatcgggataatgtgggcttagtgttgctactgcaaccactcgtcccagaaggcctgggacaagtctcggtggccccgctgtgtgtggcaaatacccatatcctttacaacccacgccggggcgatgtcaagctggcccagatggccattctcctggcggaagtggacaaggtggccagactgtcagatggcagccactgccccatcatcttgtgcggggacctaaattctgtccctgattcacctctctacaacttcatcagggatggagagctccagtaccatgggatgccagcctggaaggtatctggacaggaagacttctcccatcagctttaccagaggaagctgcaggccccactgtggcccagctccctgggcatcactgattgctgtcagtatgtcacctcctgtcaccccaagagatcagagagacgcaagtatggccgagacttcctgctacgtttccgcttctgcagcatcgcttgtcagcgaccagtaggactggtccttatggaaggagtgacagatactaagccagagcgacctgcgggttgggctgagtctgtccttgaggaagatgcatcggagcttgagcctgccttctccaggactgtaggtaccatccagcactgcctccacctgacgtcagtatatacccacttcctgccccagcgtggccgcccagaggtcactacaatgccattgggtcttggaatgacagtagattacatcttcttctcagctgagtcctgtgagaatgggaacagaactgatcacaggctgtatcgagatggaactctcaagctcctgggtcgtctctcccttctctctgaagagatactctgggctgccaatggcttacccaaccccttctgctcttcagaccacctctgcctgctagccagcttcgggatggaagtcaccgccccatgacagggctcccaggggaagagagcttctcttccagaagagctcactggatcagagactgtggaaaaatcccatgcatctagaaacttagatccaagaaacttacatcccctcccttccccctcctcgttccctttttcccacggttagactttctccaggcctggctgcgttctctgcctgtggtccttgccccaccccagcctcttcctaatcctgtgccacacactcagtggccctgggagaggcagaaggggggctcccccttccttccatgtatccagcgctcccccttgatttttaattaccagggttatgggagttcttgatttcattggttatttgctttcaggccgtttcttgatgtaccttctgacctgaccttttccctgccttcaggacttctgggcccagccctcttgccaggcatgcatatgtgagatatgcatatcatgtatgtgtcctcttggggtgagacttctgcacagccatgcctgcctctgaccagtccacttttcatgttggggctgtaggcctggggcaggttcagagtctacccaagtacctatgtatgagcaggcagcagcagggcatggccccatctctccttttagcctctgtgtttcattaggcattcatcctgccaaccagggcaggcccggcgtctgggctctgggaacaaatggggcccacatcctggagtggcaaattttgggggatgcgctacctgtcccagcgggccctgtgcctccaacccagagctccccacagacctggtgtaatttcacaagggccatccctttccccaggcttccctgagggaggcggaagtttgaacccttatgtggggttcattgggctagggtagtggtatgaggtttaaaactatttaaggattaggaggagaaagagtcttcaggaaactcttgtttcactggactctgcagcctgcagaactggggcaagggtaggagttccagtaggggaaggagcaggtagactcttcagctgcctcagctgggactgaagacctaagctgattctctttcctctccactcctaagaagcaattttctgttcctctccttccaccactttttactttctgctatctcccatctcccgcttcccttccatttcctttctagaaaaccctggtatttagctcaggccaaactgcctcagcagaaaggtggccttggacaaaactggtccaagaatttgaagtggcagtacttgcggattggctctgtccagcaaggcctcagctgcttgttgcgtctgctttccctcccctaacagaagggtaccctggcttattcaggggactccttagtccacactgtgtcacctgcatgccttaatctttcattgctggggtgtggccttgggagatcctgggccagcccctccacacatctccctaagtcagagtggctgctggccctggtagatttgacttgctcttgcctcactcgacctccaaagtgggactgaagacagtggtcaagagacttgagttcgggacagtaagccaggggttaaggttctttcctttttttgaaagccaaagacccagtttgcattgtgctgctgcattcatggttagaagctttccatgcctaggttctagggaatttatttttctatgtgtatatattttcaaactttgtttcctgggtactgggcatgtgcctgtctgagccccaggtctgtctacaccccaccattcattctgtctgtctgttccctggacactgcctaaaagggtctcaagacagtgccctgtgggttcctaggactagggcccatcactgttctcttctgctgggaaatgcagctttaaaatggctaaccacagcagagggcagatgcttgatagattatcttttccttgctttcttgtttctgttttgaaagtgaaatggggttttaaattgttatttaaactctttttccaaataaaggtttaccttttttccccccaatgttgttcattttattaggatcctgaagggattaggtccttgagagagggcctgaagaatgaggtgggcagaggaagagactaaggagcttttgatcttggggtggggtctcaagacatgaatctagattgagaaatgtgttgtaagatctccctctattagctgaggtaaattcccactgctgtgaggcctgggaggaacagggcttgagtgaagcctcctgccttgacactgctggggtacagctttcttctgtccttcccaagtgagagaatgattctttggactgcttttcattcttcctccatctgctccccccatgcctcctcctagtatcttctgcacttcaggagggtctgtgcaaagtgggataagatgtgtgttttcctgattaaagctatggcagctgcatgagacatgatgcgggtggcacatgcctcttgctgagcatctatttctgatctcttttgcattctggagccagggctgagcagtgggccatctgtcgctggaaaaatgtctcttccttcctaggcctacctctgttggtgcttttgtcttccaacctccctatgtagtaagaccagccaagcccacatgcccactgggagccctgaaaccagatctggttttctgtcttacctgaacaggttcccagaacccacaccaggcctctgaatcagtctctgagaatctgattgatttaaagccacttggttgcttccattgcactacctgggttgcgatcccctcaattgatttagtaaaaagaaaacttagcggccgggtgcggtggctcacacctgtaatcccagcactttgggaggctgaggcgggtggatcacctgaggtcgagagttccagaccagcctgaccaacatgaagaaatcccgtctctactaaaaatacaaaattagccgggcgtgatggcgcatgcctgtaatcccagctacttggaggctgaggcaggagaattgcttgaacctgggaagcggaggttgtggtgagccgagatcatgccattgcactccagcctggacaacaagagtgaaactccatctcaaaaaaaaaaaaaaaaagaaaagaaaagaaagaaaactcagctaggaattagaaacatcatttgtcctcttggcctgttcagctggtgactgtagatttgatgaaaaggaaacttgggactccggaggaccaagatggagcgagacggtcaatactgatggacttgcagctagcaccatggcagccctgcctggtctaaggaagctggcaggaggcgatggtacctggcgggggcagactgcccacctccccactccttcagaggactgtttcctgcccttcacaccatcatcatgttgggccctgcatgtatgttcctgcacttggagcgagcccagggacacagggcagacactgggctcacagatgttgctgcagctgagccagaaaacattccaggcaggaaaagcaggtgcacacattcacacaggcctctggtcactcgaccagccagaatgagacggactccttgacctgggaagtcaagtcccagtgggaagggctggaaatcacacgtggtcaacttcttggctctctctgctccccaaaccctggccctaggcttgctttatcatcacatcccaaggccagagggctgctgctgtccccatcttggccctgctagaagagggataggggtggctggcatgatgggtgaggggaacatgagaatatgcagaggccttggaggaagaggactggcagttatgacaggaaggctctctatacctggctccccagtgttctgcccctggcactgagcatgaggagccaggctttggggagactttgcaatcacccccccaacctggtccattttccacaggtagctttcttgaactcaccttgacccctcctcagccagcagcccccacctccaggggcaaaggagctgaaagacagtcctgaactggggggagctgggatcacatcagccaggccagcccccagagcagagcctgtgtaaacatgcccaggaggggaggaggggttgctacatatgagaaacagttaaaaataaatttaaaaagcaccactatgtcctgtgctggtctccacagccccgaagtctcagctcaggaagggtgagtgctgggggattatcagctggggctcggctccctcccttgcagacagcaagcaggtaagggcttcattttgctgttttctccatggagggctctgggaaaggatcctgcaagttggaacctcctaagactccagaaccaggagcggctccctctcatatctactcccctcaaaccctgtcattcccgggaagctcccagaggcagctgaggccacgcccctgctcctgagcggcagcatccagacccggaaaggacctagtttcagcctggcacctcccaaggtgagccatctcttcttaggcatagtaggaacatggagaccacactacccccactccctgaaagctgggatgggatggtgagtcaagggtcaccatgcccctattagtctggctggagttaggttaggcatcctcccagggctcattgaccccagggggaacttggggaggcaagggactgaccagctggcctcccagggtgcctctggccaggccatgctggatctggctctgggtcaagcgctgctggtttgaagagctgccagcctgtggcgccttccctgacaggcactctcatcagcaaaggcatccctggttctgccttcccttcctctttgcttcaaaggcaccatccgtctccctggcaggccaagagctacact

SEQ ID NO: 373926 - DNA, 6156 bp, Homo sapiens
ggccgagctgagggaggacctgctggctgcagtgaggagcggaggcgggcgcgggcggccggccatgatcgcgtcgtgcttgtgttacctgctgctgccggccacgcgcctcttccgcgccctctcagatgctttcttcacatgtcgaaaaaatgtccttctggcgaacagctcatccccccaggtagagggcgactttgccatggcccctcggggccctgagcaggaggaatgtgagggcctgctgcagcagtggcgagaagaagggttgagccaggtgctctcaactgcaagtgaggggccccttatagataaaggactagcccagagcagcctggcacttctgatggataatcctggagaagagaatgctgcttcagaggacaggtggtccagcaggcagctgagtgaccttcgggctgcagagaacctggatgagcctttccctgagatgctaggagaggagccactgctggaggtggagggggtggagggctccatgtgggcagctatccccatgcagtcggagccccagtatgcagactgtgctgccctcccagtgggtgccctggccacagagcagtgggaagaggacccagcggtgttggcctggagcatagcacctgagcctgtgccccaggaagaggcttccatctggccctttgagggcctggggcagttgcagcctcccgcagtggaaataccatatcatgaaattttgtggcgagaatgggaggatttctccacccagccagatgctcagggcctgaaggcaggagatggccctcagttccagttcactctgatgtcttataacatcctggctcaggacctgatgcagcagagctcagagctctatctacattgccatccagacatcctcaattggaactatcgcttcgtgaacctcatgcaggaattccagcactgggaccctgatatcctgtgtctccaggaagtccaggaagatcattactgggagcagctggaaccctctctgcgaatgatgggctttacctgtttctacaagaggaggactgggtgtaaaaccgatggctgtgctgtctgctacaagcctaccagattccgcctgctctgtgctagccctgtggagtacttccggcctggcttggagctacttaatcgggataatgtgggcttagtgttgctactgcaaccactcgtcccagaaggcctgggacaagtctcggtggccccgctgtgtgtggcaaatacccatatcctttacaacccacgccggggcgatgtcaagctggcccagatggccattctcctggcggaagtggacaaggtggccagactgtcagatggcagccactgccccatcatcttgtgcggggacctaaattctgtccctgattcacctctctacaacttcatcagggatggagagctccagtaccatgggatgccagcctggaaggtatctggacaggaagacttctcccatcagctttaccagaggaagctgcaggccccactgtggcccagctccctgggcatcactgattgctgtcagtatgtcacctcctgtcaccccaagagatcagagagacgcaagtatggccgagacttcctgctacgtttccgcttctgcagcatcgcttgtcagcgaccagtaggactggtccttatggaaggagtgacagatactaagccagagcgacctgcgggttgggctgagtctgtccttgaggaagatgcatcggagcttgagcctgccttctccaggactgtaggtaccatccagcactgcctccacctgacgtcagtatatacccacttcctgccccagcgtggccgcccagaggtcactacaatgccattgggtcttggaatgacagtagattacatcttcttctcagctgagtcctgtgagaatgggaacagaactgatcacaggctgtatcgagatggaactctcaagctcctgggtcgtctctcccttctctctgaagagatactctgggctgccaatggcttacccaaccccttctgctcttcagaccacctctgcctgctagccagcttcgggatggaagtcaccgccccatgacagggctcccaggggaagagagcttctcttccagaagagctcactggatcagagactgtggaaaaatcccatgcatctagaaacttagatccaagaaacttacatcccctcccttccccctcctcgttccctttttcccacggttagactttctccaggcctggctgcgttctctgcctgtggtccttgccccaccccagcctcttcctaatcctgtgccacacactcagtggccctgggagaggcagaaggggggctcccccttccttccatgtatccagcgctcccccttgatttttaattaccagggttatgggagttcttgatttcattggttatttgctttcaggccgtttcttgatgtaccttctgacctgaccttttccctgccttcaggacttctgggcccagccctcttgccaggcatgcatatgtgagatatgcatatcatgtatgtgtcctcttggggtgagacttctgcacagccatgcctgcctctgaccagtccacttttcatgttggggctgtaggcctggggcaggttcagagtctacccaagtacctatgtatgagcaggcagcagcagggcatggccccatctctccttttagcctctgtgtttcattaggcattcatcctgccaaccagggcaggcccggcgtctgggctctgggaacaaatggggcccacatcctggagtggcaaattttgggggatgcgctacctgtcccagcgggccctgtgcctccaacccagagctccccacagacctggtgtaatttcacaagggccatccctttccccaggcttccctgagggaggcggaagtttgaacccttatgtggggttcattgggctagggtagtggtatgaggtttaaaactatttaaggattaggaggagaaagagtcttcaggaaactcttgtttcactggactctgcagcctgcagaactggggcaagggtaggagttccagtaggggaaggagcaggtagactcttcagctgcctcagctgggactgaagacctaagctgattctctttcctctccactcctaagaagcaattttctgttcctctccttccaccactttttactttctgctatctcccatctcccgcttcccttccatttcctttctagaaaaccctggtatttagctcaggccaaactgcctcagcagaaaggtggccttggacaaaactggtccaagaatttgaagtggcagtacttgcggattggctctgtccagcaaggcctcagctgcttgttgcgtctgctttccctcccctaacagaagggtaccctggcttattcaggggactccttagtccacactgtgtcacctgcatgccttaatctttcattgctggggtgtggccttgggagatcctgggccagcccctccacacatctccctaagtcagagtggctgctggccctggtagatttgacttgctcttgcctcactcgacctccaaagtgggactgaagacagtggtcaagagacttgagttcgggacagtaagccaggggttaaggttctttcctttttttgaaagccaaagacccagtttgcattgtgctgctgcattcatggttagaagctttccatgcctaggttctagggaatttatttttctatgtgtatatattttcaaactttgtttcctgggtactgggcatgtgcctgtctgagccccaggtctgtctacaccccaccattcattctgtctgtctgttccctggacactgcctaaaagggtctcaagacagtgccctgtgggttcctaggactagggcccatcactgttctcttctgctgggaaatgcagctttaaaatggctaaccacagcagagggcagatgcttgatagattatcttttccttgctttcttgtttctgttttgaaagtgaaatggggttttaaattgttatttaaactctttttccaaataaaggtttaccttttttccccccaatgttgttcattttattaggatcctgaagggattaggtccttgagagagggcctgaagaatgaggtgggcagaggaagagactaaggagcttttgatcttggggtggggtctcaagacatgaatctagattgagaaatgtgttgtaagatctccctctattagctgaggtaaattcccactgctgtgaggcctgggaggaacagggcttgagtgaagcctcctgccttgacactgctggggtacagctttcttctgtccttcccaagtgagagaatgattctttggactgcttttcattcttcctccatctgctccccccatgcctcctcctagtatcttctgcacttcaggagggtctgtgcaaagtgggataagatgtgtgttttcctgattaaagctatggcagctgcatgagacatgatgcgggtggcacatgcctcttgctgagcatctatttctgatctcttttgcattctggagccagggctgagcagtgggccatctgtcgctggaaaaatgtctcttccttcctaggcctacctctgttggtgcttttgtcttccaacctccctatgtagtaagaccagccaagcccacatgcccactgggagccctgaaaccagatctggttttctgtcttacctgaacaggttcccagaacccacaccaggcctctgaatcagtctctgagaatctgattgatttaaagccacttggttgcttccattgcactacctgggttgcgatcccctcaattgatttagtaaaaagaaaacttagcggccgggtgcggtggctcacacctgtaatcccagcactttgggaggctgaggcgggtggatcacctgaggtcgagagttccagaccagcctgaccaacatgaagaaatcccgtctctactaaaaatacaaaattagccgggcgtgatggcgcatgcctgtaatcccagctacttggaggctgaggcaggagaattgcttgaacctgggaagcggaggttgtggtgagccgagatcatgccattgcactccagcctggacaacaagagtgaaactccatctcaaaaaaaaaaaaaaaaagaaaagaaaagaaagaaaactcagctaggaattagaaacatcatttgtcctcttggcctgttcagctggtgactgtagatttgatgaaaaggaaacttgggactccggaggaccaagatggagcgagacggtcaatactgatggacttgcagctagcaccatggcagccctgcctggtctaaggaagctggcaggaggcgatggtacctggcgggggcagactgcccacctccccactccttcagaggactgtttcctgcccttcacaccatcatcatgttgggccctgcatgtatgttcctgcacttggagcgagcccagggacacagggcagacactgggctcacagatgttgctgcagctgagccagaaaacattccaggcaggaaaagcaggtgcacacattcacacaggcctctggtcactcgaccagccagaatgagacggactccttgacctgggaagtcaagtcccagtgggaagggctggaaatcacacgtggtcaacttcttggctctctctgctccccaaaccctggccctaggcttgctttatcatcacatcccaaggccagagggctgctgctgtccccatcttggccctgctagaagagggataggggtggctggcatgatgggtgaggggaacatgagaatatgcagaggccttggaggaagaggactggcagttatgacaggaaggctctctatacctggctccccagtgttctgcccctggcactgagcatgaggagccaggctttggggagactttgcaatcacccccccaacctggtccattttccacaggtagctttcttgaactcaccttgacccctcctcagccagcagcccccacctccaggggcaaaggagctgaaagacagtcctgaactggggggagctgggatcacatcagccaggccagcccccagagcagagcctgtgtaaacatgcccaggaggggaggaggggttgctacatatgagaaacagttaaaaataaatttaaaaagc

SEQ ID NO: 373927 - DNA, 6925 bp, Homo sapiens
ggccgagctgagggaggacctgctggctgcagtgaggagcggaggcgggcgcgggcggccggccatgatcgcgtcgtgcttgtgttacctgctgctgccggccacgcgcctcttccgcgccctctcagatgctttcttcacatgtcgaaaaaatgtccttctggcgaacagctcatccccccaggtagagggcgactttgccatggcccctcggggccctgagcaggaggaatgtgagggcctgctgcagcagtggcgagaagaagggttgagccaggtgctctcaactgcaagtgaggggccccttatagataaaggactagcccagagcagcctggcacttctgatggataatcctggagaagagaatgctgcttcagaggacaggtggtccagcaggcagctgagtgaccttcgggctgcagagaacctggatgagcctttccctgagatgctaggagaggagccactgctggaggtggagggggtggagggctccatgtgggcagctatccccatgcagtcggagccccagtatgcagactgtgctgccctcccagtgggtgccctggccacagagcagtgggaagaggacccagcggtgttggcctggagcatagcacctgagcctgtgccccaggaagaggcttccatctggccctttgagggcctggggcagttgcagcctcccgcagtggaaataccatatcatgaaattttgtggcgagaatgggaggatttctccacccagccagatgctcagggcctgaaggcaggagatggccctcagttccagttcactctgatgtcttataacatcctggctcaggacctgatgcagcagagctcagagctctatctacattgccatccagacatcctcaattggaactatcgcttcgtgaacctcatgcaggaattccagcactgggaccctgatatcctgtgtctccaggaagtccaggaagatcattactgggagcagctggaaccctctctgcgaatgatgggctttacctgtttctacaagaggaggactgggtgtaaaaccgatggctgtgctgtctgctacaagcctaccagattccgcctgctctgtgctagccctgtggagtacttccggcctggcttggagctacttaatcgggataatgtgggcttagtgttgctactgcaaccactcgtcccagaaggcctgggacaagtctcggtggccccgctgtgtgtggcaaatacccatatcctttacaacccacgccggggcgatgtcaagctggcccagatggccattctcctggcggaagtggacaaggtggccagactgtcagatggcagccactgccccatcatcttgtgcggggacctaaattctgtccctgattcacctctctacaacttcatcagggatggagagctccagtaccatgggatgccagcctggaaggtatctggacaggaagacttctcccatcagctttaccagaggaagctgcaggccccactgtggcccagctccctgggcatcactgattgctgtcagtatgtcacctcctgtcaccccaagagatcagagagacgcaagtatggccgagacttcctgctacgtttccgcttctgcagcatcgcttgtcagcgaccagtaggactggtccttatggaaggagtgacagatactaagccagagcgacctgcgggttgggctgagtctgtccttgaggaagatgcatcggagcttgagcctgccttctccaggactgtaggtaccatccagcactgcctccacctgacgtcagtatatacccacttcctgccccagcgtggccgcccagaggtcactacaatgccattgggtcttggaatgacagtagattacatcttcttctcagctgagtcctgtgagaatgggaacagaactgatcacaggctgtatcgagatggaactctcaagctcctgggtcgtctctcccttctctctgaagagatactctgggctgccaatggcttacccaaccccttctgctcttcagaccacctctgcctgctagccagcttcgggatggaagtcaccgccccatgacagggctcccaggggaagagagcttctcttccagaagagctcactggatcagagactgtggaaaaatcccatgcatctagaaacttagatccaagaaacttacatcccctcccttccccctcctcgttccctttttcccacggttagactttctccaggcctggctgcgttctctgcctgtggtccttgccccaccccagcctcttcctaatcctgtgccacacactcagtggccctgggagaggcagaaggggggctcccccttccttccatgtatccagcgctcccccttgatttttaattaccagggttatgggagttcttgatttcattggttatttgctttcaggccgtttcttgatgtaccttctgacctgaccttttccctgccttcaggacttctgggcccagccctcttgccaggcatgcatatgtgagatatgcatatcatgtatgtgtcctcttggggtgagacttctgcacagccatgcctgcctctgaccagtccacttttcatgttggggctgtaggcctggggcaggttcagagtctacccaagtacctatgtatgagcaggcagcagcagggcatggccccatctctccttttagcctctgtgtttcattaggcattcatcctgccaaccagggcaggcccggcgtctgggctctgggaacaaatggggcccacatcctggagtggcaaattttgggggatgcgctacctgtcccagcgggccctgtgcctccaacccagagctccccacagacctggtgtaatttcacaagggccatccctttccccaggcttccctgagggaggcggaagtttgaacccttatgtggggttcattgggctagggtagtggtatgaggtttaaaactatttaaggattaggaggagaaagagtcttcaggaaactcttgtttcactggactctgcagcctgcagaactggggcaagggtaggagttccagtaggggaaggagcaggtagactcttcagctgcctcagctgggactgaagacctaagctgattctctttcctctccactcctaagaagcaattttctgttcctctccttccaccactttttactttctgctatctcccatctcccgcttcccttccatttcctttctagaaaaccctggtatttagctcaggccaaactgcctcagcagaaaggtggccttggacaaggcctcagctgcttgttgcgtctgctttccctcccctaacagaagggtaccctggcttattcaggggactccttagtccacactgtgtcacctgcatgccttaatctttcattgctggggtgtggccttgggagatcctgggccagcccctccacacatctccctaagtcagagtggctgctggccctggtagatttgacttgctcttgcctcactcgacctccaaagtgggactgaagacagtggtcaagagacttgagttcgggacagtaagccaggggttaaggttctttcctttttttgaaagccaaagacccagtttgcattgtgctgctgcattcatggttagaagctttccatgcctaggttctagggaatttatttttctatgtgtatatattttcaaactttgtttcctgggtactgggcatgtgcctgtctgagccccaggtctgtctacaccccaccattcattctgtctgtctgttccctggacactgcctaaaagggtctcaagacagtgccctgtgggttcctaggactagggcccatcactgttctcttctgctgggaaatgcagctttaaaatggctaaccacagcagagggcagatgcttgatagattatcttttccttgctttcttgtttctgttttgaaagtgaaatggggttttaaattgttatttaaactctttttccaaataaaggtttaccttttttccccccaatgttgttcattttattaggatcctgaagggattaggtccttgagagagggcctgaagaatgaggtgggcagaggaagagactaaggagcttttgatcttggggtggggtctcaagacatgaatctagattgagaaatgtgttgtaagatctccctctattagctgaggtaaattcccactgctgtgaggcctgggaggaacagggcttgagtgaagcctcctgccttgacactgctggggtacagctttcttctgtccttcccaagtgagagaatgattctttggactgcttttcattcttcctccatctgctccccccatgcctcctcctagtatcttctgcacttcaggagggtctgtgcaaagtgggataagatgtgtgttttcctgattaaagctatggcagctgcatgagacatgatgcgggtggcacatgcctcttgctgagcatctatttctgatctcttttgcattctggagccagggctgagcagtgggccatctgtcgctggaaaaatgtctcttccttcctaggcctacctctgttggtgcttttgtcttccaacctccctatgtagtaagaccagccaagcccacatgcccactgggagccctgaaaccagatctggttttctgtcttacctgaacaggttcccagaacccacaccaggcctctgaatcagtctctgagaatctgattgatttaaagccacttggttgcttccattgcactacctgggttgcgatcccctcaattgatttagtaaaaagaaaacttagcggccgggtgcggtggctcacacctgtaatcccagcactttgggaggctgaggcgggtggatcacctgaggtcgagagttccagaccagcctgaccaacatgaagaaatcccgtctctactaaaaatacaaaattagccgggcgtgatggcgcatgcctgtaatcccagctacttggaggctgaggcaggagaattgcttgaacctgggaagcggaggttgtggtgagccgagatcatgccattgcactccagcctggacaacaagagtgaaactccatctcaaaaaaaaaaaaaaaaagaaaagaaaagaaagaaaactcagctaggaattagaaacatcatttgtcctcttggcctgttcagctggtgactgtagatttgatgaaaaggaaacttgggactccggaggaccaagatggagcgagacggtcaatactgatggacttgcagctagcaccatggcagccctgcctggtctaaggaagctggcaggaggcgatggtacctggcgggggcagactgcccacctccccactccttcagaggactgtttcctgcccttcacaccatcatcatgttgggccctgcatgtatgttcctgcacttggagcgagcccagggacacagggcagacactgggctcacagatgttgctgcagctgagccagaaaacattccaggcaggaaaagcaggtgcacacattcacacaggcctctggtcactcgaccagccagaatgagacggactccttgacctgggaagtcaagtcccagtgggaagggctggaaatcacacgtggtcaacttcttggctctctctgctccccaaaccctggccctaggcttgctttatcatcacatcccaaggccagagggctgctgctgtccccatcttggccctgctagaagagggataggggtggctggcatgatgggtgaggggaacatgagaatatgcagaggccttggaggaagaggactggcagttatgacaggaaggctctctatacctggctccccagtgttctgcccctggcactgagcatgaggagccaggctttggggagactttgcaatcacccccccaacctggtccattttccacaggtagctttcttgaactcaccttgacccctcctcagccagcagcccccacctccaggggcaaaggagctgaaagacagtcctgaactggggggagctgggatcacatcagccaggccctgtccctcacaggaagtgagatgaggtgataccatggatggtgactaaggccccaaagtccctgcctctctgcctccccagaaacctcacagccaggccagcccccagagcagagcctgtgtaaacatgcccaggaggggaggaggggttgctacatatgagaaacagttaaaaataaatttaaaaagcaccactatgtcctgtgctggtctccacagccccgaagtctcagctcaggaagggtgagtgctgggggattatcagctggggctcggctccctcccttgcagacagcaagcaggtaagggcttcattttgctgttttctccatggagggctctgggaaaggatcctgcaagttggaacctcctaagactccagaaccaggagcggctccctctcatatctactcccctcaaaccctgtcattcccgggaagctcccagaggcagctgaggccacgcccctgctcctgagcggcagcatccagacccggaaaggacctagtttcagcctggcacctcccaaggtgagccatctcttcttaggcatagtaggaacatggagaccacactacccccactccctgaaagctgggatgggatggtgagtcaagggtcaccatgcccctattagtctggctggagttaggttaggcatcctcccagggctcattgaccccagggggaacttggggaggcaagggactgaccagctggcctcccagggtgcctctggccaggccatgctggatctggctctgggtcaagcgctgctggtttgaagagctgccagcctgtggcgccttccctgacaggcactctcatcagcaaaggcatccctggttctgccttcccttcctctttgcttcaaaggcaccatccgtctccctggcaggccaagagctacact

SEQ ID NO: 373928 - DNA, 287 bp, Homo sapiens
ggagcaggaaaatccagtgcacatctctaatctcttcagcttaagtctgggcctgttcttgctgttggtgactctgggaagtttcagtgtgacccagcagcttcccacctggcctcaggacctgctcctagagggtgggggtcacattccagcactctggagtgattgggtttcttgtcaatttcccagatcctgtgtctccaggaagtccaggaagatcattactgggagcagctggaaccctctctgcgaatgatgggtaatgcagctccctgggatgcttgcca

SEQ ID NO: 373929 - DNA, 573 bp, Homo sapiens
  misc_feature (188)..(188): n is a, c, g, or t
ggccgagctgagggaggacctgctggctgcagtgaggagcggaggcgggcgcgggcggccggccatgatcgcgtcgtgcttgtgttacctgctgctgccggccacgcgcctcttccgcgccctctcagatgctttcttcacatgtcgaaaaaatgtccttctggcgaacagctcatccccctttcgcnagcactcagcagctatgacgctacggccgcccccctcccgatgtggagggtatgactccctcaaggtggacaacctgacctaacgcacctcgcccgacacgctgaggcgcgtcttcgagaagtacgggcagcgtcggcgacgtgtacatccacgcgggatcgctacaccaaggagtcccgcaggcttcgccttcgttcgctattcacgacaaagcgcgacgctgaggacgctatggatgccatggacaggggccgtgctggcacggacagcgagctggcgcggatgcacaatgacagcgcatacaggcgaccccacagagaatcaccaccaccagacagacggggaccgacaaccacgcaaagtacacgggagcaggaggcaacg

SEQ ID NO: 373930 - DNA, 7000 bp, Homo sapiens
ggccgagctgagggaggacctgctggctgcagtgaggagcggaggcgggcgcgggcggccggccatgatcgcgtcgtgcttgtgttacctgctgctgccggccacgcgcctcttccgcgccctctcagatgctttcttcacatgtcgaaaaaatgtccttctggcgaacagctcatccccccaggtagagggcgactttgccatggcccctcggggccctgagcaggaggaatgtgagggcctgctgcagcagtggcgagaagaagggttgagccaggtgctctcaactgcaagtgaggggccccttatagataaaggactagcccagagcagcctggcacttctgatggataatcctggagaagagaatgctgcttcagaggacaggtggtccagcaggcagctgagtgaccttcgggctgcagagaacctggatgagcctttccctgagatgctaggagaggagccactgctggaggtggagggggtggagggctccatgtgggcagctatccccatgcagtcggagccccagtatgcagactgtgctgccctcccagtgggtgccctggccacagagcagtgggaagaggacccagcggtgttggcctggagcatagcacctgagcctgtgccccaggaagaggcttccatctggccctttgagggcctggggcagttgcagcctcccgcagtggaaataccatatcatgaaattttgtggcgagaatgggaggatttctccacccagccagatgctcagggcctgaaggcaggagatggccctcagttccagttcactctgatgtcttataacatcctggctcaggacctgatgcagcagagctcagagctctatctacattgccatccagacatcctcaattggaactatcgcttcgtgaacctcatgcaggaattccagcactgggaccctgatatcctgtgtctccaggaagtccaggaagatcattactgggagcagctggaaccctctctgcgaatgatgggctttacctgtttctacaagaggaggactgggtgtaaaaccgatggctgtgctgtctgctacaagcctaccagattccgcctgctctgtgctagccctgtggagtacttccggcctggcttggagctacttaatcgggataatgtgggcttagtgttgctactgcaaccactcgtcccagaaggcctgggacaagtctcggtggccccgctgtgtgtggcaaatacccatatcctttacaacccacgccggggcgatgtcaagctggcccagatggccattctcctggcggaagtggacaaggtggccagactgtcagatggcagccactgccccatcatcttgtgcggggacctaaattctgtccctgattcacctctctacaacttcatcagggatggagagctccagtaccatgggatgccagcctggaaggtatctggacaggaagacttctcccatcagctttaccagaggaagctgcaggccccactgtggcccagctccctgggcatcactgattgctgtcagtatgtcacctcctgtcaccccaagagatcagagagacgcaagtatggccgagacttcctgctacgtttccgcttctgcagcatcgcttgtcagcgaccagtaggactggtccttatggaaggagtgacagatactaagccagagcgacctgcgggttgggctgagtctgtccttgaggaagatgcatcggagcttgagcctgccttctccaggactgtaggtaccatccagcactgcctccacctgacgtcagtatatacccacttcctgccccagcgtggccgcccagaggtcactacaatgccattgggtcttggaatgacagtagattacatcttcttctcagctgagtcctgtgagaatgggaacagaactgatcacaggctgtatcgagatggaactctcaagctcctgggtcgtctctcccttctctctgaagagatactctgggctgccaatggcttacccaaccccttctgctcttcagaccacctctgcctgctagccagcttcgggatggaagtcaccgccccatgacagggctcccaggggaagagagcttctcttccagaagagctcactggatcagagactgtggaaaaatcccatgcatctagaaacttagatccaagaaacttacatcccctcccttccccctcctcgttccctttttcccacggttagactttctccaggcctggctgcgttctctgcctgtggtccttgccccaccccagcctcttcctaatcctgtgccacacactcagtggccctgggagaggcagaaggggggctcccccttccttccatgtatccagcgctcccccttgatttttaattaccagggttatgggagttcttgatttcattggttatttgctttcaggccgtttcttgatgtaccttctgacctgaccttttccctgccttcaggacttctgggcccagccctcttgccaggcatgcatatgtgagatatgcatatcatgtatgtgtcctcttggggtgagacttctgcacagccatgcctgcctctgaccagtccacttttcatgttggggctgtaggcctggggcaggttcagagtctacccaagtacctatgtatgagcaggcagcagcagggcatggccccatctctccttttagcctctgtgtttcattaggcattcatcctgccaaccagggcaggcccggcgtctgggctctgggaacaaatggggcccacatcctggagtggcaaattttgggggatgcgctacctgtcccagcgggccctgtgcctccaacccagagctccccacagacctggtgtaatttcacaagggccatccctttccccaggcttccctgagggaggcggaagtttgaacccttatgtggggttcattgggctagggtagtggtatgaggtttaaaactatttaaggattaggaggagaaagagtcttcaggaaactcttgtttcactggactctgcagcctgcagaactggggcaagggtaggagttccagtaggggaaggagcaggtagactcttcagctgcctcagctgggactgaagacctaagctgattctctttcctctccactcctaagaagcaattttctgttcctctccttccaccactttttactttctgctatctcccatctcccgcttcccttccatttcctttctagaaaaccctggtatttagctcaggccaaactgcctcagcagaaaggtggccttggacaaaactggtccaagaatttgaagtggcagtacttgcggattggctctgtccagcaaggcctcagctgcttgttgcgtctgctttccctcccctaacagaagggtaccctggcttattcaggggactccttagtccacactgtgtcacctgcatgccttaatctttcattgctggggtgtggccttgggagatcctgggccagcccctccacacatctccctaagtcagagtggctgctggccctggtagatttgacttgctcttgcctcactcgacctccaaagtgggactgaagacagtggtcaagagacttgagttcgggacagtaagccaggggttaaggttctttcctttttttgaaagccaaagacccagtttgcattgtgctgctgcattcatggttagaagctttccatgcctaggttctagggaatttatttttctatgtgtatatattttcaaactttgtttcctgggtactgggcatgtgcctgtctgagccccaggtctgtctacaccccaccattcattctgtctgtctgttccctggacactgcctaaaagggtctcaagacagtgccctgtgggttcctaggactagggcccatcactgttctcttctgctgggaaatgcagctttaaaatggctaaccacagcagagggcagatgcttgatagattatcttttccttgctttcttgtttctgttttgaaagtgaaatggggttttaaattgttatttaaactctttttccaaataaaggtttaccttttttccccccaatgttgttcattttattaggatcctgaagggattaggtccttgagagagggcctgaagaatgaggtgggcagaggaagagactaaggagcttttgatcttggggtggggtctcaagacatgaatctagattgagaaatgtgttgtaagatctccctctattagctgaggtaaattcccactgctgtgaggcctgggaggaacagggcttgagtgaagcctcctgccttgacactgctggggtacagctttcttctgtccttcccaagtgagagaatgattctttggactgcttttcattcttcctccatctgctccccccatgcctcctcctagtatcttctgcacttcaggagggtctgtgcaaagtgggataagatgtgtgttttcctgattaaagctatggcagctgcatgagacatgatgcgggtggcacatgcctcttgctgagcatctatttctgatctcttttgcattctggagccagggctgagcagtgggccatctgtcgctggaaaaatgtctcttccttcctaggcctacctctgttggtgcttttgtcttccaacctccctatgtagtaagaccagccaagcccacatgcccactgggagccctgaaaccagatctggttttctgtcttacctgaacaggttcccagaacccacaccaggcctctgaatcagtctctgagaatctgattgatttaaagccacttggttgcttccattgcactacctgggttgcgatcccctcaattgatttagtaaaaagaaaacttagcggccgggtgcggtggctcacacctgtaatcccagcactttgggaggctgaggcgggtggatcacctgaggtcgagagttccagaccagcctgaccaacatgaagaaatcccgtctctactaaaaatacaaaattagccgggcgtgatggcgcatgcctgtaatcccagctacttggaggctgaggcaggagaattgcttgaacctgggaagcggaggttgtggtgagccgagatcatgccattgcactccagcctggacaacaagagtgaaactccatctcaaaaaaaaaaaaaaaaagaaaagaaaagaaagaaaactcagctaggaattagaaacatcatttgtcctcttggcctgttcagctggtgactgtagatttgatgaaaaggaaacttgggactccggaggaccaagatggagcgagacggtcaatactgatggacttgcagctagcaccatggcagccctgcctggtctaaggaagctggcaggaggcgatggtacctggcgggggcagactgcccacctccccactccttcagaggactgtttcctgcccttcacaccatcatcatgttgggccctgcatgtatgttcctgcacttggagcgagcccagggacacagggcagacactgggctcacagatgttgctgcagctgagccagaaaacattccaggcaggaaaagcaggtgcacacattcacacaggcctctggtcactcgaccagccagaatgagacggactccttgacctgggaagtcaagtcccagtgggaagggctggaaatcacacgtggtcaacttcttggctctctctgctccccaaaccctggccctaggcttgctttatcatcacatcccaaggccagagggctgctgctgtccccatcttggccctgctagaagagggataggggtggctggcatgatgggtgaggggaacatgagaatatgcagaggccttggaggaagaggactggcagttatgacaggaaggctctctatacctggctccccagtgttctgcccctggcactgagcatgaggagccaggctttggggagactttgcaatcacccccccaacctggtccattttccacaggtagctttcttgaactcaccttgacccctcctcagccagcagcccccacctccaggggcaaaggagctgaaagacagtcctgaactggggggagctgggatcacatcagccaggccctgtccctcacaggaagtgagatgaggtgataccatggatggtgactaaggccccaaagtccctgcctctctgcctccccagaaacctcacagccaggccagcccccagagcagagcctgtgtaaacatgcccaggaggggaggaggggttgctacatatgagaaacagttaaaaataaatttaaaaagcaccactatgtcctgtgctggtctccacagccccgaagtctcagctcaggaagggtgagtgctgggggattatcagctggggctcggctccctcccttgcagacagcaagcaggtaagggcttcattttgctgttttctccatggagggctctgggaaaggatcctgcaagttggaacctcctaagactccagaaccaggagcggctccctctcatatctactcccctcaaaccctgtcattcccgggaagctcccagaggcagctgaggccacgcccctgctcctgagcggcagcatccagacccggaaaggacctagtttcagcctggcacctcccaagaggaggactcccaggctcagagatgttaaggaacttccttgggggtcacaccagtgagtcagcagccccagccacgattcaagtccaggtcaacctgaccccaaagtctgtgttgagacattatgccacggtccctccagcactactctcattccaccaatgcttactgagcctgactccttgtaagtgaccaaggatacagcgatgagaaatgcacagcccggccctgcagaggctcagagtgcggcgaggacaagacgtgagaaccacggcgtgtgctgtgcctgagggagctgtggggacactgagaaggagcccctcacccagatgggggctgttcctattttattcctgcccacaagccaccaggtgacccctgaaaagctttgaggggaaaagaccct

SEQ ID NO: 373931 - DNA, 7145 bp, Homo sapiens
ggccgagctgagggaggacctgctggctgcagtgaggagcggaggcgggcgcgggcggccggccatgatcgcgtcgtgcttgtgttacctgctgctgccggccacgcgcctcttccgcgccctctcagagatgaagtttcgttatgttgcccaggctggtctctaactcctggcctcaagtgatcctgctgcctctgtctctgcctcccaaagtgctgggagccaccacgcctggcctcttgtccccattttacagtcaagagtaacttcatctgactaggggcattgttcaagatgctttcttcacatgtcgaaaaaatgtccttctggcgaacagctcatccccccaggtagagggcgactttgccatggcccctcggggccctgagcaggaggaatgtgagggcctgctgcagcagtggcgagaagaagggttgagccaggtgctctcaactgcaagtgaggggccccttatagataaaggactagcccagagcagcctggcacttctgatggataatcctggagaagagaatgctgcttcagaggacaggtggtccagcaggcagctgagtgaccttcgggctgcagagaacctggatgagcctttccctgagatgctaggagaggagccactgctggaggtggagggggtggagggctccatgtgggcagctatccccatgcagtcggagccccagtatgcagactgtgctgccctcccagtgggtgccctggccacagagcagtgggaagaggacccagcggtgttggcctggagcatagcacctgagcctgtgccccaggaagaggcttccatctggccctttgagggcctggggcagttgcagcctcccgcagtggaaataccatatcatgaaattttgtggcgagaatgggaggatttctccacccagccagatgctcagggcctgaaggcaggagatggccctcagttccagttcactctgatgtcttataacatcctggctcaggacctgatgcagcagagctcagagctctatctacattgccatccagacatcctcaattggaactatcgcttcgtgaacctcatgcaggaattccagcactgggaccctgatatcctgtgtctccaggaagtccaggaagatcattactgggagcagctggaaccctctctgcgaatgatgggctttacctgtttctacaagaggaggactgggtgtaaaaccgatggctgtgctgtctgctacaagcctaccagattccgcctgctctgtgctagccctgtggagtacttccggcctggcttggagctacttaatcgggataatgtgggcttagtgttgctactgcaaccactcgtcccagaaggcctgggacaagtctcggtggccccgctgtgtgtggcaaatacccatatcctttacaacccacgccggggcgatgtcaagctggcccagatggccattctcctggcggaagtggacaaggtggccagactgtcagatggcagccactgccccatcatcttgtgcggggacctaaattctgtccctgattcacctctctacaacttcatcagggatggagagctccagtaccatgggatgccagcctggaaggtatctggacaggaagacttctcccatcagctttaccagaggaagctgcaggccccactgtggcccagctccctgggcatcactgattgctgtcagtatgtcacctcctgtcaccccaagagatcagagagacgcaagtatggccgagacttcctgctacgtttccgcttctgcagcatcgcttgtcagcgaccagtaggactggtccttatggaaggagtgacagatactaagccagagcgacctgcgggttgggctgagtctgtccttgaggaagatgcatcggagcttgagcctgccttctccaggactgtaggtaccatccagcactgcctccacctgacgtcagtatatacccacttcctgccccagcgtggccgcccagaggtcactacaatgccattgggtcttggaatgacagtagattacatcttcttctcagctgagtcctgtgagaatgggaacagaactgatcacaggctgtatcgagatggaactctcaagctcctgggtcgtctctcccttctctctgaagagatactctgggctgccaatggcttacccaaccccttctgctcttcagaccacctctgcctgctagccagcttcgggatggaagtcaccgccccatgacagggctcccaggggaagagagcttctcttccagaagagctcactggatcagagactgtggaaaaatcccatgcatctagaaacttagatccaagaaacttacatcccctcccttccccctcctcgttccctttttcccacggttagactttctccaggcctggctgcgttctctgcctgtggtccttgccccaccccagcctcttcctaatcctgtgccacacactcagtggccctgggagaggcagaaggggggctcccccttccttccatgtatccagcgctcccccttgatttttaattaccagggttatgggagttcttgatttcattggttatttgctttcaggccgtttcttgatgtaccttctgacctgaccttttccctgccttcaggacttctgggcccagccctcttgccaggcatgcatatgtgagatatgcatatcatgtatgtgtcctcttggggtgagacttctgcacagccatgcctgcctctgaccagtccacttttcatgttggggctgtaggcctggggcaggttcagagtctacccaagtacctatgtatgagcaggcagcagcagggcatggccccatctctccttttagcctctgtgtttcattaggcattcatcctgccaaccagggcaggcccggcgtctgggctctgggaacaaatggggcccacatcctggagtggcaaattttgggggatgcgctacctgtcccagcgggccctgtgcctccaacccagagctccccacagacctggtgtaatttcacaagggccatccctttccccaggcttccctgagggaggcggaagtttgaacccttatgtggggttcattgggctagggtagtggtatgaggtttaaaactatttaaggattaggaggagaaagagtcttcaggaaactcttgtttcactggactctgcagcctgcagaactggggcaagggtaggagttccagtaggggaaggagcaggtagactcttcagctgcctcagctgggactgaagacctaagctgattctctttcctctccactcctaagaagcaattttctgttcctctccttccaccactttttactttctgctatctcccatctcccgcttcccttccatttcctttctagaaaaccctggtatttagctcaggccaaactgcctcagcagaaaggtggccttggacaaaactggtccaagaatttgaagtggcagtacttgcggattggctctgtccagcaaggcctcagctgcttgttgcgtctgctttccctcccctaacagaagggtaccctggcttattcaggggactccttagtccacactgtgtcacctgcatgccttaatctttcattgctggggtgtggccttgggagatcctgggccagcccctccacacatctccctaagtcagagtggctgctggccctggtagatttgacttgctcttgcctcactcgacctccaaagtgggactgaagacagtggtcaagagacttgagttcgggacagtaagccaggggttaaggttctttcctttttttgaaagccaaagacccagtttgcattgtgctgctgcattcatggttagaagctttccatgcctaggttctagggaatttatttttctatgtgtatatattttcaaactttgtttcctgggtactgggcatgtgcctgtctgagccccaggtctgtctacaccccaccattcattctgtctgtctgttccctggacactgcctaaaagggtctcaagacagtgccctgtgggttcctaggactagggcccatcactgttctcttctgctgggaaatgcagctttaaaatggctaaccacagcagagggcagatgcttgatagattatcttttccttgctttcttgtttctgttttgaaagtgaaatggggttttaaattgttatttaaactctttttccaaataaaggtttaccttttttccccccaatgttgttcattttattaggatcctgaagggattaggtccttgagagagggcctgaagaatgaggtgggcagaggaagagactaaggagcttttgatcttggggtggggtctcaagacatgaatctagattgagaaatgtgttgtaagatctccctctattagctgaggtaaattcccactgctgtgaggcctgggaggaacagggcttgagtgaagcctcctgccttgacactgctggggtacagctttcttctgtccttcccaagtgagagaatgattctttggactgcttttcattcttcctccatctgctccccccatgcctcctcctagtatcttctgcacttcaggagggtctgtgcaaagtgggataagatgtgtgttttcctgattaaagctatggcagctgcatgagacatgatgcgggtggcacatgcctcttgctgagcatctatttctgatctcttttgcattctggagccagggctgagcagtgggccatctgtcgctggaaaaatgtctcttccttcctaggcctacctctgttggtgcttttgtcttccaacctccctatgtagtaagaccagccaagcccacatgcccactgggagccctgaaaccagatctggttttctgtcttacctgaacaggttcccagaacccacaccaggcctctgaatcagtctctgagaatctgattgatttaaagccacttggttgcttccattgcactacctgggttgcgatcccctcaattgatttagtaaaaagaaaacttagcggccgggtgcggtggctcacacctgtaatcccagcactttgggaggctgaggcgggtggatcacctgaggtcgagagttccagaccagcctgaccaacatgaagaaatcccgtctctactaaaaatacaaaattagccgggcgtgatggcgcatgcctgtaatcccagctacttggaggctgaggcaggagaattgcttgaacctgggaagcggaggttgtggtgagccgagatcatgccattgcactccagcctggacaacaagagtgaaactccatctcaaaaaaaaaaaaaaaaagaaaagaaaagaaagaaaactcagctaggaattagaaacatcatttgtcctcttggcctgttcagctggtgactgtagatttgatgaaaaggaaacttgggactccggaggaccaagatggagcgagacggtcaatactgatggacttgcagctagcaccatggcagccctgcctggtctaaggaagctggcaggaggcgatggtacctggcgggggcagactgcccacctccccactccttcagaggactgtttcctgcccttcacaccatcatcatgttgggccctgcatgtatgttcctgcacttggagcgagcccagggacacagggcagacactgggctcacagatgttgctgcagctgagccagaaaacattccaggcaggaaaagcaggtgcacacattcacacaggcctctggtcactcgaccagccagaatgagacggactccttgacctgggaagtcaagtcccagtgggaagggctggaaatcacacgtggtcaacttcttggctctctctgctccccaaaccctggccctaggcttgctttatcatcacatcccaaggccagagggctgctgctgtccccatcttggccctgctagaagagggataggggtggctggcatgatgggtgaggggaacatgagaatatgcagaggccttggaggaagaggactggcagttatgacaggaaggctctctatacctggctccccagtgttctgcccctggcactgagcatgaggagccaggctttggggagactttgcaatcacccccccaacctggtccattttccacaggtagctttcttgaactcaccttgacccctcctcagccagcagcccccacctccaggggcaaaggagctgaaagacagtcctgaactggggggagctgggatcacatcagccaggccctgtccctcacaggaagtgagatgaggtgataccatggatggtgactaaggccccaaagtccctgcctctctgcctccccagaaacctcacagccaggccagcccccagagcagagcctgtgtaaacatgcccaggaggggaggaggggttgctacatatgagaaacagttaaaaataaatttaaaaagcaccactatgtcctgtgctggtctccacagccccgaagtctcagctcaggaagggtgagtgctgggggattatcagctggggctcggctccctcccttgcagacagcaagcaggtaagggcttcattttgctgttttctccatggagggctctgggaaaggatcctgcaagttggaacctcctaagactccagaaccaggagcggctccctctcatatctactcccctcaaaccctgtcattcccgggaagctcccagaggcagctgaggccacgcccctgctcctgagcggcagcatccagacccggaaaggacctagtttcagcctggcacctcccaaggtgagccatctcttcttaggcatagtaggaacatggagaccacactacccccactccctgaaagctgggatgggatggtgagtcaagggtcaccatgcccctattagtctggctggagttaggttaggcatcctcccagggctcattgaccccagggggaacttggggaggcaagggactgaccagctggcctcccagggtgcctctggccaggccatgctggatctggctctgggtcaagcgctgctggtttgaagagctgccagcctgtggcgccttccctgacaggcactctcatcagcaaaggcatccctggttctgccttcccttcctctttgcttcaaaggcaccatccgtctccctggcaggccaagagctacact

SEQ ID NO: 373932 - DNA, 6230 bp, Homo sapiens
ggccgagctgagggaggacctgctggctgcagtgaggagcggaggcgggcgcgggcggccggccatgatcgcgtcgtgcttgtgttacctgctgctgccggccacgcgcctcttccgcgccctctcagatgctttcttcacatgtcgaaaaaatgtccttctggcgaacagctcatccccccaggtagagggcgactttgccatggcccctcggggccctgagcaggaggaatgtgagggcctgctgcagcagtggcgagaagaagggttgagccaggtgctctcaactgcaagtgaggggccccttatagataaaggactagcccagagcagcctggcacttctgatggataatcctggagaagagaatgctgcttcagaggacaggtggtccagcaggcagctgagtgaccttcgggctgcagagaacctggatgagcctttccctgagatgctaggagaggagccactgctggaggtggagggggtggagggctccatgtgggcagctatccccatgcagtcggagccccagtatgcagactgtgctgccctcccagtgggtgccctggccacagagcagtgggaagaggacccagcggtgttggcctggagcatagcacctgagcctgtgccccaggaagaggcttccatctggccctttgagggcctggggcagttgcagcctcccgcagtggaaataccatatcatgaaattttgtggcgagaatgggaggatttctccacccagccagatgctcagggcctgaaggcaggagatggccctcagttccagttcactctgatgtcttataacatcctggctcaggacctgatgcagcagagctcagagctctatctacattgccatccagacatcctcaattggaactatcgcttcgtgaacctcatgcaggaattccagcactgggaccctgatatcctgtgtctccaggaagtccaggaagatcattactgggagcagctggaaccctctctgcgaatgatgggctttacctgtttctacaagaggaggactgggtgtaaaaccgatggctgtgctgtctgctacaagcctaccagattccgcctgctctgtgctagccctgtggagtacttccggcctggcttggagctacttaatcgggataatgtgggcttagtgttgctactgcaaccactcgtcccagaaggcctgggacaagtctcggtggccccgctgtgtgtggcaaatacccatatcctttacaacccacgccggggcgatgtcaagctggcccagatggccattctcctggcggaagtggacaaggtggccagactgtcagatggcagccactgccccatcatcttgtgcggggacctaaattctgtccctgattcacctctctacaacttcatcagggatggagagctccagtaccatgggatgccagcctggaaggtatctggacaggaagacttctcccatcagctttaccagaggaagctgcaggccccactgtggcccagctccctgggcatcactgattgctgtcagtatgtcacctcctgtcaccccaagagatcagagagacgcaagtatggccgagacttcctgctacgtttccgcttctgcagcatcgcttgtcagcgaccagtaggactggtccttatggaaggagtgacagatactaagccagagcgacctgcgggttgggctgagtctgtccttgaggaagatgcatcggagcttgagcctgccttctccaggactgtaggtaccatccagcactgcctccacctgacgtcagtatatacccacttcctgccccagcgtggccgcccagaggtcactacaatgccattgggtcttggaatgacagtagattacatcttcttctcagctgagtcctgtgagaatgggaacagaactgatcacaggctgtatcgagatggaactctcaagctcctgggtcgtctctcccttctctctgaagagatactctgggctgccaatggcttacccaaccccttctgctcttcagaccacctctgcctgctagccagcttcgggatggaagtcaccgccccatgacagggctcccaggggaagagagcttctcttccagaagagctcactggatcagagactgtggaaaaatcccatgcatctagaaacttagatccaagaaacttacatcccctcccttccccctcctcgttccctttttcccacggttagactttctccaggcctggctgcgttctctgcctgtggtccttgccccaccccagcctcttcctaatcctgtgccacacactcagtggccctgggagaggcagaaggggggctcccccttccttccatgtatccagcgctcccccttgatttttaattaccagggttatgggagttcttgatttcattggttatttgctttcaggccgtttcttgatgtaccttctgacctgaccttttccctgccttcaggacttctgggcccagccctcttgccaggcatgcatatgtgagatatgcatatcatgtatgtgtcctcttggggtgagacttctgcacagccatgcctgcctctgaccagtccacttttcatgttggggctgtaggcctggggcaggttcagagtctacccaagtacctatgtatgagcaggcagcagcagggcatggccccatctctccttttagcctctgtgtttcattaggcattcatcctgccaaccagggcaggcccggcgtctgggctctgggaacaaatggggcccacatcctggagtggcaaattttgggggatgcgctacctgtcccagcgggccctgtgcctccaacccagagctccccacagacctggtgtaatttcacaagggccatccctttccccaggcttccctgagggaggcggaagtttgaacccttatgtggggttcattgggctagggtagtggtatgaggtttaaaactatttaaggattaggaggagaaagagtcttcaggaaactcttgtttcactggactctgcagcctgcagaactggggcaagggtaggagttccagtaggggaaggagcaggtagactcttcagctgcctcagctgggactgaagacctaagctgattctctttcctctccactcctaagaagcaattttctgttcctctccttccaccactttttactttctgctatctcccatctcccgcttcccttccatttcctttctagaaaaccctggtatttagctcaggccaaactgcctcagcagaaaggtggccttggacaaaactggtccaagaatttgaagtggcagtacttgcggattggctctgtccagcaaggcctcagctgcttgttgcgtctgctttccctcccctaacagaagggtaccctggcttattcaggggactccttagtccacactgtgtcacctgcatgccttaatctttcattgctggggtgtggccttgggagatcctgggccagcccctccacacatctccctaagtcagagtggctgctggccctggtagatttgacttgctcttgcctcactcgacctccaaagtgggactgaagacagtggtcaagagacttgagttcgggacagtaagccaggggttaaggttctttcctttttttgaaagccaaagacccagtttgcattgtgctgctgcattcatggttagaagctttccatgcctaggttctagggaatttatttttctatgtgtatatattttcaaactttgtttcctgggtactgggcatgtgcctgtctgagccccaggtctgtctacaccccaccattcattctgtctgtctgttccctggacactgcctaaaagggtctcaagacagtgccctgtgggttcctaggactagggcccatcactgttctcttctgctgggaaatgcagctttaaaatggctaaccacagcagagggcagatgcttgatagattatcttttccttgctttcttgtttctgttttgaaagtgaaatggggttttaaattgttatttaaactctttttccaaataaaggtttaccttttttccccccaatgttgttcattttattaggatcctgaagggattaggtccttgagagagggcctgaagaatgaggtgggcagaggaagagactaaggagcttttgatcttggggtggggtctcaagacatgaatctagattgagaaatgtgttgtaagatctccctctattagctgaggtaaattcccactgctgtgaggcctgggaggaacagggcttgagtgaagcctcctgccttgacactgctggggtacagctttcttctgtccttcccaagtgagagaatgattctttggactgcttttcattcttcctccatctgctccccccatgcctcctcctagtatcttctgcacttcaggagggtctgtgcaaagtgggataagatgtgtgttttcctgattaaagctatggcagctgcatgagacatgatgcgggtggcacatgcctcttgctgagcatctatttctgatctcttttgcattctggagccagggctgagcagtgggccatctgtcgctggaaaaatgtctcttccttcctaggcctacctctgttggtgcttttgtcttccaacctccctatgtagtaagaccagccaagcccacatgcccactgggagccctgaaaccagatctggttttctgtcttacctgaacaggttcccagaacccacaccaggcctctgaatcagtctctgagaatctgattgatttaaagccacttggttgcttccattgcactacctgggttgcgatcccctcaattgatttagtaaaaagaaaacttagcggccgggtgcggtggctcacacctgtaatcccagcactttgggaggctgaggcgggtggatcacctgaggtcgagagttccagaccagcctgaccaacatgaagaaatcccgtctctactaaaaatacaaaattagccgggcgtgatggcgcatgcctgtaatcccagctacttggaggctgaggcaggagaattgcttgaacctgggaagcggaggttgtggtgagccgagatcatgccattgcactccagcctggacaacaagagtgaaactccatctcaaaaaaaaaaaaaaaaagaaaagaaaagaaagaaaactcagctaggaattagaaacatcatttgtcctcttggcctgttcagctggtgactgtagatttgatgaaaaggaaacttgggactccggaggaccaagatggagcgagacggtcaatactgatggacttgcagctagcaccatggcagccctgcctggtctaaggaagctggcaggaggcgatggtacctggcgggggcagactgcccacctccccactccttcagaggactgtttcctgcccttcacaccatcatcatgttgggccctgcatgtatgttcctgcacttggagcgagcccagggacacagggcagacactgggctcacagatgttgctgcagctgagccagaaaacattccaggcaggaaaagcaggtgcacacattcacacaggcctctggtcactcgaccagccagaatgagacggactccttgacctgggaagtcaagtcccagtgggaagggctggaaatcacacgtggtcaacttcttggctctctctgctccccaaaccctggccctaggcttgctttatcatcacatcccaaggccagagggctgctgctgtccccatcttggccctgctagaagagggataggggtggctggcatgatgggtgaggggaacatgagaatatgcagaggccttggaggaagaggactggcagttatgacaggaaggctctctatacctggctccccagtgttctgcccctggcactgagcatgaggagccaggctttggggagactttgcaatcacccccccaacctggtccattttccacaggtagctttcttgaactcaccttgacccctcctcagccagcagcccccacctccaggggcaaaggagctgaaagacagtcctgaactggggggagctgggatcacatcagccaggccctgtccctcacaggaagtgagatgaggtgataccatggatggtgactaaggccccaaagtccctgctagaagagggataggggtggctggcatgatgggtgaggggaacatgagaatatgcagagccttgaaggaagagactgcagttcagccgcaagactcct

SEQ ID NO: 373933 - DNA, 2428 bp, Homo sapiens
ggccgagctgagggaggacctgctggctgcagtgaggagcggaggcgggcgcgggcggccggccatgatcgcgtcgtgcttgtgttacctgctgctgccggccacgcgcctcttccgcgccctctcagatgctttcttcacatgtcgaaaaaatgtccttctggcgaacagctcatccccccaggtagagggcgactttgccatggcccctcggggccctgagcaggaggaatgtgagggcctgctgcagcagtggcgagaagaagggttgagccaggtgctctcaactgcaagtgaggggccccttatagataaaggactagcccagagcagcctggcacttctgatggataatcctggagaagagaatgctgcttcagaggacaggtggtccagcaggcagctgagtgaccttcgggctgcagagaacctggatgagcctttccctgagatgctaggagaggagccactgctggaggtggagggggtggagggctccatgtgggcagctatccccatgcagtcggagccccagtatgcagactgtgctgccctcccagtgggtgccctggccacagagcagtgggaagaggacccagcggtgttggcctggagcatagcacctgagcctgtgccccaggaagaggcttccatctggccctttgagggcctggggcagttgcagcctcccgcagtggaaataccatatcatgaaattttgtggcgagaatgggaggatttctccacccagccagatgctcagggcctgaaggcaggagatggccctcagttccagttcactctgatgtcttataacatcctggctcaggacctgatgcagcagagctcagagctctatctacattgccatccagacatcctcaattggaactatcgcttcgtgaacctcatgcaggaattccagcactgggaccctgatatcctgtgtctccaggaagtccaggaagatcattactgggagcagctggaaccctctctgcgaatgatgggctttacctgtttctacaagaggaggactgggtgtaaaaccgatggctgtgctgtctgctacaagcctaccagattccgcctgctctgtgctagccctgtggagtacttccggcctggcttggagctacttaatcgggataatgtgggcttagtgttgctactgcaaccactcgtcccagaaggcctgggacaagtctcggtggccccgctgtgtgtggcaaatacccatatcctttacaacccacgccggggcgatgtcaagctggcccagatggccattctcctggcggaagtggacaaggtggccagactgtcagatggcagccactgccccatcatcttgtgcggggacctaaattctgtccctgattcacctctctacaacttcatcagggatggagagctccagtaccatgggatgccagcctggaaggtatctggacaggaagacttctcccatcagctttaccagaggaagctgcaggccccactgtggcccagctccctgggcatcactgattgctgtcagtatgtcacctcctgtcaccccaagagatcagagagacgcaagtatggccgagacttcctgctacgtttccgcttctgcagcatcgcttgtcagcgaccagtaggactggtccttatggaaggagtgacagatactaagccagagcgacctgcgggttgggctgagtctgtccttgaggaagatgcatcggagcttgagcctgccttctccaggactgtaggtaccatccagcactgcctccacctgacgtcagtatatacccacttcctgccccagcgtggccgcccagaggtcactacaatgccattgggtcttggaatgacagtagattacatcttcttctcagctgagtcctgtgagaatgggaacagaactgatcacaggctgtatcgagatggaactctcaagctcctgggtcgtctctcccttctctctgaagagatactctgggctgccaatggcttacccaaccccttctgctcttcagaccacctctgcctgctagccagcttcgggatggaagtcaccgccccatgacagggctcccaggggaagagagcttctcttccagaagagctcactggatcagagactgtggaaaaatcccatgcatctagaaacttagatccaagaaacttacatcccctcccttccccctcctcgttccctttttcccacggttagactttctccaggccctgtccctcacaggaagtgagatgaggtgataccatggatggtgactaaggccccaaagtccctgcctctctgcctccccagaaacctcacagccaggccagcccccagagcagagcctgtgtaaacatgcccaggaggggaggaggggttgctacatatgagaaacagttaaaaataaatttaaaaagc

SEQ ID NO: 373934 - DNA, 678 bp, Homo sapiens
  misc_feature (570)..(572): n is a, c, g, or t
  misc_feature (577)..(577): n is a, c, g, or t
  misc_feature (603)..(603): n is a, c, g, or t
ggaaattaattctgtccaagccagcatggtggcttcatattaagtagtaacagaagtctgaacaatggagaagatactctatggtagaactaaggcctttcctttcttggccaaagtctttaccctatttaaccctttgtatatttctgactgctcactgttcatattataggggaccagatttgtaatatagaattctccataacatgaatgaaattaattctgtccaagccagcatggtggcttcatattaagtagtaacagaagtctgaacaattggataaatttgacttccaagacagctaaacttttcaactgcaattttaaaaactacactacactgttatagttaatctgacaaaaatgtcctcaaagagtactttattttatttaaagcatctgtttaattcaacctttaataattttgcaaagaagggtatgtgtgtattttaatatagcctgacctgaatttatatgtttttagctttagtatttaactttttgtaacaaataaaccttttttaaaacaagtttaaaaaaaaaaaaaaaaaaaaaaaaaaaaaaaaaaannntttangggggggggggggggaaaaaaaaaanttttggggggggggggggggcccccgccccccctagggggggttattttttgggggggggggggggccccctttt

SEQ ID NO: 373935 - DNA, 1824 bp, Homo sapiens
  misc_feature (1320)..(1320): n is a, c, g, or t
  misc_feature (1444)..(1444): n is a, c, g, or t
attgactaaacctaactagaagccagaggccaaaggaatctgtcgatatacaagctagcttcccagtggatggagcaggatggagaagaggaagaacgggcctggagggacaaacaaagggttaaaagaaaaggtccatccacatcgtggcgctggggaacgagggggacacattccaccaggacaaccggccgtcggggcttatccgcacttacctggggagaagccctctggtctccggggacgagagcagcttgttgctgaacgcggccagcacggtcgcgcgtccggtgttcaccgagtatcaggccagtgcgtttgggaatgtcaagctggtggtccacgactgtcccgtctgggacatatttgacagtgattggtacacttctcgaaatctaattgggggcgctgacatcattgtgatcaaatacaacgttaatgacaagttttcattccatgaagtaaaggataattatattccagtgataaaaagagcattaaattcagttccagtaattattgctgctgttggtaccagacaaaatgaagagttaccttgtacatgcccactatgtacctcagacagagggagctgtgttagtacaactgaagggatccaacttgcaaaagaactaggagcgacctatcttgaactccacagccttgatgacttctacataggaaagtattttggaggagtgttggagtattttatgattcaagccttaaatcagaagacaagtgaaaaaatgaagaaaagaaaaatgagcaactcctttcatggaattagaccacctcaacttgaacaaccagaaaaaatgcctgtcttaaaggctgaagcgtcacattataactctgacttaaataacttgctgttctgctgccagtgtgtggacgtggtattttacaaccccaatttaaagaaagttgtagaggcccacaagatcgttctctgcgctgtaagccatgttttcatgctgcttttcaatgtgaagagtcccactgacattcaggattccagtatcatccgaactacccaggatctttttgctataaacagagatactgcatttccaggtgctagccatgaatcttcaggcaacccaccattacgagtcattgttaaagacgccctcttctgttcttgtttatcagacatccttcgcttcatttattcaggtatcttgtcaagtggttctggttacttacaatctcataagctttggaaatgaaatgtgcctgtgacactcaagggtactggttagttttacagtggtctttacctaccatctgagattaagattatacatgaaatattanttgctttatatataagaattggtccaagctttctgttttccttacaaatgtacttgcctcatcttttccctatcaatttcattttattgtggtaaaatacatagaacataaattttaccatctnaaccatttttaagaacacagttcagtggaattaaacacattcataatgttgtgtaactatcaccaccatccgtgtccataattctttgcatcttataaaactgaaactctatacccattaaacgatgattccccattccgacctctttccagcccctgacagccaccattctactttctgtctctgtgattttaactctcctaagtgcctcatgtaagtggaatcatacagtatttgtcattttgtgattgatgtattttacttagcataatgtcttaaaggttcatccaagttgtggcatgtatcaggattttcttccttttaaggttgataatattctgtagtacatatagaccacattttgtttacccattcattca

SEQ ID NO: 373936 - DNA, 473 bp, Homo sapiens
tcagtcaaaagcctgaatttcaggatctttcagatcacacggaattactcagcaaggagcagggcagaaaacaggaggttactggcatattccaggccatgtgtctcctgatctgtgccgagatgtaccaagtgtccagactgcagcacatctgtgagctgttcatcattacccagttggcagccagaaccctgaggatgaggcccaacccccagctgtgaagctggagagactgaatggctcaaaagaaaaggtgtccaggaaccaataattgggggatctcccagtgaggcaaccagatctgtacctgttcatttattctttaatttgttcactcaagaaagagcctactatctgccaagcagtcttgatgctgcagatacagcggtaaatagacaccaatccctgacctcaaggcacttatattctaatagtgaagagacagtaaactaaataaatcataccatatatta

SEQ ID NO: 373937 - DNA, 5876 bp, Homo sapiens
ccctttcctggctctggttacggccttgcgagttgaacaaacttgctgcaggcggattggcggctgggagctctcgggctggggcgttgtatttattaatttatattccgcggcgccccgcgcgggcggctcctttgtgtccagccgccgccaccggagctcccggggcctccgcggggagcgcgtcccccgcatccgcccgacccccggggctggcacgtgctgcgcccggtccgctgagggggcggaggccccgatctccccgaccccccttctctgcttagaggaggaggagcagcggcagcggcagcaggaggcgacagctgccagccgaggaggcgcggcggagaggggactgcggtcagctgcgtccacttggggctgtgcggcggtcccgcgcccggcgatgttcccgggcactccctgagtagcggcagcttatcccccgcccgctagcccgccctggtccccggctcgctcgctggctggcgcggccccggccccgctctgcgtcggccccgccgcggtggaggcgcgcgagggggacgcggccggggatgagcggattgcgggtgaactcgccgcccgggggccccgcgaagccgtgagccgctgcttttctccgagtcgccgccctgcccttggatttgagatcatgtccatccacatcgtggcgctggggaacgagggggacacattccaccaggacaaccggccgtcggggcttatccgcacttacctggggagaagccctctggtctccggggacgagagcagcttgttgctgaacgcggccagcacggtcgcgcgtccggtgttcaccgagtatcaggccagtgcgtttgggaatgtcaagctggtggtccacgactgtcccgtctgggacatatttgacagtgattggtacacttctcgaaatctaattgggggcgctgacatcattgtgatcaaatacaacgttaatgacaagttttcattccatgaagtaaaggataattatattccagtgataaaaagagcattaaattcagttccagtaattattgctgctgttggtaccagacaaaatgaagagttaccttgtacatgcccactatgtacctcagacagagggagctgtgttagtacaactgaagggatccaacttgcaaaagaactaggagcgacctatcttgaactccacagccttgatgacttctacataggaaagtattttggaggagtgttggagtattttatgattcaagccttaaatcagaagacaagtgaaaaaatgaagaaaagaaaaatgagcaactcctttcatggaattagaccacctcaacttgaacaaccagaaaaaatgcctgtcttaaaggctgaagcgtcacattataactctgacttaaataacttgctgttctgctgccagtgtgtggacgtggtattttacaaccccaatttaaagaaagttgtagaggcccacaagatcgttctctgcgctgtaagccatgttttcatgctgcttttcaatgtgaagagtcccactgacattcaggattccagtatcatccgaactacccaggatctttttgctataaacagagatactgcatttccaggtgctagccatgaatcttcaggcaacccaccattacgagtcattgttaaagacgccctcttctgttcttgtttatcagacatccttcgcttcatttattcaggtgcttttcagtgggaagaattggaagaagatatcaggaagaagttgaaagattctggggatgtttcaaatgtaatcgagaaagttaaatgcattttaaaaacaccaggaaagattaattgcctaaggaattgcaaaacctatcaagccagaaaacctttgtggttttataacacttccctcaagtttttccttaataagccgatgcttgccgatgttgtcttcgaaattcaaggtacgacagtgccagcccacagggccatcctggtggcccgttgtgaagtgatggcagccatgtttaatggtaattacatggaagcaaagagtgtcctgattcccgtttatggtgtttccaaagagactttcttgtcatttttagaatacctgtacacagactcctgctgcccagctggcatattccaggccatgtgtctcctgatctgtgccgagatgtaccaagtgtccagactgcagcacatctgtgagctgttcatcattacccagctgcagagcatgccaagcagggaactggcatccatgaaccttgatatagttgacctgcttaaaaaggccaagtttcaccactctgattgcctttcaacctggctacttcatttcattgctactaactacctcatcttcagtcaaaagcctgaatttcaggatctttcagtggaagaacgcagttttgttgaaaagcacagatggccgtcgaatatgtacttgaagcagcttgcggaatacaggaagtatattcactcccggaaatgtcgttgcttagtaatgtaaccctggagcttttatacactacatttcttttttattattatgaagaatgggatacctcccaggttccagtaaaattcttctgaccgaaaccaatgtgggtgttagaaaaattaccatatagcttaatatgtttattagttctctttggaaaaaaactaccactgtggtcttaaaagggaacaaaatataccataggctaaaactaaggctttcactctagaatgcaaagctgttttgcagctgttttcccttaaagatgtcctgttgctttagtgatatttagacccctctcagttaagaaatgcttagattaaaaaaaaaaaattacgtaggattaatacagaaatttaatcatgtctgattaattgctctattaaaataaggggcatttaaagacccagcataaccatttgtataatgagaaatctaggggaaaaccaatcagtccaacatgagattttaggaatagaaatttgccggccatttggaaagtgaaatgccacttagttctcaattgatgacagtgtttgaatcatcataaaaaaaatacctgcttttcatctggacaacccaattgagccactttatctccttttggcaatctgagtaggcggggaacctaggcagggctggctttcttagcgtgtaacttgtgtagcagcacagggcccacacttagaaggaccccacacttggttcaaggctctgctatagcggaaattcttaataatgtttgaagaagggccccatgatttcattttgtgctgagccctcaaaattatgtctgtttcgtggtgggaaatatcctatgttttcttgctcaaacacctttctctctgaaagcagaaaaaggcactgatataaagggaagagaaggaggctcaccggagggaagagaacatagtgaagattcccgcctttggggaggtctggaccacccagggcctccactgccaccttggctggcaagggagaaatgtgttgtgttgtcttagctttaaaacagtcacagttcttgctctatcatagatgaacaaatactttcttgatcattctgtaagaccaggaggttggtaagagtgactaaccagcctaactttaatacacatgtataaagatgttcacagagaaagatgctctgtagagaatttgctaccgaagttggctcaagaatttgtttttagtgttatttaccaagattaggacgtcagtggcttaaattctttgaattcttttcaaggactgcaagattatttgataaagagtagcatgaatcttgtgctctaatattacacagtaagttcaaagaaaggatgtaagtcaaagacttgttacatagagggaaaatggactgggatagaggacagactgatagtttctttctttcatatcacatgtatagagaaataattatatcagaaactcacaaacctagacatggaaaaacagattactgtctattgtcagcatcattttcatctgtaagtcactactggaatatatttttcttttaatttccagtgactttagaatacacacagtttttccgacttttcaaaaatttgattaaatggttttatagtataatattgggaccccataccgttagcccttgtatgtataccaacactgccaaagtaaaacattaggtcaggcatggtggctcaggcctgtaatcccagcattttgggaggctgaggcaagtggataacttgaggtcatgagttcgaaaccagcctggccaaaacagtgaaaccccgtctctactaaaaatacaaaattagccagatgtggtggcgcacacctgtaatcccagctactcaggaagctgaggcaggaaaatcgcttgaacctgggaggtggaagttgcagtgagccgagatcgcaccactgcactccagcctgggtgacaagagcgaaactccatctcaaaaaaaaaaaaaaaaccaaagtgaaacactaaaaattccctatagatatattccaggaaatattttaattgggctgattttaattaggctgtatcattgatgattactggaatcgattttatgtcttttgtattttaatcacttgagttaatcaaccactggcaaatcccatttgacaaagattagcattgtaaaaaacagatactgtggtagatttctagaaattcattcacatttaagacttctaaaatggaataatagccttttgtttttcatgagcatattcgcacccctatatgaattacagcatttaaagttcaaaatcagtaacttttaatctaggaaattgaaaaatattaagttgcaaagcaaaaaaaggtattttcttgaaaatactatttaatgtttaactagactataggtagttccttaaggttgtttgacctgaagtggagttgggtttggaagctggtgcccagttggtgtggagtgtgtagttttgttatgaaagttctctaccacctacctgtgtgagtgacaccaacatccagatgtcacagctctccagagctagtcagaagagaaatcaaattagtgtttaaacccatttgcatattgacttgtcagtacctttaactcaatttaatataacaagaaatcgtaaaatacttataacctatcttagagaaatgagtgctggttttgagagttgttttttaactgaaagattatttctagatgggtagtgctttgtgctggtttctgcttccatatatttcccagtcattttaattagagaagatactctatggtagaactaaggcctttcctttcttggccaaagtctttaccctatttaaccctttgtatatttctgactgctcactgttcatattataggggaccagatttgtaatatagaattctccataacatgaatgaaattaattctgtccaagccagcatggtggcttcatattaagtagtaacagaagtctgaacaattggataaatttgacttccaagacagctaaacttttcaactgcaattttaaaaactacactacactgttatagttaatctgacaaaaatgtcctcaaagagtactttattttatttaaagcatctgtttaattcaacctttaataattttgcaaagaagggtatgtgtgtattttaatatagcctgacctgaatttatatgtttttagctttagtatttaactttttgtaacaaataaaccttttttaaaacaagtttaaaaacaacaaaaaaagggggggggctaaaggatcctgagggcaggttacggtccagttttgcaaggtgccaaggggcgttaaagaggggcgggttaaactggggggaagctctgggttggagactcttgggggatatggacactcgagttagccgataaatctttgggacgattggggatgtgtaaacagg

SEQ ID NO: 373938 - DNA, 5813 bp, Homo sapiens
ccctttcctggctctggttacggccttgcgagttgaacaaacttgctgcaggcggattggcggctgggagctctcgggctggggcgttgtatttattaatttatattccgcggcgccccgcgcgggcggctcctttgtgtccagccgccgccaccggagctcccggggcctccgcggggagcgcgtcccccgcatccgcccgacccccggggctggcacgtgctgcgcccggtccgctgagggggcggaggccccgatctccccgaccccccttctctgcttagaggaggaggagcagcggcagcggcagcaggaggcgacagctgccagccgaggaggcgcggcggagaggggactgcggtcagctgcgtccacttggggctgtgcggcggtcccgcgcccggcgatgttcccgggcactccctgagtagcggcagcttatcccccgcccgctagcccgccctggtccccggctcgctcgctggctggcgcggccccggccccgctctgcgtcggccccgccgcggtggaggcgcgcgagggggacgcggccggggatgagcggattgcgggtgaactcgccgcccgggggccccgcgaagccgtgagccgctgcttttctccgagtcgccgccctgcccttggatttgagatcatgtccatccacatcgtggcgctggggaacgagggggacacattccaccaggacaaccggccgtcggggcttatccgcacttacctggggagaagccctctggtctccggggacgagagcagcttgttgctgaacgcggccagcacggtcgcgcgtccggtgttcaccgagtatcaggccagtgcgtttgggaatgtcaagctggtggtccacgactgtcccgtctgggacatatttgacagtgattggtacacttctcgaaatctaattgggggcgctgacatcattgtgatcaaatacaacgttaatgacaagttttcattccatgaagtaaaggataattatattccagtgataaaaagagcattaaattcagttccagtaattattgctgctgttggtaccagacaaaatgaagagttaccttgtacatgcccactatgtacctcagacagagggagctgtgttagtacaactgaagggatccaacttgcaaaagaactaggagcgacctatcttgaactccacagccttgatgacttctacataggaaagtattttggaggagtgttggagtattttatgattcaagccttaaatcagaagacaagtgaaaaaatgaagaaaagaaaaatgagcaactcctttcatggaattagaccacctcaacttgaacaaccagaaaaaatgcctgtcttaaaggctgaagcgtcacattataactctgacttaaataacttgctgttctgctgccagtgtgtggacgtggtattttacaaccccaatttaaagaaagttgtagaggcccacaagatcgttctctgcgctgtaagccatgttttcatgctgcttttcaatgtgaagagtcccactgacattcaggattccagtatcatccgaactacccaggatctttttgctataaacagagatactgcatttccaggtgctagccatgaatcttcaggcaacccaccattacgagtcattgttaaagacgccctcttctgttcttgtttatcagacatccttcgcttcatttattcaggtgcttttcagtgggaagaattggaagaagatatcaggaagaagttgaaagattctggggatgtttcaaatgtaatcgagaaagttaaatgcattttaaaaacaccaggaaagattaattgcctaaggaattgcaaaacctatcaagccagaaaacctttgtggttttataacacttccctcaagtttttccttaataagccgatgcttgccgatgttgtcttcgaaattcaaggtacgacagtgccagcccacagggccatcctggtggcccgttgtgaagtgatggcagccatgtttaatggtaattacatggaagcaaagagtgtcctgattcccgtttatggtgtttccaaagagactttcttgtcatttttagaatacctgtacacagactcctgctgcccagctggcatattccaggccatgtgtctcctgatctgtgccgagatgtaccaagtgtccagactgcagcacatctgtgagctgttcatcattacccagctgcagagcatgccaagcagggaactggcatccatgaaccttgatatagttgacctgcttaaaaaggccaagtttcaccactctgattgcctttcaacctggctacttcatttcattgctactaactacctcatcttcagtcaaaagcctgaatttcaggatctttcagtggaagaacgcagttttgttgaaaagcacagatggccgtcgaatatgtacttgaagcagcttgcggaatacaggaagtatattcactcccggaaatgtcgttgcttagtaatgtaaccctggagcttttatacactacatttcttttttattattatgaagaatgggatacctcccaggttccagtaaaattcttctgaccgaaaccaatgtgggtgttagaaaaattaccatatagcttaatatgtttattagttctctttggaaaaaaactaccactgtggtcttaaaagggaacaaaatataccataggctaaaactaaggctttcactctagaatgcaaagctgttttgcagctgttttcccttaaagatgtcctgttgctttagtgatatttagacccctctcagttaagaaatgcttagattaaaaaaaaaaaattacgtaggattaatacagaaatttaatcatgtctgattaattgctctattaaaataaggggcatttaaagacccagcataaccatttgtataatgagaaatctaggggaaaaccaatcagtccaacatgagattttaggaatagaaatttgccggccatttggaaagtgaaatgccacttagttctcaattgatgacagtgtttgaatcatcataaaaaaaatacctgcttttcatctggacaacccaattgagccactttatctccttttggcaatctgagtaggcggggaacctaggcagggctggctttcttagcgtgtaacttgtgtagcagcacagggcccacacttagaaggaccccacacttggttcaaggctctgctatagcggaaattcttaataatgtttgaagaagggccccatgatttcattttgtgctgagccctcaaaattatgtctgtttcgtggtgggaaatatcctatgttttcttgctcaaacacctttctctctgaaagcagaaaaaggcactgatataaagggaagagaaggaggctcaccggagggaagagaacatagtgaagattcccgcctttggggaggtctggaccacccagggcctccactgccaccttggctggcaagggagaaatgtgttgtgttgtcttagctttaaaacagtcacagttcttgctctatcatagatgaacaaatactttcttgatcattctgtaagaccaggaggttggtaagagtgactaaccagcctaactttaatacacatgtataaagatgttcacagagaaagatgctctgtagagaatttgctaccgaagttggctcaagaatttgtttttagtgttatttaccaagattaggacgtcagtggcttaaattctttgaattcttttcaaggactgcaagattatttgataaagagtagcatgaatcttgtgctctaatattacacagtaagttcaaagaaaggatgtaagtcaaagacttgttacatagagggaaaatggactgggatagaggacagactgatagtttctttctttcatatcacatgtatagagaaataattatatcagaaactcacaaacctagacatggaaaaacagattactgtctattgtcagcatcattttcatctgtaagtcactactggaatatatttttcttttaatttccagtgactttagaatacacacagtttttccgacttttcaaaaatttgattaaatggttttatagtataatattgggaccccataccgttagcccttgtatgtataccaacactgccaaagtaaaacattaggtcaggcatggtggctcaggcctgtaatcccagcattttgggaggctgaggcaagtggataacttgaggtcatgagttcgaaaccagcctggccaaaacagtgaaaccccgtctctactaaaaatacaaaattagccagatgtggtggcgcacacctgtaatcccagctactcaggaagctgaggcaggaaaatcgcttgaacctgggaggtggaagttgcagtgagccgagatcgcaccactgcactccagcctgggtgacaagagcgaaactccatctcaaaaaaaaaaaaaaaaccaaagtgaaacactaaaaattccctatagatatattccaggaaatattttaattgggctgattttaattaggctgtatcattgatgattactggaatcgattttatgtcttttgtattttaatcacttgagttaatcaaccactggcaaatcccatttgacaaagattagcattgtaaaaaacagatactgtggtagatttctagaaattcattcacatttaagacttctaaaatggaataatagccttttgtttttcatgagcatattcgcacccctatatgaattacagcatttaaagttcaaaatcagtaacttttaatctaggaaattgaaaaatattaagttgcaaagcagttgtttgacctgaagtggagttgggtttggaagctggtgcccagttggtgtggagtgtgtagttttgttatgaaagttctctaccacctacctgtgtgagtgacaccaacatccagatgtcacagctctccagagctagtcagaagagaaatcaaattagtgtttaaacccatttgcatattgacttgtcagtacctttaactcaatttaatataacaagaaatcgtaaaatacttataacctatcttagagaaatgagtgctggttttgagagttgttttttaactgaaagattatttctagatgggtagtgctttgtgctggtttctgcttccatatatttcccagtcattttaattagagaagatactctatggtagaactaaggcctttcctttcttggccaaagtctttaccctatttaaccctttgtatatttctgactgctcactgttcatattataggggaccagatttgtaatatagaattctccataacatgaatgaaattaattctgtccaagccagcatggtggcttcatattaagtagtaacagaagtctgaacaattggataaatttgacttccaagacagctaaacttttcaactgcaattttaaaaactacactacactgttatagttaatctgacaaaaatgtcctcaaagagtactttattttatttaaagcatctgtttaattcaacctttaataattttgcaaagaagggtatgtgtgtattttaatatagcctgacctgaatttatatgtttttagctttagtatttaactttttgtaacaaataaaccttttttaaaacaagtttaaaaacaacaaaaaaagggggggggctaaaggatcctgagggcaggttacggtccagttttgcaaggtgccaaggggcgttaaagaggggcgggttaaactggggggaagctctgggttggagactcttgggggatatggacactcgagttagccgataaatctttgggacgattggggatgtgtaaacagg
